United States Patent Application Publication US 2018/0126003 A1 - sequence listing, part 16

SEQ ID NO: 24826 - DNA, 414 bp, Artificial Sequence
  derived and/or modified sequence
atgggagcaccaacactgcccccagcctggcagcccttcctcaaggaccacagaatttctaccttcaagaactggccatttctcgaaggctgtgcctgtaccccagaacgaatggccgaggctgggtttatccattgccctactgaaaatgagcctgacctcgcccagtgtttcttttgttttaaggaacttgaagggtgggaaccggacgacgatcccatgcagcgcaagccaactatccgtaggaaaaatctcaggaaactgagaaggaagtgcgccgtaccctcttccagctggctgccctggatcgaagctagcggccgatcctgtctggtgcccgaatggctgcaccactttcagggcctcttcccgggggctacctcattgccagttggaccattagcaatgtcctag

SEQ ID NO: 24827 - DNA, 414 bp, Artificial Sequence
  derived and/or modified sequence
atgggcgcccccaccctgcccccagcctggcagcccttcctgaaggaccaccgcatcagcaccttcaagaactggcccttcctggagggctgtgcctgcaccccagagaggatggccgaggccggcttcatccactgccccacagaaaatgaaccagacctggcccagtgcttcttctgcttcaaggagctggagggctgggagccagatgatgaccccatgcagaggaagcccaccatccggaggaagaacctgaggaagctgcggaggaaatgtgctgtgcccagcagctcctggctgccctggattgaggccagcggccgcagctgcctggtgcctgagtggctgcaccacttccagggcctcttccctggggccaccagcctgcctgtgggccccctggccatgtcctag

SEQ ID NO: 24828 - DNA, 414 bp, Artificial Sequence
  derived and/or modified sequence
atgggcgcccccaccctgccccccgcctggcagcccttcctgaaggatcatagaatttcgacatttaaaaattggcctttccttgaggggtgcgcatgtactcccgagagaatggctgaggcgggattcatccattgccccaccgaaaatgagcccgacctcgctcaatgtttcttctgttttaaagaactggaaggttgggaacccgatgatgatcctatgcagagaaagccaactatacgcagaaagaacctgagaaaactaaggcgcaagtgcgccgtgccatcatcaagctggctgccctggatagaagccagcggccgcagctgtctggttcccgaatggctccatcacttccaggggctatttcccggcgcgacaagtctccccgtgggacccctggccatgtcttag

SEQ ID NO: 24829 - DNA, 414 bp, Artificial Sequence
  derived and/or modified sequence
atgggggctccaaccttgcccccagcatggcagcccttcctgaaagaccacaggatttcaactttcaaaaactggccgttcctcgaaggctgtgcatgtacccccgaacggatggctgaagccggattcattcattgtcccactgagaatgaacccgatcttgcacagtgtttcttctgttttaaggagctagaagggtgggaaccagatgatgatcctatgcaacgaaaacccacgatccggagaaaaaacctcaggaagcttagacgtaagtgcgctgttccttctagcagctggctaccctggattgaggcttctgggaggagctgtttggtgccagagtggttgcaccatttccaggggctctttcccggagctacatcactccctgtagggcctctggctatgtcctag

SEQ ID NO: 24830 - DNA, 2512 bp, Artificial Sequence
  derived and/or modified sequence
cccagaaggccgcggggggtggaccgcctaagagggcgtgcgctcccgacatgccccgcggcgcgccattaaccgccagatttgaatcgcgggacccgttggcagaggtggcggcggcggcatgggtgccccgacgttgccccctgcctggcagccctttctcaaggaccaccgcatctctacattcaagaactggcccttcttggagggctgcgcctgcaccccggagcggatggccgaggctggcttcatccactgccccactgagaacgagccagacttggcccagtgtttcttctgcttcaaggagctggaaggctgggagccagatgacgaccccatgcaaaggaaaccaacaataagaagaaagaatttgaggaaactgcggagaaagtgcgccgtgccatcgagcagctggctgccatggattgaggcctctggccggagctgcctggtcccagagtggctgcaccacttccagggtttattccctggtgccaccagccttcctgtgggccccttagcaatgtcttaggaaaggagatcaacattttcaaattagatgtttcaactgtgctcttgttttgtcttgaaagtggcaccagaggtgcttctgcctgtgcagcgggtgctgctggtaacagtggctgcttctctctctctctctcttttttgggggctcatttttgctgttttgattcccgggcttaccaggtgagaagtgagggaggaagaaggcagtgtcccttttgctagagctgacagctttgttcgcgtgggcagagccttccacagtgaatgtgtctggacctcatgttgttgaggctgtcacagtcctgagtgtggacttggcaggtgcctgttgaatctgagctgcaggttccttatctgtcacacctgtgcctcctcagaggacagtttttttgttgttgtgtttttttgtttttttttttttggtagatgcatgacttgtgtgtgatgagagaatggagacagagtccctggctcctctactgtttaacaacatggctttcttattttgtttgaattgttaattcacagaatagcacaaactacaattaaaactaagcacaaagccattctaagtcattggggaaacggggtgaacttcaggtggatgaggagacagaatagagtgataggaagcgtctggcagatactccttttgccactgctgtgtgattagacaggcccagtgagccgcggggcacatgctggccgctcctccctcagaaaaaggcagtggcctaaatcctttttaaatgacttggctcgatgctgtgggggactggctgggctgctgcaggccgtgtgtctgtcagcccaaccttcacatctgtcacgttctccacacgggggagagacgcagtccgcccaggtccccgctttctttggaggcagcagctcccgcagggctgaagtctggcgtaagatgatggatttgattcgccctcctccctgtcatagagctgcagggtggattgttacagcttcgctggaaacctctggaggtcatctcggctgttcctgagaaataaaaagcctgtcatttcaaacactgctgtggaccctactgggtttttaaaatattgtcagtttttcatcgtcgtccctagcctgccaacagccatctgcccagacagccgcagtgaggatgagcgtcctggcagagacgcagttgtctctgggcgcttgccagagccacgaaccccagacctgtttgtatcatccgggctccttccgggcagaaacaactgaaaatgcacttcagacccacttatttctgccacatctgagtcggcctgagatagacttttccctctaaactgggagaatatcacagtggtttttgttagcagaaaatgcactccagcctctgtactcatctaagctgcttatttttgatatttgtgtcagtctgtaaatggatacttcactttaataactgttgcttagtaattggctttgtagagaagctggaaaaaaatggttttgtcttcaactcctttgcatgccaggcggtgatgtggatctcggcttctgtgagcctgtgctgtgggcagggctgagctggagccgcccctctcagcccgcctgccacggcctttccttaaaggccatccttaaaaccagaccctcatggctaccagcacctgaaagcttcctcgacatctgttaataaagccgtaggcccttgtctaagtgcaaccgcctagactttctttcagatacatgtccacatgtccatttttcaggttctctaagttggagtggagtctgggaagggttgtgaatgaggcttctgggctatgggtgaggttccaatggcaggttagagcccctcgggccaactgccatcctggaaagtagagacagcagtgcccgctgcccagaagagaccagcaagccaaactggagcccccattgcaggctgtcgccatgtggaaagagtaactcacaattgccaataaagtctcatgtggttttatct

SEQ ID NO: 24831 - DNA, 414 bp, Artificial Sequence
  derived and/or modified sequence
atgggcgcccccaccctgccccccgcctggcagcccttcctgaaggaccacagaatcagcaccttcaagaactggcccttcctggagggctgcgcctgcacccccgagagaatggccgaggccggcttcatccactgccccaccgagaacgagcccgacctggcccagtgcttcttctgcttcaaggagctggagggctgggagcccgacgacgaccccatgcagagaaagcccaccatcagaagaaagaacctgagaaagctgagaagaaagtgcgccgtgcccagcagcagctggctgccctggatcgaggccagcggcagaagctgcctggtgcccgagtggctgcaccacttccagggcctgttccccggcgccaccagcctgcccgtgggccccctggccatgagctag

SEQ ID NO: 24832 - protein, 165 aa, Artificial Sequence
  derived and/or modified sequence
MGAPTLPPAWQPFLKDHRISTFKNWPFLEGCACTPERMAEAGFIHCPTENEPDLAQCFFCFKELEGWEPDDDPIGPGTVAYACNTSTLGGRGGRITREEHKKHSSGCAFLSVKKQFEELTLGEFLKLDRERAKNKIAKETNNKKKEFEETAEKVRRAIEQLAAMD

SEQ ID NO: 24833 - protein, 143 aa, Artificial Sequence
  derived and/or modified sequence
MGAPTLPPAWQPFLKDHRISTFKNWPFLEGCACTPERMAEAGFIHCPTENEPDLAQCFFCFKELEGWEPDDDPIGPGTVAYACNTSTLGGRGGRITREEHKKHSSGCAFLSVKKQFEELTLGEFLKLDRERAKNKIERALLAE

SEQ ID NO: 24834 - DNA, 498 bp, Artificial Sequence
  derived and/or modified sequence
atgggcgccccaacattgcctcccgcctggcagccttttctcaaggaccacagaatctccaccttcaagaactggccttttctggaagggtgtgcttgtacacctgaaagaatggcggaagccgggttcatccactgtccaaccgagaatgaaccagatctagcgcagtgcttcttttgctttaaggaactagaggggtgggaaccggatgatgatccgatcggacccggcaccgtcgcgtatgcttgcaatacttccactctgggcgggcgggggggccggattacccgcgaagagcataagaagcactcttcagggtgtgcctttctttcagtcaaaaagcagtttgaggaacttacgctgggcgagttcttgaagctggacagggaaagagctaaaaacaagattgccaaagagacaaacaataaaaaaaaagaatttgaagagacagccgagaaagtccggcgggccattgagcagctagctgcaatggactag

SEQ ID NO: 24835 - DNA, 432 bp, Artificial Sequence
  derived and/or modified sequence
atgggggcccctacactacctccagcctggcaaccattcctgaaggatcatagaatctccacattcaagaactggcccttcctggaaggatgtgcctgcacgcccgagaggatggccgaagccggatttatacactgtcccacggaaaatgagcctgatctggctcagtgcttcttttgtttcaaagaactcgagggctgggaaccagatgacgacccaataggtccaggaaccgtggcatatgcttgtaatacctccacgctgggaggtcgtggtgggaggatcaccagagaagaacataagaagcattccagcggctgcgcgttcctctcggtgaaaaagcaatttgaagaactgaccctgggcgaattcctaaagctggaccgggaacgcgccaaaaacaaaatcgagagagccctgctcgccgaatag

SEQ ID NO: 24836 - DNA, 498 bp, Artificial Sequence
  derived and/or modified sequence
atgggcgcccccaccctgcccccagcctggcagcccttcctgaaggaccaccgcatcagcaccttcaagaactggcccttcctggagggctgtgcctgcaccccagagaggatggccgaggccggcttcatccactgccccacagaaaatgaaccagacctggcccagtgcttcttctgcttcaaggagctggagggctgggagccagatgatgaccccatcggccctggcaccgtggcctatgcctgcaacaccagcaccctgggcggccggggcggccgcatcacccgggaggagcacaagaagcacagcagcggctgtgccttcctgtctgtgaagaagcagtttgaggagctgaccctgggggagttcctgaagctggaccgggagcgggccaagaacaagatcgccaaggagaccaacaacaagaagaaggagtttgaggagacagctgagaaggtgagaagagccatcgagcagctggccgccatggactag

SEQ ID NO: 24837 - DNA, 432 bp, Artificial Sequence
  derived and/or modified sequence
atgggcgcccccaccctgcccccagcctggcagcccttcctgaaggaccaccgcatcagcaccttcaagaactggcccttcctggagggctgtgcctgcaccccagagaggatggccgaggccggcttcatccactgccccacagaaaatgaaccagacctggcccagtgcttcttctgcttcaaggagctggagggctgggagccagatgatgaccccatcggccctggcaccgtggcctatgcctgcaacaccagcaccctgggcggccggggcggccgcatcacccgggaggagcacaagaagcacagcagcggctgtgccttcctgtctgtgaagaagcagtttgaggagctgaccctgggggagttcctgaagctggaccgggagcgggccaagaacaagattgaaagagccctgctggccgagtag

SEQ ID NO: 24838 - DNA, 498 bp, Artificial Sequence
  derived and/or modified sequence
atgggcgcccccaccctgccccccgcctggcagcccttcctgaaggatcataggatctctactttcaagaattggcctttcttagagggctgcgcttgcactcccgagcgcatggccgaggctgggttcatccactgccctacagagaatgagcccgatctcgcccagtgttttttttgcttcaaagagctggaaggatgggaacccgatgatgatcctattggtccaggtactgtggcttacgcctgtaatacatctactctaggaggtcgcggaggccggatcacccgggaagagcacaagaagcactcctccgggtgcgcttttctgtcagtcaagaagcagttcgaggagcttacactgggagagttcttaaagctcgaccgagaacgagctaagaacaaaatcgctaaagagacgaataataagaaaaaggagtttgaggagaccgctgagaaagtcaggagggcaatcgagcagctcgccgcaatggattag

SEQ ID NO: 24839 - DNA, 432 bp, Artificial Sequence
  derived and/or modified sequence
atgggcgcccccaccctgccccccgcctggcagcccttcctgaaggaccaccgaatatccacattcaaaaattggccattcctggaagggtgcgcatgcacccctgaaaggatggccgaagcaggattcattcattgccccactgagaacgagcccgacctggcccagtgtttcttttgcttcaaagagctcgagggctgggagccagatgacgatccgatcggccctggtaccgtggcctacgcctgcaacacgtccacactgggtgggagaggtgggcgcataacccgcgaagagcacaagaaacattcgtcagggtgcgccttcttgagcgtcaagaagcaattcgaagagcttacactgggcgagttccttaaacttgatcgggagcgggcgaagaataagatcgagagggcacttctggcagagtag

SEQ ID NO: 24840 - DNA, 498 bp, Artificial Sequence
  derived and/or modified sequence
atgggcgctcccaccctccctcccgcatggcaaccatttttgaaggatcacagaattagtacattcaagaactggccattcttagaaggatgtgcatgtaccccagagaggatggccgaagctggcttcattcactgcccgaccgagaacgagccagacctggcacagtgtttcttttgcttcaaagaactagagggttgggagcccgatgacgaccccattggccctggaacagtcgcatacgcttgcaacaccagtaccctcggcggacggggtggcaggatcacacgagaagaacacaagaagcactcatctggctgtgcattcctctcagtgaagaagcaattcgaggagttaaccctgggcgaattccttaaactagacagagagagggctaagaacaagattgctaaggaaaccaacaataagaaaaaagagttcgaagagacagcagagaaggtgcgcagggcaatcgaacagctggctgccatggactag

SEQ ID NO: 24841 - DNA, 432 bp, Artificial Sequence
  derived and/or modified sequence
atgggcgctccaaccctccccccagcttggcaaccatttttgaaggaccatcgcattagcacattcaagaattggccattccttgaaggatgcgcctgtacacctgaacgcatggctgaagccggttttattcactgtcctacagaaaatgagcccgacttagcacagtgttttttttgcttcaaagagctcgagggctgggagcctgatgatgatcctattgggcctggtacggtggcctatgcgtgtaatacctccactctcgggggtcgtggaggacgtatcactcgggaagagcacaagaaacacagctccggatgcgcattcctcagcgttaagaaacaattcgaggagctgaccctcggagagtttctcaagctggaccgtgaaagggccaagaataagatcgagcgggcactgttggccgagtag

SEQ ID NO: 24842 - DNA, 2699 bp, Artificial Sequence
  derived and/or modified sequence
cccagaaggccgcggggggtggaccgcctaagagggcgtgcgctcccgacatgccccgcggcgcgccattaaccgccagatttgaatcgcgggacccgttggcagaggtggcggcggcggcatgggtgccccgacgttgccccctgcctggcagccctttctcaaggaccaccgcatctctacattcaagaactggcccttcttggagggctgcgcctgcaccccggagcggatggccgaggctggcttcatccactgccccactgagaacgagccagacttggcccagtgtttcttctgcttcaaggagctggaaggctgggagccagatgacgaccccattgggccgggcacggtggcttacgcctgtaataccagcactttgggaggccgaggcgggcggatcacgagagaggaacataaaaagcattcgtccggttgcgctttcctttctgtcaagaagcagtttgaagaattaacccttggtgaatttttgaaactggacagagaaagagccaagaacaaaattgcaaaggaaaccaacaataagaagaaagaatttgaggaaactgcggagaaagtgcgccgtgccatcgagcagctggctgccatggattgaggcctctggccggagctgcctggtcccagagtggctgcaccacttccagggtttattccctggtgccaccagccttcctgtgggccccttagcaatgtcttaggaaaggagatcaacattttcaaattagatgtttcaactgtgctcttgttttgtcttgaaagtggcaccagaggtgcttctgcctgtgcagcgggtgctgctggtaacagtggctgcttctctctctctctctcttttttgggggctcatttttgctgttttgattcccgggcttaccaggtgagaagtgagggaggaagaaggcagtgtcccttttgctagagctgacagctttgttcgcgtgggcagagccttccacagtgaatgtgtctggacctcatgttgttgaggctgtcacagtcctgagtgtggacttggcaggtgcctgttgaatctgagctgcaggttccttatctgtcacacctgtgcctcctcagaggacagtttttttgttgttgtgtttttttgtttttttttttttggtagatgcatgacttgtgtgtgatgagagaatggagacagagtccctggctcctctactgtttaacaacatggctttcttattttgtttgaattgttaattcacagaatagcacaaactacaattaaaactaagcacaaagccattctaagtcattggggaaacggggtgaacttcaggtggatgaggagacagaatagagtgataggaagcgtctggcagatactccttttgccactgctgtgtgattagacaggcccagtgagccgcggggcacatgctggccgctcctccctcagaaaaaggcagtggcctaaatcctttttaaatgacttggctcgatgctgtgggggactggctgggctgctgcaggccgtgtgtctgtcagcccaaccttcacatctgtcacgttctccacacgggggagagacgcagtccgcccaggtccccgctttctttggaggcagcagctcccgcagggctgaagtctggcgtaagatgatggatttgattcgccctcctccctgtcatagagctgcagggtggattgttacagcttcgctggaaacctctggaggtcatctcggctgttcctgagaaataaaaagcctgtcatttcaaacactgctgtggaccctactgggtttttaaaatattgtcagtttttcatcgtcgtccctagcctgccaacagccatctgcccagacagccgcagtgaggatgagcgtcctggcagagacgcagttgtctctgggcgcttgccagagccacgaaccccagacctgtttgtatcatccgggctccttccgggcagaaacaactgaaaatgcacttcagacccacttatttctgccacatctgagtcggcctgagatagacttttccctctaaactgggagaatatcacagtggtttttgttagcagaaaatgcactccagcctctgtactcatctaagctgcttatttttgatatttgtgtcagtctgtaaatggatacttcactttaataactgttgcttagtaattggctttgtagagaagctggaaaaaaatggttttgtcttcaactcctttgcatgccaggcggtgatgtggatctcggcttctgtgagcctgtgctgtgggcagggctgagctggagccgcccctctcagcccgcctgccacggcctttccttaaaggccatccttaaaaccagaccctcatggctaccagcacctgaaagcttcctcgacatctgttaataaagccgtaggcccttgtctaagtgcaaccgcctagactttctttcagatacatgtccacatgtccatttttcaggttctctaagttggagtggagtctgggaagggttgtgaatgaggcttctgggctatgggtgaggttccaatggcaggttagagcccctcgggccaactgccatcctggaaagtagagacagcagtgcccgctgcccagaagagaccagcaagccaaactggagcccccattgcaggctgtcgccatgtggaaagagtaactcacaattgccaataaagtctcatgtggttttatct

SEQ ID NO: 24843 - DNA, 476 bp, Artificial Sequence
  derived and/or modified sequence
agatttgaatcgcgggacccgttggcagaggtggcggcggcggcatgggtgccccgacgttgccccctgcctggcagccctttctcaaggaccaccgcatctctacattcaagaactggcccttcttggagggctgcgcctgcaccccggagcggatggccgaggctggcttcatccactgccccactgagaacgagccagacttggcccagtgtttcttctgcttcaaggagctggaaggctgggagccagatgacgaccccattgggccgggcacggtggcttacgcctgtaataccagcactttgggaggccgaggcgggcggatcacgagagaggaacataaaaagcattcgtccggttgcgctttcctttctgtcaagaagcagtttgaagaattaacccttggtgaatttttgaaactggacagagaaagagccaagaacaaaattgagagagctctgttagcagaatga

SEQ ID NO: 24844 - DNA, 498 bp, Artificial Sequence
  derived and/or modified sequence
atgggcgcccccaccctgccccccgcctggcagcccttcctgaaggaccacagaatcagcaccttcaagaactggcccttcctggagggctgcgcctgcacccccgagagaatggccgaggccggcttcatccactgccccaccgagaacgagcccgacctggcccagtgcttcttctgcttcaaggagctggagggctgggagcccgacgacgaccccatcggccccggcaccgtggcctacgcctgcaacaccagcaccctgggcggcagaggcggcagaatcaccagagaggagcacaagaagcacagcagcggctgcgccttcctgagcgtgaagaagcagttcgaggagctgaccctgggcgagttcctgaagctggacagagagagagccaagaacaagatcgccaaggagaccaacaacaagaagaaggagttcgaggagaccgccgagaaggtgagaagagccatcgagcagctggccgccatggactag

SEQ ID NO: 24845 - DNA, 432 bp, Artificial Sequence
  derived and/or modified sequence
atgggcgcccccaccctgccccccgcctggcagcccttcctgaaggaccacagaatcagcaccttcaagaactggcccttcctggagggctgcgcctgcacccccgagagaatggccgaggccggcttcatccactgccccaccgagaacgagcccgacctggcccagtgcttcttctgcttcaaggagctggagggctgggagcccgacgacgaccccatcggccccggcaccgtggcctacgcctgcaacaccagcaccctgggcggcagaggcggcagaatcaccagagaggagcacaagaagcacagcagcggctgcgccttcctgagcgtgaagaagcagttcgaggagctgaccctgggcgagttcctgaagctggacagagagagagccaagaacaagatcgagagagccctgctggccgagtag

SEQ ID NO: 24846 - protein, 475 aa, Artificial Sequence
  derived and/or modified sequence
MTRGTGGTAQRGRSGPDSQGLLDSSLMASGTASRSEDEESLAGQKRASSQALGTIPKRRSSSRFIKRKKFDDELVESSLAKSSTRAKGASGVEPGRCSGSEPSSSEKKKVSKAPSTPVPPSPAPAPGLTKRVKKSKQPLQVTKDLGRWKPADDLLLINAVLQTNDLTSVHLGVKFSCRFTLREVQERWYALLYDPVISKLACQAMRQLHPEAIAAIQSKALFSKAEEQLLSKVGSTSQPTLETFQDLLHRHPDAFYLARTAKALQAHWQLMKQYYLLEDQTVQPLPKGDQVLNFSDAEDLIDDSKLKDMRDEVLEHELMVADRRQKREIRQLEQELHKWQVLVDSITGMSSPDFDNQTLAVLRGRMVRYLMRSREITLGRATKDNQIDVDLSLEGPAWKISRKQGVIKLKNNGDFFIANEGRRPIYIDGRPVLCGSKWRLSNNSVVEIASLRFVFLINQDLIALIRAEAAKITPQ

SEQ ID NO: 24847 - protein, 271 aa, Artificial Sequence
  derived and/or modified sequence
MRQLHPEAIAAIQSKALFSKAEEQLLSKVGSTSQPTLETFQDLLHRHPDAFYLARTAKALQAHWQLMKQYYLLEDQTVQPLPKGDQVLNFSDAEDLIDDSKLKDMRDEVLEHELMVADRRQKREIRQLEQELHKWQVLVDSITGMSSPDFDNQTLAVLRGRMVRYLMRSREITLGRATKDNQIDVDLSLEGPAWKISRKQGVIKLKNNGDFFIANEGRRPIYIDGRPVLCGSKWRLSNNSVVEIASLRFVFLINQDLIALIRAEAAKITPQ

SEQ ID NO: 24848 - DNA, 1428 bp, Artificial Sequence
  derived and/or modified sequence
atgaccagaggcaccggcggcaccgcccagagaggcagaagcggccccgacagccagggcctgctggacagcagcctgatggccagcggcaccgccagcagaagcgaggacgaggagagcctggccggccagaagagagccagcagccaggccctgggcaccatccccaagagaagaagcagcagcagattcatcaagagaaagaagttcgacgacgagctggtggagagcagcctggccaagagcagcaccagagccaagggcgccagcggcgtggagcccggcagatgcagcggcagcgagcccagcagcagcgagaagaagaaggtgagcaaggcccccagcacccccgtgccccccagccccgcccccgcccccggcctgaccaagagagtgaagaagagcaagcagcccctgcaggtgaccaaggacctgggcagatggaagcccgccgacgacctgctgctgatcaacgccgtgctgcagaccaacgacctgaccagcgtgcacctgggcgtgaagttcagctgcagattcaccctgagagaggtgcaggagagatggtacgccctgctgtacgaccccgtgatcagcaagctggcctgccaggccatgagacagctgcaccccgaggccatcgccgccatccagagcaaggccctgttcagcaaggccgaggagcagctgctgagcaaggtgggcagcaccagccagcccaccctggagaccttccaggacctgctgcacagacaccccgacgccttctacctggccagaaccgccaaggccctgcaggcccactggcagctgatgaagcagtactacctgctggaggaccagaccgtgcagcccctgcccaagggcgaccaggtgctgaacttcagcgacgccgaggacctgatcgacgacagcaagctgaaggacatgagagacgaggtgctggagcacgagctgatggtggccgacagaagacagaagagagagatcagacagctggagcaggagctgcacaagtggcaggtgctggtggacagcatcaccggcatgagcagccccgacttcgacaaccagaccctggccgtgctgagaggcagaatggtgagatacctgatgagaagcagagagatcaccctgggcagagccaccaaggacaaccagatcgacgtggacctgagcctggagggccccgcctggaagatcagcagaaagcagggcgtgatcaagctgaagaacaacggcgacttcttcatcgccaacgagggcagaagacccatctacatcgacggcagacccgtgctgtgcggcagcaagtggagactgagcaacaacagcgtggtggagatcgccagcctgagattcgtgttcctgatcaaccaggacctgatcgccctgatcagagccgaggccgccaagatcaccccccagtag

SEQ ID NO: 24849 - DNA, 1428 bp, Artificial Sequence
  derived and/or modified sequence
atgacacgtggcaccgggggaactgcccagcgtggaaggtctgggccagattctcaggggctgctagattcatccctgatggcatcaggcactgccagccgctcagaggatgaggagtcactggcagggcagaagcgagcctcctcccaggccttgggcaccatccctaaacggagaagctcctccaggttcatcaagaggaagaagttcgatgatgagctggtggagagcagcctggcaaaatcttctacccgggcaaagggggccagtggggtggaaccagggcgctgttcggggagtgaaccctcctccagtgagaagaagaaggtatccaaagcccccagcactcctgtgccacccagcccagccccagcccctggactcaccaagcgtgtgaagaagagtaaacagccacttcaggtgaccaaggatctgggccgctggaagcctgcagatgacctcctgctcataaatgctgtgttgcagaccaacgacctgacctccgtccacctgggcgtgaaattcagctgccgcttcacccttcgggaggtccaggagcgttggtacgccctgctctacgatcctgtcatctccaagttggcctgtcaggccatgaggcagctgcacccagaggctattgcagccatccagagcaaggccctgtttagcaaggctgaggagcagctgctgagcaaagtgggatcgaccagccagcccaccttggagaccttccaggacctgctgcacagacaccctgatgccttctacctggcccgtaccgcgaaggccctgcaggcccactggcagctcatgaagcagtattacctgctggaggaccagacagtgcagccgctgcccaaaggggaccaagtgctgaacttctctgatgcagaggacctgattgatgacagtaagctcaaggacatgcgagatgaggtcctggaacatgagctgatggtggctgaccggcgccagaagcgagagattcggcagctggaacaggaactgcataagtggcaggtgctagtggacagcatcacaggcatgagctctccggacttcgacaaccagacactggcagtgctgcggggccgcatggtgcggtacctgatgcgctcgcgtgagatcaccctgggcagagcaaccaaggataaccagattgatgtggacctgtctctggagggtccggcctggaagatatcccggaaacaaggtgtcatcaagctgaagaacaacggtgatttcttcattgccaatgagggtcgacggcccatctacatcgatggacggccggtgctctgtggctccaaatggcgcctcagcaacaactctgtggtggagatcgccagcctgcgattcgtcttccttatcaaccaggacctcattgccctcatcagggctgaggctgccaagatcacaccacagtga

SEQ ID NO: 24850 - DNA, 1428 bp, Artificial Sequence
  derived and/or modified sequence
atgacaaggggcaccggaggcaccgcccagcgagggcgctccggcccggacagccaggggctgttagatagctctctaatggcttcaggtacagccagcagatccgaggatgaggaaagcttggccggtcaaaaaagggctagctcccaggcgctcggcacaattccgaagaggcggagcagttcacggttcataaagcggaaaaaatttgacgacgagctggttgaatcctccctggccaagtctagcacacgggccaaaggcgcgtcaggtgtcgagccagggaggtgcagtggcagtgagccgtcaagtagcgaaaagaaaaaagtctccaaggctccgtccacaccagtgcctccatctccagcgcctgcacctggtctgacgaaaagagtgaagaagtcaaagcagcccttacaagtaaccaaggaccttggaagatggaagcccgctgacgacctgctgcttatcaacgctgtccttcaaacaaatgaccttacaagcgtccatttaggcgtgaagttctcctgccggtttaccttgcgggaagtgcaggaaagatggtatgctctgctctatgatcctgtcattagcaaactcgcctgtcaggccatgcgccagcttcaccccgaggcaatcgcggccatccagtccaaggccctcttcagcaaggccgaggagcagctgctgtccaaggtcgggtccacttcccagcctacccttgagacatttcaggacctgctgcaccggcatccggacgccttctacctggcccgtacggctaaggcactacaggcccactggcagctcatgaaacagtattatctgcttgaggaccaaacagtgcagccacttcccaaaggggatcaggtcctcaattttagtgacgccgaagatctgattgatgactctaagctgaaagatatgcgcgatgaggtgctggaacatgaacttatggtggctgataggcggcaaaagcgagagatccggcagttggaacaggagttgcacaagtggcaggtgttggtcgacagcatcaccgggatgtcctctcctgattttgataatcaaaccctggctgtgcttcgggggcggatggttaggtatctgatgagaagtagagagataactctcgggagggccaccaaggataaccagattgacgtagaccttagtttggaaggccccgcctggaaaatcagtagaaaacaaggagtgataaaactgaaaaacaatggcgatttctttatcgctaatgaaggccggagacctatttacatagacgggcgaccagtactttgcgggtcgaaatggcgtctttcgaacaatagtgtggtggagatagccagtcttagattcgtttttctcattaaccaggatttgatcgccctgattcgcgctgaggcggctaagatcaccccacaatag

SEQ ID NO: 24851 - DNA, 1428 bp, Artificial Sequence
  derived and/or modified sequence
atgacccggggcactggaggaacagcccagaggggccgcagcggccctgacagccagggcctgctggacagcagcctgatggccagcggcacagccagccgctcagaagatgaggagagcctggccggccagaagagggccagcagccaggccctgggcaccatccccaagaggaggagcagcagccgcttcatcaagaggaagaagtttgatgatgagctggtggagagcagcctggccaagagcagcacccgggccaagggggccagcggcgtggagcccggccgctgcagcggcagcgagcccagcagcagcgagaagaagaaggtgtccaaggcccccagcacccctgtgccccccagccctgccccagcccctggcctgaccaagagggtgaagaagagcaagcagcccctgcaggtgaccaaggacctgggccgctggaagccagcagatgacctgctgctgatcaatgctgtgctgcagaccaatgacctgacctctgtgcacctgggcgtgaagttcagctgccgcttcaccctgcgggaggtgcaggagcgctggtacgccctgctgtatgaccctgtgatcagcaagctggcctgccaggccatgaggcagctgcaccctgaggccatcgccgccatccagagcaaggccctcttcagcaaggccgaggagcagctgctgagcaaggtgggcagcaccagccagcccaccctggagaccttccaggacctgctgcaccgccacccagatgccttctacctggccaggacagccaaggccctgcaggcccactggcagctgatgaagcagtactacctgctggaggaccagacagtgcagcccctgcccaagggggaccaggtgctgaacttcagtgatgctgaggacctgattgatgacagcaagctgaaggacatgagagatgaggtgctggagcacgagctgatggtggccgaccggcggcagaagcgggagatccggcagctggagcaggagctgcacaagtggcaggtgctggtggacagcatcaccggcatgagcagcccagactttgacaaccagaccctggccgtgctgcggggccgcatggtgcgctacctgatgaggagccgggagatcaccctgggccgggccaccaaggacaaccagattgatgtggacctgagcctggagggccctgcctggaagatcagcaggaagcagggcgtcatcaagctgaagaacaacggggacttcttcatcgccaatgaaggccggcggcccatctacattgatggccggcctgtgctgtgtggcagcaagtggaggctgagcaacaacagcgtggtggagatcgccagcctgcgctttgtgttcctgatcaaccaggacctgattgccctgatccgggcagaggccgccaagatcaccccccagtag

SEQ ID NO: 24852 - DNA, 1428 bp, Artificial Sequence
  derived and/or modified sequence
atgacccggggcaccggcggcaccgcccagcggggccggagcggccccgactcccagggactgctggattcttccctcatggcctccgggacggcatcccggtccgaggacgaagagtctttggctggacagaaacgcgcatcatcccaggcactaggcactatccctaagaggagatcctcaagccgatttattaagcgaaagaagtttgacgatgaactggtggagagctctctggcaaagagtagcacaagagctaagggagccagtggggtggagccggggagatgcagcggaagcgagccaagctcgagcgagaagaagaaggtctccaaagccccttccacccctgtcccccccagtcccgcaccggcgccaggattaaccaaaagggttaagaagtcgaaacagcccctgcaggtcaccaaggacctaggaagatggaagcccgccgatgacctactgctcattaatgcagtcctgcagacgaacgacctcaccagcgtgcacttgggggtcaagttctcttgtcggtttacgctgcgtgaggtgcaggagaggtggtacgcactgctgtatgatcccgtgatcagcaaacttgcttgccaggccatgcgtcagctccaccccgaggccattgctgctattcagtccaaggcccttttttccaaggccgaagaacaactgctgagtaaagtcggctcaacgagtcagccaacactggagacattccaggacctgttgcatcgccaccctgatgcattctatctggcccgcacagcgaaggctctccaggctcactggcaactgatgaaacagtactacctgctggaggaccaaactgtccagcctttacctaaaggagaccaggtactcaactttagcgacgcggaggatctgatcgacgatagcaagctgaaggatatgagggatgaagttttggagcatgaactcatggttgctgatcggcgtcagaagcgcgaaattcgccaactggagcaagagctgcataagtggcaggtactcgttgattctatcacaggcatgagcagccccgactttgacaaccagactttggccgtactccgtgggaggatggtaaggtatctgatgcgaagtagggagataacattaggccgagccactaaggacaatcagattgatgtggatctttctctagaggggcccgcgtggaaaatctctaggaaacagggggtgataaagctgaagaataacggcgattttttcatcgccaacgaaggccgaagacccatttacatcgatggtcgacctgttttgtgcggttctaagtggcggctgagcaataacagcgtggtcgaaattgctagtctcagatttgtgttccttattaaccaagatttaatcgccttgataagggccgaggccgcaaagatcaccccccagtag

SEQ ID NO: 24853 - DNA, 1428 bp, Artificial Sequence
  derived and/or modified sequence
atgacacgcggtactggcggtaccgctcagcggggaagatcaggaccagactcccaggggttgctggattcttcactgatggcgtccgggacagcctctcggagtgaggacgaggagtctctggctgggcagaaacgggcttccagccaagcactgggcaccataccaaaacggaggtccagtagccgatttatcaaacggaagaagttcgacgatgaactagttgaaagctccctcgctaagagctctactcgcgcaaaaggcgcttctggggtagagccgggacgctgtagtgggtccgagccctcttcctccgaaaagaaaaaggttagtaaagcaccaagcacaccggtaccaccctctcctgccccagcaccaggcctgaccaaaagagtgaaaaaaagcaagcaacctttacaggtgaccaaggacttagggcgatggaagccggctgatgacctcctcctcataaacgcagtgctgcagactaatgatctcacaagtgtgcatctcggcgtgaagttctcgtgcaggttcacattgcgcgaagtgcaggagagatggtatgcccttttatatgaccctgttatatcgaagctcgcctgtcaagccatgagacagctccatcctgaagctatcgcggctatacaatctaaggcacttttctcaaaggccgaagagcagctgctcagcaaagtaggaagcacaagccagcccacacttgagacttttcaagatttgcttcaccgtcatcctgatgcgttctacctcgccagaaccgccaaagctctgcaggcccactggcagcttatgaagcagtactatttgttggaagatcaaactgtgcaaccactgcccaagggggaccaggttcttaatttctccgacgccgaggatctaattgacgatagcaaactaaaagatatgcgcgacgaggtgctggaacacgagcttatggtggcagatcggagacagaaacgcgagattagacagctggagcaagagcttcacaagtggcaggtcttggtggactccatcactgggatgtcttctcccgacttcgataatcagacactcgctgtattgagaggacgcatggtgcgatacctgatgaggagtcgcgaaattacactgggacgggcaaccaaagataaccaaatcgatgtagacctcagtctcgaaggcccagcatggaaaattagcagaaaacagggggtcatcaagcttaaaaataatggagacttctttatcgcgaacgaaggtcgcaggcccatctacatcgacggcaggccggtgctgtgtggatcaaagtggcggctgtcaaacaactctgtggtggagatcgctagcctccggtttgtgtttctgatcaaccaggacctgatagccctgatccgcgcagaggccgctaagatcactcctcaatag

SEQ ID NO: 24854 - protein, 569 aa, Artificial Sequence
  derived and/or modified sequence
MHTLTGFSLVSLLSFGYLSWDWAKPSFVADGPGEAGEQPSAAPPQPPHIIFILTDDQGYHDVGYHGSDIETPTLDRLAAKGVKLENYYIQPICTPSRSQLLTGRYQIHTGLQHSIIRPQQPNCLPLDQVTLPQKLQEAGYSTHMVGKWHLGFYRKECLPTRRGFDTFLGSLTGNVDYYTYDNCDGPGVCGFDLHEGENVAWGLSGQYSTMLYAQRASHILASHSPQRPLFLYVAFQAVHTPLQSPREYLYRYRTMGNVARRKYAAMVTCMDEAVRNITWALKRYGFYNNSVIIFSSDNGGQTFSGGSNWPLRGRKGTYWEGGVRGLGFVHSPLLKRKQRTSRALMHITDWYPTLVGLAGGTTSAADGLDGYDVWPAISEGRASPRTEILHNIDPLYNHAQHGSLEGGFGIWNTAVQAAIRVGEWKLLTGDPGYGDWIPPQTLATFPGSWWNLERMASVRQAVWLFNISADPYEREDLAGQRPDVVRTLLARLAEYNRTAIPVRYPAENPRAHPDFNGGAWGPWASDEEEEEEEGRARSFSRGRRKKKCKICKLRSFFRKLNTRLMSQRI

SEQ ID NO: 24855 - protein, 86 aa, Artificial Sequence
  derived and/or modified sequence
MVGKWHLGFYRKECLPTRRGFDTFLGSLTGNVDYYTYDNCDGPGVCGFDLHEGENVAWGLSGQYSTMLYAQRASHILASHSPQRPL

SEQ ID NO: 24856 - protein, 426 aa, Artificial Sequence
  derived and/or modified sequence
MVGKWHLGFYRKECLPTRRGFDTFLGSLTGNVDYYTYDNCDGPGVCGFDLHEGENVAWGLSGQYSTMLYAQRASHILASHSPQRPLFLYVAFQAVHTPLQSPREYLYRYRTMGNVARRKYAAMVTCMDEAVRNITWALKRYGFYNNSVIIFSSDNGGQTFSGGSNWPLRGRKGTYWEGGVRGLGFVHSPLLKRKQRTSRALMHITDWYPTLVGLAGGTTSAADGLDGYDVWPAISEGRASPRTEILHNIDPLYNHAQHGSLEGGFGIWNTAVQAAIRVGEWKLLTGDPGYGDWIPPQTLATFPGSWWNLERMASVRQAVWLFNISADPYEREDLAGQRPDVVRTLLARLAEYNRTAIPVRYPAENPRAHPDFNGGAWGPWASDEEEEEEEGRARSFSRGRRKKKCKICKLRSFFRKLNTRLMSQRI

SEQ ID NO: 24857 - DNA, 1710 bp, Artificial Sequence
  derived and/or modified sequence
atgcatacattgactggcttctcgcttgttagcttgctcagttttggttacctgagctgggactgggccaagccatctttcgtggccgatggacccggcgaggccggagaacagcctagcgcagctcccccccagcctccacatattatcttcatcctgacggatgatcagggataccatgacgttggataccatggaagtgatatagagacccctaccttggaccggcttgcagctaaaggggtcaagctcgaaaattattatatccagcctatttgtacgcctagtcggtcgcaactcctcactggtaggtaccagattcacacaggtctccagcactcgattataaggccacaacaacccaactgcttgcccctggaccaagtcaccctaccccagaagctgcaggaggctggctactccactcatatggtgggaaaatggcacctgggattttacagaaaggaatgtctgcctaccagaaggggttttgacacattcctggggtcactgaccgggaacgtggattattacacctatgataactgtgatgggcctggggtgtgtggttttgatttgcatgaaggcgaaaatgtagcctggggcctatccggacaatactctacaatgctgtacgcccagagggctagccatattctcgcctcacattccccccagcggccactgttcctgtacgtggccttccaagcagtacacaccccactgcaatcgccccgggagtatctctatagatatcgcactatgggcaacgtcgcacggagaaaatatgcagcaatggttacctgcatggacgaggccgtccgtaacattacctgggccctgaagcgatacggcttctacaataactctgtgataatttttagctccgataatggagggcagacattctccggagggtctaactggccactccgcggtcgtaaagggacttactgggaaggcggagtgcgcggcttaggctttgtgcactctcctttgctcaaacggaaacagagaacaagtcgggcactcatgcatattacagattggtaccctaccctcgtgggactggcgggcggaaccacatccgctgcagacggcttggatggatatgatgtatggcctgccatttcggaaggcagagcgtcacctagaaccgagattctgcataacattgatcctctttataaccacgcccagcatgggtcactggaaggagggttcggaatttggaataccgcagtgcaggccgcaattcgggtgggggaatggaaactccttaccggagatcctggatacggagattggataccaccccagacattagccacctttccaggttcctggtggaatctcgagcgcatggcttccgtgcgccaggccgtctggctgttcaatatttctgccgatccgtacgaacgcgaggacttagctggacagcggccggatgtcgttagaactctattagctaggctggcagaatacaaccgcaccgccatcccggtgagatatccagctgaaaatcctcgtgctcaccccgacttcaatggaggagcctgggggccttgggcatctgatgaagaggaagaagaggaggaaggccgggcccgctctttcagccgaggccggaggaaaaagaaatgtaaaatttgcaaattgaggtcattctttcgaaaactgaatacacgcttaatgtctcagcgcatctag

SEQ ID NO: 24858 - DNA, 261 bp, Artificial Sequence
  derived and/or modified sequence
atggtaggaaagtggcacctcggcttctatcggaaagagtgccttccaacccgtcgaggtttcgacacattcctcgggagcttgaccggtaatgtagattactacacttacgataactgcgacggacccggagtgtgtggcttcgatctacatgaaggcgaaaacgttgcgtggggattgtctggccaatattctacaatgctttacgctcagcgggcctcccatatcctggctagtcattcgccccagcgtcccctgtag

SEQ ID NO: 24859 - DNA, 1281 bp, Artificial Sequence
  derived and/or modified sequence
atggtcggaaaatggcacttaggattttacagaaaagaatgtctcccaactcgcaggggatttgataccttcctcgggagtctgactggaaacgtggattactatacttatgataattgcgacggcccaggagtttgtggtttcgatctccatgagggtgagaatgtcgcttggggcctgtcgggccagtattccactatgttgtacgcgcagcgagcctcccatattttggcctcccatagcccacagcgaccactgtttctgtatgttgctttccaggccgttcatacaccattacagtcgcctcgagagtatttgtaccgctatagaacgatgggcaatgtcgcccgaagaaaatatgcagccatggtaacttgtatggacgaggccgtccgaaacatcacatgggctctgaagagatacggcttctataacaactccgtgatcattttttcttccgacaatgggggccaaaccttcagcggaggatccaactggcctttgaggggcagaaaaggcacatactgggagggcggcgtacgggggctgggctttgtgcactcacctctcctgaaaaggaagcagaggacgtccagagctctcatgcatattacggactggtatccaaccttagtggggctggcggggggaactacttcagccgccgacggtctcgacgggtacgacgtgtggcctgccatttctgagggtcgggcaagccctagaactgagatcctccacaatatcgaccctctgtataaccatgcccagcatggttcgcttgaagggggttttggcatttggaatactgctgtccaggcagcgatcagggtgggagaatggaaacttctgacgggtgatcctggctatggggactggatcccgcctcaaaccttggccaccttccccggaagttggtggaacctcgaacggatggcctcggtaagacaggcagtgtggctcttcaatatttcagccgatccctacgagagagaagacttggcaggacaacgccccgatgtcgtgaggaccctgctggcccgtttggctgaatataaccggaccgcaattcccgttaggtatcctgccgaaaatcccagggctcatcccgattttaacggcggagcctggggcccttgggccagtgatgaggaggaggaggaggaggaaggcagggccaggagcttcagccgggggaggaggaagaaaaaatgcaaaatctgcaaactgcgctcattctttcggaagttgaacacacgactgatgtcccaacgcatctag

SEQ ID NO: 24860 - DNA, 1710 bp, Artificial Sequence
  derived and/or modified sequence
atgcacaccctgaccggcttcagcctggtgtccctgctgagctttggctacctgtcctgggactgggccaagcccagctttgtggctgatggccctggagaggccggggagcagcccagcgctgccccaccccagcccccccacatcatcttcatcctgacagatgaccagggctaccatgatgtgggctaccacggcagtgacatcgagacccccaccctggaccggctggccgccaagggcgtgaagctggagaactactacatccagcccatctgcacccccagccgcagccagctgctgaccggccgctaccagatccacacaggcctgcagcacagcatcatccggccccagcagcccaactgcctgcccctggaccaggtgaccctgccccagaagctgcaggaggccggctacagcacccacatggtgggcaagtggcacctgggcttctacaggaaggagtgcctgcccacccggcggggctttgacaccttcctgggcagcctgactggaaatgtggactactacacctatgacaactgtgatggccctggggtgtgtggctttgacctgcacgagggagaaaatgtggcctggggcctgagcggccagtacagcaccatgctgtatgcccagagggccagccacatcctggccagccacagcccccagaggcccctcttcctgtatgtggccttccaggccgtgcacacccccctgcagagcccccgggagtacctgtaccgctaccgcaccatgggaaatgtggcccggaggaaatatgctgccatggtgacctgcatggatgaagctgtgaggaacatcacctgggccctgaagagatatggcttctacaacaacagcgtcatcatcttcagcagtgacaatggaggccagaccttcagcggcggcagcaactggcccctgcggggcaggaagggcacctactgggagggcggcgtgcggggcctgggctttgtgcacagccccctgctgaagaggaagcagaggaccagccgggccctgatgcacatcacagactggtaccccaccctggtgggcctggccggcggcaccaccagcgctgctgatggcctggatggctatgatgtgtggccagccatcagcgagggccgggccagccccaggacagagatcctgcacaacatcgaccccctgtacaaccacgcccagcacggcagcctggagggcggcttcggcatctggaacacagctgtgcaggccgccatccgggtgggggagtggaagctgctgaccggggaccccggctatggagactggatccccccccagaccctggccaccttccctggctcctggtggaacctggagaggatggcctctgtgcggcaggccgtgtggctgttcaacatctctgctgacccctatgaaagagaggacctggccggccagaggccagatgtggtgaggaccctgctggcccggctggccgagtacaacagaacagccatccctgtgcgctacccagctgagaacccccgggcccacccagacttcaacggcggggcctggggcccctgggccagtgatgaggaggaggaggaggaggagggccgggcccggagcttcagccggggccgcaggaagaagaagtgcaagatctgcaagctgcgctccttcttcaggaagctgaacacccggctgatgagccagaggatctag

SEQ ID NO: 24861 - DNA, 261 bp, Artificial Sequence
  derived and/or modified sequence
atggtgggcaagtggcacctgggcttctacagaaaagaatgtctgcccacccggcggggctttgacaccttcctgggcagcctgactggaaatgtggactactacacctatgacaactgtgatggccctggggtgtgtggctttgacctgcatgaaggagaaaatgtggcctggggcctgagcggccagtacagcaccatgctgtatgcccagagggccagccacatcctggccagccacagcccccagaggcccctgtag

SEQ ID NO: 24862 - DNA, 1281 bp, Artificial Sequence
  derived and/or modified sequence
atggtgggcaagtggcacctgggcttctacagaaaagaatgtctgcccacccggcggggctttgacaccttcctgggcagcctgactggaaatgtggactactacacctatgacaactgtgatggccctggggtgtgtggctttgacctgcatgaaggagaaaatgtggcctggggcctgagcggccagtacagcaccatgctgtatgcccagagggccagccacatcctggccagccacagcccccagaggcccctcttcctgtatgtggccttccaggccgtgcacacccccctgcagagcccccgggagtacctgtaccgctaccgcaccatgggaaatgtggcccggaggaaatatgctgccatggtgacctgcatggatgaggccgtgaggaacatcacctgggccctgaagagatatggcttctacaacaacagcgtcatcatcttcagcagtgacaatggaggccagaccttcagcggcggcagcaactggcccctgcggggcaggaagggcacctactgggagggcggcgtgcggggcctgggctttgtgcacagccccctgctgaagaggaagcagaggaccagccgggccctgatgcacatcacagactggtaccccaccctggtgggcctggccggcggcaccaccagcgctgctgatggcctggatggctatgatgtgtggccagccatcagcgagggccgggccagccccaggacagagatcctgcacaacatcgaccccctgtacaaccacgcccagcacggcagcctggagggcggcttcggcatctggaacacagctgtgcaggccgccatccgggtgggggagtggaagctgctgactggagaccccggctacggggactggatccccccccagaccctggccaccttccctggctcctggtggaacctggagaggatggcctctgtgcggcaggccgtgtggctgttcaacatctctgctgacccctatgagcgggaggacctggccggccagaggccagatgtggtgaggaccctgctggcccggctggccgagtacaacagaacagccatccctgtgcgctacccagctgagaacccccgggcccacccagacttcaatggaggagcctggggcccctgggccagtgatgaggaggaggaggaggaggagggccgggcccgctccttcagccggggccgcaggaagaagaagtgcaagatctgcaagctgcggagcttcttcaggaagctgaacacccggctgatgagccagaggatctag

SEQ ID NO: 24863 - DNA, 1710 bp, Artificial Sequence
  derived and/or modified sequence
atgcacaccctgaccggcttcagcctggtgagcctgctgagcttcgggtacctgtcttgggactgggcaaagccatcattcgttgctgatggacctggcgaagcgggcgagcagccaagtgccgcccccccccaaccccctcatatcatctttatattaacggacgaccaaggttaccatgatgtcggataccacggctctgatattgagaccccgaccttagatagattagctgctaagggcgtaaagttggagaattactacattcaaccaatttgcactccttccagatctcaactgcttacagggagatatcagatccatacaggccttcagcattccatcataagacctcaacaacccaattgtctgcccctggaccaagtcacccttccccaaaaactacaggaggccggttacagtacacacatggttgggaagtggcatctgggattttaccgcaaagaatgtctgcccactcggaggggattcgacaccttcctgggaagcctgacaggtaatgtggattactacacctacgacaattgtgatggcccaggtgtttgcggctttgatcttcatgagggcgaaaacgtagcttggggcctgagtggacaatacagtactatgttatacgcacagcgagccagtcatattttagcttctcattcccctcagcgtccactgttcctctacgtagcctttcaggctgtccacacgcccctgcagtcccctcgggaatacctgtaccgctacaggacaatgggtaacgtggcccgccggaagtacgcagccatggtgacctgtatggatgaagcagtccggaacatcacatgggcactcaagaggtatgggttttataataactctgttatcatcttctctagtgataacggcggtcagactttttctggaggatccaactggccactccgtggacggaagggaacatattgggagggaggcgtaagagggctcggtttcgttcatagccctctactaaaacggaagcagcgaacttcacgtgccctcatgcatatcaccgactggtatcccacccttgtggggcttgcagggggtaccacaagtgccgccgacgggctggatgggtatgacgtctggccggccatctccgagggaagagctagtcctagaacggagattttgcataatatagaccccctgtataaccatgcacagcacggctccctggagggaggcttcggcatctggaacactgccgtgcaagcagccatcagggtgggcgaatggaagctcttgaccggcgatccagggtacggcgattggattcccccccagacccttgcaaccttcccaggaagttggtggaacttggagaggatggcctctgtgcggcaggctgtttggctattcaacattagcgcagatccttacgaacgggaggacctggccggacagcgtcctgacgtagtccggacattgctggccaggttagctgagtataaccgcacagccatcccagtgcgctaccctgctgagaacccgagagcccaccctgatttcaacgggggggcgtggggtccctgggcctccgacgaggaggaagaggaagaagagggtcgcgcgcgttcattttcacgaggaagacgcaagaagaagtgcaagatttgtaaactcaggtcctttttccggaagcttaacacgcgcctcatgtcacagagaatatag

SEQ ID NO: 24864 - DNA, 261 bp, Artificial Sequence
  derived and/or modified sequence
atggtgggcaagtggcacctgggcttctaccggaaggagtgcctgcccacacgcagaggcttcgacacctttcttggatcccttacaggaaacgtggattactatacctatgataattgcgacgggcccggggtgtgcgggtttgacctacacgaaggagaaaatgtggcatgggggctgtctgggcaatactccaccatgctctatgctcaaagggcttcgcatattctggcttctcattccccacagcggccactatag

SEQ ID NO: 24865 - DNA, 1281 bp, Artificial Sequence
  derived and/or modified sequence
atggtgggcaagtggcacctgggcttctaccggaaggagtgcctgccgacacgaagaggattcgacacctttctggggtctctaactggcaacgtggactactatacctatgataactgcgatggacctggtgtgtgtgggttcgatttacacgaaggtgagaatgtagcctggggcctcagcggccagtacagcacaatgttgtacgctcagcgagccagccacatcctggcttcccatagcccacagcggcccctctttctgtatgtcgccttccaagcagtgcatactccactgcaatccccgcgcgaatatttatatcgctacaggactatggggaacgtggcaagaagaaagtacgcggccatggtgacatgcatggacgaggccgtgagaaacattacttgggctctcaaaagatacgggttctacaacaattcagttatcattttcagttctgacaatggagggcaaaccttttctggagggagcaattggccgctgcgtgggcgaaaagggacctactgggaggggggcgtgcgcggcttggggttcgttcattcccccttactgaagcggaagcagagaacaagccgggcactgatgcacattaccgattggtatcctactctggtaggattggccggcggcactactagtgccgcagacgggctcgatggctatgacgtatggcccgccatttccgagggccgggcctctcctcggaccgaaatccttcacaatattgaccccctctataaccacgcacagcacggatccctggaaggtggctttggcatatggaatactgcggttcaggccgcaatccgtgtgggtgaatggaagctgctgacaggcgaccccgggtatggggactggattccaccacagacactggccaccttccctggatcttggtggaacctggaacgaatggcctcggtgcggcaggctgtgtggctcttcaacatatcggccgacccttatgagcgcgaggatctggccgggcagcgtcccgatgtggtgcgaaccttgttggcccgactcgcggaatataatcggaccgctatcccggtccgataccccgcagaaaacccgagggctcaccccgatttcaacgggggcgcctggggtccctgggccagtgacgaggaagaggaagaggaagaaggacgggcccgatcattctctagggggagacgtaaaaagaagtgcaaaatttgtaaactccgtagcttcttccgcaagctgaacacccgcctaatgagtcagagaatctag

SEQ ID NO: 24866 - DNA, 1710 bp, Artificial Sequence
  derived and/or modified sequence
atgcacacccttactggcttttcactggtatcactgctgtcgttcgggtacttaagttgggactgggcgaagccctcatttgtggcagacggaccgggtgaggctggggagcaacccagcgccgctccaccccaaccaccacatatcatcttcatcttaaccgacgaccaaggctaccacgatgttggctaccatgggagcgacattgagacccctactctggaccggctagccgctaagggcgttaagctggagaattattacattcagccaatttgtactcctagtagaagccagctgctgactggcaggtatcagattcacaccgggctccaacattctattataagaccacagcaaccaaactgtctgccgctcgatcaggtgactcttcctcagaaactgcaggaagctgggtactctacccatatggttggcaagtggcaccttggtttttatagaaaagagtgcctgcccaccaggaggggtttcgataccttcctcggctcactcacaggcaacgttgactactacacgtacgataactgtgacgggcctggggtgtgtggtttcgacctgcacgaaggggaaaacgtagcctggggcctgtcggggcagtacagtactatgctgtatgcccagcgtgcttcacatatcctcgcctcgcactcaccccagcgccctcttttcctgtatgttgcgttccaggcagttcacactcccctacaaagtccccgtgagtatctgtacaggtatagaacaatgggaaacgttgccaggagaaaatatgcagcaatggtgacctgtatggacgaggcagtgagaaacataacctgggccctgaagcgatacggtttttacaataattccgtgatcatttttagcagtgacaatggagggcagacattttcaggtggtagtaattggccccttagaggtagaaaaggaacctattgggaaggaggagtcaggggcttagggttcgtgcattctcccctgttaaagcggaaacagcgaacttcgcgcgctctgatgcacatcacggactggtaccctacattggtgggcctcgcgggtggcaccacttcagcagctgatgggcttgatggatatgatgtttggccggcaatttccgaaggcagggcttctcctcgaactgagatcctgcacaacatagaccccctttataaccacgcccagcacggctcgttagaggggggatttggcatctggaatactgccgtgcaggcagctatcagggtcggagaatggaagctgctgaccggggacccagggtacggagactggattcccccacagaccctggcaactttccctggtagttggtggaatctcgagcggatggccagcgtccggcaggctgtgtggctcttcaatattagtgcagacccctatgagcgcgaggatctagccggacagcggcctgacgtggtgcggaccttgctcgccagattggccgagtacaacaggaccgctatccccgtcaggtacccagcggagaatcctagggcgcatccagacttcaatggcggtgcttgggggccttgggccagcgacgaggaggaagaagaagaagaaggcagggcacgttcattctcaaggggacggcgtaaaaagaaatgcaagatatgtaagctccgatcattctttcgtaagttgaacacacgactgatgagccagcgcatctag

SEQ ID NO: 24867 - DNA, 261 bp, Artificial Sequence
  derived and/or modified sequence
atggttggcaagtggcatttgggattttatcggaaggagtgtttgcccaccagaaggggatttgatacattcttagggagccttactggcaatgttgactactacacatatgacaattgcgacgggccaggcgtctgcgggttcgatctgcacgaaggggagaacgtcgcctggggcttaagcggccaatacagcactatgctgtacgcacaaagagcctcccatatccttgccagtcattctccgcagagacctttgtag

SEQ ID NO: 24868 - DNA, 1281 bp, Artificial Sequence
  derived and/or modified sequence
atggttgggaagtggcatcttggcttctatcgcaaagaatgcctgccgacacgccgtggtttcgacacttttctgggaagtctgacgggcaacgttgactattacacatacgacaactgcgatgggcctggagtgtgtgggttcgaccttcacgagggcgagaacgtggcgtgggggctgagtgggcagtattccacaatgctctatgcccagagagctagtcacattttggcttcccacagtccccagaggcccttgtttctttacgtggcttttcaggccgtgcacacacctctacagagcccccgagagtatctgtatcggtaccggaccatgggtaatgtggcacgaaggaaatatgcagccatggtaacctgtatggatgaggctgtgcgcaacataacttgggccctgaagcgatacggattctacaataatagcgttattattttcagttctgataacggtggacagacgttctccgggggaagcaactggcctttgaggggtaggaaaggtacgtattgggaaggaggagtaagggggctgggattcgttcactcccccctgctaaagcgcaaacagaggacgtcacgagcactcatgcatattactgactggtacccaacactggtgggcctggcaggtggtaccaccagcgctgccgacggcctggacggttatgacgtttggcctgcaatttctgaagggagggcctccccacgcaccgagatcctccataacattgaccctctgtataatcacgcccagcatgggtccctggagggaggattcgggatctggaataccgccgtgcaagctgcaataagagtgggcgagtggaagcttttgaccggtgaccctggctacggggactggatccctccgcagacattagcaacctttcctgggtcttggtggaaccttgagcgaatggccagcgtccgccaagccgtgtggctttttaacatctcagccgacccctatgaacgcgaagatcttgcagggcaacgcccagatgtcgttagaaccctgctcgcaaggctcgcggagtacaatcgcaccgcaatccccgtaagatatcccgcagagaacccacgcgctcatcctgacttcaatggcggagcctgggggccttgggcatccgacgaagaagaagaggaggaagaaggacgagcacgcagcttttccaggggacggagaaagaagaaatgtaagatttgtaaacttagatcattctttaggaagcttaacacgcggcttatgagccagcggatctag

SEQ ID NO: 24869 - DNA, 3161 bp, Artificial Sequence
  derived and/or modified sequence
ccctccacctggggctcggcccggcccggcagatgttacaactttttcgaattctctcccgccgtgtcccctcgacccgcccaacttgtgcctccctccccttcccctctggggtcctgcccacctccctgcagggagctgggctgttttaaggactccgggtggggcgagaggccgggaaagcagaggagagagaaattaggaggcgggagaaatccagggcaagaaggaagaggggagtcagaggatggtagagagcactttttggaagctgccacgccgcgtctcaggctggccgggctgagctggggaagagggagcaaaggcggcgcagggcctgcgcttaggcagcgggaggcagctcggcgcgggcctgacctccccagagcgccccgctgcggccgagcagatccggcccagccgtccggcagccagtcccggaccagacactggaccgtccccggggggcgctgaactccctcgcagcatccgagccggcgggccggtggtgcgccctgggcgcgcgaggtggtgaggccccaggagcccggcgcgccgggacgcgcgggccggcttggcgatgcacaccctcactggcttctccctggtcagcctgctcagcttcggctacctgtcctgggactgggccaagccgagcttcgtggccgacgggcccggggaggctggcgagcagccctcggccgctccgccccagcctccccacatcatcttcatcctcacggacgaccaaggctaccacgacgtgggctaccatggttcagatatcgagacccctacgctggacaggctggcggccaagggggtcaagttggagaattattacatccagcccatctgcacgccttcgcggagccagctcctcactggcaggtaccagatccacacaggactccagcattccatcatccgcccacagcagcccaactgcctgcccctggaccaggtgacactgccacagaagctgcaggaggcaggttattccacccatatggtgggcaagtggcacctgggcttctaccggaaggagtgtctgcccacccgtcggggcttcgacaccttcctgggctcgctcacgggcaatgtggactattacacctatgacaactgtgatggcccaggcgtgtgcggcttcgacctgcacgagggtgagaatgtggcctgggggctcagcggccagtactccactatgctttatgcccagcgcgccagccatatcctggccagccacagccctcagcgtcccctcttcctctatgtggccttccaggcagtacacacacccctgcagtcccctcgtgagtacctgtaccgctaccgcaccatgggcaatgtggcccggcggaagtacgcggccatggtgacctgcatggatgaggctgtgcgcaacatcacctgggccctcaagcgctacggtttctacaacaacagtgtcatcatcttctccagtgacaatggtggccagactttctcggggggcagcaactggccgctccgaggacgcaagggcacttattgggaaggtggcgtgcggggcctaggctttgtccacagtcccctgctcaagcgaaagcaacggacaagccgggcactgatgcacatcactgactggtacccgaccctggtgggtctggcaggtggtaccacctcagcagccgatgggctagatggctacgacgtgtggccggccatcagcgagggccgggcctcaccacgcacggagatcctgcacaacattgacccactctacaaccatgcccagcatggctccctggagggcggctttggcatctggaacaccgccgtgcaggctgccatccgcgtgggtgagtggaagctgctgacaggagaccccggctatggcgattggatcccaccgcagacactggccaccttcccgggtagctggtggaacctggaacgaatggccagtgtccgccaggccgtgtggctcttcaacatcagtgctgacccttatgaacgggaggacctggctggccagcggcctgatgtggtccgcaccctgctggctcgcctggccgaatataaccgcacagccatcccggtacgctacccagctgagaacccccgggctcatcctgactttaatgggggtgcttgggggccctgggccagtgatgaggaagaggaggaagaggaagggagggctcgaagcttctcccggggtcgtcgcaagaaaaaatgcaagatttgcaagcttcgatcctttttccgtaaactcaacaccaggctaatgtcccaacggatctgatggtggggagggagaaaactgtcctttagaggatcttccccactccggcttggccctgctgtttctcagggagaagcctgtcacatctccatctacagggagttggagggtgtagagtcccttggttgaacagggtagggagcctggataggagtgggtgggaataaaccagactgggatgcctgtgtctcagtcctgcctcctcacggacttgctctgtgacctcaggtgacccacatgagcttttagcctcagtttcctcatctgtaaaatgagctctaatgactttgtgactctttggtgtggccctggagcctggggccacggtggagttcctggccggccttgccacttgacaactcctttaaggcttcccccttaacacgggatccctgtggtggtgtttgggagttgcctggaggcaactccaagcctggcccccagctgaagcatggcaatctggctgctctctacagggacccccaagcgctgtgggtggagggcaggggtcgggggggttgaccttcttgggtcttcacatggcctaggccagtcctccggtcagactggtgtcaggcaccgtggtgcaaaattcctcttctggcccctccagtacccagagaaactggctgggccattaactgctgcagcaccaagggtggtagaaagagctgtgaagagcccccaaaccagtaccaggacacctgggttctcctgtgacctggggcacagttcttgccctctaggccttgatttccccacctgcaagtggggatgccagccctggctctgcctccttcatgaggctctggaagactggccaaggttgtggaggagcttgtgaacttgattaaagtgtcgtaacatggaa

SEQ ID NO: 24870 - DNA, 472 bp, Artificial Sequence
  derived and/or modified sequence
atgcagttctggaaaggtgaatcggttccttctgcctgtctgggttttgcaaccccgtggtgggacaattggccaggtgcatattcctcagaaggtaccagatccacacaggactccagcattccatcatccgcccacagcagcccaactgcctgcccctggaccaggtgacactgccacagaagctgcaggaggcaggttattccacccatatggtgggcaagtggcacctgggcttctaccggaaggagtgtctgcccacccgtcggggcttcgacaccttcctgggctcgctcacgggcaatgtggactattacacctatgacaactgtgatggcccaggcgtgtgcggcttcgacctgcacgagggtgagaatgtggcctgggggctcagcggccagtactccactatgctttatgcccagcgcgccagccatatcctggccagccacagccctcagcgtcccctctt

SEQ ID NO: 24871 - DNA, 1429 bp, Artificial Sequence
  derived and/or modified sequence
gggagggcctcctcatgcagttctggaaaggtaccagatccacacaggactccagcattccatcatccgcccacagcagcccaactgcctgcccctggaccaggtgacactgccacagaagctgcaggaggcaggttattccacccatatggtgggcaagtggcacctgggcttctaccggaaggagtgtctgcccacccgtcggggcttcgacaccttcctgggctcgctcacgggcaatgtggactattacacctatgacaactgtgatggcccaggcgtgtgcggcttcgacctgcacgagggtgagaatgtggcctgggggctcagcggccagtactccactatgctttatgcccagcgcgccagccatatcctggccagccacagccctcagcgtcccctcttcctctatgtggccttccaggcagtacacacacccctgcagtcccctcgtgagtacctgtaccgctaccgcaccatgggcaatgtggcccggcggaagtacgcggccatggtgacctgcatggatgaggctgtgcgcaacatcacctgggccctcaagcgctacggtttctacaacaacagtgtcatcatcttctccagtgacaatggtggccagactttctcggggggcagcaactggccgctccgaggacgcaagggcacttattgggaaggtggcgtgcggggcctaggctttgtccacagtcccctgctcaagcgaaagcaacggacaagccgggcactgatgcacatcactgactggtacccgaccctggtgggtctggcaggtggtaccacctcagcagccgatgggctagatggctacgacgtgtggccggccatcagcgagggccgggcctcaccacgcacggagatcctgcacaacattgacccactctacaaccatgcccagcatggctccctggagggcggctttggcatctggaacaccgccgtgcaggctgccatccgcgtgggtgagtggaagctgctgacaggagaccccggctatggcgattggatcccaccgcagacactggccaccttcccgggtagctggtggaacctggaacgaatggccagtgtccgccaggccgtgtggctcttcaacatcagtgctgacccttatgaacgggaggacctggctggccagcggcctgatgtggtccgcaccctgctggctcgcctggccgaatataaccgcacagccatcccggtacgctacccagctgagaacccccgggctcatcctgactttaatgggggtgcttgggggccctgggccagtgatgaggaagaggaggaagaggaagggagggctcgaagcttctcccggggtcgtcgcaagaaaaaatgcaagatttgcaagcttcgatcctttttccgtaaactcaacaccaggctaatgtcccaacggatctga

SEQ ID NO: 24872 - DNA, 1710 bp, Artificial Sequence
  derived and/or modified sequence
atgcacaccctgaccggcttcagcctggtgagcctgctgagcttcggctacctgagctgggactgggccaagcccagcttcgtggccgacggccccggcgaggccggcgagcagcccagcgccgcccccccccagcccccccacatcatcttcatcctgaccgacgaccagggctaccacgacgtgggctaccacggcagcgacatcgagacccccaccctggacagactggccgccaagggcgtgaagctggagaactactacatccagcccatctgcacccccagcagaagccagctgctgaccggcagataccagatccacaccggcctgcagcacagcatcatcagaccccagcagcccaactgcctgcccctggaccaggtgaccctgccccagaagctgcaggaggccggctacagcacccacatggtgggcaagtggcacctgggcttctacagaaaggagtgcctgcccaccagaagaggcttcgacaccttcctgggcagcctgaccggcaacgtggactactacacctacgacaactgcgacggccccggcgtgtgcggcttcgacctgcacgagggcgagaacgtggcctggggcctgagcggccagtacagcaccatgctgtacgcccagagagccagccacatcctggccagccacagcccccagagacccctgttcctgtacgtggccttccaggccgtgcacacccccctgcagagccccagagagtacctgtacagatacagaaccatgggcaacgtggccagaagaaagtacgccgccatggtgacctgcatggacgaggccgtgagaaacatcacctgggccctgaagagatacggcttctacaacaacagcgtgatcatcttcagcagcgacaacggcggccagaccttcagcggcggcagcaactggcccctgagaggcagaaagggcacctactgggagggcggcgtgagaggcctgggcttcgtgcacagccccctgctgaagagaaagcagagaaccagcagagccctgatgcacatcaccgactggtaccccaccctggtgggcctggccggcggcaccaccagcgccgccgacggcctggacggctacgacgtgtggcccgccatcagcgagggcagagccagccccagaaccgagatcctgcacaacatcgaccccctgtacaaccacgcccagcacggcagcctggagggcggcttcggcatctggaacaccgccgtgcaggccgccatcagagtgggcgagtggaagctgctgaccggcgaccccggctacggcgactggatccccccccagaccctggccaccttccccggcagctggtggaacctggagagaatggccagcgtgagacaggccgtgtggctgttcaacatcagcgccgacccctacgagagagaggacctggccggccagagacccgacgtggtgagaaccctgctggccagactggccgagtacaacagaaccgccatccccgtgagataccccgccgagaaccccagagcccaccccgacttcaacggcggcgcctggggcccctgggccagcgacgaggaggaggaggaggaggagggcagagccagaagcttcagcagaggcagaagaaagaagaagtgcaagatctgcaagctgagaagcttcttcagaaagctgaacaccagactgatgagccagagaatctag

SEQ ID NO: 24873 - DNA, 261 bp, Artificial Sequence
  derived and/or modified sequence
atggtgggcaagtggcacctgggcttctacagaaaggagtgcctgcccaccagaagaggcttcgacaccttcctgggcagcctgaccggcaacgtggactactacacctacgacaactgcgacggccccggcgtgtgcggcttcgacctgcacgagggcgagaacgtggcctggggcctgagcggccagtacagcaccatgctgtacgcccagagagccagccacatcctggccagccacagcccccagagacccctgtag

SEQ ID NO: 24874 - DNA, 1281 bp, Artificial Sequence
  derived and/or modified sequence
atggtgggcaagtggcacctgggcttctacagaaaggagtgcctgcccaccagaagaggcttcgacaccttcctgggcagcctgaccggcaacgtggactactacacctacgacaactgcgacggccccggcgtgtgcggcttcgacctgcacgagggcgagaacgtggcctggggcctgagcggccagtacagcaccatgctgtacgcccagagagccagccacatcctggccagccacagcccccagagacccctgttcctgtacgtggccttccaggccgtgcacacccccctgcagagccccagagagtacctgtacagatacagaaccatgggcaacgtggccagaagaaagtacgccgccatggtgacctgcatggacgaggccgtgagaaacatcacctgggccctgaagagatacggcttctacaacaacagcgtgatcatcttcagcagcgacaacggcggccagaccttcagcggcggcagcaactggcccctgagaggcagaaagggcacctactgggagggcggcgtgagaggcctgggcttcgtgcacagccccctgctgaagagaaagcagagaaccagcagagccctgatgcacatcaccgactggtaccccaccctggtgggcctggccggcggcaccaccagcgccgccgacggcctggacggctacgacgtgtggcccgccatcagcgagggcagagccagccccagaaccgagatcctgcacaacatcgaccccctgtacaaccacgcccagcacggcagcctggagggcggcttcggcatctggaacaccgccgtgcaggccgccatcagagtgggcgagtggaagctgctgaccggcgaccccggctacggcgactggatccccccccagaccctggccaccttccccggcagctggtggaacctggagagaatggccagcgtgagacaggccgtgtggctgttcaacatcagcgccgacccctacgagagagaggacctggccggccagagacccgacgtggtgagaaccctgctggccagactggccgagtacaacagaaccgccatccccgtgagataccccgccgagaaccccagagcccaccccgacttcaacggcggcgcctggggcccctgggccagcgacgaggaggaggaggaggaggagggcagagccagaagcttcagcagaggcagaagaaagaagaagtgcaagatctgcaagctgagaagcttcttcagaaagctgaacaccagactgatgagccagagaatctag

SEQ ID NO: 24875 - protein, 405 aa, Artificial Sequence
  derived and/or modified sequence
MDTIFLWSLLLLFFGSQASRCSAQKNTEFAVDLYQEVSLSHKDNIIFSPLGITLVLEMVQLGAKGKAQQQIRQTLKQQETSAGEEFFVLKSFFSAISEKKQEFTFNLANALYLQEGFTVKEQYLHGNKEFFQSAIKLVDFQDAKACAEMISTWVERKTDGKIKDMFSGEEFGPLTRLVLVNAIYFKGDWKQKFRKEDTQLINFTKKNGSTVKIPMMKALLRTKYGYFSESSLNYQVLELSYKGDEFSLIIILPAEGMDIEEVEKLITAQQILKWLSEMQEEEVEISLPRFKVEQKVDFKDVLYSLNITEIFSGGCDLSGITDSSEVYVSQVTQKVFFEINEDGSEAATSTGIHIPVIMSLAQSQFIANHPFLFIMKHNPTESILFMGRVTNPDTQEIKGRDLDSL

SEQ ID NO: 24876 - protein, 206 aa, Artificial Sequence
  derived and/or modified sequence
MDTIFLWSLLLLFFGSQASRCSAQKNTEFAVDLYQEVSLSHKDNIIFSPLGITLVLEMVQLGAKGKAQQQIRQTLKQQETSAGEEFFVLKSFFSAISEKKQEFTFNLANALYLQEGFTVKEQYLHGNKEFFQSAIKLVDFQDAKACAEMISTWVERKTDGKIKDMFSGEEFGPLTRLVLVNAIYFKGDWKQKFRKEDTQLINFTKK

SEQ ID NO: 24877 - DNA, 1514 bp, Artificial Sequence
  derived and/or modified sequence
aagatccagttcttataggactattcatcaggttgtttagttcagcattactttgtgctttctgataagatatgatccaaaacctgatgagagaagtcaaaatggacacaatcttcttgtggagtcttctattgctgttttttggaagtcaagcctcaagatgctcagctcaaaaaaataccgaatttgcagtggatctttatcaagaggtttccttatctcataaggacaacattatattttcaccccttggaataactttggttcttgagatggtacaactgggagccaaaggaaaagcacagcagcagataagacaaactttaaaacaacaggaaacctcagctggggaagaattttttgtactgaagtcatttttctctgccatctcagagaaaaaacaagaatttacatttaatcttgccaatgccctctaccttcaagaaggattcactgtgaaagaacagtatctccatggcaacaaggaattttttcagagtgctataaaactggtggattttcaagatgcaaaggcttgtgcagagatgataagtacctgggtagaaagaaaaacagatggaaaaattaaagacatgttttcaggggaagaatttggccctctgactcggcttgtcctggtgaatgctatttatttcaaaggagattggaaacagaaattcagaaaagaggacacacagctgataaattttactaagaaaaatggttcaactgtcaaaattccaatgatgaaggctcttctgagaacaaaatatggttatttttctgaatcttccctgaactaccaagttttagaattgtcttacaaaggtgatgaatttagcttaattatcatacttcctgcagaaggtatggatatagaagaagtggaaaaactaattactgctcaacaaatcctaaaatggctctctgagatgcaagaagaggaagtagaaataagcctccctagatttaaagtagaacaaaaagtagacttcaaagacgttttgtattctttgaacataaccgagatatttagtggtggctgcgacctttctggaataacagattcatctgaagtgtatgtttcccaagtgacgcaaaaagttttctttgagataaatgaagatggtagtgaagctgcaacatcaactggcatacacatccctgtgatcatgagtctggctcaaagccaatttatagcaaatcatccatttctgtttattatgaagcataatccaacagaatcaattctgtttatgggaagagtgacaaatcctgacacccaggagataaaaggaagagatttagattcactgtgaatgaaaagcacagcctcagaataaaagatgatttctcaaaaatagctgattggcaaaatatcgtcatcttgacaatatttgctctatatcttatgtcttttctgttttaaactgtgcctgtagtaatagatatctgtcttgatgaataagtaaaattaggtatgcatttgtttccattccttctgtatgttttag

SEQ ID NO: 24878 - DNA, 743 bp, Artificial Sequence
  derived and/or modified sequence
tgaataatcagaagtcagtttgggaagatccagttcttataggactattcatcaggttgtttagttcagcattactttgtgctttctgataagatatgatccaaaacctgatgagagaagtcaaaatggacacaatcttcttgtggagtcttctattgctgttttttggaagtcaagcctcaagatgctcagctcaaaaaaataccgaatttgcagtggatctttatcaagaggtttccttatctcataaggacaacattatattttcaccccttggaataactttggttcttgagatggtacaactgggagccaaaggaaaagcacagcagcagataagacaaactttaaaacaacaggaaacctcagctggggaagaattttttgtactgaagtcatttttctctgccatctcagagaaaaaacaagaatttacatttaatcttgccaatgccctctaccttcaagaaggattcactgtgaaagaacagtatctccatggcaacaaggaattttttcagagtgctataaaactggtggattttcaagatgcaaaggcttgtgcagagatgataagtacctgggtagaaagaaaaacagatggaaaaattaaagacatgttttcaggggaagaatttggccctctgactcggcttgtcctggtgaatgctatttatttcaaaggagattggaaacagaaattcagaaaagaggacacacagctgataaattttactaagaaa

SEQ ID NO: 24879 - DNA, 1331 bp, Artificial Sequence
  derived and/or modified sequence
gagctctctgtggaaaactctattttgaaaatgaatatattttgatttaaacaatacagagaagtcaaaatggacacaatcttcttgtggagtcttctattgctgttttttggaagtcaagcctcaagatgctcagctcaaaaaaataccgaatttgcagtggatctttatcaagaggtttccttatctcataaggacaacattatattttcaccccttggaataactttggttcttgagatggtacaactgggagccaaaggaaaagcacagcagcagataagacaaactttaaaacaacaggaaacctcagctggggaagaattttttgtactgaagtcatttttctctgccatctcagagaaaaaacaagaatttacatttaatcttgccaatgccctctaccttcaagaaggattcactgtgaaagaacagtatctccatggcaacaaggaattttttcagagtgctataaaactggtggattttcaagatgcaaaggcttgtgcagagatgataagtacctgggtagaaagaaaaacagatggaaaaattaaagacatgttttcaggggaagaatttggccctctgactcggcttgtcctggtgaatgctatttatttcaaaggagattggaaacagaaattcagaaaagaggacacacagctgataaattttactaagaaaaatggttcaactgtcaaaattccaatgatgaaggctcttctgagaacaaaatatggttatttttctgaatcttccctgaactaccaagttttagaattgtcttacaaaggtgatgaatttagcttaattatcatacttcctgcagaaggtatggatatagaagaagtggaaaaactaattactgctcaacaaatcctaaaatggctctctgagatgcaagaagaggaagtagaaataagcctccctagatttaaagtagaacaaaaagtagacttcaaagacgttttgtattctttgaacataaccgagatatttagtggtggctgcgacctttctggaataacagattcatctgaagtgtatgtttcccaagtgacgcaaaaagttttctttgagataaatgaagatggtagtgaagctgcaacatcaactggcatacacatccctgtgatcatgagtctggctcaaagccaatttatagcaaatcatccatttctgtttattatgaagcataatccaacagaatcaattctgtttatgggaagagtgacaaatcctgacacccaggagataaaaggaagagatttagattcactgtgaatgaaaagcacagcctcagaataaaagatgatttctcaaaaata

SEQ ID NO: 24880 - DNA, 1837 bp, Artificial Sequence
  derived and/or modified sequence
ttttgtagctttgaaagctgtatttgatgagaaaaacctgtttcccaaggaaattctgcatcatgaacgaaaagccaagcaattatgccaagaaaaaagttgtgaagtgaagaaaaataagaagtaattacaacagaaaaaccttcactgttacataagaggaattaatcaagcaatggtcaagataaatggagttggccttgatcgctcaggtgtttatgtacaagagttttccagcaagcgtattttagttgtaacattccagtgaataatcagaagtcagtttgggagaagtcaaaatggacacaatcttcttgtggagtcttctattgctgttttttggaagtcaagcctcaagatgctcagctcaaaaaaataccgaatttgcagtggatctttatcaagaggtttccttatctcataaggacaacattatattttcaccccttggaataactttggttcttgagatggtacaactgggagccaaaggaaaagcacagcagcagataagacaaactttaaaacaacaggaaacctcagctggggaagaattttttgtactgaagtcatttttctctgccatctcagagaaaaaacaagaatttacatttaatcttgccaatgccctctaccttcaagaaggattcactgtgaaagaacagtatctccatggcaacaaggaattttttcagagtgctataaaactggtggattttcaagatgcaaaggcttgtgcagagatgataagtacctgggtagaaagaaaaacagatggaaaaattaaagacatgttttcaggggaagaatttggccctctgactcggcttgtcctggtgaatgctatttatttcaaaggagattggaaacagaaattcagaaaagaggacacacagctgataaattttactaagaaaaatggttcaactgtcaaaattccaatgatgaaggctcttctgagaacaaaatatggttatttttctgaatcttccctgaactaccaagttttagaattgtcttacaaaggtgatgaatttagcttaattatcatacttcctgcagaaggtatggatatagaagaagtggaaaaactaattactgctcaacaaatcctaaaatggctctctgagatgcaagaagaggaagtagaaataagcctccctagatttaaagtagaacaaaaagtagacttcaaagacgttttgtattctttgaacataaccgagatatttagtggtggctgcgacctttctggaataacagattcatctgaagtgtatgtttcccaagtgacgcaaaaagttttctttgagataaatgaagatggtagtgaagctgcaacatcaactggcatacacatccctgtgatcatgagtctggctcaaagccaatttatagcaaatcatccatttctgtttattatgaagcataatccaacagaatcaattctgtttatgggaagagtgacaaatcctgacacccaggagataaaaggaagagatttagattcactgtgaatgaaaagcacagcctcagaataaaagatgatttctcaaaaatagctgattggcaaaatatcgtcatcttgacaatatttgctctatatcttatgtcttttctgttttaaactgtgcctgtagtaatagatatctgtcttgatgaataagtaaaattaggtatgcatttgtttccattccttctgtatgttttagaaaatctatatgcatctaaaaccttgagcgtacgtaaaatattaccattcatatgttagaacaatcctgtctataatatcttaaataccaaattcttgtcttagatagcaaatttattattccct

SEQ ID NO: 24881 - DNA, 1430 bp, Artificial Sequence
  derived and/or modified sequence
ccagtgaataatcagaagtcagtttgggagaagtcaaaatggacacaatcttcttgtggagtcttctattgctgttttttggaagtcaagcctcaagatgctcagctcaaaaaaataccgaatttgcagtggatctttatcaagaggtttccttatctcataaggacaacattatattttcaccccttggaataactttggttcttgagatggtacaactgggagccaaaggaaaagcacagcagcagataagacaaactttaaaacaacaggaaacctcagctggggaagaattttttgtactgaagtcatttttctctgccatctcagagaaaaaacaagaatttacatttaatcttgccaatgccctctaccttcaagaaggattcactgtgaaagaacagtatctccatggcaacaaggaattttttcagagtgctataaaactggtggattttcaagatgcaaaggcttgtgcagagatgataagtacctgggtagaaagaaaaacagatggaaaaattaaagacatgttttcaggggaagaatttggccctctgactcggcttgtcctggtgaatgctatttatttcaaaggagattggaaacagaaattcagaaaagaggacacacagctgataaattttactaagaaaaatggttcaactgtcaaaattccaatgatgaaggctcttctgagaacaaaatatggttatttttctgaatcttccctgaactaccaagttttagaattgtcttacaaaggtgatgaatttagcttaattatcatacttcctgcagaaggtatggatatagaagaagtggaaaaactaattactgctcaacaaatcctaaaatggctctctgagatgcaagaagaggaagtagaaataagcctccctagatttaaagtagaacaaaaagtagacttcaaagacgttttgtattctttgaacataaccgagatatttagtggtggctgcgacctttctggaataacagattcatctgaagtgtatgtttcccaagtgacgcaaaaagttttctttgagataaatgaagatggtagtgaagctgcaacatcaactggcatacacatccctgtgatcatgagtctggctcaaagccaatttatagcaaatcatccatttctgtttattatgaagcataatccaacagaatcaattctgtttatgggaagagtgacaaatcctgacacccaggagataaaaggaagagatttagattcactgtgaatgaaaagcacagcctcagaataaaagatgatttctcaaaaatagctgattggcaaaatatcgtcatcttgacaatatttgctctatatcttatgtcttttctgttttaaactgtgcctgtagtaatagatatctgtcttgatgaataagtaaaattaggtatgcatttgtttc

SEQ ID NO: 24882 - protein, 790 aa, Artificial Sequence
  derived and/or modified sequence
MLRGGRRGQLGWHSWAAGPGSLLAWLILASAGAAPCPDACCPHGSSGLRCTRDGALDSLHHLPGAENLTELYIENQQHLQHLELRDLRGLGELRNLTIVKSGLRFVAPDAFHFTPRLSRLNLSFNALESLSWKTVQGLSLQELVLSGNPLHCSCALRWLQRWEEEGLGGVPEQKLQCHGQGPLAHMPNASCGVPTLKVQVPNASVDVGDDVLLRCQVEGRGLEQAGWILTELEQSATVMKSGGLPSLGLTLANVTSDLNRKNVTCWAENDVGRAEVSVQVNVSFPASVQLHTAVEMHHWCIPFSVDGQPAPSLRWLFNGSVLNETSFIFTEFLEPAANETVRHGCLRLNQPTHVNNGNYTLLAANPFGQASASIMAAFMDNPFEFNPEDPIPDTNSTSGDPVEKKDETPFGVSVAVGLAVFACLFLSTLLLVLNKCGRRNKFGINRPAVLAPEDGLAMSLHFMTLGGSSLSPTEGKGSGLQGHIIENPQYFSDACVHHIKRRDIVLKWELGEGAFGKVFLAECHNLLPEQDKMLVAVKALKEASESARQDFQREAELLTMLQHQHIVRFFGVCTEGRPLLMVFEYMRHGDLNRFLRSHGPDAKLLAGGEDVAPGPLGLGQLLAVASQVAAGMVYLAGLHFVHRDLATRNCLVGQGLVVKIGDFGMSRDIYSTDYYRVGGRTMLPIRWMPPESILYRKFTTESDVWSFGVVLWEIFTYGKQPWYQLSNTEAIDCITQGRELERPRACPPEVYAIMRGCWQREPQQRHSIKDVHARLQALAQAPPVYLDVLG

SEQ ID NO: 24883 - DNA, 2373 bp, Artificial Sequence
  derived and/or modified sequence
atgctgagagggggacgtcggggacagctcgggtggcatagttgggcagccgggccaggaagcctgctggcatggctgatcctagccagcgccggtgccgccccttgcccggacgcttgctgtccccacggcagttccgggttaagatgcactagagatggagcattggacagcctccaccatttaccaggagcagaaaatctcacggaactgtacattgaaaaccagcagcacctgcagcatctggaactgcgcgatctgagaggcctgggtgaattgcgtaacctgaccatcgtcaaaagcggcttaagatttgtggcacctgacgccttccacttcacgccaagactaagccggctgaacctttcattcaacgctctagagagtctgagttggaaaacagtacaggggctgtctctgcaagagctcgtgcttagcggtaacccactgcattgttcctgcgcacttaggtggctccagcggtgggaggaagaaggcctgggaggagtaccagagcagaagctacagtgtcatggccaggggcctctagctcacatgccaaacgcctcctgtggggtgccgactctcaaagtacaggtacctaacgccagcgtggatgtgggggacgacgtgctgctgcgctgccaggtcgagggcagaggactggagcaggctggttggatacttacagaactggaacaaagcgccacagtcatgaagtccggaggccttccctcactggggctaacccttgccaacgtcacttcggacctgaaccgaaaaaacgtgacttgctgggctgaaaatgatgtggggcgagccgaggtgagtgtccaggtgaatgtgtcgttcccggctagcgtgcagctgcataccgctgtggaaatgcatcattggtgcatacccttttccgtcgacggccagccagctccaagtcttaggtggctgttcaacggttcggtgttaaacgagacatcctttatttttacagagttcttagagcctgccgccaacgagacagtgaggcacggctgtctgcggctgaatcaaccaacccatgtcaacaacggcaactacacccttttagccgcaaacccattcggccaggcttcagcgtctattatggcagccttcatggataatccattcgaattcaatcccgaagaccctattcccgatactaacagtacgtccggcgaccctgtggagaaaaaagatgaaacaccttttggtgtctctgttgccgtcgggctggcggtgtttgcttgccttttcctcagcacgcttctgctggtcctcaataaatgcggccggcgcaataaattcggtatcaaccgcccagccgtcctcgccccagaggacggattggccatgtctttgcatttcatgactttggggggcagctccctctcacccacggagggcaaagggtcaggactgcaaggccacattatagagaacccacaatatttctccgatgcatgcgtgcaccacatcaaacgcagggatatcgtcttgaaatgggagttaggggaaggtgcttttggtaaggtctttctggccgagtgtcacaatctcctgcctgagcaggacaagatgctcgtcgcggttaaagcattaaaagaggcaagcgaatctgctcgccaggacttccagcgggaggccgagttattaacaatgctgcagcaccaacacatcgtacgattcttcggggtctgtactgagggtaggccgcttctgatggtattcgagtacatgaggcacggagatctgaataggttcctgagaagtcacggaccagacgccaagctgctagctggaggagaagatgtcgccccaggtcctttggggctggggcagctgttggctgtggcgtcccaggttgctgccggaatggtgtatcttgccggactgcactttgtccatcgcgatctggctacccgtaattgtttggtcggacagggacttgttgtaaaaatcggcgactttgggatgtctcgtgatatttattccacagattactacagagtcggaggtcggaccatgctgcctataagatggatgccgccagagagcattctgtatcggaagtttactactgagtcagacgtgtggtcgttcggagtggtactgtgggagatttttacatatggcaagcagccgtggtaccagctgagcaataccgaagccatagactgtatcactcagggccgggaactcgaaaggccccgggcgtgtccgcctgaggtgtatgctattatgagagggtgttggcagagagaacctcaacagcgtcatagtatcaaggatgtgcacgcaagactgcaagcactggcccaggctccaccggtgtacctcgatgtgctgggctag

SEQ ID NO: 24884 - DNA, 2373 bp, Artificial Sequence
  derived and/or modified sequence
atgctgcggggcggccggcggggccagctgggctggcacagctgggccgccggccctggcagcctgctggcctggctgatcctggccagcgctggagctgccccctgcccagatgcctgctgcccccacggcagcagcggcctgcgctgcaccagagatggagccctggacagcctgcaccacctgcctggagctgagaacctgacagagctgtacatcgagaaccagcagcacctgcagcacctggagctgcgggacctgcggggcctgggggagctgaggaacctgaccatcgtgaagagcggcctgcgctttgtggccccagatgccttccacttcaccccccggctgagccggctgaacctgtccttcaatgccctggagagcctgtcctggaagacagtgcagggcctgagcctgcaggagctggtgctgagcggcaaccccctgcactgcagctgtgccctgcgctggctgcagcgctgggaggaggagggcctgggcggcgtgcctgagcagaagctgcagtgccacggccagggccccctggcccacatgcccaatgccagctgtggggtgcccaccctgaaggtgcaggtgcccaatgcctctgtggatgtgggagatgatgtgctgctgcgctgccaggtggagggccggggcctggagcaggccggctggatcctgacagagctggagcagagcgccaccgtgatgaagagcggcggcctgcccagcctgggcctgaccctggccaacgtgaccagtgacctgaacaggaagaatgtgacctgctgggccgagaatgatgtgggccgggcagaggtgtctgtgcaggtgaatgtgtccttccctgcctctgtgcagctgcacacagctgtggagatgcaccactggtgcatccccttctctgtggatggccagcctgcccccagcctgcgctggctgttcaacggctctgtgctgaatgagaccagcttcatcttcacagagttcctggagcctgctgccaatgagaccgtgagacatggctgcctgcggctgaaccagcccacccacgtgaacaacggcaactacaccctgctggccgccaaccccttcggccaggccagcgccagcatcatggccgccttcatggacaacccctttgagttcaaccctgaggaccccatcccagacaccaacagcaccagcggggaccctgtggagaagaaggatgagacccccttcggcgtgtctgtggccgtgggcctggccgtgtttgcctgcctcttcctgagcaccctgctgctggtgctgaacaagtgtggcagaagaaacaagtttggcatcaacagacctgctgtgctggccccagaagatggcctggccatgagcctgcacttcatgaccctgggcggcagcagcctgagccccacagagggcaagggcagcggcctgcagggccacatcatcgagaacccccagtacttcagtgatgcctgtgtgcaccacatcaagagaagagacatcgtgctgaagtgggagctgggggagggcgccttcggcaaggtgttcctggccgagtgccacaacctgctgcctgagcaggacaagatgctggtggccgtgaaggccctgaaggaggccagcgagagcgcccggcaggacttccagcgggaggccgagctgctgaccatgctgcagcaccagcacatcgtgcgcttcttcggcgtgtgcacagagggccggcccctgctgatggtgtttgagtacatgagacatggagacctgaaccgcttcctgcggagccacggcccagatgccaagctgctggccggaggagaagatgtggcccctggccccctgggcctgggccagctgctggccgtggccagccaggtggccgccggcatggtgtacctggccggcctgcactttgtgcaccgggacctggccaccaggaactgcctggtgggccagggcctggtggtgaagatcggggactttggcatgagccgggacatctacagcacagactactacagagtgggcggccgcaccatgctgcccatccgctggatgcctcctgagagcatcctgtacaggaagttcaccacagaaagtgatgtgtggagctttggagtggtgctgtgggagatcttcacctacggcaagcagccctggtaccagctgagcaacacagaggccatcgactgcatcacccagggccgggagctggagcggccccgggcctgccccccagaggtgtatgccatcatgaggggctgctggcagcgggagccccagcagaggcacagcatcaaggatgtgcacgcccggctgcaggccctggcccaggcccctcctgtgtacctggatgtgctgggctag

SEQ ID NO: 24885 - DNA, 2373 bp, Artificial Sequence
  derived and/or modified sequence
atgctgcggggcggccggcggggccagctgggctggcacagctgggccgccgggcctggttccctgcttgcttggctcattctcgcctcagcgggagcagctccttgccctgacgcgtgttgccctcatggttcctcaggtctcagatgtaccagagacggagctctagactccctgcatcacctgccaggcgctgaaaacctcaccgaactgtatattgagaatcagcaacatcttcagcacctggagctgcgcgacttgcgtgggctgggcgagctccgcaaccttactattgtcaaatctggcctgcggtttgtggctccagatgcttttcatttcaccccaaggctctccagactaaatctgtcttttaatgcactggagagtcttagctggaagaccgtccaaggactttctctgcaagagctggtcctgtccggaaaccctctgcattgctcatgtgccctgaggtggctccagcgatgggaagaagaaggccttggtggcgtcccagaacagaagttacagtgtcatggacagggccccctggctcacatgcctaacgcatcgtgtggggtaccaactctaaaggttcaagtccccaacgcttccgtcgacgtgggtgatgatgtgctgctgcgctgtcaggtggaagggcgcgggctcgagcaagccgggtggattctcacagaactggaacagtccgctactgttatgaagagcggaggcctgccatcactgggcctaactctggctaacgtgaccagcgacctaaataggaaaaacgtgacctgctgggctgagaatgacgtgggcagagccgaagtttccgttcaggtgaacgtgtccttccctgccagcgtgcaactgcacactgccgtagagatgcatcactggtgtatacccttctccgtggacggccagcccgcacccagtctgaggtggctattcaatgggtccgtgttgaacgagacatcctttatctttacagagtttctagagcctgccgccaacgaaaccgtgaggcacggctgcctgcgtctgaatcagccaacgcacgttaataatggcaactacacccttctggcagcgaaccctttcggtcaggcctccgccagtatcatggcagcatttatggacaatcctttcgagtttaaccctgaggatcccatccctgacacaaactccactagtggggacccagtagaaaaaaaggatgaaacacctttcggcgtttccgtcgctgtcggcctggccgtgtttgcgtgcctgtttctttccacgttgctactggtgcttaataagtgcggcaggcgtaataaattcgggattaacagacctgccgtcctggctcctgaagacgggctggccatgagcctccacttcatgactcttgggggcagctctctgtcccctaccgagggaaagggcagtgggttgcagggtcacattattgaaaatccccaatatttcagcgacgcgtgtgtgcaccacatcaaacgcagagacatcgtgctgaagtgggagttaggtgaaggggcttttggaaaggtatttcttgctgaatgtcacaatctactgccagaacaggataagatgctggtggcggtaaaagcactcaaggaggcctccgagtctgcgcgccaggatttccaacgcgaggccgagctgttaacaatgctgcaacatcagcatatcgtcagattttttggagtgtgtaccgagggcaggccactgcttatggtttttgagtatatgcgccacggggacctgaataggttcctgcggtctcacgggcctgatgcaaaactccttgccggcggcgaagacgtggcccccggaccgctcggtcttgggcagctcctcgctgtggcctcgcaagtggcagccggaatggtttacctcgccggcctacattttgttcacagagatctcgccacccgtaattgtctcgtgggccaaggcctcgtagtgaaaatcggagattttggaatgtcaagggacatctattccactgactactatagagtgggcggaaggaccatgctacctatccgatggatgccaccggagtctatcctatacaggaagtttaccacagagtctgatgtatggtcctttggagtcgtgctgtgggaaattttcacatatgggaaacagccctggtaccaactgagtaatacagaagccatcgattgcattacccaaggacgtgaactggaaagacctcgggcgtgcccacccgaggtgtacgcaattatgaggggatgctggcaaagagagcctcagcaaaggcacagtatcaaggacgttcatgccaggctgcaggcacttgctcaggcacctcccgtgtacctggacgttctgggatag

SEQ ID NO: 24886 - DNA, 2701 bp, Artificial Sequence
  derived and/or modified sequence
gccctttcctggcggctgggtctttaacaccgcccagcgcacatgtcgggggaggcctggcagctgcagctgggagcgcacagacggctgccccgcctgagcgaggcgggcgccgccgcgatgctgcgaggcggacggcgcgggcagcttggctggcacagctgggctgcggggccgggcagcctgctggcttggctgatactggcatctgcgggcgccgcaccctgccccgatgcctgctgcccccacggctcctcgggactgcgatgcacccgggatggggccctggatagcctccaccacctgcccggcgcagagaacctgactgagctctacatcgagaaccagcagcatctgcagcatctggagctccgtgatctgaggggcctgggggagctgagaaacctcaccatcgtgaagagtggtctccgtttcgtggcgccagatgccttccatttcactcctcggctcagtcgcctgaatctctccttcaacgctctggagtctctctcctggaaaactgtgcagggcctctccttacaggaactggtcctgtcggggaaccctctgcactgttcttgtgccctgcgctggctacagcgctgggaggaggagggactgggcggagtgcctgaacagaagctgcagtgtcatgggcaagggcccctggcccacatgcccaatgccagctgtggtgtgcccacgctgaaggtccaggtgcccaatgcctcggtggatgtgggggacgacgtgctgctgcggtgccaggtggaggggcggggcctggagcaggccggctggatcctcacagagctggagcagtcagccacggtgatgaaatctgggggtctgccatccctggggctgaccctggccaatgtcaccagtgacctcaacaggaagaacgtgacgtgctgggcagagaacgatgtgggccgggcagaggtctctgttcaggtcaacgtctccttcccggccagtgtgcagctgcacacggcggtggagatgcaccactggtgcatccccttctctgtggatgggcagccggcaccgtctctgcgctggctcttcaatggctccgtgctcaatgagaccagcttcatcttcactgagttcctggagccggcagccaatgagaccgtgcggcacgggtgtctgcgcctcaaccagcccacccacgtcaacaacggcaactacacgctgctggctgccaaccccttcggccaggcctccgcctccatcatggctgccttcatggacaaccctttcgagttcaaccccgaggaccccatccctgacactaacagcacatctggagacccggtggagaagaaggacgaaacaccttttggggtctcggtggctgtgggcctggccgtctttgcctgcctcttcctttctacgctgctccttgtgctcaacaaatgtggacggagaaacaagtttgggatcaaccgcccggctgtgctggctccagaggatgggctggccatgtccctgcatttcatgacattgggtggcagctccctgtcccccaccgagggcaaaggctctgggctccaaggccacatcatcgagaacccacaatacttcagtgatgcctgtgttcaccacatcaagcgccgggacatcgtgctcaagtgggagctgggggagggcgcctttgggaaggtcttccttgctgagtgccacaacctcctgcctgagcaggacaagatgctggtggctgtcaaggcactgaaggaggcgtccgagagtgctcggcaggacttccagcgtgaggctgagctgctcaccatgctgcagcaccagcacatcgtgcgcttcttcggcgtctgcaccgagggccgccccctgctcatggtctttgagtatatgcggcacggggacctcaaccgcttcctccgatcccatggacctgatgccaagctgctggctggtggggaggatgtggctccaggccccctgggtctggggcagctgctggccgtggctagccaggtcgctgcggggatggtgtacctggcgggtctgcattttgtgcaccgggacctggccacacgcaactgtctagtgggccagggactggtggtcaagattggtgattttggcatgagcagggatatctacagcaccgactattaccgtgtgggaggccgcaccatgctgcccattcgctggatgccgcccgagagcatcctgtaccgtaagttcaccaccgagagcgacgtgtggagcttcggcgtggtgctctgggagatcttcacctacggcaagcagccctggtaccagctctccaacacggaggcaatcgactgcatcacgcagggacgtgagttggagcggccacgtgcctgcccaccagaggtctacgccatcatgcggggctgctggcagcgggagccccagcaacgccacagcatcaaggatgtgcacgcccggctgcaagccctggcccaggcacctcctgtctacctggatgtcctgggctagggggccggcccaggggctgggagtggttagccggaatactggggcctgccctcagcatcccccatagctcccagcagccccagggtgatctcaaagtatctaattcaccctcagcatgtgggaagggacaggtgggggctgggagtagaggatgttcctgcttctctaggcaaggtcccgtcatagcaattatatttattatcccttg

SEQ ID NO: 24887 - DNA, 2373 bp, Artificial Sequence
  derived and/or modified sequence
atgctaagaggtggacggagaggccaattggggtggcactcttgggccgcaggccctggatctcttttggcatggcttatcctggcatcagccggagccgcaccatgtccagatgcctgctgtcctcacggctccagtggattgcggtgtaccagggacggggctctagacagtctgcatcacttgcctggagccgagaacctcacagaactctacattgagaaccagcagcatttacagcatttagaactcagggatctgcgcggtctcggtgagctccgtaacctcactattgtcaaaagtggcctcaggtttgtggcccctgacgccttccacttcacgccacggttgtcaagactaaacctgtccttcaatgccctggagtcacttagctggaaaaccgtccaggggctctcactgcaggaattagtgctgtctggcaatccattgcattgcagctgtgctcttcgatggcttcagcggtgggaagaggaggggctagggggtgttcccgagcagaaacttcagtgccacggccagggacctctcgctcacatgcctaacgcttcgtgcggcgtgcccactctgaaagtgcaggtcccgaacgctagtgtcgatgtcggagacgacgtgctgctgaggtgtcaggtagaaggcagaggactggagcaggctggatggatcctgaccgaattggaacagagcgccactgtgatgaagagcggcggactgcccagcctcggactgacgttagcaaacgtgacctcagacctcaatcgcaagaacgtgacctgctgggctgaaaacgatgtggggagggcagaagtgagtgttcaggtgaatgtctccttccccgcaagtgtgcagctccacacagcagtcgagatgcatcattggtgcattcccttctccgtcgacggccaacctgcccctagcctcagatggctgtttaatggttctgtactgaatgagacttctttcattttcactgagttcctggaaccggctgcgaacgaaactgttaggcatggctgtttaaggcttaaccagccaactcacgtgaataatggaaactacaccttgttagccgctaacccttttggacaggccagtgcatccattatggccgctttcatggataacccctttgagttcaatcccgaggatcccattccagacactaattcgactagcggagacccagtagagaaaaaggatgagacacccttcggggtgtctgtcgcagttggactagctgtgtttgcatgcctcttcctcagtaccctcttgctggtgcttaacaaatgcggaagacgcaataagttcggcatcaaccggccagccgtcttggctccagaggatggacttgccatgagtctgcattttatgacactaggcggttcatccctgtcccctaccgagggcaagggctccgggctccaaggccacattatagagaatccgcagtatttttcagatgcttgcgtccaccacatcaaacgtcgggacattgtcctcaagtgggagctcggtgagggggctttcggcaaggtattcctggccgagtgccataacctgttacccgagcaggacaaaatgctggtggcagtaaaggccctgaaagaggctagtgaaagtgcgcgtcaggacttccaacgcgaagccgagctcctgactatgctccagcaccagcatatcgtcagatttttcggtgtatgcaccgagggacgcccacttctgatggtgttcgaatacatgagacatggagatcttaaccggttcctgagatcacacggccctgacgctaagttgctagccggaggggaagatgtagctcctggtccccttggactgggtcaactgctggcagtagcgagccaagtggctgcgggaatggtctacctggcgggactgcatttcgtccatcgcgatctcgcaacaagaaattgtctggtggggcaggggctggtggtgaaaataggcgactttggaatgagccgcgatatctattccacagactactaccgcgttggtggcaggacgatgctgcctatcagatggatgcctccggagtctatcttgtataggaaattcacaaccgaaagcgacgtctggtcattcggggtggttctctgggaaatctttacttatggcaagcagccatggtaccagctcagtaacaccgaagctatagactgtatcactcaaggccgtgagctagagcgacctagagcttgtcctcccgaggtctacgccataatgaggggatgctggcagagggagcctcaacagcgtcacagcatcaaagatgtacatgcccgtttgcaagcactggcgcaggcccctcctgtgtatttggacgtcctagggtag

SEQ ID NO: 24888 - DNA, 2373 bp, Artificial Sequence
  derived and/or modified sequence
atgctgagaggcggcagaagaggccagctgggctggcacagctgggccgccggccccggcagcctgctggcctggctgatcctggccagcgccggcgccgccccctgccccgacgcctgctgcccccacggcagcagcggcctgagatgcaccagagacggcgccctggacagcctgcaccacctgcccggcgccgagaacctgaccgagctgtacatcgagaaccagcagcacctgcagcacctggagctgagagacctgagaggcctgggcgagctgagaaacctgaccatcgtgaagagcggcctgagattcgtggcccccgacgccttccacttcacccccagactgagcagactgaacctgagcttcaacgccctggagagcctgagctggaagaccgtgcagggcctgagcctgcaggagctggtgctgagcggcaaccccctgcactgcagctgcgccctgagatggctgcagagatgggaggaggagggcctgggcggcgtgcccgagcagaagctgcagtgccacggccagggccccctggcccacatgcccaacgccagctgcggcgtgcccaccctgaaggtgcaggtgcccaacgccagcgtggacgtgggcgacgacgtgctgctgagatgccaggtggagggcagaggcctggagcaggccggctggatcctgaccgagctggagcagagcgccaccgtgatgaagagcggcggcctgcccagcctgggcctgaccctggccaacgtgaccagcgacctgaacagaaagaacgtgacctgctgggccgagaacgacgtgggcagagccgaggtgagcgtgcaggtgaacgtgagcttccccgccagcgtgcagctgcacaccgccgtggagatgcaccactggtgcatccccttcagcgtggacggccagcccgcccccagcctgagatggctgttcaacggcagcgtgctgaacgagaccagcttcatcttcaccgagttcctggagcccgccgccaacgagaccgtgagacacggctgcctgagactgaaccagcccacccacgtgaacaacggcaactacaccctgctggccgccaaccccttcggccaggccagcgccagcatcatggccgccttcatggacaaccccttcgagttcaaccccgaggaccccatccccgacaccaacagcaccagcggcgaccccgtggagaagaaggacgagacccccttcggcgtgagcgtggccgtgggcctggccgtgttcgcctgcctgttcctgagcaccctgctgctggtgctgaacaagtgcggcagaagaaacaagttcggcatcaacagacccgccgtgctggcccccgaggacggcctggccatgagcctgcacttcatgaccctgggcggcagcagcctgagccccaccgagggcaagggcagcggcctgcagggccacatcatcgagaacccccagtacttcagcgacgcctgcgtgcaccacatcaagagaagagacatcgtgctgaagtgggagctgggcgagggcgccttcggcaaggtgttcctggccgagtgccacaacctgctgcccgagcaggacaagatgctggtggccgtgaaggccctgaaggaggccagcgagagcgccagacaggacttccagagagaggccgagctgctgaccatgctgcagcaccagcacatcgtgagattcttcggcgtgtgcaccgagggcagacccctgctgatggtgttcgagtacatgagacacggcgacctgaacagattcctgagaagccacggccccgacgccaagctgctggccggcggcgaggacgtggcccccggccccctgggcctgggccagctgctggccgtggccagccaggtggccgccggcatggtgtacctggccggcctgcacttcgtgcacagagacctggccaccagaaactgcctggtgggccagggcctggtggtgaagatcggcgacttcggcatgagcagagacatctacagcaccgactactacagagtgggcggcagaaccatgctgcccatcagatggatgccccccgagagcatcctgtacagaaagttcaccaccgagagcgacgtgtggagcttcggcgtggtgctgtgggagatcttcacctacggcaagcagccctggtaccagctgagcaacaccgaggccatcgactgcatcacccagggcagagagctggagagacccagagcctgcccccccgaggtgtacgccatcatgagaggctgctggcagagagagccccagcagagacacagcatcaaggacgtgcacgccagactgcaggccctggcccaggccccccccgtgtacctggacgtgctgggctag

SEQ ID NO: 24889 - protein, 831 aa, Artificial Sequence
  derived and/or modified sequence
MDVSLCPAKCSFWRIFLLGSVWLDYVGSVLACPANCVCSKTEINCRRPDDGNLFPLLEGQDSGNSNGNASINITDISRNITSIHIENWRSLHTLNAVDMELYTGLQKLTIKNSGLRSIQPRAFAKNPHLRYINLSSNRLTTLSWQLFQTLSLRELQLEQNFFNCSCDIRWMQLWQEQGEAKLNSQNLYCINADGSQLPLFRMNISQCDLPEISVSHVNLTVREGDNAVITCNGSGSPLPDVDWIVTGLQSINTHQTNLNWTNVHAINLTLVNVTSEDNGFTLTCIAENVVGMSNASVALTVYYPPRVVSLEEPELRLEHCIEFVVRGNPPPTLHWLHNGQPLRESKIIHVEYYQEGEISEGCLLFNKPTHYNNGNYTLIAKNPLGTANQTINGHFLKEPFPVDEVSPTPPITVTHKPEEDTFGVSIAVGLAAFACVLLVVLFVMINKYGRRSKFGMKGPVAVISGEEDSASPLHHINHGITTPSSLDAGPDTVVIGMTRIPVIENPQYFRQGHNCHKPDTYVQHIKRRDIVLKRELGEGAFGKVFLAECYNLSPTKDKMLVAVKALKDPTLAARKDFQREAELLTNLQHEHIVKFYGVCGDGDPLIMVFEYMKHGDLNKFLRAHGPDAMILVDGQPRQAKGELGLSQMLHIASQIASGMVYLASQHFVHRDLATRNCLVGANLLVKIGDFGMSRDVYSTDYYRLFNPSGNDFCIWCEVGGHTMLPIRWMPPESIMYRKFTTESDVWSFGVILWEIFTYGKQPWFQLSNTEVIECITQGRVLERPRVCPKEVYDVMLGCWQREPQQRLNIKEIYKILHALGKATPIYLDILG

SEQ ID NO: 24890 - protein, 839 aa, Artificial Sequence
  derived and/or modified sequence
MDVSLCPAKCSFWRIFLLGSVWLDYVGSVLACPANCVCSKTEINCRRPDDGNLFPLLEGQDSGNSNGNASINITDISRNITSIHIENWRSLHTLNAVDMELYTGLQKLTIKNSGLRSIQPRAFAKNPHLRYINLSSNRLTTLSWQLFQTLSLRELQLEQNFFNCSCDIRWMQLWQEQGEAKLNSQNLYCINADGSQLPLFRMNISQCDLPEISVSHVNLTVREGDNAVITCNGSGSPLPDVDWIVTGLQSINTHQTNLNWTNVHAINLTLVNVTSEDNGFTLTCIAENVVGMSNASVALTVYYPPRVVSLEEPELRLEHCIEFVVRGNPPPTLHWLHNGQPLRESKIIHVEYYQEGEISEGCLLFNKPTHYNNGNYTLIAKNPLGTANQTINGHFLKEPFPESTDNFILFDEVSPTPPITVTHKPEEDTFGVSIAVGLAAFACVLLVVLFVMINKYGRRSKFGMKGPVAVISGEEDSASPLHHINHGITTPSSLDAGPDTVVIGMTRIPVIENPQYFRQGHNCHKPDTYVQHIKRRDIVLKRELGEGAFGKVFLAECYNLSPTKDKMLVAVKALKDPTLAARKDFQREAELLTNLQHEHIVKFYGVCGDGDPLIMVFEYMKHGDLNKFLRAHGPDAMILVDGQPRQAKGELGLSQMLHIASQIASGMVYLASQHFVHRDLATRNCLVGANLLVKIGDFGMSRDVYSTDYYRLFNPSGNDFCIWCEVGGHTMLPIRWMPPESIMYRKFTTESDVWSFGVILWEIFTYGKQPWFQLSNTEVIECITQGRVLERPRVCPKEVYDVMLGCWQREPQQRLNIKEIYKILHALGKATPIYLDILG

SEQ ID NO: 24891 - DNA, 2496 bp, Artificial Sequence
  derived and/or modified sequence
atggacgtctctctctgtccagccaagtgcagcttctggcgtatattcctgctcgggtcggtgtggctggattacgtgggatccgtacttgcctgtccagctaattgtgtttgttccaaaactgaaatcaattgcagacgccccgacgatggaaatctatttcctctgctggagggccaggatagcggcaacagtaacgggaacgctagcatcaacattaccgatatttctagaaatataacttcaattcatattgagaattggcggtctctccacacacttaatgctgtggacatggagctctacacaggtctccaaaaactgactattaagaacagcggcctgaggagcattcaaccccgggcctttgccaaaaacccccaccttagatacatcaacttgagctccaatagacttactaccctgagctggcaactgttccagacgctcagtctccgggaactccaactggagcagaatttcttcaactgttcttgcgacattcgatggatgcagctgtggcaggagcagggagaggcaaagcttaacagccagaatctgtactgcattaacgccgatggttctcagctcccgctgtttaggatgaacattagccagtgcgatttgcccgagatctctgtgtctcatgtgaatctgactgtgcgcgaaggcgataatgccgtcataacctgtaatggtagtggcagccctttaccggatgtggactggatcgtgactggtctccagagtataaatactcatcaaactaacctgaactggaccaacgtgcatgccatcaacttaacactcgtcaacgtgacttctgaagacaacggttttaccctgacttgcatcgcagaaaatgtggtgggtatgagtaatgcatctgtggctcttaccgtatactatccacccagagtggtcagcctggaggagcccgaactccgtctggagcactgcattgagttcgtggtcaggggtaacccacctcctactttgcactggctgcacaacggccagcccctgcgcgaaagcaaaatcatacatgttgaatactatcaggaaggcgagatttctgagggatgcctactgttcaataagcctacacactataataacgggaattatacattaattgctaaaaaccccctgggcaccgccaaccagacaatcaatgggcacttcctcaaggagccttttcctgtggatgaggtgagcccaacacccccaatcactgtgacacacaaaccagaggaagacactttcggtgttagcatcgcggtgggattggcagcctttgcctgtgtgctgctggtggttctgttcgtgatgatcaataagtatggccggcgctcaaagtttggaatgaagggccccgtggccgttatatcgggcgaagaggatagcgcctcaccattacatcatatcaatcacgggataactacaccctcttcattggacgccggtccagatacagtggtcatcgggatgacacggattcccgtcattgagaacccccaatattttagacaggggcataactgtcacaagcccgacacatacgtgcagcacataaaacggcgggacatcgtgcttaaacgcgaacttggggaaggtgccttcggcaaggtgtttctagccgaatgttataacctcagtcctaccaaggataaaatgctggtcgctgttaaggccttgaaggaccctactctggctgcccggaaagatttccagcgtgaagcagaactgcttaccaacctacagcacgagcatatcgtgaaattctatggtgtgtgcggcgacggagaccccctcatcatggtcttcgaatacatgaagcacggagatctcaacaagtttctgagagcacacggcccagacgcgatgatcctggtggacgggcagccacgccaagccaagggggagctgggtctctctcaaatgctccacatagcctcacagatcgcctcggggatggtgtacttggccagtcagcattttgtccatcgcgatctagccaccaggaactgcctcgttggagccaatttgctcgtgaaaatcggcgacttcggcatgagcagagatgtctacagcaccgattactatcgtctgttcaaccctagcggaaacgacttttgcatctggtgtgaggttggcggacataccatgcttccaattcgttggatgccgccagagagcattatgtataggaagttcactacggagagcgacgtctggtccttcggtgtgattctttgggaaatcttcacctacggcaaacaaccttggtttcagctgtccaacaccgaagttatagaatgcattacacagggtcgcgtgcttgaacgtcctagggtgtgtcccaaagaggtgtacgacgttatgctcgggtgctggcagcgggagcctcagcagagactcaatattaaggagatttacaaaattttacacgcacttgggaaagctacccccatctatctagatattctggggtag

SEQ ID NO: 24892 - DNA, 2520 bp, Artificial Sequence
  derived and/or modified sequence
atggatgtttcattatgtcccgccaagtgttctttttggcgcatcttcctgctgggatccgtttggctcgattacgtgggctccgttctcgcatgcccggctaactgcgtctgtagtaaaacggaaattaattgtcgccggcccgacgatggaaatctctttccactactcgagggtcaggactcaggtaactctaatggcaatgcctcgattaacatcacagacatctctcgtaacataaccagtattcacatagagaattggcggtctctgcatacattaaacgctgtggacatggaactgtatactggccttcagaaactgactatcaagaattctggactcagatccattcagccaagagcatttgcaaagaatccccatctccggtacatcaacctttcctctaaccgtctgacaacgctgtcctggcagctgtttcagacgctatcccttcgcgaactgcagctggaacagaacttctttaattgttcctgcgacatccggtggatgcagctttggcaggagcagggcgaagctaaactgaactcccagaacctttattgtattaatgcagacggttcacagctcccattgtttcgaatgaatatctcccagtgtgatctgccagaaatttctgtcagtcatgtgaacctgacagtgcgggagggggataatgccgttatcacttgtaacggctccggtagcccactgccggacgtcgattggatcgtcacgggtctgcagagtattaacacccaccagaccaatcttaattggacaaacgtgcacgccatcaacctgacactggtgaacgtcacctcggaggataatggcttcacgctgacttgcatagctgagaacgtcgtgggaatgagcaacgcctccgtggcgcttaccgtctattaccccccacgcgttgtgtctctcgaagagcctgaacttcggctggaacattgtatagagttcgtggtcagggggaatccgccccctaccctgcactggcttcacaacggccagcctctgcgagagtccaaaataatccacgtggaatactaccaggagggcgagatctcagaggggtgcctgctgttcaacaaaccaacgcactacaataatgggaactatacacttatcgccaagaatcctctcggaaccgctaaccaaaccattaatggccatttcctgaaagaaccatttcctgagagtaccgacaattttatccttttcgacgaagttagcccaacccccccgatcacagtgacacacaagcctgaggaggatacttttggcgtatctattgccgtcgggctcgccgcattcgcatgcgtgctcctggtcgtgctgttcgtaatgattaataagtatggacggaggagtaaattcggcatgaaggggccggtggcagtcattagcggagaagaggattctgcttcacccctccatcatattaatcacgggatcaccactccgtcttcattggacgccggacctgataccgtggttattgggatgacaagaattcctgtaattgaaaatccacagtacttccgacagggccacaactgtcacaagccagacacttacgttcagcacatcaaaaggcgggacatcgtgctgaagagggagctgggagaaggggctttcgggaaggtgtttctggctgagtgttacaatctttctccaactaaggataaaatgttggtggctgtgaaagccctgaaggaccctactttggctgcccgcaaggattttcagcgcgaggcagagctgctgaccaaccttcaacatgagcatatagtaaaattttacggggtttgtggagacggcgatcctctgatcatggtcttcgagtatatgaaacacggggatctgaataaattcttacgtgctcacggccccgacgcgatgatcctggtcgatgggcagccacggcaagccaagggagagctcgggctgagccaaatgcttcatatcgctagccagatcgcctccggcatggtctatcttgcctcacaacactttgttcaccgcgacctagctacccgcaactgcctggttggcgccaatctgttggtcaagatcggtgactttgggatgtcacgtgatgtgtacagtacggattactaccgactgtttaacccgtccggaaacgacttctgtatttggtgcgaagtcgggggacacactatgctgccaatccggtggatgccacccgagtctattatgtaccggaagttcaccacggaatctgatgtttggtccttcggagtgattctgtgggagatatttacctatggcaaacagccttggttccagctgtccaatactgaggttatcgaatgtataacccaggggcgagtccttgagcggccacgagtctgcccaaaggaggtgtacgatgttatgctggggtgctggcaaagagaaccccagcagcgcctgaacattaaggagatttacaaaattttacatgccttaggaaaggccactccgatttacctggatattttggggtag

SEQ ID NO: 24893 - DNA, 2496 bp, Artificial Sequence
  derived and/or modified sequence
atggatgtgtccctgtgcccagccaagtgcagcttctggaggatcttcctgctgggctctgtgtggctggactatgtgggctctgtgctggcctgcccagccaactgtgtgtgcagcaagacagagatcaactgccggcggccagatgatggcaacctcttccccctgctggagggccaggacagcggcaacagcaatggaaatgccagcatcaacatcacagacatcagcaggaacatcaccagcatccacatcgagaactggaggagcctgcacaccctgaatgctgtggacatggagctgtacacaggcctgcagaagctgaccatcaagaacagcggcctgcggagcatccagccccgggcctttgccaagaacccccacctgcgctacatcaacctgagcagcaaccggctgaccaccctgtcctggcagctgttccagaccctgagcctgcgggagctgcagctggagcagaacttcttcaactgcagctgtgacatccgctggatgcagctgtggcaggagcagggcgaggccaagctgaacagccagaacctgtactgcatcaatgctgatggcagccagctgcccctcttcaggatgaacatcagccagtgtgacctgcctgagatctctgtgagccacgtgaacctgactgtgcgggagggggacaatgctgtgatcacctgcaatggcagcggcagccccctgcctgatgtggactggatcgtgacaggcctgcagagcatcaacacccaccagaccaacctgaactggaccaacgtgcacgccatcaacctgaccctggtgaatgtgaccagcgaggacaatggcttcaccctgacctgcatcgcagaaaatgtggtgggcatgagcaatgcctctgtggccctgactgtgtactacccaccccgggtggtgtccctggaggagcctgagctgcggctggagcactgcattgaatttgtggtgcggggcaaccccccacccaccctgcactggctgcacaacggccagcccctgcgggagagcaagatcatccacgtggagtactaccaggagggggagatcagcgagggctgcctgctcttcaacaagcccacccactacaacaatggaaactacaccctgattgccaagaaccccctgggcacagccaaccagaccatcaatggccacttcctgaaggagcccttccctgtggatgaggtgagccccaccccacccatcaccgtgacccacaagccagaggaggacaccttcggcgtgtccattgctgtgggcctggccgcctttgcctgtgtgctgctggtggtgctgtttgtgatgatcaacaagtatggccgccgcagcaagtttggcatgaagggccctgtggccgtcatcagcggggaggaggacagcgccagccccctgcaccacatcaaccacggcatcaccacccccagcagcctggatgctggccctgacacagtggtgattggcatgacccgcatccctgtgattgagaacccccagtacttccggcagggccacaactgccacaagccagacacctacgtgcagcacatcaagagaagagacatcgtgctgaagcgggagctgggggagggcgccttcggcaaggtgttcctggccgagtgctacaacctgagccccaccaaggacaagatgctggtggccgtgaaggccctgaaggaccccaccctggccgccaggaaggacttccagcgggaggccgagctgctgaccaacctgcagcacgagcacatcgtgaagttctacggcgtgtgtggagatggagaccccctcatcatggtgtttgagtacatgaagcacggggacctgaacaagttcctgcgggcccacggcccagatgccatgatcctggtggatggccagccccggcaggccaagggggagctgggcctgagccagatgctgcacatcgccagccagatcgccagcggcatggtgtacctggccagccagcactttgtgcaccgggacctggccaccaggaactgcctggtgggcgccaacctgctggtgaagattggagactttggcatgagcagagatgtgtacagcacagactactaccgcctcttcaaccccagcggaaatgacttctgcatctggtgtgaggtgggcggccacaccatgctgcccatccgctggatgcctcctgagagcatcatgtacaggaagttcaccacagaaagtgatgtgtggagctttggagtcatcctgtgggagatcttcacctacggcaagcagccctggttccagctgagcaacacagaggtgattgagtgcatcacccagggccgggtgctggagcggccccgggtgtgccccaaggaggtgtatgatgtgatgctgggctgctggcagcgggagccccagcagaggctgaacatcaaggagatctacaagatcctgcacgccctgggcaaggccacccccatctacctggacatcctgggctag

SEQ ID NO: 24894 - DNA, 2520 bp, Artificial Sequence
  derived and/or modified sequence
atggatgtgtccctgtgcccagccaagtgcagcttctggaggatcttcctgctgggctctgtgtggctggactatgtgggctctgtgctggcctgcccagccaactgtgtgtgcagcaagacagagatcaactgccggcggccagatgatggcaacctcttccccctgctggagggccaggacagcggcaacagcaatggaaatgccagcatcaacatcacagacatcagcaggaacatcaccagcatccacatcgagaactggaggagcctgcacaccctgaatgctgtggacatggagctgtacacaggcctgcagaagctgaccatcaagaacagcggcctgcggagcatccagccccgggcctttgccaagaacccccacctgcgctacatcaacctgagcagcaaccggctgaccaccctgtcctggcagctgttccagaccctgagcctgcgggagctgcagctggagcagaacttcttcaactgcagctgtgacatccgctggatgcagctgtggcaggagcagggcgaggccaagctgaacagccagaacctgtactgcatcaatgctgatggcagccagctgcccctcttcaggatgaacatcagccagtgtgacctgcctgagatctctgtgagccacgtgaacctgactgtgcgggagggggacaatgctgtgatcacctgcaatggcagcggcagccccctgcctgatgtggactggatcgtgacaggcctgcagagcatcaacacccaccagaccaacctgaactggaccaacgtgcacgccatcaacctgaccctggtgaatgtgaccagcgaggacaatggcttcaccctgacctgcatcgcagaaaatgtggtgggcatgagcaatgcctctgtggccctgactgtgtactacccaccccgggtggtgtccctggaggagcctgagctgcggctggagcactgcattgaatttgtggtgcggggcaaccccccacccaccctgcactggctgcacaacggccagcccctgcgggagagcaagatcatccacgtggagtactaccaggagggggagatcagcgagggctgcctgctcttcaacaagcccacccactacaacaatggaaactacaccctgattgccaagaaccccctgggcacagccaaccagaccatcaatggccacttcctgaaggagcccttccctgagagcacagacaacttcatcctgtttgatgaggtgagccccaccccacccatcaccgtgacccacaagccagaggaggacaccttcggcgtgtccattgctgtgggcctggccgcctttgcctgtgtgctgctggtggtgctgtttgtgatgatcaacaagtatggccgccgcagcaagtttggcatgaagggccctgtggccgtcatcagcggggaggaggacagcgccagccccctgcaccacatcaaccacggcatcaccacccccagcagcctggatgctggccctgacacagtggtgattggcatgacccgcatccctgtgattgagaacccccagtacttccggcagggccacaactgccacaagccagacacctacgtgcagcacatcaagagaagagacatcgtgctgaagcgggagctgggggagggcgccttcggcaaggtgttcctggccgagtgctacaacctgagccccaccaaggacaagatgctggtggccgtgaaggccctgaaggaccccaccctggccgccaggaaggacttccagcgggaggccgagctgctgaccaacctgcagcacgagcacatcgtgaagttctacggcgtgtgtggagatggagaccccctcatcatggtgtttgagtacatgaagcacggggacctgaacaagttcctgcgggcccacggcccagatgccatgatcctggtggatggccagccccggcaggccaagggggagctgggcctgagccagatgctgcacatcgccagccagatcgccagcggcatggtgtacctggccagccagcactttgtgcaccgggacctggccaccaggaactgcctggtgggcgccaacctgctggtgaagattggagactttggcatgagcagagatgtgtacagcacagactactaccgcctcttcaaccccagcggaaatgacttctgcatctggtgtgaggtgggcggccacaccatgctgcccatccgctggatgcctcctgagagcatcatgtacaggaagttcaccacagaaagtgatgtgtggagctttggagtcatcctgtgggagatcttcacctacggcaagcagccctggttccagctgagcaacacagaggtgattgagtgcatcacccagggccgggtgctggagcggccccgggtgtgccccaaggaggtgtatgatgtgatgctgggctgctggcagcgggagccccagcagaggctgaacatcaaggagatctacaagatcctgcacgccctgggcaaggccacccccatctacctggacatcctgggctag

SEQ ID NO: 24895 - DNA, 2496 bp, Artificial Sequence
  derived and/or modified sequence
atggacgtgagcctgtgccccgccaagtgcagcttctggcggatctttctgctgggaagtgtgtggctggactacgtgggatcagtgctcgcatgccctgctaactgcgtgtgctctaagacagagatcaattgccgaaggcctgacgatgggaacttgtttccgctcttagagggtcaagactctggcaactccaatggaaacgcgtcaatcaatataaccgatatttcgcgtaacattaccagtatccacatcgagaactggaggagcctgcacacgctcaatgccgtggacatggaactgtacaccggtttacaaaagctaactattaagaattctggtctgagatctattcagcctcgggcgttcgcaaagaatcctcatctcaggtacatcaatttatcctcaaatcgtctcaccactcttagctggcagttgttccagacactgtcacttagagagctgcagctggagcagaacttcttcaactgtagctgcgatatccggtggatgcaactctggcaagagcagggggaggcaaaattgaactcacagaacctgtattgcattaatgccgacggctcacagttgcccctgttcagaatgaacatatcccagtgcgacttacctgaaatctccgtgagtcatgtcaacctgaccgtaagagaaggagacaatgcagttataacatgcaacggctcaggctctcctctcccagacgtggactggattgtcacagggctacagagtatcaacactcaccaaactaacttgaattggacaaacgttcacgcaataaacctgacccttgtaaacgtgacgagtgaggataatggatttaccctcacatgtattgcagagaacgttgtcggcatgtctaacgcgagcgttgccctgacggtatactatcctccgcgggtcgtgagcctcgaggaacctgaactgcgcctcgagcactgcatcgagtttgtagtgagggggaaccccccccccacacttcactggttacacaatggtcaacccttgcgcgagtccaaaatcattcacgtagagtactaccaggagggggagatctccgaaggttgtctgctcttcaataaacccacccactataacaacggaaattataccctaattgccaaaaaccccttaggaacagcgaaccagactattaatggacattttctgaaagagccttttccagttgacgaggtgtctcccacaccccccatcacagtcacccacaagcctgaggaggacactttcggcgtgtccattgccgtgggactggccgcattcgcttgcgtgctattagtcgttctattcgtcatgatcaataagtacggaagacggtccaaatttggaatgaaaggacccgtggcagtgatatcgggggaggaagattctgcctctccgttacatcacatcaatcacgggattactacaccctcatccctcgatgccggacccgacaccgtggtcatcggtatgactcgaattcctgtaatcgaaaatccacaatatttccgacagggtcataactgtcataagcccgacacctatgtccagcacatcaaacgacgggatatcgtactgaagagagagttgggggaaggagcattcggcaaggtctttctggctgagtgttataatctgtctccaaccaaggacaagatgctcgtagccgtgaaagcactgaaggatccaacactcgccgccaggaaggattttcaaagagaagcggaactgctcacaaatctgcagcacgagcatatagtcaaattttacggagtctgcggggacggggaccccttaattatggtgtttgagtatatgaagcatggagacttgaacaagtttctgcgcgctcacggccctgacgctatgattctcgttgatggccagccacgccaggcgaagggagagcttggcctgagtcagatgctgcatatagcatctcaaatagcatccggtatggtatacttagccagtcaacactttgtgcatagggacctggcaacaaggaactgtcttgtgggcgccaatctactagtgaaaataggagacttcggtatgagtcgcgacgtttactctacagattactatcgtctatttaatccctcaggaaacgatttctgcatttggtgcgaagttggcggacacactatgctccctattcgatggatgccaccagagtcaatcatgtataggaagttcacaactgaaagtgacgtctggtctttcggggttattctctgggagatcttcacttacggcaaacagccatggttccagctctcgaacacagaagtgatcgaatgtattactcagggccgcgtgcttgaaagaccacgagtgtgccctaaggaggtttatgatgttatgttaggatgctggcagcgcgagccacagcagcgactgaacatcaaagaaatctacaaaattctccacgccctgggaaaggctacacccatctatttggatattctggggtag

SEQ ID NO: 24896 - DNA, 2520 bp, Artificial Sequence
  derived and/or modified sequence
atggacgtgagcctgtgccccgccaagtgcagcttctggcggatctttctgcttggctcggtgtggttggattatgtcggcagcgttctagcatgcccagcaaattgcgtttgttctaagactgaaatcaactgccggaggcccgacgacgggaatttattccctctactcgagggccaagacagcggcaacagcaacggtaatgcttctataaacataacagatatttcacgtaatatcacttccattcacatcgagaactggaggtcactccatacactcaatgctgttgacatggagttgtacacgggtttgcagaaattgaccattaagaattccgggctgaggagcatacagccaagggcctttgctaaaaatccccacttacgctacatcaacctgtcgtccaataggctgaccacactgagttggcaactatttcaaactctttcgcttcgggagctgcaactggaacaaaacttcttcaactgttcctgtgacattcggtggatgcagctgtggcaagaacagggcgaggctaaactgaacagccagaacctgtactgcatcaatgctgacggatctcagctgcccctgttccgcatgaacattagccaatgcgacctgccagaaattagcgtgtcccacgtgaacctaacagtcagagaaggcgataatgccgtaattacctgcaatggtagtgggtccccactgccagacgtggattggattgtcaccggactgcaaagcattaacacacaccagactaacctgaattggaccaacgtacacgctattaatttgacgttggtcaatgtgacttcggaggacaatggtttcacgctgacgtgcatagccgagaatgtagtgggaatgagtaacgcctcggtggctcttaccgtttactaccccccacgcgtggtgagcttggaagaaccagagctcaggctggagcactgcatcgagtttgttgtgagaggaaacccaccaccaaccctgcattggctccataatgggcagccgctgcgcgaatccaagatcatccacgtggagtattaccaggagggtgagatctctgaagggtgcctcctgtttaataagccaacacattataataacggtaactatacgctgattgctaagaacccgcttgggaccgctaaccagaccatcaacggacattttcttaaggagcctttccctgaaagcactgataatttcatcctatttgacgaggttagtcctaccccaccaataaccgtcacacacaagcccgaagaggacactttcggcgtgtccatcgcagtcggactagcagctttcgcctgcgtcctcttggtggtgctgtttgttatgatcaacaaatacggccgccgctctaaattcggtatgaaggggccagtagccgtcatatccggcgaggaagactctgcatccccattgcaccatattaaccacgggatcaccacgccgtcctctttggacgccggccccgatacagtggtcataggaatgacgagaatccctgtgatcgagaacccacagtacttccgacagggacacaactgtcacaagccggacacctatgtccagcatatcaagcggagggatattgtgctgaagagggaactgggtgagggcgccttcggcaaagtatttctggcagagtgctacaatctgtcccctactaaagacaagatgctggtggctgtgaaggcccttaaagacccaactctcgctgctcgaaaggacttccaaagagaggccgagctgttaacgaaccttcagcacgagcacatcgtcaagttttacggcgtgtgcggtgacggggatcccctcattatggtgttcgaatatatgaaacacggcgatctcaataaatttttgcgcgcccatggaccggacgcaatgatccttgttgacggccagcccaggcaagccaaaggcgagctggggctgtctcagatgctacacatcgcctctcagatagcctcaggtatggtttacctggcttcacagcatttcgtccaccgagacctggcaactaggaattgcctcgtcggggctaatctcctcgtcaagatcggggactttggcatgagcagagatgtttactccactgactactatagactgtttaatccttctgggaacgatttctgtatctggtgcgaggttggggggcacactatgttgcctatcagatggatgccccccgagtctatcatgtatagaaaatttactacggaatccgacgtctggtctttcggtgtaattctttgggaaatctttacgtacggcaagcagccatggttccagttgagtaatactgaagttattgaatgtatcacacaaggtagagttctggagagaccacgggtctgtccaaaagaagtctacgacgtgatgttgggctgttggcagcgcgagccgcaacaacgcttaaacataaaagagatttataaaatactgcatgcactcggtaaggccacacccatatacctggacatactgggttag

SEQ ID NO: 24897 - DNA, 2088 bp, Artificial Sequence
  derived and/or modified sequence
gatcgccgagccggccaccatgcccggcagaccgcgccactaggcgctcctcgcggctcccacccggcggcggcggcggcggcggcggcgtccgcgatggtttcagacgctgaaggattttgcatctgatcgctcggcgtttcaaagaagcagcgatcggagatggatgtctctctttgcccagccaagtgtagtttctggcggattttcttgctgggaagcgtctggctggactatgtgggctccgtgctggcttgccctgcaaattgtgtctgcagcaagactgagatcaattgccggcggccggacgatgggaacctcttccccctcctggaagggcaggattcagggaacagcaatgggaacgccagtatcaacatcacggacatctcaaggaatatcacttccatacacatagagaactggcgcagtcttcacacgctcaacgccgtggacatggagctctacaccggacttcaaaagctgaccatcaagaactcaggacttcggagcattcagcccagagcctttgccaagaacccccatttgcgttatataaacctgtcaagtaaccggctcaccacactctcgtggcagctcttccagacgctgagtcttcgggaattgcagttggagcagaactttttcaactgcagctgtgacatccgctggatgcagctctggcaggagcagggggaggccaagctcaacagccagaacctctactgcatcaacgctgatggctcccagcttcctctcttccgcatgaacatcagtcagtgtgaccttcctgagatcagcgtgagccacgtcaacctgaccgtacgagagggtgacaacgctgttatcacttgcaatggctctggatcaccccttcctgatgtggactggatagtcactgggctgcagtccatcaacactcaccagaccaatctgaactggaccaatgttcatgccatcaacttgacgctggtgaatgtgacgagtgaggacaatggcttcaccctgacgtgcattgcagagaacgtggtgggcatgagcaatgccagtgttgccctcactgtctactatcccccacgtgtggtgagcctggaggagcctgagctgcgcctggagcactgcatcgagtttgtggtgcgtggcaaccccccaccaacgctgcactggctgcacaatgggcagcctctgcgggagtccaagatcatccatgtggaatactaccaagagggagagatttccgagggctgcctgctcttcaacaagcccacccactacaacaatggcaactataccctcattgccaaaaacccactgggcacagccaaccagaccatcaatggccacttcctcaaggagccctttccagagagcacggataactttatcttgtttgacgaagtgagtcccacacctcctatcactgtgacccacaaaccagaagaagacacttttggggtatccatagcagttggacttgctgcttttgcctgtgtcctgttggtggttctcttcgtcatgatcaacaaatatggtcgacggtccaaatttggaatgaagggtcccgtggctgtcatcagtggtgaggaggactcagccagcccactgcaccacatcaaccacggcatcaccacgccctcgtcactggatgccgggcccgacactgtggtcattggcatgactcgcatccctgtcattgagaacccccagtacttccgtcagggacacaactgccacaagccggacacgtatgtgcagcacattaagaggagagacatcgtgctgaagcgagaactgggtgagggagcctttggaaaggtcttcctggccgagtgctacaacctcagcccgaccaaggacaagatgcttgtggctgtgaaggccctgaaggatcccaccctggctgcccggaaggatttccagagggaggccgagctgctcaccaacctgcagcatgagcacattgtcaagttctatggagtgtgcggcgatggggaccccctcatcatggtctttgaatacatgaagcatggagacctgaataagttcctcagcagtatctccagccccaagagccaccagcagggttaa

SEQ ID NO: 24898 - DNA, 2802 bp, Artificial Sequence
  derived and/or modified sequence
gatcgccgagccggccaccatgcccggcagaccgcgccactaggcgctcctcgcggctcccacccggcggcggcggcggcggcggcggcgtccgcgatggtttcagacgctgaaggattttgcatctgatcgctcggcgtttcaaagaagcagcgatcggagatggatgtctctctttgcccagccaagtgtagtttctggcggattttcttgctgggaagcgtctggctggactatgtgggctccgtgctggcttgccctgcaaattgtgtctgcagcaagactgagatcaattgccggcggccggacgatgggaacctcttccccctcctggaagggcaggattcagggaacagcaatgggaacgccagtatcaacatcacggacatctcaaggaatatcacttccatacacatagagaactggcgcagtcttcacacgctcaacgccgtggacatggagctctacaccggacttcaaaagctgaccatcaagaactcaggacttcggagcattcagcccagagcctttgccaagaacccccatttgcgttatataaacctgtcaagtaaccggctcaccacactctcgtggcagctcttccagacgctgagtcttcgggaattgcagttggagcagaactttttcaactgcagctgtgacatccgctggatgcagctctggcaggagcagggggaggccaagctcaacagccagaacctctactgcatcaacgctgatggctcccagcttcctctcttccgcatgaacatcagtcagtgtgaccttcctgagatcagcgtgagccacgtcaacctgaccgtacgagagggtgacaacgctgttatcacttgcaatggctctggatcaccccttcctgatgtggactggatagtcactgggctgcagtccatcaacactcaccagaccaatctgaactggaccaatgttcatgccatcaacttgacgctggtgaatgtgacgagtgaggacaatggcttcaccctgacgtgcattgcagagaacgtggtgggcatgagcaatgccagtgttgccctcactgtctactatcccccacgtgtggtgagcctggaggagcctgagctgcgcctggagcactgcatcgagtttgtggtgcgtggcaaccccccaccaacgctgcactggctgcacaatgggcagcctctgcgggagtccaagatcatccatgtggaatactaccaagagggagagatttccgagggctgcctgctcttcaacaagcccacccactacaacaatggcaactataccctcattgccaaaaacccactgggcacagccaaccagaccatcaatggccacttcctcaaggagccctttccagttgacgaagtgagtcccacacctcctatcactgtgacccacaaaccagaagaagacacttttggggtatccatagcagttggacttgctgcttttgcctgtgtcctgttggtggttctcttcgtcatgatcaacaaatatggtcgacggtccaaatttggaatgaagggtcccgtggctgtcatcagtggtgaggaggactcagccagcccactgcaccacatcaaccacggcatcaccacgccctcgtcactggatgccgggcccgacactgtggtcattggcatgactcgcatccctgtcattgagaacccccagtacttccgtcagggacacaactgccacaagccggacacgtatgtgcagcacattaagaggagagacatcgtgctgaagcgagaactgggtgagggagcctttggaaaggtcttcctggccgagtgctacaacctcagcccgaccaaggacaagatgcttgtggctgtgaaggccctgaaggatcccaccctggctgcccggaaggatttccagagggaggccgagctgctcaccaacctgcagcatgagcacattgtcaagttctatggagtgtgcggcgatggggaccccctcatcatggtctttgaatacatgaagcatggagacctgaataagttcctcagggcccatgggccagatgcaatgatccttgtggatggacagccacgccaggccaagggtgagctggggctctcccaaatgctccacattgccagtcagatcgcctcgggtatggtgtacctggcctcccagcactttgtgcaccgagacctggccaccaggaactgcctggttggagcgaatctgctagtgaagattggggacttcggcatgtccagagatgtctacagcacggattattacaggctctttaatccatctggaaatgatttttgtatatggtgtgaggtgggaggacacaccatgctccccattcgctggatgcctcctgaaagcatcatgtaccggaagttcactacagagagtgatgtatggagcttcggggtgatcctctgggagatcttcacctatggaaagcagccatggttccaactctcaaacacggaggtcattgagtgcattacccaaggtcgtgttttggagcggccccgagtctgccccaaagaggtgtacgatgtcatgctggggtgctggcagagggaaccacagcagcggttgaacatcaaggagatctacaaaatcctccatgctttggggaaggccaccccaatctacctggacattcttggctagtggtggctggtggtcatgaattcatactctgttgcctcctctctccctgcctcacatctcccttccacctcacaactccttccatccttgactgaagcgaacatcttcatataaactcaagtgcctgctacacatacaacactg

SEQ ID NO: 24899 - DNA, 2826 bp, Artificial Sequence
  derived and/or modified sequence
gatcgccgagccggccaccatgcccggcagaccgcgccactaggcgctcctcgcggctcccacccggcggcggcggcggcggcggcggcgtccgcgatggtttcagacgctgaaggattttgcatctgatcgctcggcgtttcaaagaagcagcgatcggagatggatgtctctctttgcccagccaagtgtagtttctggcggattttcttgctgggaagcgtctggctggactatgtgggctccgtgctggcttgccctgcaaattgtgtctgcagcaagactgagatcaattgccggcggccggacgatgggaacctcttccccctcctggaagggcaggattcagggaacagcaatgggaacgccagtatcaacatcacggacatctcaaggaatatcacttccatacacatagagaactggcgcagtcttcacacgctcaacgccgtggacatggagctctacaccggacttcaaaagctgaccatcaagaactcaggacttcggagcattcagcccagagcctttgccaagaacccccatttgcgttatataaacctgtcaagtaaccggctcaccacactctcgtggcagctcttccagacgctgagtcttcgggaattgcagttggagcagaactttttcaactgcagctgtgacatccgctggatgcagctctggcaggagcagggggaggccaagctcaacagccagaacctctactgcatcaacgctgatggctcccagcttcctctcttccgcatgaacatcagtcagtgtgaccttcctgagatcagcgtgagccacgtcaacctgaccgtacgagagggtgacaacgctgttatcacttgcaatggctctggatcaccccttcctgatgtggactggatagtcactgggctgcagtccatcaacactcaccagaccaatctgaactggaccaatgttcatgccatcaacttgacgctggtgaatgtgacgagtgaggacaatggcttcaccctgacgtgcattgcagagaacgtggtgggcatgagcaatgccagtgttgccctcactgtctactatcccccacgtgtggtgagcctggaggagcctgagctgcgcctggagcactgcatcgagtttgtggtgcgtggcaaccccccaccaacgctgcactggctgcacaatgggcagcctctgcgggagtccaagatcatccatgtggaatactaccaagagggagagatttccgagggctgcctgctcttcaacaagcccacccactacaacaatggcaactataccctcattgccaaaaacccactgggcacagccaaccagaccatcaatggccacttcctcaaggagccctttccagagagcacggataactttatcttgtttgacgaagtgagtcccacacctcctatcactgtgacccacaaaccagaagaagacacttttggggtatccatagcagttggacttgctgcttttgcctgtgtcctgttggtggttctcttcgtcatgatcaacaaatatggtcgacggtccaaatttggaatgaagggtcccgtggctgtcatcagtggtgaggaggactcagccagcccactgcaccacatcaaccacggcatcaccacgccctcgtcactggatgccgggcccgacactgtggtcattggcatgactcgcatccctgtcattgagaacccccagtacttccgtcagggacacaactgccacaagccggacacgtatgtgcagcacattaagaggagagacatcgtgctgaagcgagaactgggtgagggagcctttggaaaggtcttcctggccgagtgctacaacctcagcccgaccaaggacaagatgcttgtggctgtgaaggccctgaaggatcccaccctggctgcccggaaggatttccagagggaggccgagctgctcaccaacctgcagcatgagcacattgtcaagttctatggagtgtgcggcgatggggaccccctcatcatggtctttgaatacatgaagcatggagacctgaataagttcctcagggcccatgggccagatgcaatgatccttgtggatggacagccacgccaggccaagggtgagctggggctctcccaaatgctccacattgccagtcagatcgcctcgggtatggtgtacctggcctcccagcactttgtgcaccgagacctggccaccaggaactgcctggttggagcgaatctgctagtgaagattggggacttcggcatgtccagagatgtctacagcacggattattacaggctctttaatccatctggaaatgatttttgtatatggtgtgaggtgggaggacacaccatgctccccattcgctggatgcctcctgaaagcatcatgtaccggaagttcactacagagagtgatgtatggagcttcggggtgatcctctgggagatcttcacctatggaaagcagccatggttccaactctcaaacacggaggtcattgagtgcattacccaaggtcgtgttttggagcggccccgagtctgccccaaagaggtgtacgatgtcatgctggggtgctggcagagggaaccacagcagcggttgaacatcaaggagatctacaaaatcctccatgctttggggaaggccaccccaatctacctggacattcttggctagtggtggctggtggtcatgaattcatactctgttgcctcctctctccctgcctcacatctcccttccacctcacaactccttccatccttgactgaagcgaacatcttcatataaactcaagtgcctgctacacatacaacactg

SEQ ID NO: 24900 - DNA, 2496 bp, Artificial Sequence
  derived and/or modified sequence
atggatgtgtctctatgccccgctaagtgctctttttggaggatttttctcctgggaagcgtctggctcgactatgtggggagcgtcctggcatgtcctgccaattgtgtgtgttccaagaccgagatcaactgtcgacgacccgacgacggaaatctcttccccttgctggaggggcaggacagcggtaactcaaacggtaacgctagcatcaacataactgacatttcgaggaatatcactagtatccatatcgaaaactggcgatccctgcacacgctgaatgctgtggatatggaactatatactggcctccagaagctcacaatcaagaattcaggcctgagatccatccagcctcgggcattcgctaagaatccacacctgcgttacatcaatcttagtagtaaccggttaactacactttcttggcagctgttccagaccctgtccctccgagaactgcaactggaacagaactttttcaactgttcttgtgatattagatggatgcagctgtggcaggaacaaggggaagccaaattgaacagccagaacctatattgtataaacgccgacggctcgcagctgcccttatttcgaatgaatatcagccaatgcgacttgcctgagataagtgtgagtcacgtaaatctgaccgtccgcgagggcgataacgcagtcataacctgcaacggctccggttcccctctgccagatgtcgattggatcgtgaccggcctgcaatctatcaatacacaccagactaatctcaactggacaaatgttcacgcaatcaatctgacgctcgtgaatgtgacaagcgaggataatgggtttacgctgacctgcattgccgaaaacgtcgttggcatgtccaatgcgtccgtcgccctgacggtgtactacccaccaagggtggtgagtctggaggaacccgagctcagattagaacattgcatcgagttcgtggtccgaggcaaccccccaccaactctgcactggttgcacaatggccagcccctgcgggagtctaagattatacatgtggagtattaccaggagggcgagatttctgaaggatgcttactctttaacaagcccacccattacaataatgggaactacaccttgatcgcaaaaaatcccctgggtaccgcgaatcagaccattaacggccattttctaaaggagccatttccagtcgacgaagttagccccactcccccaattaccgtcacccataagcctgaagaggatactttcggggtgtcaatagcggtgggactcgctgccttcgcttgcgttctgctcgtggtgctgttcgtgatgatcaataagtacgggagacggtccaagtttggcatgaaaggaccagtcgcggtcatctccggcgaggaagacagcgcctcaccgctgcaccacattaaccacgggattactactccaagttccttagatgcaggccctgatacagtcgtgattggaatgacccggatacctgttatcgaaaatcctcagtattttcgacagggccacaattgccacaaacctgacacatacgtgcagcacatcaagcggagggacatagtgctgaagagagaactgggggagggcgcattcggaaaggtgttccttgctgagtgttataacctgagcccaacgaaagataaaatgctcgtagcggtaaaggcacttaaggaccccactctggcagctcgcaaggatttccagcgagaggccgagcttctaacgaatctgcagcacgaacacatcgtgaagttttacggtgtgtgcggcgatggcgacccacttatcatggtgttcgagtatatgaaacatggtgatctaaacaaatttctgcgagcccacgggccagacgccatgatcctggtggacggccagccacgacaggctaaaggagagctgggattgagccagatgctacacatagctagtcaaatcgcaagtggcatggtctacttggcttcacagcactttgttcatagggatttggccactaggaactgcctggtcggtgcgaacctgctggtcaaaattggcgattttggcatgtcaagagacgtctatagtactgactactacaggctgtttaacccttctgggaacgatttctgtatctggtgtgaagtgggcggacatactatgctaccaatcagatggatgcccccagagagtatcatgtaccgcaagttcactactgagagtgacgtctggagtttcggggtgatcctctgggagatttttacttatgggaagcagccctggtttcagctttccaatacggaggtgattgagtgcattacacaaggccgtgtcctggagaggcccagggtgtgccctaaagaggtgtacgacgtgatgctgggttgctggcaaagggagccacagcagcgactgaatatcaaggagatatataagatcctccacgctctgggcaaagccacccctatctacctcgacatcctggggtag

SEQ ID NO: 24901 - DNA, 2520 bp, Artificial Sequence
  derived and/or modified sequence
atggacgtgagcttgtgtcccgctaaatgttctttttggcggatctttttgctggggtccgtgtggctcgattatgtcggatccgtgctggcttgccccgcaaattgtgtgtgcagcaaaaccgaaatcaattgtaggcgccctgatgacggcaacctgttcccccttctagaggggcaagacagtggtaattctaacggtaacgcatcgataaatatcactgacatatccaggaatattacgtcaattcatatcgagaactggaggagcctgcatacacttaacgccgttgatatggagctgtacactggcctacagaaattgacaattaagaacagcggactgcggtccattcaacccagagcctttgccaagaatccccatctccggtatatcaatctctctagcaaccggctgactactctatcgtggcagctcttccaaactctgagcctaagggagctgcagctcgaacagaatttctttaactgttcgtgtgatattcggtggatgcaactttggcaagaacagggagaggctaagcttaattctcaaaatctctattgtatcaatgccgatggcagtcaactgcccctctttcggatgaatatctctcagtgcgacctgcctgagattagcgtgagccacgtgaatctgactgtacgagaaggagacaacgctgtcatcacttgtaacggatccgggagccctctacccgatgtggactggatcgttaccggactgcagagtatcaatacccaccagaccaacctcaattggaccaatgttcacgccatcaatcttaccttagtgaatgtgacaagtgaggataacgggtttaccttaacctgcatcgccgaaaatgtcgtcggaatgtccaatgcatctgtggcactgacggtctactaccccccaagagtggtgtcccttgaggagcctgagttgcggctggagcactgtattgaattcgtggtgagggggaaccctccacctacactgcattggctgcacaatggacagcccctgagggagagtaaaattatccacgtggaatactaccaggaaggggaaattagcgaaggatgcctacttttcaataagccgactcattacaataacgggaactacacactcattgcgaagaatccattagggactgctaatcaaaccatcaatggccacttcttgaaggagcctttccctgagtccaccgacaattttattctgttcgacgaggtgtctccaacaccccctattacagtgacacataagcccgaagaagacaccttcggagtgtccatcgctgtcggcctggcagcgttcgcttgtgttctgttagttgtgctgttcgtgatgatcaataaatatggacggcgatccaaatttgggatgaagggccctgtggccgtgataagcggcgaagaagactcagcctctccgctgcaccatatcaaccacgggattactacgccgagcagcttggatgccggtcccgacacggtcgtgatcggtatgacccggatacctgtgattgagaacccccagtatttccgccagggtcacaactgtcacaagcccgatacatacgtgcagcacattaaacgacgggacattgtgctaaagcgcgagcttggggagggcgcatttggcaaggtcttcttggccgaatgttacaacttgagcccgactaaagataaaatgctggttgctgttaaggctctgaaggatcccacacttgccgctaggaaagactttcagcgcgaggcagagctgctcacaaatctgcagcacgagcacatcgtgaagttttatggtgtctgcggggacggagatcctctgataatggtgtttgaatacatgaagcacggcgatttaaataagtttttgcgagctcacggccctgatgccatgatcctggtggacggccagcccagacaggcaaagggcgagttgggcctctcgcaaatgttgcatatcgcttcacagatcgcctctgggatggtttatctggcttctcaacacttcgtccatcgagacctcgcaacccggaattgcctcgtaggcgctaacctgttggtaaaaattggtgattttgggatgagtcgtgatgtgtactctaccgattactaccggctgtttaacccttccggcaacgacttctgtatctggtgtgaggtggggggtcacacaatgttaccaataaggtggatgcctcctgagtctatcatgtacagaaagttcacgaccgagtctgatgtatggagtttcggagttatcttgtgggagatattcacttatggcaaacagccttggttccaactgtccaacactgaggtcatagaatgcatcacacagggcagagttctagagagacctcgggtgtgcccaaaagaggtgtacgatgttatgctaggctgctggcagagagagccacaacagcggttgaatattaaagaaatctacaaaatcctgcacgctttgggaaaagctacccctatctatctggatatactgggctag

SEQ ID NO: 24902 - DNA, 2496 bp, Artificial Sequence
  derived and/or modified sequence
atggacgtgagcctgtgccccgccaagtgcagcttctggagaatcttcctgctgggcagcgtgtggctggactacgtgggcagcgtgctggcctgccccgccaactgcgtgtgcagcaagaccgagatcaactgcagaagacccgacgacggcaacctgttccccctgctggagggccaggacagcggcaacagcaacggcaacgccagcatcaacatcaccgacatcagcagaaacatcaccagcatccacatcgagaactggagaagcctgcacaccctgaacgccgtggacatggagctgtacaccggcctgcagaagctgaccatcaagaacagcggcctgagaagcatccagcccagagccttcgccaagaacccccacctgagatacatcaacctgagcagcaacagactgaccaccctgagctggcagctgttccagaccctgagcctgagagagctgcagctggagcagaacttcttcaactgcagctgcgacatcagatggatgcagctgtggcaggagcagggcgaggccaagctgaacagccagaacctgtactgcatcaacgccgacggcagccagctgcccctgttcagaatgaacatcagccagtgcgacctgcccgagatcagcgtgagccacgtgaacctgaccgtgagagagggcgacaacgccgtgatcacctgcaacggcagcggcagccccctgcccgacgtggactggatcgtgaccggcctgcagagcatcaacacccaccagaccaacctgaactggaccaacgtgcacgccatcaacctgaccctggtgaacgtgaccagcgaggacaacggcttcaccctgacctgcatcgccgagaacgtggtgggcatgagcaacgccagcgtggccctgaccgtgtactacccccccagagtggtgagcctggaggagcccgagctgagactggagcactgcatcgagttcgtggtgagaggcaaccccccccccaccctgcactggctgcacaacggccagcccctgagagagagcaagatcatccacgtggagtactaccaggagggcgagatcagcgagggctgcctgctgttcaacaagcccacccactacaacaacggcaactacaccctgatcgccaagaaccccctgggcaccgccaaccagaccatcaacggccacttcctgaaggagcccttccccgtggacgaggtgagccccaccccccccatcaccgtgacccacaagcccgaggaggacaccttcggcgtgagcatcgccgtgggcctggccgccttcgcctgcgtgctgctggtggtgctgttcgtgatgatcaacaagtacggcagaagaagcaagttcggcatgaagggccccgtggccgtgatcagcggcgaggaggacagcgccagccccctgcaccacatcaaccacggcatcaccacccccagcagcctggacgccggccccgacaccgtggtgatcggcatgaccagaatccccgtgatcgagaacccccagtacttcagacagggccacaactgccacaagcccgacacctacgtgcagcacatcaagagaagagacatcgtgctgaagagagagctgggcgagggcgccttcggcaaggtgttcctggccgagtgctacaacctgagccccaccaaggacaagatgctggtggccgtgaaggccctgaaggaccccaccctggccgccagaaaggacttccagagagaggccgagctgctgaccaacctgcagcacgagcacatcgtgaagttctacggcgtgtgcggcgacggcgaccccctgatcatggtgttcgagtacatgaagcacggcgacctgaacaagttcctgagagcccacggccccgacgccatgatcctggtggacggccagcccagacaggccaagggcgagctgggcctgagccagatgctgcacatcgccagccagatcgccagcggcatggtgtacctggccagccagcacttcgtgcacagagacctggccaccagaaactgcctggtgggcgccaacctgctggtgaagatcggcgacttcggcatgagcagagacgtgtacagcaccgactactacagactgttcaaccccagcggcaacgacttctgcatctggtgcgaggtgggcggccacaccatgctgcccatcagatggatgccccccgagagcatcatgtacagaaagttcaccaccgagagcgacgtgtggagcttcggcgtgatcctgtgggagatcttcacctacggcaagcagccctggttccagctgagcaacaccgaggtgatcgagtgcatcacccagggcagagtgctggagagacccagagtgtgccccaaggaggtgtacgacgtgatgctgggctgctggcagagagagccccagcagagactgaacatcaaggagatctacaagatcctgcacgccctgggcaaggccacccccatctacctggacatcctgggctag

SEQ ID NO: 24903 - DNA, 2520 bp, Artificial Sequence
  derived and/or modified sequence
atggacgtgagcctgtgccccgccaagtgcagcttctggagaatcttcctgctgggcagcgtgtggctggactacgtgggcagcgtgctggcctgccccgccaactgcgtgtgcagcaagaccgagatcaactgcagaagacccgacgacggcaacctgttccccctgctggagggccaggacagcggcaacagcaacggcaacgccagcatcaacatcaccgacatcagcagaaacatcaccagcatccacatcgagaactggagaagcctgcacaccctgaacgccgtggacatggagctgtacaccggcctgcagaagctgaccatcaagaacagcggcctgagaagcatccagcccagagccttcgccaagaacccccacctgagatacatcaacctgagcagcaacagactgaccaccctgagctggcagctgttccagaccctgagcctgagagagctgcagctggagcagaacttcttcaactgcagctgcgacatcagatggatgcagctgtggcaggagcagggcgaggccaagctgaacagccagaacctgtactgcatcaacgccgacggcagccagctgcccctgttcagaatgaacatcagccagtgcgacctgcccgagatcagcgtgagccacgtgaacctgaccgtgagagagggcgacaacgccgtgatcacctgcaacggcagcggcagccccctgcccgacgtggactggatcgtgaccggcctgcagagcatcaacacccaccagaccaacctgaactggaccaacgtgcacgccatcaacctgaccctggtgaacgtgaccagcgaggacaacggcttcaccctgacctgcatcgccgagaacgtggtgggcatgagcaacgccagcgtggccctgaccgtgtactacccccccagagtggtgagcctggaggagcccgagctgagactggagcactgcatcgagttcgtggtgagaggcaaccccccccccaccctgcactggctgcacaacggccagcccctgagagagagcaagatcatccacgtggagtactaccaggagggcgagatcagcgagggctgcctgctgttcaacaagcccacccactacaacaacggcaactacaccctgatcgccaagaaccccctgggcaccgccaaccagaccatcaacggccacttcctgaaggagcccttccccgagagcaccgacaacttcatcctgttcgacgaggtgagccccaccccccccatcaccgtgacccacaagcccgaggaggacaccttcggcgtgagcatcgccgtgggcctggccgccttcgcctgcgtgctgctggtggtgctgttcgtgatgatcaacaagtacggcagaagaagcaagttcggcatgaagggccccgtggccgtgatcagcggcgaggaggacagcgccagccccctgcaccacatcaaccacggcatcaccacccccagcagcctggacgccggccccgacaccgtggtgatcggcatgaccagaatccccgtgatcgagaacccccagtacttcagacagggccacaactgccacaagcccgacacctacgtgcagcacatcaagagaagagacatcgtgctgaagagagagctgggcgagggcgccttcggcaaggtgttcctggccgagtgctacaacctgagccccaccaaggacaagatgctggtggccgtgaaggccctgaaggaccccaccctggccgccagaaaggacttccagagagaggccgagctgctgaccaacctgcagcacgagcacatcgtgaagttctacggcgtgtgcggcgacggcgaccccctgatcatggtgttcgagtacatgaagcacggcgacctgaacaagttcctgagagcccacggccccgacgccatgatcctggtggacggccagcccagacaggccaagggcgagctgggcctgagccagatgctgcacatcgccagccagatcgccagcggcatggtgtacctggccagccagcacttcgtgcacagagacctggccaccagaaactgcctggtgggcgccaacctgctggtgaagatcggcgacttcggcatgagcagagacgtgtacagcaccgactactacagactgttcaaccccagcggcaacgacttctgcatctggtgcgaggtgggcggccacaccatgctgcccatcagatggatgccccccgagagcatcatgtacagaaagttcaccaccgagagcgacgtgtggagcttcggcgtgatcctgtgggagatcttcacctacggcaagcagccctggttccagctgagcaacaccgaggtgatcgagtgcatcacccagggcagagtgctggagagacccagagtgtgccccaaggaggtgtacgacgtgatgctgggctgctggcagagagagccccagcagagactgaacatcaaggagatctacaagatcctgcacgccctgggcaaggccacccccatctacctggacatcctgggctag

SEQ ID NO: 24904 - protein, 367 aa, Artificial Sequence
  derived and/or modified sequence
MLLLRCQLKQAPPQKVSFRFCVVMGKQQSKLKHSTYKYGRPDEIIEERIQTKAFQEYSPAHMDTVSVVAALNSDLCVSGGKDKTVVAYNWKTGNVVKRFKGHEHEITKVACIPKSSQFFSASRDRMVMMWDLHGSSQPRQQLCGHAMVVTGLAVSPDSSQLCTGSRDNTLLLWDVVTGQSVERASVSRNVVTHLCWVPREPYILQTSEDKTLRLWDSRGLQVAHMFPAKQHIQTYCEVSVDGHKCISCSNGFGGEGCEATLWDLRQTRNRICEYKGHFQTVASCVFLPRALALMPLIATSSHDCKVKIWNQDTGACLFTLSLDGSGPLTSLAVGDAISLLCASFNRGIHLLRMDHSQGLELQEVAAF

SEQ ID NO: 24905 - DNA, 1104 bp, Artificial Sequence
  derived and/or modified sequence
atgctgctgctgagatgccagctgaagcaggcccccccccagaaggtgagcttcagattctgcgtggtgatgggcaagcagcagagcaagctgaagcacagcacctacaagtacggcagacccgacgagatcatcgaggagagaatccagaccaaggccttccaggagtacagccccgcccacatggacaccgtgagcgtggtggccgccctgaacagcgacctgtgcgtgagcggcggcaaggacaagaccgtggtggcctacaactggaagaccggcaacgtggtgaagagattcaagggccacgagcacgagatcaccaaggtggcctgcatccccaagagcagccagttcttcagcgccagcagagacagaatggtgatgatgtgggacctgcacggcagcagccagcccagacagcagctgtgcggccacgccatggtggtgaccggcctggccgtgagccccgacagcagccagctgtgcaccggcagcagagacaacaccctgctgctgtgggacgtggtgaccggccagagcgtggagagagccagcgtgagcagaaacgtggtgacccacctgtgctgggtgcccagagagccctacatcctgcagaccagcgaggacaagaccctgagactgtgggacagcagaggcctgcaggtggcccacatgttccccgccaagcagcacatccagacctactgcgaggtgagcgtggacggccacaagtgcatcagctgcagcaacggcttcggcggcgagggctgcgaggccaccctgtgggacctgagacagaccagaaacagaatctgcgagtacaagggccacttccagaccgtggccagctgcgtgttcctgcccagagccctggccctgatgcccctgatcgccaccagcagccacgactgcaaggtgaagatctggaaccaggacaccggcgcctgcctgttcaccctgagcctggacggcagcggccccctgaccagcctggccgtgggcgacgccatcagcctgctgtgcgccagcttcaacagaggcatccacctgctgagaatggaccacagccagggcctggagctgcaggaggtggccgccttctag

SEQ ID NO: 24906 - DNA, 1104 bp, Artificial Sequence
  derived and/or modified sequence
atgctgctcttgaggtgccagctaaagcaagcgcccccccaaaaggtttcgtttcgcttctgtgttgtaatggggaagcagcaaagtaagctaaaacattcgacttataaatacgggcggccagacgagataatcgaggagcgcatccaaaccaaggcttttcaagagtacagcccagcccatatggacactgtgtccgttgtggccgctctcaacagcgacctgtgcgtgtctgggggaaaggacaagacggtcgtcgcctacaactggaagacaggcaatgtggttaaacgcttcaagggacacgagcatgagatcactaaagtggcctgcattccaaagagcagccagttttttagcgcgtccagggatagaatggttatgatgtgggatctgcatggctcctctcagcccagacaacagctctgtggtcacgccatggtcgtaaccggtctcgccgtgtctccagacagttctcagctgtgcaccggtagcagggacaatacccttctcctttgggatgtagtgacaggacaatccgtggagcgggcaagcgtgtctagaaatgtggtcacccatctgtgttgggttcctcgcgagccttacatcctgcaaacctcagaggataaaaccttgcgcctatgggattctcgcggcctgcaagtcgctcacatgttccctgcaaagcagcatatccaaacatactgtgaagtctccgttgatggacataagtgtatctcctgttcaaacgggttcgggggtgaggggtgcgaagcgactctgtgggatctgcgccagacccgcaaccgcatatgtgaatataaaggccacttccaaaccgtcgcatcctgtgtctttcttcctcgagcccttgctctgatgccactgatcgccactagtagtcatgattgtaaggtgaagatttggaatcaggacactggggcatgcctcttcaccttgagtttggatgggtcaggtccacttacgtccctggccgtcggcgatgctatctctctgctttgtgcctctttcaatcggggaatccacctgcttcgaatggatcactcccagggcttagaactccaggaagtggccgcattctag

SEQ ID NO: 24907 - DNA, 1104 bp, Artificial Sequence
  derived and/or modified sequence
atgctgctgctgcgctgccagctgaagcaggccccaccccagaaggtgtccttccgcttctgtgtggtgatgggcaagcagcagagcaagctgaagcacagcacctacaagtatggccgcccagatgagatcatcgaggagcgcatccagaccaaggccttccaggagtacagccctgcccacatggacacagtgtctgtggtggccgccctgaacagcgacctgtgtgtgtctgggggcaaggacaagacagtggtggcctacaactggaagacaggaaatgtggtgaagcgcttcaagggccacgagcacgagatcaccaaggtggcctgcatccccaagagcagccagttcttcagcgccagccgggacaggatggtgatgatgtgggacctgcacggcagcagccagccccggcagcagctgtgtggccacgccatggtggtgacaggcctggccgtgtccccagacagcagccagctgtgcaccggcagccgggacaacaccctgctgctgtgggatgtggtgacaggccagagcgtggagcgggcctctgtgtccagaaatgtggtgacccacctgtgctgggtgccccgggagccctacatcctgcagaccagcgaggacaagaccctgcggctgtgggacagccggggcctgcaggtggcccacatgtttcctgccaagcagcacatccagacctactgtgaggtgtctgtggatggccacaagtgcatcagctgcagcaatggatttggaggagagggctgtgaggccaccctgtgggacctgcggcagaccaggaaccgcatctgtgagtacaagggccacttccagacagtggccagctgtgtgttcctgccccgggccctggccctgatgcccctgattgccaccagcagccatgactgcaaggtgaagatctggaaccaggacacaggagcctgcctcttcaccctgagcctggatggcagcggccccctgaccagcctggccgtgggagatgccatcagcctgctgtgtgccagcttcaacagaggcatccacctgctgaggatggaccacagccagggcctggagctgcaggaggtggccgccttctag

SEQ ID NO: 24908 - DNA, 1104 bp, Artificial Sequence
  derived and/or modified sequence
atgctgctgctgcggtgccagctgaagcaggcccccccccagaaggtcagctttcgtttttgcgtggtaatgggaaagcagcagtctaagctgaagcacagcacatacaagtacggccggcccgacgagataatcgaagaaagaatccagaccaaggctttccaggagtattctccggctcatatggacacggtaagcgtggtggctgccctcaacagcgacctgtgtgtctccggcggtaaggataagactgtggtggcctataactggaaaaccggaaatgtagtgaagagatttaagggacacgagcacgagataaccaaggtggcctgcattccgaaatcttcacagtttttctcggcctcccgggacagaatggtgatgatgtgggacctccacgggagcagccagcccagacagcagctttgcggacacgcaatggtggtgacaggacttgctgtctccccagatagctctcagctttgcacagggtctcgcgataatactctcctgctctgggatgttgtaactggacagtctgtggaacgcgctagtgtatccagaaacgttgtcacccacctctgttgggttccacgcgaaccctatattcttcagacctcggaggacaagacgcttaggctctgggacagtagggggctacaagtggcccacatgttccctgcgaaacagcacattcaaacatactgcgaggtgtccgtggatggtcacaagtgcatttcttgtagcaacggattcggtggtgagggatgcgaagccacactttgggatctgagacaaacccgcaatagaatttgtgaatataaaggacacttccagacagtcgctagttgcgtctttctgccacgagctctcgctctgatgccccttattgccacctcatctcatgattgtaaggtcaagatttggaaccaggataccggagcctgcctattcaccctgtcacttgatgggagtgggcccctgacctctctggcagtgggtgatgccatttctttgctttgcgcctctttcaacaggggaatacacctgctaaggatggaccattctcagggcctggagttgcaggaggttgcagccttttag

SEQ ID NO: 24909 - DNA, 1104 bp, Artificial Sequence
  derived and/or modified sequence
atgcttctcctgagatgccaactgaaacaggctcccccacaaaaggtgtcatttcggttttgtgtggtgatggggaagcaacagtcaaagctcaagcactccacctataagtatggcagaccagatgagataatcgaggaaagaatccagaccaaggctttccaggagtattcccccgctcacatggacacagtctctgtcgtggccgctctgaactcggatctgtgcgtcagcggagggaaagacaagacagtagttgcctacaactggaagacaggtaacgtagttaaacgattcaagggccacgagcatgaaatcactaaggttgcgtgcattcccaagtcatcacagttctttagtgcatctagagacaggatggtgatgatgtgggatctccacggaagctcccagcccagacagcaactctgtggccacgctatggtggttaccgggttagcagtcagccctgatagctcccagctctgtaccgggtcgcgcgataacacgttgctgctctgggatgtcgtgacaggccagagcgttgagagggcctccgtgagccgtaacgtggtcacccatttgtgttgggtgcccagggagccttatattttgcagacgtccgaggataaaaccctccgactttgggacagtcgcggtctccaggtcgcccatatgtttcctgccaagcagcacatccagacctactgtgaggtgtctgtcgacggacataaatgtatttcctgcagcaacgggtttgggggagaaggatgcgaagccaccctgtgggatctgagacagactaggaacaggatttgtgagtacaaggggcactttcagacggtggcgagttgcgtgttccttccgagagcattggcactgatgccgctgatcgctacttcatctcatgactgtaaagttaagatatggaatcaggacacaggcgcatgcttattcactctgtctttagacggcagcggtcctctcacatccctggccgtcggagatgcaatctccctcctatgtgcaagttttaatcgtgggattcacttactgaggatggaccattcccaggggctcgagcttcaggaagtcgctgccttttag

SEQ ID NO: 24910 - DNA, 2429 bp, Artificial Sequence
  derived and/or modified sequence
ggaggctgttcccacccccaggctccgcgttcccgccggccccagctccagccccgcagcccaccgtgcaaacatgcttagacagagaagagattaacttcagtggcttcccactaattacagagattaagaagtggctgcctgaactattttccaaaggatacacattacaaattattgaatagggcagctaaccaagaagatcctattggtttggggggaacacaacttccagcagccacaagggatgctgctactcaggtgccaactgaaacaagctcctccacagaaggtttcgtttaggttttgtgtcgtgatggggaaacagcaaagcaaactcaaacacagcacttataaatacggcaggcctgatgaaattatagaagagagaattcaaactaaagcttttcaagagtatagcccagctcacatggataccgtctctgtcgtggctgctttgaactcagacctttgtgtctctggagggaaagataagacagttgtggcctataattggaaaactggaaatgtggtgaaaaggttcaaaggacatgaacatgagatcaccaaggtagcctgtattcccaaatccagccagttcttcagtgcctctcgtgacaggatggtcatgatgtgggacttgcacggttcctcacaaccaaggcagcaattgtgtggccatgccatggtggtcaccggattggctgtgagtccagactcatcacagctgtgcactggctctcgggacaacaccctgcttctgtgggatgtggtgacaggacagagtgtggaaagagcatctgtctccaggaacgtggtcactcacctgtgctgggtccccagagaaccatacatactacagacctctgaagataaaaccctcagattatgggacagtcgggggctgcaggtagctcatatgtttcctgcaaagcagcacattcagacctactgtgaagtcagtgtggatggacacaagtgtatctcctgcagcaatggctttggaggagaaggctgtgaagccacgttgtgggacctaagacagactcgaaacagaatatgtgagtataaggggcatttccagactgtcgcatcctgcgtctttctaccaagagcattggccttgatgcctttaattgctacctcatcacatgattgcaaggtgaagatttggaaccaagatactggagcctgccttttcaccttgtctctggatggatcaggacccttgacttctctggctgttggtgacgccatctccttattgtgtgcaagttttaacagaggaattcacttactcagaatggaccacagccaagggctggaactgcaggaagtggcagcattctgaggccaagagacactcactggacaatatcaaaccatggctcctcctcagcatggctttgtgtctttcccagttatcttgaggggagtgggatgtagggctggtattctttgcttaggttcatttacaagatgtatcagtgttgtaagtccaataatttaagtccagtgattcaaaatcaggtatagagtccagaaacatggactacacataaggttctctatttaagttaaatacaaatgcaactttttagtgagcttttaggactactcttcaaaaaaagtgtattgctcagaatgatgacctgtaaatgtaagagtggcaggcctctgtctgtgaaagtcagaacacagggctcgagcctctggaactgaccctttgcaagtctttacaaaagaaaaaaggcagtggggagagagagtgttttggttacatcagaaataattgagatgggaaagaatagtgcagctccatagaggagacggactgtagacaatgagattaagcttcaatcactgctcctcagcaatgtgaagaatcaaagtcagggcaagaaagcgaaagcttggacttctattcaaagtggcagcagagtgggagggcggtacccttctagcccagtgctgctgagcttgtgtgaaaatcagacctgagatggcttgaagcagccaagaaccacatgggcattgcccagaattacaggagttagcacaccagctctacagataagaaaacattgaaattcaaagattaaggccaaaaatatctcacttgcaattttaatattttcatttggatttatataaatgaaacatatatatgttttggaatggccagagtgaggcaaaggggatccctgaaataacattagaacatacaggaaaaacgaggcaggcagatcactttaggtcaggagttcaagaccagcctgtacgtgcgtgcctgtagtcccagctactcgggaggctgagatgggagaatcacttgaacctgggaggcagagtttgcagtgagctgagattgtgccactgcactccagtctgtgtgacagaatgagaccttgtcttgaaaaaaaaaaaaa

SEQ ID NO: 24911 - protein, 312 aa, Artificial Sequence
  derived and/or modified sequence
MYHPAYWVVFSATTALLFIPGVPVRSGDATFPKAMDNVTVRQGESATLRCTIDDRVTRVAWLNRSTIMIQNVDVYDEGPYTCSVQTDNHPKTSRVHLIVQVPPQIMNISSDITVNEGSSVTLLCLAIGRPEPTVTWRHLSVKEGQGFVSEDEYLEISDIKRDQSGEYECSALNDVAAPDVRKVKITVNYPPYISKAKNTGVSVGQKGILSCEASAVPMAEFQWFKEETRLATGLDGMRIENKGRMSTLTFFNVSEKDYGNYTCVATNKLGNTNASITLYGPGAVIDGVNSASRALACLWLSGTLLAHFFIKF

SEQ ID NO: 24912 - protein, 338 aa, Artificial Sequence
  derived and/or modified sequence
MYHPAYWVVFSATTALLFIPGVPVRSGDATFPKAMDNVTVRQGESATLRCTIDDRVTRVAWLNRSTILYAGNDKWSIDPRVIILVNTPTQYSIMIQNVDVYDEGPYTCSVQTDNHPKTSRVHLIVQVPPQIMNISSDITVNEGSSVTLLCLAIGRPEPTVTWRHLSVKEGQGFVSEDEYLEISDIKRDQSGEYECSALNDVAAPDVRKVKITVNYPPYISKAKNTGVSVGQKGILSCEASAVPMAEFQWFKEETRLATGLDGMRIENKGRMSTLTFFNVSEKDYGNYTCVATNKLGNTNASITLYGPGAVIDGVNSASRALACLWLSGTLLAHFFIKF

SEQ ID NO: 24913 - DNA, 939 bp, Artificial Sequence
  derived and/or modified sequence
atgtaccaccccgcctactgggtggtgttcagcgccaccaccgccctgctgttcatccccggcgtgcccgtgagaagcggcgacgccaccttccccaaggccatggacaacgtgaccgtgagacagggcgagagcgccaccctgagatgcaccatcgacgacagagtgaccagagtggcctggctgaacagaagcaccatcatgatccagaacgtggacgtgtacgacgagggcccctacacctgcagcgtgcagaccgacaaccaccccaagaccagcagagtgcacctgatcgtgcaggtgcccccccagatcatgaacatcagcagcgacatcaccgtgaacgagggcagcagcgtgaccctgctgtgcctggccatcggcagacccgagcccaccgtgacctggagacacctgagcgtgaaggagggccagggcttcgtgagcgaggacgagtacctggagatcagcgacatcaagagagaccagagcggcgagtacgagtgcagcgccctgaacgacgtggccgcccccgacgtgagaaaggtgaagatcaccgtgaactaccccccctacatcagcaaggccaagaacaccggcgtgagcgtgggccagaagggcatcctgagctgcgaggccagcgccgtgcccatggccgagttccagtggttcaaggaggagaccagactggccaccggcctggacggcatgagaatcgagaacaagggcagaatgagcaccctgaccttcttcaacgtgagcgagaaggactacggcaactacacctgcgtggccaccaacaagctgggcaacaccaacgccagcatcaccctgtacggccccggcgccgtgatcgacggcgtgaacagcgccagcagagccctggcctgcctgtggctgagcggcaccctgctggcccacttcttcatcaagttctag

SEQ ID NO: 24914 - DNA, 1017 bp, Artificial Sequence
  derived and/or modified sequence
atgtaccaccccgcctactgggtggtgttcagcgccaccaccgccctgctgttcatccccggcgtgcccgtgagaagcggcgacgccaccttccccaaggccatggacaacgtgaccgtgagacagggcgagagcgccaccctgagatgcaccatcgacgacagagtgaccagagtggcctggctgaacagaagcaccatcctgtacgccggcaacgacaagtggagcatcgaccccagagtgatcatcctggtgaacacccccacccagtacagcatcatgatccagaacgtggacgtgtacgacgagggcccctacacctgcagcgtgcagaccgacaaccaccccaagaccagcagagtgcacctgatcgtgcaggtgcccccccagatcatgaacatcagcagcgacatcaccgtgaacgagggcagcagcgtgaccctgctgtgcctggccatcggcagacccgagcccaccgtgacctggagacacctgagcgtgaaggagggccagggcttcgtgagcgaggacgagtacctggagatcagcgacatcaagagagaccagagcggcgagtacgagtgcagcgccctgaacgacgtggccgcccccgacgtgagaaaggtgaagatcaccgtgaactaccccccctacatcagcaaggccaagaacaccggcgtgagcgtgggccagaagggcatcctgagctgcgaggccagcgccgtgcccatggccgagttccagtggttcaaggaggagaccagactggccaccggcctggacggcatgagaatcgagaacaagggcagaatgagcaccctgaccttcttcaacgtgagcgagaaggactacggcaactacacctgcgtggccaccaacaagctgggcaacaccaacgccagcatcaccctgtacggccccggcgccgtgatcgacggcgtgaacagcgccagcagagccctggcctgcctgtggctgagcggcaccctgctggcccacttcttcatcaagttctag

SEQ ID NO: 24915 - DNA, 939 bp, Artificial Sequence
  derived and/or modified sequence
atgtaccaccctgcctactgggtagtgtttagtgctactactgccttgctgttcatacccggagtgcccgtacgttccggcgatgcgacatttcctaaagccatggacaacgttaccgtccggcaaggcgaaagcgccaccctgcgctgtacaattgatgaccgagtgacaagggtggcatggctgaaccgctccacaattatgatccagaacgtcgacgtctacgatgagggcccctacacgtgttctgtacagactgataatcaccccaagacctctcgggtgcacctgattgtgcaggtgcccccccagatcatgaatatcagctccgacatcacagtaaatgaagggagtagtgtcacgctgctctgcttggctataggccgcccagagcccactgtgacatggagacacttgtccgtgaaagagggtcaggggtttgtttctgaggacgaatacttggagatttccgacattaaacgcgaccagagcggtgagtacgagtgttctgcattaaatgatgtggccgctccagacgtgcgtaaggtgaaaatcaccgtcaattatccaccttacatctctaaggcaaagaatacaggggtttccgtgggtcaaaaagggatcctcagctgcgaagcctctgctgtaccgatggccgaattccagtggttcaaagaggagaccagacttgctaccggcctggacggcatgcggattgagaacaaaggcagaatgagtaccctgacctttttcaatgtctctgaaaaggactatgggaactatacatgtgtggccacgaacaaactgggaaacactaacgcttccatcaccctgtatgggccaggtgctgtgatcgatggcgtgaattctgctagcagagccttggcttgtctctggctttcaggaactttgcttgcccacttctttatcaagttctag

SEQ ID NO: 24916 - DNA, 1017 bp, Artificial Sequence
  derived and/or modified sequence
atgtaccatcctgcctactgggtggtcttctcagctaccaccgctttactttttataccgggcgtacctgtgaggtccggagatgcaacttttccgaaggccatggataacgtgacagtgcggcagggtgaatcagcaacactgcgctgcactatagacgatagggttactcgcgtggcctggctgaacagatctaccatactctacgccggaaatgataagtggtcgattgatcccagagtgattatcttggtgaacactcccacccagtactctattatgatccagaatgtcgacgtgtacgatgaaggtccatatacctgttcagtgcaaactgataatcatcccaaaacatctagggtgcatttaatcgtgcaggtgccaccacagatcatgaacatcagctcagatataactgtcaacgaaggatcttccgtaaccctgctgtgtcttgctatcggacgtccggaacctaccgtgacctggcggcacttgtccgtgaaggaagggcaaggtttcgtaagcgaagatgagtatttggaaatcagtgacattaagagagaccaatccggtgaatatgagtgcagtgccctcaacgatgtagcagccccagacgtgagaaaagtcaaaattactgtgaactaccccccatacatctctaaagccaagaacacaggagtaagtgtcggacaaaaaggaatcctttcttgcgaagcaagcgccgtccccatggctgaattccaatggttcaaggaagaaactaggttggccacaggcctcgatggcatgcgcattgagaacaaggggcggatgagcactttaacattcttcaatgtgtccgagaaggactatggaaactatacctgtgtcgctacaaataaactcggcaacaccaacgcttccatcaccctgtatggcccaggcgctgtgattgacggggttaactccgcttctagagcattagcctgcctgtggctctccgggactctgctcgcccatttcttcatcaagttttag

SEQ ID NO: 24917 - DNA, 939 bp, Artificial Sequence
  derived and/or modified sequence
atgtaccacccagcctactgggtggtgttttctgccaccacagccctgctcttcatccctggggtgcctgtgcgctctggagatgccaccttccccaaggccatggacaacgtgacagtgcggcagggcgagagcgccaccctgcgctgcaccattgatgacagagtgaccagggtggcctggctgaacagaagcaccatcatgatccagaatgtggatgtgtatgatgagggcccctacacctgcagcgtgcagacagacaaccaccccaagaccagccgggtgcacctgattgtgcaggtgcccccccagatcatgaacatcagcagtgacatcaccgtgaatgaaggcagctctgtgaccctgctgtgcctggccatcggccggcctgagcccaccgtgacctggaggcacctgtctgtgaaggagggccagggctttgtgtctgaagatgagtacctggagatcagtgacatcaagagggaccagagcggggagtatgagtgcagcgccctgaatgatgtggccgccccagatgtgaggaaggtgaagatcaccgtgaactacccaccctacatcagcaaggccaagaacacaggagtgtctgtgggccagaagggcatcctgagctgtgaggccagcgctgtgcccatggccgagttccagtggttcaaggaggagacccggctggccaccggcctggatggcatgagaattgagaacaagggccgcatgagcaccctgaccttcttcaacgtgtctgagaaggactatggcaactacacctgtgtggccaccaacaagctgggcaacaccaatgccagcatcaccctgtatggccctggagctgtgattgatggagtgaacagcgccagccgggccctggcctgcctgtggctgagcggcaccctgctggcccacttcttcatcaagttctag

SEQ ID NO: 24918 - DNA, 1017 bp, Artificial Sequence
  derived and/or modified sequence
atgtaccacccagcctactgggtggtgttttctgccaccacagccctgctcttcatccctggggtgcctgtgcgctctggagatgccaccttccccaaggccatggacaacgtgacagtgcggcagggcgagagcgccaccctgcgctgcaccattgatgacagagtgaccagggtggcctggctgaacagaagcaccatcctgtatgctggaaatgacaagtggagcattgaccccagggtcatcatcctggtgaacacccccacccagtacagcatcatgatccagaatgtggatgtgtatgatgagggcccctacacctgcagcgtgcagacagacaaccaccccaagaccagccgggtgcacctgattgtgcaggtgcccccccagatcatgaacatcagcagtgacatcaccgtgaatgaaggcagctctgtgaccctgctgtgcctggccatcggccggcctgagcccaccgtgacctggaggcacctgtctgtgaaggagggccagggctttgtgtctgaagatgagtacctggagatcagtgacatcaagagggaccagagcggggagtatgagtgcagcgccctgaatgatgtggccgccccagatgtgaggaaggtgaagatcaccgtgaactacccaccctacatcagcaaggccaagaacacaggagtgtctgtgggccagaagggcatcctgagctgtgaggccagcgctgtgcccatggccgagttccagtggttcaaggaggagacccggctggccaccggcctggatggcatgagaattgagaacaagggccgcatgagcaccctgaccttcttcaacgtgtctgagaaggactatggcaactacacctgtgtggccaccaacaagctgggcaacaccaatgccagcatcaccctgtatggccctggagctgtgattgatggagtgaacagcgccagccgggccctggcctgcctgtggctgagcggcaccctgctggcccacttcttcatcaagttctag

SEQ ID NO: 24919 - DNA, 939 bp, Artificial Sequence
  derived and/or modified sequence
atgtaccaccccgcctactgggtggtgttcagcgccaccaccgccttgctgtttatccccggcgtacccgttcgttcaggcgacgccacctttccgaaggcaatggacaacgtgaccgttcgacagggcgagtcagcgacacttagatgcacaattgacgacagagtaacccgtgttgcatggctgaaccggagcactattatgatccagaacgttgatgtgtatgacgaagggccttacacctgcagcgtccagaccgataatcacccgaagacctctagggtgcaccttatagttcaggttcccccccagatcatgaacatctcatcggacattactgttaacgagggcagctcggtgaccctgctctgcctcgccattgggcgcccggaacccactgttacttggagacatcttagcgtgaaggagggacaggggtttgtcagtgaagacgaatacctggagatttcagacattaaacgcgaccagtcgggggaatatgaatgcagtgcgctgaatgacgtggctgctccagacgtgcgcaaggttaagatcactgtcaattatcctccctacatttcaaaggccaagaatactggagtgagcgtcggccagaagggcattcttagctgcgaggccagcgcggtgcctatggctgagtttcagtggttcaaagaagaaactcgcctggccaccggactggacggaatgcggatagagaataaagggcgcatgagcacccttactttctttaatgtgtcagagaaggattacggcaattacacctgtgttgcaacaaacaagctgggcaatacaaatgcctccattaccctgtacggccctggggcagtgatagacggggtcaattctgcctcgcgtgctctggcctgtctgtggctcagcggcactctgctggcccacttctttataaagttttag

SEQ ID NO: 24920 - DNA, 1017 bp, Artificial Sequence
  derived and/or modified sequence
atgtaccaccccgcctactgggtggtgttcagcgccaccaccgccctgctcttcatccccggagttcctgtcagatcaggagacgctacttttcccaaagctatggacaatgtgactgtgcgacagggcgagagtgctacactgcggtgtaccattgacgatcgggtgacccgggtcgcctggttaaaccgtagcaccattctttatgccggcaatgacaagtggtcaatcgacccccgggtgataatactggtaaacacaccaacccaatactccattatgatccagaacgtggacgtgtatgacgagggtccttatacatgcagcgtgcagactgacaatcaccccaagacctctagggttcatctgatcgtccaagttccaccacagatcatgaatatcagctccgatattacagtcaacgagggcagctctgtaaccctgctctgcctggccatcggtcggccagaaccaactgttacctggcgccacttgagtgttaaggaaggccagggcttcgtgtcagaggacgagtacttggagattagcgatattaaaagagatcagtcaggagagtatgagtgctccgctctcaacgacgtagctgcccctgacgtacgaaaggtcaaaatcactgtaaactatcctccttacatctcaaaggccaaaaataccggcgtttccgttgggcagaagggtatactgagctgcgaagcatccgccgttccgatggctgagttccagtggttcaaagaggagacaagactagctactggtctcgacggaatgcgcattgaaaacaaaggccgcatgtcaactttaaccttcttcaatgtgtccgagaaggactacggcaattacacttgcgtagcaactaataagctcggcaacactaacgcttcgataacattgtatggccctggggccgttatcgatggagtgaacagcgcttctcgagccctggcttgtctctggctaagcggcaccctgctcgcccactttttcattaagttctag

SEQ ID NO: 24921 - DNA, 939 bp, Artificial Sequence
  derived and/or modified sequence
atgtaccatcctgcctactgggtcgtcttctcggcgacaactgccctgctcttcatcccaggagtgcccgtgcgcagcggagatgccaccttccccaaagctatggacaacgtgacggtccggcagggggagagcgccaccctcaggtgtaccatagatgaccgggtaacccgggtggcctggctaaaccgcagcaccatcatgatccaaaatgtggatgtgtatgacgaaggtccgtacacctgctctgtgcagacagacaatcatcccaaaacgtcccgggttcacctaatagtgcaagttcctcctcagatcatgaatatctcctcagacatcactgtgaatgagggaagcagtgtgaccctgctgtgtcttgctattggcagaccagagccaactgtgacatggagacacctgtcagtcaaggaaggccagggctttgtaagtgaggatgagtacctggagatctctgacatcaagcgagaccagtccggggagtacgaatgcagcgcgttgaacgatgtcgctgcgcccgatgtgcggaaagtaaaaatcactgtaaactatcctccctatatctcaaaagccaagaacactggtgtttcagtcggtcagaagggcatcctgagctgtgaagcctctgcagtccccatggctgaattccagtggttcaaggaagaaaccaggttagccactggtctggatggaatgaggattgaaaacaaaggccgcatgtccactctgactttcttcaatgtttcagaaaaggattatgggaactatacttgtgtggccacgaacaagcttgggaacaccaatgccagcatcacattgtatgggcctggagcagtcattgatggtgtaaactcggcctccagagcactggcttgtctctggctatcagggaccctcttagcccacttcttcatcaagttttga

SEQ ID NO: 24922 - DNA, 6424 bp, Artificial Sequence
  derived and/or modified sequence
tgtgcaagaaaagaaatcagagacgctgcctgcctgctcccatctctcgcgcgctctctctctcttctgctctctccctccctttgcaaacattggatttaaacctgctcagaattcagcacagaggaaggcagcagcggtagcagcagcagaagcagtagcaagcccggcagctgagagcaccgcagcgtcgagatgtaccatcctgcctactgggtcgtcttctcggcgacaactgccctgctcttcatcccaggagtgcccgtgcgcagcggagatgccaccttccccaaagctatggacaacgtgacggtccggcagggggagagcgccaccctcaggtgtaccatagatgaccgggtaacccgggtggcctggctaaaccgcagcaccatcctctacgctgggaatgacaagtggtccatagaccctcgtgtgatcatcctggtcaatacaccaacccagtacagcatcatgatccaaaatgtggatgtgtatgacgaaggtccgtacacctgctctgtgcagacagacaatcatcccaaaacgtcccgggttcacctaatagtgcaagttcctcctcagatcatgaatatctcctcagacatcactgtgaatgagggaagcagtgtgaccctgctgtgtcttgctattggcagaccagagccaactgtgacatggagacacctgtcagtcaaggaaggccagggctttgtaagtgaggatgagtacctggagatctctgacatcaagcgagaccagtccggggagtacgaatgcagcgcgttgaacgatgtcgctgcgcccgatgtgcggaaagtaaaaatcactgtaaactatcctccctatatctcaaaagccaagaacactggtgtttcagtcggtcagaagggcatcctgagctgtgaagcctctgcagtccccatggctgaattccagtggttcaaggaagaaaccaggttagccactggtctggatggaatgaggattgaaaacaaaggccgcatgtccactctgactttcttcaatgtttcagaaaaggattatgggaactatacttgtgtggccacgaacaagcttgggaacaccaatgccagcatcacattgtatgggcctggagcagtcattgatggtgtaaactcggcctccagagcactggcttgtctctggctatcagggaccctcttagcccacttcttcatcaagttttgataagaaatcctaggtcctctgagcaacgcctgcttctccatatcacagactttaatctacactgcggagagcaaaccagcttgggcttctttttgtttttttctgttattctagatttgttttctttttgtttttgtttatttgtttgtttgcttttatttccagcttgaatgagtggggttgggggcggggtgggcagggttctaccacgtgtaggataatcattcattggtgtgtccaaaaatggggtctgctcctgctaccttgacccttccctttcctctgcttctctcctcatcatcattcccaacaacatcctctgccacacacaacaaaacgtaagtttcatttgggcaaaaattgagcctcacaataaacaccctgaagacacaacttgacttataacatagtgcacagcaagagctacatccaagtgtcctattatctgtgattattttcttaatgacaatgtacatatgcccccatccatgttaattattatctaattccattagggttcacgtcttttctttctgggacactatcctactatatccatatctatagatttcaatatagatgattgtgccatcttctgtagcccctccgctctactcattccttccaccatctgcagagatttgaagtttggggctatgcatgaaacccaacactaaattttgcaagtcaagtaaccaaaaaagggggaggcattttgaagatagaacctctattttaaaaagagaagttcaactcataaacgtgattgataggtggctgatttatttaggttttgtcaagctatctatcaaagtaatggtacagttacccatctactcaaatatctgatttatctcaccatccaattatctacccacctgtcttcctctctagcaatctatttactgtttatcaatctatcaatgtaattgtctaacactcctttctattctctccctactactcactatcaattcatccccatatgaatctctaaccatattgtatctctcccactgtattcatttatacaccatcagcagacattggcatcttcaaaattatctttcaacttctgtgaaagccaacgatctcacaggttaacaaaatacaaaagcaataccctgtgttgtggactctttaaaatctggtatcctatccacccaagggagacactaacagataggccaaagtagcaagctaatgatcagtcactcactattcccagaagagcctgtgttttctaaaacactttcttgggaagcagatcagcctagaaaagttttgattagcactgtggttttccttttgcacttgaaggacaaaggtgccagcctttatgcttctctcaacccttcaagaaagtacatgtcaggaacctatggctggctttccttagcagcaagaacttgagagaaaaacacatctgtctctgcaatgcaaagtgaagagtccacccgcctgagtgggatgacttcagctagagtctcctttctgctccagttctggtttaatctgtttgaaaactatccagtaaaaagctgatggaggccaattacatggcgggtgtattgacaactctggtatttgtttcaggaagctcttctaagctgagggcacttgagcaactgacttaattttcaagcacttgattaacacaacactgcaaacagaagggagaaagtgtcagtgacacagtttcctctgatgcagctgcttctccaatggctttggggaagaacttcaccagctcttcaggttcaaagcagacccagcatacaaacaagagctgagccacctttgctgtcttgtctcctgggacgagaaggactcatccagcaaagttgcctgggattcaaaataaaggcattgcagaccgcacaggtgtgctgcagggactgatccacagagaggatgagaatgcagcatcaatcgcagacctgccctgcctcagttggaaaaccttttcaggccctcagtctaaaaaataaaaaatatgagcaccattgaattctgtgcccttaatgcttaactggtcttcttcctctggtatcagtgtcctctttgtttttgtccatcaaggcacatgagtgtgacctctgccatggggaaacacacacagagatatctatacatatatacatacatacaaacataggctatcttggcacactaaatgctaagcactgtcttaagaggtagagctggtgtgagtgaaattaatgttacattttccagctgtaaacagacatctgcatttcctagtgagctgccaggagccagattcgggaaccgtaactgatgtgccaggaatggtgcattgattcccagttccagggatgatcatgagcaggcgcaaaatcagaattaaaggtcgcacatagacgtttcagatctgtcaccaccttcagcatctggagttgagttggtgtcagatagtgtatgagaattaaatgtgtcatctgagcatgctactgatgataaatttgttactttggagttgaataaatgtgaaggctgtgaagagtggacagtcttggagaacacagtgcttgaaatggacaagctggacctattcctcactccaagacttgttctacaggaaagggtccatgctcctttggccaagatcatcagaacctctcaacccaacaaggctggcttcagggccactatggaaccctgctgttcccccttccaaaggatactaagatgcccctctggtgggtacctatcccagccacgtttcagagggagagaaatgctacagttgatcctcatctgtctggggtaaagacaacaaagtaaatacaacccaaggcaactggggtactcactgggagtgaaaatgacttcttcacaacagacatatttctgcttctgtgtttttgtgtttctttggtggggatggcttcatgggagagtggctgtcacccatcattttgaagcatatagaacaacaaatgcttacacaagacaatatccacacttttccaacttcacacacggagagtacatggagaatgcctacaggctagatttgttcagggtgccagtagtgggcatggggtgggggcaaggcaggacaaaacatacaagtctgagcaagtacatctcttgcaggttttccacatgaaaaggaagccaaataagtcctgttaggagattaggtgagaggaattagcaatgtagggactctgaaacccttccccttcccaaaacagagttcatatgcacttccaccaaagtaatgccaatgaaagtgctcgtgttaaggctgcagccaagcttgtttttcagtagtttaatgtcaagtgcctgatacagtcgactgcaagtctaaacaagcatgtttagtttttctcattcttgctttaattcagggagggggagatgtagagaagtggttgtgaaaacatgtacaggctttatgcagagcactgcgcatggctgttctgctgcaactgtgctccacgaaacagaagaaaaggtaaggtgttgtgtcacaaagaggccccagtctctttcttcttacatccatgcctcttactagatgatacatttacagattgggcagtttgttctcaaaacctgggtgagaagactattcctggactctagcaacttcaaaactgaggctgggtttcagaatctttttctgcatcaattcagtcaatttgccttcaacaaagagaagtcagcaagttctatttatgctgaaagaactattccatgagaaaagcagagaaccccaaagtgggcaggcaaccccgacgagagcttatccctgtggcggcatcaggagtggctgtacattgaattttcaagtgctggttggctgtcgccagcccatggtaggaggggaggaatggcttaagatgaggtaagatctggtggtggggcatctttcctcaattccatactgactttgatcttgagaaagaaaaactggctatgcattacctaaaaccagtccaaaatgaaacagaccaacacacacacaaaagcaaattgtcaatccctttggaattaagggaagcagcataaggtttttctttttggaaaaaatgcatttattttctttttctccaacagcaagaatcttttgttttcattttgcacgtgaccttatcttggaaactcttatacccaattgcctcccctcctattattcagagcttccctgtctttttacttgaagacaaataagtttgagcacttgagtaaaacttcacaggtgtgtaagtaggaaggcaacattttcaaaaagagaccatatgatgagaacgcctaatgatcaccacatgcaaacaaacaaaactgccagtctcatttcccacatttcttacttaagagaagagaagtaaatgaaaggaagaagaaatagatttgtaattaaagatgtggcaaaaaagatagggctgagccagttcaatttagccttcaggtgcagaatacttagagtccaaagaaatgtggagtggacttaattagatgcagttgtctttatcctgaaagtagtgagctaagcctaatttccagcattttgaaagagattcctttttgtttctttccatggtgccctctttaaggcacagagttgctccacaccactgggtggagaaagaaagattgcgaaccctcgaccatccttttgaggctacattctatgttatttggcagatttataaagctatcagtaataacaatgctatgtactgcaagctgcccttgtgttagttaaagggagcatttttaatcgttcggaaattttcgtgacatgtcaagtgcagttgtgaggactgtgtgggtgaacgaaaatgtgtctgtcaagttcagagtcctttagatttaaaaaaaaattatgacttatcaatggtgccgttatagctgtgtcagacaatgggtgtgcccattctcacaattatccttcaaaaaaaatctatgttcaaatgctttaaaaatttatcacacgatacaagagtatgactttgtcagccttctagagttctttttttcttttattttctttcgtattttttccttcaaaaaatcaatgaagacttgatttctgtcaataattgtatcaagggtgaatatactacctgaattttgtgcatgttacattgtagttgtaaccttttctaattcaggatgaatacgagatggttgtgattgtgcagtgtaccaataaagttcgagaaatttgtaa

SEQ ID NO: 24923 - DNA, 939 bp, Artificial Sequence
  derived and/or modified sequence
atgtatcaccccgcatactgggtggtcttctctgcaactacagcactgctgtttatcccaggtgttcccgtgagaagtggcgatgcgactttcccgaaagccatggataatgtgaccgtccggcagggcgaaagtgcaacattgcgctgtaccatcgacgatagagttactagggtagcctggctgaacaggtccactatcatgatacagaacgtggatgtgtacgacgaaggcccttacacatgttctgtccagacagataaccatcccaagacatctagagtccatctgatcgtgcaggtgcctccccaaattatgaatatctcttctgatattaccgtcaatgaagggtcttcagtgactcttttgtgcctggctatcggacgacccgagcctactgtgacatggcggcatttgtccgtaaaggaagggcagggattcgtttctgaagatgagtatctggagatctctgacattaagagagaccagagcggcgagtacgaatgttctgcccttaatgatgtggctgcccctgatgtgaggaaggttaagatcacagtgaattaccccccatatattagcaaggccaagaacaccggcgtttctgtaggacagaagggcattctgtcatgtgaagcgtctgctgtgccaatggctgaatttcagtggtttaaggaggaaacccgactggccacaggcctggacgggatgcgaattgagaacaaaggtcgcatgagtacactaacctttttcaacgtcagtgagaaagactacggcaactacacatgcgtagcaaccaataaactgggaaacacaaacgcctccatcaccttgtatgggccaggcgcagtcatcgatggcgttaattccgcctctcgggctctggcttgtctctggctcagcgggacactgcttgcccacttctttataaagttctag

SEQ ID NO: 24924 - DNA, 1017 bp, Artificial Sequence
  derived and/or modified sequence
atgtatcacccggcttattgggtggtgttcagtgctacaacggcccttctgttcatccccggagtgccggtgcgatcgggcgacgcaacatttcctaaggcgatggacaatgtgactgtgaggcagggcgaatctgctactcttcggtgcaccattgacgaccgggtgacccgggtcgcctggttgaatcgatccaccatcctctacgcaggcaatgataaatggtcgattgatccgcgagtaataattctggttaatactcctacccagtattccattatgatccagaatgtggacgtttacgacgaaggaccctacacttgctcagtccagaccgacaaccaccccaaaacatctagggtccacctcattgtgcaggtccctccgcaaattatgaatatcagctccgacatcacggtcaacgagggaagctcagtgactctcctgtgcttggcaattgggaggcccgagccgaccgtaacttggcgccacctgtccgtgaaggagggtcagggcttcgtcagcgaagatgagtacctcgagatcagtgacattaagagagaccagagcggagaatatgaatgctcagccttgaatgacgtagcggctcccgacgtgcgcaaagtgaagatcactgtgaactacccgccttatatcagcaaagctaagaataccggagtatcagtgggacagaagggtatcctctcttgcgaagctagcgcagtacctatggctgagttccaatggttcaaggaagaaactcgccttgcaactggcctggatggcatgcgcatcgaaaacaaaggaagaatgtctaccctcacattctttaacgttagcgaaaaggattacggaaattatacctgcgtggctacaaataaactgggtaataccaatgcttcaattaccttgtatggtccaggtgccgtgattgatggcgtgaacagtgcttccagagcactggcttgcctgtggttatctggaactctgctggcacatttctttatcaaattctag

SEQ ID NO: 24925 - protein, 527 aa, Artificial Sequence
  derived and/or modified sequence
MAKERCLKKSFQDSLEDIKKRMKEKRNKNLAEIGKRRSFIAAPCQIITNTSTLLKNYQDNNKMLVLALENEKSKVKEAQDIILQLRKECYYLTCQLYALKGKLTSQQTVEPAQNQEICSSGMDPNSDDSSRNLFVKDLPQIPLEETELPGQGESFQIEDQIPTIPQDTLGVDFDSGEAKSTDNVLPRTVSVRSSLKKHCNSICQFDSLDDFETSHLAGKSFEFERVGFLDPLVNMHIPENVQHNACQWSKDQVNLSPKLIQPGTFTKTKEDILESKSEQTKSKQRDTQERKREEKRKANRRKSKRMSKYKENKSENKKTVPQKKMHKSVSSNDAYNFNLEEGVHLTPFRQKVSNDSNREENNESEVSLCESSGSGDDSDDLYLPTCKYIQNPTSNSDRPVTRPLAKRALKYTDEKETEGSKPTKTPTTTPPETQQSPHLSLKDITNVSLYPVVKIRRLSLSPKKNKASPAVALPKRRCTASVNYKEPTLASKLRRGDPFTDLCFLNSPIFKQKKDLRRSKKSMKQIQ

SEQ ID NO: 24926 - DNA, 1584 bp, Artificial Sequence
  derived and/or modified sequence
atggcaaaagagaggtgtctgaagaaatccttccaggattccctggaggatataaagaaaaggatgaaagagaagaggaataaaaatctggcagagatcggaaagcggcggagctttatagccgctccatgtcaaataataactaacacttcgacactgttgaaaaactatcaggataacaataaaatgctggttctcgctctggagaatgaaaagtcaaaagtcaaggaggctcaggatatcattttgcagctgcgtaaggagtgctactaccttacatgccagctttatgccctgaaaggaaagctaacatcccaacagaccgtagaacccgctcagaatcaagaaatctgtagctcgggtatggatcccaacagcgacgactccagcaggaatctgttcgtcaaagacctgccacagatccctctggaggagacagaactgccagggcagggcgagtcattccagatcgaagaccagatccctacaatcccacaggatacactcggagttgacttcgatagtggtgaggctaagtcaactgataatgtcttgcctcgaactgtttcagtgagatcctccctgaaaaaacattgtaattcaatttgtcagttcgattcattggacgatttcgaaacttcccatttggcaggaaaaagcttcgagtttgagcgggtggggtttttagatccacttgttaacatgcatattccagagaatgttcaacacaatgcttgccaatggtccaaggaccaggtgaacttgagccccaagctcatccaacccggaacatttacaaaaactaaggaagacatccttgagtcaaagtcggagcagacaaaatccaaacaacgggacacccaggaaaggaaacgcgaggagaaaagaaaggccaaccgaaggaagagcaagcgaatgtctaaatacaaggaaaataaatctgaaaacaagaagaccgtcccccagaagaaaatgcacaagagtgtgtcctccaacgatgcatataactttaacttagaggaaggtgtacacctcactcccttccggcaaaaagtgtccaatgacagtaaccgggaggagaacaacgaaagcgaggtctctctgtgcgagagctccggttctggcgatgattctgatgacctgtacctcccaacgtgtaagtacatccaaaatcctaccagcaactccgacagacctgtcacgcgccccctggccaagcgcgccctgaaatacacagatgagaaggagaccgaggggagcaagccaaccaagactccaactaccaccccccctgagacccagcagtcaccacatctgtctttgaaggatatcactaacgtgagcctttacccagtggttaaaattaggagactatcactctctcccaagaagaataaggcctcacccgcagtcgccttgccgaaacgtcgctgcactgccagtgtgaactataaggaacccacccttgcctcaaagctgagaagaggtgaccctttcaccgatctttgttttctgaactcaccgatttttaaacaaaaaaaagaccttcgtcgttccaagaaaagcatgaagcagatacagtag

SEQ ID NO: 24927 - DNA, 1584 bp, Artificial Sequence
  derived and/or modified sequence
atggcgaaggaacgctgtctgaagaagtccttccaggactccctagaagatattaaaaagaggatgaaagaaaagcgcaacaaaaatctggctgaaatcggcaaacggaggtcatttatcgcagccccttgccaaatcattacaaatacctctactctcctgaagaactatcaggacaacaataaaatgctggtgctcgcactggaaaacgaaaaatccaaagtgaaagaggcacaggacattatccttcagctcaggaaagagtgctattacctcacctgtcaactttacgccttaaaagggaagcttacttctcagcagacggtggaacctgcccagaatcaggaaatctgctcttctggtatggacccgaactccgatgatagctcacgtaatcttttcgtgaaagatctgccacagattcccctagaagagaccgaattacctgggcagggggagtcctttcagattgaggaccaaattccaaccatcccacaggataccctcggcgtggactttgattctggggaggcgaaaagcacggacaacgtactacctaggacagtgtctgtacgctcgagtctcaagaagcactgtaactctatatgtcagtttgacagccttgacgactttgaaacttcccacctggctgggaaaagctttgagttcgagcgtgtcgggttcctcgatcccctggtaaacatgcacattcctgagaacgtgcagcataacgcatgtcaatggagtaaagaccaggtgaacctctcccctaaacttattcagcccggtacattcactaaaaccaaggaagatattctagagagtaagagcgagcaaactaagtcaaaacagagagatactcaggagagaaaacgcgaggaaaagaggaaggccaaccgccgcaagtctaagagaatgtctaaatacaaggaaaacaaaagcgagaacaaaaagaccgtgccgcagaagaagatgcataaatcggtgagttcgaatgacgcatacaattttaatctggaggaaggcgttcatcttactccattccgacaaaaagttagcaatgactcaaacagggaggagaacaatgagagcgaagtgtccctgtgcgaatcttcaggttctggcgacgattccgacgacttatatctccccacctgcaagtatatccagaaccccacatcaaatagcgaccgacctgtgacaagacccctagctaagcgagccttgaagtacacagacgaaaaagagaccgaaggttccaaaccaactaagacccccaccacaacccccccagagacccagcaatcccctcatctgtcacttaaggacataactaacgtgagtctgtaccccgtcgtgaaaataagaagactgagcttgtctcccaagaaaaataaagccagccctgctgtggccctccctaagaggcggtgtactgccagcgtgaactataaagaacccactctggccagcaaactcagacggggcgacccattcacagatctctgttttcttaactctccaatatttaaacagaaaaaggacctgcgcagatcaaaaaaatccatgaagcagattcagtag

SEQ ID NO: 24928 - DNA, 1584 bp, Artificial Sequence
  derived and/or modified sequence
atggccaaggagcgctgcctgaagaagagcttccaggacagcctggaggacatcaagaagaggatgaaggagaagaggaacaagaacctggccgagatcggcaagaggaggagcttcatcgccgccccctgccagatcatcaccaacaccagcaccctgctgaagaactaccaggacaacaacaagatgctggtgctggccctggagaatgagaagagcaaggtgaaggaggcccaggacatcatcctgcagctgaggaaggagtgctactacctgacctgccagctgtatgccctgaagggcaagctgaccagccagcagacagtggagcccgcccagaaccaggagatctgcagcagcggcatggaccccaacagtgatgacagcagcaggaacctgtttgtgaaggacctgccccagatccccctggaggagacagagctgcccggccagggcgagagcttccagatcgaggaccagatccccaccatcccccaggacaccctgggcgtggactttgattctggagaggccaagagcacagacaacgtgctgcccaggacagtgtctgtgcgcagcagcctgaagaagcactgcaacagcatctgccagtttgacagcctggatgactttgagaccagccacctggccggcaagagctttgaatttgagcgggtgggcttcctggaccccctggtgaacatgcacatcccagaaaatgtgcagcacaatgcctgccagtggagcaaggaccaggtgaacctgagccccaagctgatccagcccggcaccttcaccaagaccaaggaggacatcctggagagcaagtctgagcagaccaagagcaagcagagggacacccaggagaggaagcgggaggagaagaggaaggccaacagaaggaagagcaagaggatgagcaagtacaaggagaacaagtctgagaacaagaagacagtgccccagaagaagatgcacaagtctgtgagcagcaatgatgcctacaacttcaacctggaggagggcgtgcacctgacccccttccggcagaaggtgtccaatgacagcaaccgggaggagaacaatgaaagtgaggtgtccctgtgtgagagcagcggcagcggagatgacagtgatgacctgtacctgcccacctgcaagtacatccagaaccccaccagcaacagcgacaggcctgtgacccggcccctggccaagagggccctgaagtacacagatgagaaggagacagagggcagcaagcccaccaagacccccaccaccaccccacctgagacccagcagagcccccacctgagcctgaaggacatcaccaacgtgtccctgtaccctgtggtgaagatccggcggctgagcctgagccccaagaagaacaaggccagccctgctgtggccctgcccaagaggcgctgcacagcctctgtgaactacaaggagcccaccctggccagcaagctgcggcggggggaccccttcacagacctgtgcttcctgaacagccccatcttcaagcagaagaaggacctgcggcgcagcaagaagtccatgaagcagatccagtag

SEQ ID NO: 24929 - DNA, 1584 bp, Artificial Sequence
  derived and/or modified sequence
atggccaaggagcggtgcctgaagaagagcttccaggacagcctggaagacatcaagaaaaggatgaaggagaagagaaataagaaccttgccgaaatagggaaaaggcgttcttttatcgcagcgccttgtcaaataatcactaacaccagcaccctgctgaaaaactaccaggacaataataagatgttggtcttagcactggagaacgagaagtccaaagttaaagaagcgcaggatattatcctccagttacggaaggagtgttactacctgacctgccagctttatgcactgaaggggaaattaacctctcagcaaaccgtggagcctgctcaaaatcaggaaatctgctcctctggcatggatcctaattcagacgattccagccgcaacctgtttgttaaagacttaccacaaattcctctcgaagaaactgagctgccagggcagggagagtcttttcagatagaagatcagattccaaccataccacaggatactctgggggtggactttgactccggagaggccaagtcaactgacaacgtgctgccccgcaccgtgtcggtgagatcctcccttaagaagcactgtaacagcatttgccagtttgactccctcgacgatttcgaaacttctcatcttgcaggaaagtctttcgagttcgagcgagtgggattcctggaccctcttgtcaacatgcatatccccgaaaacgttcagcacaacgcctgtcaatggagcaaagatcaggtgaatcttagccctaaactgatccaacccggcacattcactaagaccaaggaggacatcctggaaagtaaaagtgaacaaactaagagcaagcagcgagacacacaggagcggaaacgcgaggagaagcggaaggcaaacaggaggaaaagcaagcggatgtccaagtataaagagaataaatcagaaaacaaaaagaccgtgccacaaaaaaagatgcacaagtccgtatctagcaacgacgcctataatttcaacctggaggagggggtgcacttaacacccttcagacagaaggtaagcaatgattcaaaccgggaagagaataatgagtccgaggtttctctgtgtgagtctagcggttccggcgacgatagtgatgacctgtacctgccgacctgtaaatatatccaaaatcccacatcaaattcagaccgcccagtaacccgaccactagcaaaacgtgccctcaagtatacagatgagaaggaaactgagggtagtaagcctacaaagaccccaactaccactcctccagagacgcaacagagcccgcacctcagcctcaaagatattaccaacgtgagtctgtatccggtagtgaaaatccggcgtctatctctgtcccctaaaaaaaacaaagctagcccggctgtcgctttgcctaagagacgctgtaccgcaagcgtgaactataaggagccaacacttgccagtaagctccgtaggggtgacccattcactgatctgtgcttcctaaactcaccaatttttaagcagaagaaggatttacggagaagcaaaaaatctatgaagcagatccagtag

SEQ ID NO: 24930 - DNA, 1584 bp, Artificial Sequence
  derived and/or modified sequence
atggccaaggagcggtgcctgaagaagagcttccaggacagcctggaggacattaagaaacgcatgaaagagaaacgtaacaagaatctggccgaaatcggaaaaaggcgttctttcatcgctgccccttgccaaattataaccaacacttccactctcctgaagaactaccaagacaacaacaagatgttggttctcgctttggaaaatgaaaagtcgaaagtcaaagaagcccaggacattatcttgcagctgcggaaggagtgttattacctcacgtgccagctgtacgccctgaagggcaagctgacgtcacagcagacggttgaacccgcccagaatcaagagatttgcagctctggtatggaccctaatagtgacgactccagtcggaacctgtttgtgaaggacctgcctcaaatcccactggaggagacagaacttccaggacaaggcgagagcttccagattgaagaccagatacctaccatccctcaggacacccttggcgtggacttcgattctggggaggccaagtcgacagacaacgtgcttccaagaacggtctccgtgcggtcaagcttgaagaagcactgtaacagtatctgccagtttgattcattggatgattttgagaccagccatctagcggggaaatccttcgaattcgagagagtgggcttcctcgatcccctggtgaatatgcacattcccgaaaacgttcagcacaatgcctgtcaatggtctaaagatcaggtgaatctgagtcctaaattgatccagcctggaacctttaccaaaactaaggaagacatcttagagagcaaatcggagcagacaaagagcaagcagcgagatacacaggaacgaaagagggaagagaagagaaaagcgaaccgtaggaaatctaagcggatgagcaagtataaggagaataagagtgaaaacaagaaaactgtgccacaaaagaaaatgcataaatccgtgtcgagcaacgacgcttacaacttcaacctcgaggagggagtgcatttgacccctttccgccagaaggtatccaacgactcaaaccgcgaagagaataacgagtccgaggtgagcctgtgcgagtcttccggtagcggggatgactccgacgacctgtacctccccacctgcaagtacatccagaatccgaccagcaattcagatcgccccgtcacccgtccccttgctaagagggcattgaaatacaccgatgagaaggaaactgaaggctcaaagccgacgaagaccccgacaaccacccctccagagacccagcagagcccacacctgtccctgaaagatatcacaaacgtgagtctataccctgtggtgaagatccgacgcttgtcactgtctccaaaaaaaaataaagcttccccggctgtggccctcccaaagcgaaggtgcacagctagcgtaaactacaaagagcccacccttgcttccaaactgagaagaggagatcccttcacagatctgtgcttcctaaactcgccgattttcaagcagaagaaggatcttcgtaggtcaaaaaaatctatgaaacagatccagtag

SEQ ID NO: 24931 - DNA, 1584 bp, Artificial Sequence
  derived and/or modified sequence
atggcaaaagagcggtgtctgaaaaagagctttcaggactcgttagaagacatcaaaaaacggatgaaagagaagcgtaataaaaacctcgcagaaatcggcaagagacgaagtttcattgcggcaccttgtcagataatcaccaacactagcactctgttgaagaattaccaggataataacaaaatgttggtcttagcccttgagaacgagaaaagtaaggtcaaggaagcacaggacatcattcttcaactgcgtaaagaatgttactatttgacctgtcagctttatgccctcaaaggaaaacttacctcccagcaaactgtagagccagcccagaatcaggagatatgcagcagcgggatggatcccaattctgacgactcgtcgagaaatcttttcgtcaaggacctgcctcaaattccgttagaagagactgaacttccagggcaaggagagtccttccaaatcgaggatcaaatccccacaatcccccaggatacacttggtgtagacttcgattccggggaggcaaagagtactgacaatgtgctgcctcgcaccgtctctgtccgaagctccttaaaaaagcactgtaactccatatgccagtttgacagtctggacgactttgaaacctctcatctagccggaaaaagtttcgagttcgagcgtgtgggcttccttgaccccctggttaatatgcatatcccagagaatgtgcagcacaatgcttgtcagtggtcgaaggaccaggtgaacctctcacccaaactgattcaaccagggacttttaccaaaaccaaagaggacattctcgagtcaaaaagtgagcagaccaagtctaaacagcgcgatacccaggaaagaaaacgagaagaaaaaaggaaggctaatcggaggaagtccaagcgtatgagtaaatacaaggagaataaatccgaaaacaagaagacagtgcctcagaaaaagatgcacaaaagtgtcagcagcaacgacgcctataactttaatctcgaggagggtgtacatctcaccccgtttcgccagaaggttagcaatgattctaatagagaggaaaataacgaaagcgaggtctctctgtgcgaatcttctggaagtggagacgactctgatgacctctatttgcctacatgcaagtacatacagaaccccactagtaattcagatcggccagtcacacgccctctcgccaaaagggcgctgaagtacaccgatgagaaagagaccgagggctccaagcccactaaaacccccaccacaactcctcctgagactcagcagagccctcatctgagtcttaaagacataacaaacgtatccctgtacccagttgtgaagattagacgcctgagtctcagccccaagaagaataaggcatcgcctgcagtcgcccttcccaagaggaggtgcaccgcctcagttaactacaaagaaccaacattggcttcgaagcttcgcagaggcgatccctttacagacctgtgtttccttaacagccctattttcaaacagaagaaagacttaagaaggtccaaaaagtctatgaagcagatccagtag

SEQ ID NO: 24932 - DNA, 1584 bp, Artificial Sequence
  derived and/or modified sequence
atggccaaagaaagatgccttaagaagtcctttcaggatagccttgaggacatcaaaaagcggatgaaagagaaaaggaacaaaaaccttgcagagattggcaaacggaggagcttcatcgcagctccatgtcagatcatcacaaatacgtcaaccctgttgaaaaattatcaagacaataacaagatgttagtcttggctcttgagaacgagaagtctaaggtgaaagaagcacaggatattatccttcagctcaggaaggaatgttattatcttacctgccagttatacgcactcaaaggcaagcttacatctcagcagacggttgaacctgcccaaaatcaggagatctgtagcagcggcatggatcccaatagcgatgacagctcccggaatctgttcgtgaaggacttgccacagatccccctggaggaaactgaactgcctgggcagggtgaaagttttcaaatcgaggaccagatacctacaatcccacaggatacactcggtgtggacttcgatagtggcgaagccaaatcaacggacaacgtgctgcccaggaccgtgagtgtgcggagtagcctgaagaagcactgtaacagtatttgccagtttgacagcctggatgacttcgaaaccagccaccttgccggaaagagcttcgaattcgaacgtgttggtttcctcgaccctttggtgaacatgcacatccccgagaatgtgcagcacaacgcctgtcagtggtcgaaggaccaagtaaacctgtcaccgaagctaatccaaccaggtacatttacaaagacaaaggaagatatcctggagtccaaatctgagcaaacaaagagtaaacagcgggacacccaggagcgtaagcgcgaggagaaacgaaaggctaaccgacgtaagtctaagagaatgagtaagtacaaagagaacaagtctgagaataagaagactgtaccccagaagaaaatgcacaagtcagtttcttcaaacgacgcctataatttcaacctagaggagggagtccatctgacacctttcaggcaaaaggtgagcaatgattctaaccgggaggagaataatgagtcagaggtatccctttgcgaatctagcggcagcggagacgacagcgacgacttatacttgcccacatgcaagtacatccagaatcctacctcaaacagcgaccgccctgtcacacgcccactcgcaaaaagggctctgaaatatactgacgagaaagagaccgagggctctaaaccgaccaaaacgccgactactaccccacctgagacgcagcaatccccacatctgagtctgaaggacattacaaacgttagcctctaccccgtcgtcaagataagaagattatccctgtcaccaaaaaaaaacaaagcctcacccgcagtggccttgccaaagcgcagatgcactgcttcagtgaattataaggaacctacactggcctccaaattgcggagaggtgatccgttcaccgatctgtgcttccttaactctccgatctttaaacaaaagaaggatttgcgcaggtctaaaaagtccatgaaacagattcaatag

SEQ ID NO: 24933 - DNA, 1935 bp, Artificial Sequence
  derived and/or modified sequence
agttccaggcgacggcggacggtggtacggtcctggagggcccagtgcgcggggctagccgtggctggagagcttcgaagagccttgaaatgtgaggaggaggaagatagctgttgcagaagtagtggccaaggcaaaagatggccaaggaaagatgcctgaaaaagtcctttcaagatagtcttgaagacataaagaagcgaatgaaagagaaaaggaataaaaacttggcagagattggcaaacgcaggtcttttatagctgcaccatgccaaataatcaccaacacttctacactgctgaaaaattaccaagacaacaacaaaatgttagttttagctttggaaaatgaaaaatccaaagtgaaagaagcccaagatatcatcctacagctgagaaaagaatgttactatctcacatgtcagctatatgcattgaaaggaaaacttacatcacaacaaacagtagaacctgctcagaaccaggaaatatgttcctctggaatggaccccaatagtgatgacagctccagaaatttatttgtgaaggatttaccgcaaattcctcttgaagaaactgaacttccaggacaaggagaatcatttcaaatagaagatcagatacctactattcctcaagacacactgggagttgattttgattcaggtgaagctaagtctactgataatgtcttacctagaactgtatctgttcgtagcagtttaaagaaacattgtaacagtatatgtcagtttgatagcttggatgattttgaaaccagtcatttggcagggaagtcttttgaattcgaaagagttggatttttagacccactagtaaacatgcacatacctgaaaatgtacaacacaatgcttgtcaatggagcaaggaccaagttaacttatcaccaaagctgattcagccaggaacgtttactaaaacaaaagaagacattttagaatctaaatctgaacaaactaaaagtaagcaaagagatacacaagaaagaaaaagagaagagaaaagaaaagctaacaggagaaaatcaaaacgtatgtcaaaatataaagagaataaaagcgaaaataaaaaaactgttccccaaaaaaaaatgcacaaatctgtcagttccaatgatgcttacaattttaatttggaagagggtgttcatcttactcctttccgacaaaaagtgagcaatgactctaatagagaagaaaacaacgagtctgaagtgagcctctgtgaatcaagtggttcaggagatgattccgatgacctctatttgcccacttgcaagtacattcagaatcccacgagcaattcagatagaccagtcaccaggcctctagctaaaagagcactgaaatacacagatgaaaaagagacggagggttctaagccaacaaaaactcctaccactacaccacctgaaactcagcagtcacctcatcttagcctgaaggatatcaccaatgtctccttgtatcctgttgtgaaaatcagaagactttctctttctccaaaaaagaataaagcaagcccagcagtggctctgcctaaacgtaggtgcacagccagcgtgaactataaggagcccaccctcgcttcgaaactgagaagaggggacccttttacagatttgtgttttttgaattctcctattttcaagcagaaaaaggatttgagacgttctaaaaaaagtatgaaacaaatacaatgaaggttttgttggatattgtttaaattcaatctacacctctttctgttgcttcaggagaggatctgtaagagtacacaaacagagtgagccattgccatagaatattctcttgacaggaccctagctcataaacatttcttcagaactatacttcaaatgggatgctttgtattaaaactttaataaatttaatttattttttcttttgaat

SEQ ID NO: 24934 - DNA, 2587 bp, Artificial Sequence
  derived and/or modified sequence
tctgcctgcgacggtggtgttgggtgcatcctgcgccacgtgaccgcctcccagccaaccaatggaggagcgaggcggaaaatttcgaatgtggcggcggtagttccaggcgacggcggacggtggtacggtcctggagggcccagtgcgcggggctagccgtggctggagagcttcgaagagccttgaaatgtgaggaggaggaagatagctgttgcagaagtagtggccaaggtatcgttctggacgcgcctgcggcaggagggtcgccgcgtccacttccgccagccccacctccccccggccttcctggagtccctgaaagaggaagaagtaggttttaaggcaaaagatggccaaggaaagatgcctgaaaaagtcctttcaagatagtcttgaagacataaagaagcgaatgaaagagaaaaggaataaaaacttggcagagattggcaaacgcaggtcttttatagctgcaccatgccaaataatcaccaacacttctacactgctgaaaaattaccaagacaacaacaaaatgttagttttagctttggaaaatgaaaaatccaaagtgaaagaagcccaagatatcatcctacagctgagaaaagaatgttactatctcacatgtcagctatatgcattgaaaggaaaacttacatcacaacaaacagtagaacctgctcagaaccaggaaatatgttcctctggaatggaccccaatagtgatgacagctccagaaatttatttgtgaaggatttaccgcaaattcctcttgaagaaactgaacttccaggacaaggagaatcatttcaaatagaagatcagatacctactattcctcaagacacactgggagttgattttgattcaggtgaagctaagtctactgataatgtcttacctagaactgtatctgttcgtagcagtttaaagaaacattgtaacagtatatgtcagtttgatagcttggatgattttgaaaccagtcatttggcagggaagtcttttgaattcgaaagagttggatttttagacccactagtaaacatgcacatacctgaaaatgtacaacacaatgcttgtcaatggagcaaggaccaagttaacttatcaccaaagctgattcagccaggaacgtttactaaaacaaaagaagacattttagaatctaaatctgaacaaactaaaagtaagcaaagagatacacaagaaagaaaaagagaagagaaaagaaaagctaacaggagaaaatcaaaacgtatgtcaaaatataaagagaataaaagcgaaaataaaaaaactgttccccaaaaaaaaatgcacaaatctgtcagttccaatgatgcttacaattttaatttggaagagggtgttcatcttactcctttccgacaaaaagtgagcaatgactctaatagagaagaaaacaacgagtctgaagtgagcctctgtgaatcaagtggttcaggagatgattccgatgacctctatttgcccacttgcaagtacattcagaatcccacgagcaattcagatagaccagtcaccaggcctctagctaaaagagcactgaaatacacagatgaaaaagagacggagggttctaagccaacaaaaactcctaccactacaccacctgaaactcagcagtcacctcatcttagcctgaaggatatcaccaatgtctccttgtatcctgttgtgaaaatcagaagactttctctttctccaaaaaagaataaagcaagcccagcagtggctctgcctaaacgtaggtgcacagccagcgtgaactataaggagcccaccctcgcttcgaaactgagaagaggggacccttttacagatttgtgttttttgaattctcctattttcaagcagaaaaaggatttgagacgttctaaaaaaagtatgaaacaaatacaatgaaggttttgttggatattgtttaaattcaatctacacctctttctgttgcttcaggagaggatctgtaagagtacacaaacagagtgagccattgccatagaatattctcttgacaggaccctagctcataaacatttcttcagaactatacttcaaatgggatgctttgtattaaaactttaataaatttaatttattttttcttttgaatataaataactgagcttaagcattatcatcatatcgatttcttatgctgcctaaacctcttaattttagtcgaaatatatctttttttttttttggaggcggaatttcattcttgttgcccaggctggagtgcaatggcacgatctcagcttaccgcaacctccgcctcccaggttcaagcgattctcctgcctcagactcccgagtagctgggactacaggcatgtgccactacgcccggctaattttgtatttttagtagagacagggtttctccatgttggtcaggttgctctcaaactcccaacctcaggtgatctgcccacctcggcctcccaaagtgctgggattactgagccactgtgcccagcccaaaatgtatcttatacaaacattgtagaaatgaataatgattactcaaataagatcttttaattataa

SEQ ID NO: 24935 - DNA, 1584 bp, Artificial Sequence
  derived and/or modified sequence
atggccaaggagagatgcctgaagaagagcttccaggacagcctggaggacatcaagaagagaatgaaggagaagagaaacaagaacctggccgagatcggcaagagaagaagcttcatcgccgccccctgccagatcatcaccaacaccagcaccctgctgaagaactaccaggacaacaacaagatgctggtgctggccctggagaacgagaagagcaaggtgaaggaggcccaggacatcatcctgcagctgagaaaggagtgctactacctgacctgccagctgtacgccctgaagggcaagctgaccagccagcagaccgtggagcccgcccagaaccaggagatctgcagcagcggcatggaccccaacagcgacgacagcagcagaaacctgttcgtgaaggacctgccccagatccccctggaggagaccgagctgcccggccagggcgagagcttccagatcgaggaccagatccccaccatcccccaggacaccctgggcgtggacttcgacagcggcgaggccaagagcaccgacaacgtgctgcccagaaccgtgagcgtgagaagcagcctgaagaagcactgcaacagcatctgccagttcgacagcctggacgacttcgagaccagccacctggccggcaagagcttcgagttcgagagagtgggcttcctggaccccctggtgaacatgcacatccccgagaacgtgcagcacaacgcctgccagtggagcaaggaccaggtgaacctgagccccaagctgatccagcccggcaccttcaccaagaccaaggaggacatcctggagagcaagagcgagcagaccaagagcaagcagagagacacccaggagagaaagagagaggagaagagaaaggccaacagaagaaagagcaagagaatgagcaagtacaaggagaacaagagcgagaacaagaagaccgtgccccagaagaagatgcacaagagcgtgagcagcaacgacgcctacaacttcaacctggaggagggcgtgcacctgacccccttcagacagaaggtgagcaacgacagcaacagagaggagaacaacgagagcgaggtgagcctgtgcgagagcagcggcagcggcgacgacagcgacgacctgtacctgcccacctgcaagtacatccagaaccccaccagcaacagcgacagacccgtgaccagacccctggccaagagagccctgaagtacaccgacgagaaggagaccgagggcagcaagcccaccaagacccccaccaccaccccccccgagacccagcagagcccccacctgagcctgaaggacatcaccaacgtgagcctgtaccccgtggtgaagatcagaagactgagcctgagccccaagaagaacaaggccagccccgccgtggccctgcccaagagaagatgcaccgccagcgtgaactacaaggagcccaccctggccagcaagctgagaagaggcgaccccttcaccgacctgtgcttcctgaacagccccatcttcaagcagaagaaggacctgagaagaagcaagaagagcatgaagcagatccagtag

SEQ ID NO: 24936 - protein, 561 aa, Artificial Sequence
  derived and/or modified sequence
MAKERCLKKSFQDSLEDIKKRMKEKRNKNLAEIGKRRSFIAAPCQIITNTSTLLKNYQDNNKMLVLALENEKSKVKEAQDIILQLRKECYYLTCQLYALKGKLTSQQTVEPAQNQEICSSGMDPNSDDSSRNLFVKDLPQIPLEETELPGQGESFQIEDQIPTIPQDTLGVDFDSGEAKSTDNVLPRTVSVRSSLKKHCNSICQFDSLDDFETSHLAGKSFEFERVGFLDPLVNMHIPENVQHNACQWSKDQVNLSPKLIQPGTFTKTKEDILESKSEQTKSKQRDTQERKREEKRKANRRKSKRMSKYKENKSENKKTVPQKKMHKSVSSNDAYNFNLEEGVHLTPFRQKVSNDSNREENNESEVSLCESSGSGDDSDDLYLPTCKYIQNPTSNSDRPVTRPLAKRALKYTDEKETEGSKPTKTPTTTPPETQQSPHLSLKDITNVSLYPVVKIRRLSLSPKKNKASPAVALPKRRCTASVNYKEPTLASKLRRGDPFTDLCFLNSPIFKQKKDLRRSKKRALEVSPAKEAIFILYYVREFVSRFPDCRKCKLETHICLR

SEQ ID NO: 24937 - DNA, 1686 bp, Artificial Sequence
  derived and/or modified sequence
atggcgaaggagaggtgcctaaaaaaatcctttcaggactccttggaggatataaaaaaaagaatgaaagaaaaacggaacaagaacctggcagaaataggtaagagaaggtctttcatcgccgcaccatgccagattatcaccaacactagcactctgctgaaaaactatcaggacaataacaagatgctcgtgttagctcttgaaaacgaaaagtcaaaggtgaaagaggcccaggatattatccttcagctgcgcaaggaatgttattacctgacctgtcagctgtatgctctgaagggaaaattgacctcacagcagacagttgaaccagcgcaaaatcaggagatatgttcgagcggaatggatcccaactctgacgactcctctaggaacctcttcgtcaaagacttaccccagatcccactggaagaaacagagctgccagggcagggggaatctttccagattgaggaccagatccccactatacctcaagacacactaggcgtggacttcgactctggggaggcaaagtctacagacaacgtgctgcctaggaccgtgtccgtgcgctccagcttgaagaaacactgcaattcgatctgtcagttcgatagcctggacgacttcgagacaagccacctcgccggaaaaagctttgagtttgagcgggtaggatttctagaccccctagtgaacatgcatattcccgaaaacgtccaacataacgcctgccagtggagtaaagatcaggtgaatttgagccccaagctgattcagccaggcacgttcacaaaaacaaaggaggacattcttgagagtaagtctgaacagaccaaatccaaacagagagacacccaggagcggaaaagggaggagaaaagaaaggcgaatagaagaaaatcaaaacgtatgagcaaatataaagaaaataagagtgaaaataaaaagaccgtcccccagaagaaaatgcacaagagcgttagcagtaatgatgcctataactttaacctcgaggagggcgtgcacctcacccccttcaggcagaaggtgagcaacgactccaatcgcgaggaaaacaatgaaagtgaggtgagcctctgcgagtccagtggcagcggggatgactccgacgacctgtacctgccaacatgtaaatacatccagaacccgacatccaatagtgaccgtcctgtaaccaggcccctagccaaacgagcactcaagtacaccgacgagaaggagactgaaggcagtaaacccacaaaaaccccgacaaccacacccccagagacacagcagtcgccacatttatctctcaaagatattacgaacgtgagcctgtaccccgttgtaaagatacggcgactgtccctatccccaaaaaaaaacaaggccagccccgccgtcgcattgcctaagaggcgttgcacagcgtctgtgaactacaaagagcctaccttggcctctaagttgcggagaggggatcccttcactgacctgtgcttcctgaatagtccaatcttcaaacaaaaaaaggatctgaggcggtcgaaaaaaagagctctcgaggtatcccccgccaaagaggctatattcatactgtactatgtaagagagttcgtctcacggttccctgactgccgaaagtgtaaactggaaacgcatatttgcctgcgatag

SEQ ID NO: 24938 - DNA, 1686 bp, Artificial Sequence
  derived and/or modified sequence
atggcgaaagagcgatgtctgaaaaagagctttcaagatagcctggaagatattaagaaacgcatgaaggagaaaagaaacaagaatctcgccgagattgggaagcggaggtctttcatcgctgccccctgtcaaatcattaccaataccagtactctattaaagaactatcaggataacaacaagatgttggtattagcattagagaacgaaaagagcaaagtcaaggaggcccaagacatcattcttcagctgaggaaagagtgctactatcttacctgccaactctatgccctgaagggaaagctaacttctcagcagactgttgaaccagcgcagaatcaggagatttgttcctcaggaatggaccctaatagcgacgactcgtctaggaaccttttcgtcaaggacctgcctcagatcccactagaagagactgagcttccaggtcagggggagtcttttcagatagaagaccagatcccgactataccgcaagataccctgggcgtggacttcgacagcggggaggccaaatctacagacaatgtcctaccccgaaccgtgagtgtgcggagctcactcaagaaacattgcaattctatctgccaatttgactccttggatgacttcgagacatcgcatctagccgggaagtcgttcgagtttgaacgtgttggttttctcgaccctttagtgaacatgcatattcctgagaatgtgcagcacaatgcctgccaatggtcaaaggaccaggtgaacttgtcccccaaattaatacaacccggtacttttaccaagacaaaggaggacatcctcgagagcaaaagcgagcagaccaaatcaaaacaacgtgatacacaggagagaaaaagggaagagaagcgcaaggctaaccgccgcaaatcaaaacggatgtctaaatacaaagaaaacaaatcagagaacaaaaagactgtcccacagaaaaagatgcataagtctgtgagctctaacgacgcctataattttaatctggaagagggagttcacctcactccattccgccagaaggtctctaacgactccaaccgcgaggagaataacgagagcgaggtgtccttgtgcgagagctccggcagcggcgacgacagcgacgacctgtacttacctacttgtaagtatatccagaatcctacaagtaattcagaccgacctgtgacgagaccgttggctaaacgcgccctgaagtataccgatgaaaaagagacagaagggtccaagcctaccaagaccccgaccacgacgcccccagaaactcagcagtccccacacctctcgttaaaggacatcacaaatgtgagtttgtacccagtagtgaagatcaggaggctcagcctttcccctaagaaaaacaaagcgtcccctgccgtggctctgcctaagagaagatgtacagcgtcggtgaattacaaggaaccgacactcgctagtaagctgcgccgaggcgaccccttcaccgatctgtgcttcctgaacagcccaattttcaagcagaagaaggacctaagacgcagtaagaagcgagcgctggaagtctccccagccaaggaggcaatctttatactctactacgtacgtgagttcgtctcccgctttccggattgtagaaagtgcaagctcgagactcatatttgtctgagatag

SEQ ID NO: 24939 - DNA, 1686 bp, Artificial Sequence
  derived and/or modified sequence
atggccaaggagcgctgcctgaagaagagcttccaggacagcctggaggacatcaagaagaggatgaaggagaagaggaacaagaacctggccgagatcggcaagaggaggagcttcatcgccgccccctgccagatcatcaccaacaccagcaccctgctgaagaactaccaggacaacaacaagatgctggtgctggccctggagaatgagaagagcaaggtgaaggaggcccaggacatcatcctgcagctgaggaaggagtgctactacctgacctgccagctgtatgccctgaagggcaagctgaccagccagcagacagtggagcccgcccagaaccaggagatctgcagcagcggcatggaccccaacagtgatgacagcagcaggaacctgtttgtgaaggacctgccccagatccccctggaggagacagagctgcccggccagggcgagagcttccagatcgaggaccagatccccaccatcccccaggacaccctgggcgtggactttgattctggagaggccaagagcacagacaacgtgctgcccaggacagtgtctgtgcgcagcagcctgaagaagcactgcaacagcatctgccagtttgacagcctggatgactttgagaccagccacctggccggcaagagctttgaatttgagcgggtgggcttcctggaccccctggtgaacatgcacatcccagaaaatgtgcagcacaatgcctgccagtggagcaaggaccaggtgaacctgagccccaagctgatccagcccggcaccttcaccaagaccaaggaggacatcctggagagcaagtctgagcagaccaagagcaagcagagggacacccaggagaggaagcgggaggagaagaggaaggccaacagaaggaagagcaagaggatgagcaagtacaaggagaacaagtctgagaacaagaagacagtgccccagaagaagatgcacaagtctgtgagcagcaatgatgcctacaacttcaacctggaggagggcgtgcacctgacccccttccggcagaaggtgtccaatgacagcaaccgggaggagaacaatgaaagtgaggtgtccctgtgtgagagcagcggcagcggagatgacagtgatgacctgtacctgcccacctgcaagtacatccagaaccccaccagcaacagcgacaggcctgtgacccggcccctggccaagagggccctgaagtacacagatgagaaggagacagagggcagcaagcccaccaagacccccaccaccaccccacctgagacccagcagagcccccacctgagcctgaaggacatcaccaacgtgtccctgtaccctgtggtgaagatccggcggctgagcctgagccccaagaagaacaaggccagccctgctgtggccctgcccaagaggcgctgcacagcctctgtgaactacaaggagcccaccctggccagcaagctgcggcggggggaccccttcacagacctgtgcttcctgaacagccccatcttcaagcagaagaaggacctgcggcgcagcaagaagagggccctggaggtgtccccagccaaggaggccatcttcatcctgtactacgtgcgggagtttgtgagccgcttcccagactgcaggaagtgcaagctggagacccacatctgcctgaggtag

SEQ ID NO: 24940 - DNA, 1686 bp, Artificial Sequence
  derived and/or modified sequence
atggccaaggagcggtgcctgaagaagagcttccaggacagcctggaggatattaagaaaaggatgaaagaaaaacggaacaagaatttagctgaaatcggcaagcgtcggtcattcatcgccgccccctgccaaatcattaccaacacttctacgctcctgaaaaactaccaggacaacaataagatgcttgtgttagccctggaaaacgagaaatcaaaagttaaagaagcgcaggatatcatcctgcagctgcggaaggaatgttattacttaacctgccaactatacgccctgaaggggaaactcacaagccagcagaccgtggagcccgcccagaatcaggaaatttgttcatctgggatggacccgaactctgacgattcatccaggaatctgtttgtgaaagacctgccccaaattcctctagaggaaacagagttgcctggccagggggagtctttccaaatagaagatcagattcccactattccccaggataccctgggggtcgatttcgactcaggggaagctaagagcactgacaatgtgctgcctagaaccgtctctgtgcgcagctcacttaagaaacactgcaactcaatctgccagtttgacagtctggacgacttcgagacgagccacctcgccggaaagtcttttgagtttgagcgcgtcggtttcctagacccgttggtgaacatgcacataccggaaaacgttcagcacaacgcctgtcagtggtctaaagaccaggtgaatctttccccaaaactcatccagcccggaacctttaccaagactaaagaagatatcctcgaatctaagtccgagcagaccaagtctaagcagcgcgacacccaagaacggaaaagagaggagaaaagaaaagctaaccgtcgcaaatcaaaaagaatgtccaagtacaaggagaataaaagcgaaaataaaaagactgtgccgcagaaaaagatgcacaagagtgtatccagtaacgacgcgtacaacttcaatctcgaagagggcgtccatctgactccctttaggcagaaagtctctaatgattccaacagggaggagaacaatgaatcagaagtgagcctctgcgagagtagtggtagcggggatgattccgatgatctgtacttgcccacctgcaagtacattcagaatccaacctccaactccgaccggcctgtgacaagacccttggctaagagagccctcaaatacaccgacgaaaaagagaccgagggaagtaagcctaccaaaactcccacaacaacgcccccagagacgcagcaaagcccccatctcagcctaaaggacatcaccaatgtgagcctgtaccctgtcgtgaaaattcggcggctgtccctttctcccaagaagaacaaggcctcacctgcagtggcacttccaaaaaggagatgtacagcctccgtgaattacaaggagccaaccttggctagtaagctgagacggggggacccatttacagatctatgcttcctgaattctccgattttcaaacagaagaaagatctgcgccgttctaaaaaacgagcactcgaagtcagtccagccaaagaggcaattttcatcctgtattatgtgcgcgagttcgtgagccggtttcccgattgcaggaagtgcaagttggagacccacatctgcctccggtag

SEQ ID NO: 24941 - DNA, 1686 bp, Artificial Sequence
  derived and/or modified sequence
atggccaaggagcggtgcctgaagaagagcttccaggacagcctggaagatataaagaagcggatgaaggagaagcggaacaaaaatctggctgaaataggcaagcggaggtccttcatcgccgcgccttgccagatcattaccaacaccagcacgctgctgaagaattaccaggataacaacaaaatgctcgtcctcgccttggaaaatgagaagagcaaggtaaaggaggcacaagatattatcttgcagctccgcaaagagtgctattatctcacatgccagctgtacgctttgaaaggaaagcttacttcccagcagacagtagagccggcccagaatcaagagatttgtagtagtggtatggatcccaactctgatgactcctccagaaacctgttcgtgaaggaccttccccagattcccttggaagagacggaattgccaggacagggggagtcctttcaaatcgaggatcaaatacctactatcccgcaggatacccttggagtggacttcgattcgggcgaggccaagagtacagataacgttctgccccggactgtcagtgtccgcagcagcctgaagaagcactgcaatagcatctgccaattcgactcacttgatgactttgagacgtcccacctagccggcaagagtttcgagtttgagcgggtgggcttcctcgaccctctggtgaacatgcacatccctgagaatgtgcagcacaacgcctgtcagtggagcaaggaccaggtcaatttatctccgaaactgatccaaccagggacattcaccaaaacgaaggaagacatcctagagagtaagagcgagcagaccaaatccaagcaacgtgatacccaggagcggaaaagggaggagaagcgtaaggctaacaggcggaagagcaaaagaatgtctaagtacaaggaaaataaatctgagaacaagaagactgtcccccagaaaaaaatgcacaaatcagtctcttccaacgacgcttacaacttcaatctagaagagggggtgcatctcacgccatttcgtcagaaagttagcaatgacagtaatagagaggaaaataacgaatccgaagtcagcctttgtgagtcatctgggagcggggatgatagcgatgatctgtacctgcccacatgcaaatatattcaaaaccctacttccaactccgatcgcccagtgactcgaccgcttgccaaacgggcgctgaagtacaccgacgagaaggagactgaaggatcgaagccaacaaagacacccacaactacaccccctgaaactcaacagtcaccccacctgtccctgaaggacatcaccaacgtgagcctgtacccagtcgtgaagatacgccgcttgagcctgtctcctaagaaaaataaagcctcccctgcagtcgccctgcctaaacgcagatgcaccgcctccgttaactataaagagcccaccctagcgtctaaactgaggcgaggtgatcccttcaccgacctgtgttttctgaacagcccaatattcaagcagaagaaggacctccgaagatctaaaaagagagccttggaagtatcgccagccaaagaagcaatatttatcctatattacgtgagagagtttgtaagtcggttccctgactgtcgcaagtgtaagctcgaaacccatatatgtttgcggtag

SEQ ID NO: 24942 - DNA, 1686 bp, Artificial Sequence
  derived and/or modified sequence
atggccaaggagcggtgtcttaagaaatctttccaggatagcctcgaagatattaagaaacgtatgaaagagaaaaggaacaaaaacttggcagagatcggtaagcgtcgttcttttatcgccgcaccatgtcagattatcactaatacttccactttactgaaaaactatcaggacaacaacaaaatgttggtcctggcactcgagaacgagaaatcaaaggtgaaggaggctcaggacatcatactccagcttcgcaaggaatgctattatctgacctgccagttgtatgccctcaagggtaaactgacaagccagcaaacagtggaaccagcacaaaaccaggaaatctgtagctctggaatggacccaaacagcgatgattccagtcgtaacttgtttgtcaaggatctcccacagatcccactagaagaaactgagctcccaggacagggtgaaagttttcaaattgaggatcagatccctacgatcccacaggataccttgggagtcgattttgactccggcgaggccaagtcgaccgacaacgtcctcccgagaactgtgagcgtgcggagcagtctcaagaagcactgcaattccatttgccaattcgattccctggatgacttcgaaacatcacatctggccggaaagtcttttgagttcgaaagagttggcttcctcgaccctttagtcaatatgcatatccctgagaatgtccagcacaatgcgtgtcagtggtccaaggatcaggttaatctgagtcccaagctaattcagcccggaaccttcacaaagacaaaagaggacatcctggagtctaagtccgaacagactaagtcgaagcagcgagacacacaggagcgaaagagggaggagaagaggaaggccaaccgcagaaagagcaagcgcatgtcgaagtacaaggaaaacaaatccgaaaataaaaaaacggtgcctcagaaaaagatgcataagagtgttagttctaatgacgcttataattttaatttagaggagggagtacacctgaccccctttagacaaaaggtgtcaaatgacagtaatcgcgaggagaataatgagagcgaggtaagtctttgtgagagctccggaagcggggatgactcagacgacctgtatctacctacctgtaaatacatacaaaatccaacatctaacagtgatagacctgtgacacggcctctggccaagcgcgctctcaaatacactgacgagaaagagaccgaaggtagcaaacctactaagacacccactactaccccccctgaaacccagcagtctcctcacctttccttgaaagacatcactaacgtgtccctatatcctgtggtgaaaataagaaggttatcgctttccccaaaaaaaaacaaggcaagccccgctgtcgcacttccaaaaaggagatgtaccgcttcagttaactacaaagaacccaccttggcctcaaagctgcggcgaggagatccctttaccgatctgtgcttcctgaatagtcctatatttaagcaaaagaaagacctcaggaggagtaagaagcgagccctggaagtgtcccccgctaaggaggcaattttcattctctactacgtacgcgagttcgtgtctcgattcccagactgcagaaaatgcaagttggagactcatatctgcctgagatag

SEQ ID NO: 24943 - DNA, 1686 bp, Artificial Sequence
  derived and/or modified sequence
atggctaaggagagatgcttaaagaagagttttcaggactccctggaggatattaaaaaaagaatgaaagaaaagcggaataaaaacctggccgagatcgggaagcggcgttcattcatcgccgcaccatgccagatcatcaccaacacaagtactcttctgaagaactatcaggataataataaaatgctggtgctcgctctggagaatgagaaatccaaggtgaaagaagctcaggatattattctccaattacggaaagagtgctactacctgacttgtcagctgtacgccctgaaaggtaaattgacctctcagcagaccgtggagcccgctcagaaccaggaaatctgcagtagcggcatggatcctaactcggacgattcgtctaggaacctcttcgtaaaggacttgcctcagataccgctagaagagacggagttacccggacaaggcgagtcattccagatagaagatcagatcccgactataccccaggatacgttgggggtagactttgactctggggaagccaagtctaccgacaacgtgctgcctaggactgtgagcgtccgttcgtccttgaagaagcactgtaattcaatatgccagttcgactctttggacgattttgagacctcgcacttggcaggaaagtcattcgaatttgagagggtgggtttcctggatccgctggtaaatatgcacatccccgagaacgtacagcataatgcatgccagtggagtaaggaccaggtgaatcttagcccgaagttgatccagcctgggacctttaccaaaacaaaggaggatattttggagtctaaaagcgaacagacaaaatcgaaacagcgcgacacacaagaacggaagcgcgaggagaaaaggaaagccaataggcgaaagagtaagagaatgagcaaatacaaggaaaacaagtctgaaaataaaaaaaccgtgcctcaaaagaaaatgcacaaaagcgtcagttctaatgatgcttacaactttaacttggaggagggagtgcatctgacacccttcagacagaaggtttcgaacgatagcaaccgggaggagaacaacgaatctgaggtgagcctttgtgagagtagcggctccggcgacgattcagatgacctttatctccccacgtgcaaatatattcagaaccccacctccaactcagacaggcctgtgacgcgacccctcgcaaaacgtgctcttaagtacactgacgaaaaagagacagaggggagtaagcctacaaaaactccaaccactacgccacctgaaacccaacaaagcccgcacctgtccctaaaggatataacgaatgttagcctttaccctgtggtgaagattaggcgtctcagtctatcccctaagaaaaataaggcctctcctgctgtagccctccccaagcggagatgcacagcatcagtgaactacaaggaaccaactttagcttctaaattgaggagaggagacccattcacagacctctgcttcttaaactcccccattttcaagcagaagaaggatctccgtcgtagtaagaagagagccttagaggtatctccggctaaggaggccatctttatcctctactacgtgcgcgaattcgtgagtcgctttcctgactgtcgtaaatgcaaactggagacccatatctgtctgcgctag

SEQ ID NO: 24944 - DNA, 2338 bp, Artificial Sequence
  derived and/or modified sequence
agttccaggcgacggcggacggtggtacggtcctggagggcccagtgcgcggggctagccgtggctggagagcttcgaagagccttgaaatgtgaggaggaggaagatagctgttgcagaagtagtggccaaggcaaaagatggccaaggaaagatgcctgaaaaagtcctttcaagatagtcttgaagacataaagaagcgaatgaaagagaaaaggaataaaaacttggcagagattggcaaacgcaggtcttttatagctgcaccatgccaaataatcaccaacacttctacactgctgaaaaattaccaagacaacaacaaaatgttagttttagctttggaaaatgaaaaatccaaagtgaaagaagcccaagatatcatcctacagctgagaaaagaatgttactatctcacatgtcagctatatgcattgaaaggaaaacttacatcacaacaaacagtagaacctgctcagaaccaggaaatatgttcctctggaatggaccccaatagtgatgacagctccagaaatttatttgtgaaggatttaccgcaaattcctcttgaagaaactgaacttccaggacaaggagaatcatttcaaatagaagatcagatacctactattcctcaagacacactgggagttgattttgattcaggtgaagctaagtctactgataatgtcttacctagaactgtatctgttcgtagcagtttaaagaaacattgtaacagtatatgtcagtttgatagcttggatgattttgaaaccagtcatttggcagggaagtcttttgaattcgaaagagttggatttttagacccactagtaaacatgcacatacctgaaaatgtacaacacaatgcttgtcaatggagcaaggaccaagttaacttatcaccaaagctgattcagccaggaacgtttactaaaacaaaagaagacattttagaatctaaatctgaacaaactaaaagtaagcaaagagatacacaagaaagaaaaagagaagagaaaagaaaagctaacaggagaaaatcaaaacgtatgtcaaaatataaagagaataaaagcgaaaataaaaaaactgttccccaaaaaaaaatgcacaaatctgtcagttccaatgatgcttacaattttaatttggaagagggtgttcatcttactcctttccgacaaaaagtgagcaatgactctaatagagaagaaaacaacgagtctgaagtgagcctctgtgaatcaagtggttcaggagatgattccgatgacctctatttgcccacttgcaagtacattcagaatcccacgagcaattcagatagaccagtcaccaggcctctagctaaaagagcactgaaatacacagatgaaaaagagacggagggttctaagccaacaaaaactcctaccactacaccacctgaaactcagcagtcacctcatcttagcctgaaggatatcaccaatgtctccttgtatcctgttgtgaaaatcagaagactttctctttctccaaaaaagaataaagcaagcccagcagtggctctgcctaaacgtaggtgcacagccagcgtgaactataaggagcccaccctcgcttcgaaactgagaagaggggacccttttacagatttgtgttttttgaattctcctattttcaagcagaaaaaggatttgagacgttctaaaaaaagagccctggaggtatcacctgccaaagaagcaatttttattttatattatgttcgagaatttgtttcgagattcccagactgtaggaaatgtaaacttgaaacccacatctgcttgaggtaaagtccacgggcttcacatccttagaaaacttttttagtccatgcattcactaatgtatgcagacctttaatagattctagctttatgtgttgggggagagatggaggggtgttgacagtctgtttcactcagcctacatacataataaaatctaagccctttaattagagatagcaactttcccagggtgaccgaggaatcagtacgtgttgaacccctcttttaagtttccttttggttgtgtcacttggagattgccttttctttcttgtaagctcagctgtgtcctcaaatatattgcattttacccagcatttccaggtgttttcaggggtcaaagtttttaagttatcttagtctttgatattgtgtaagcgaaattctccaatcccatctcctagatgatttttttttaaatcacaaaatgtgattatgcttaacagctgtttcctgtttctcttaaaataaaatccatttcctatttctcttaaaataaaatccattattcttaa

SEQ ID NO: 24945 - DNA, 1969 bp, Artificial Sequence
  derived and/or modified sequence
ctggagagcttcgaagagccttgaaatgtgaggaggaggaagatagctgttgcagaagtagtggccaaggtatcgttctggacgcgcctgcggcaggagggtcgccgcgtccacttccgccagccccacctccccccggccttcctggagtccctgaaagaggaagaagtaggttttaaggcaaaagatggccaaggaaagatgcctgaaaaagtcctttcaagatagtcttgaagacataaagaagcgaatgaaagagaaaaggaataaaaacttggcagagattggcaaacgcaggtcttttatagctgcaccatgccaaataatcaccaacacttctacactgctgaaaaattaccaagacaacaacaaaatgttagttttagctttggaaaatgaaaaatccaaagtgaaagaagcccaagatatcatcctacagctgagaaaagaatgttactatctcacatgtcagctatatgcattgaaaggaaaacttacatcacaacaaacagtagaacctgctcagaaccaggaaatatgttcctctggaatggaccccaatagtgatgacagctccagaaatttatttgtgaaggatttaccgcaaattcctcttgaagaaactgaacttccaggacaaggagaatcatttcaaatagaagatcagatacctactattcctcaagacacactgggagttgattttgattcaggtgaagctaagtctactgataatgtcttacctagaactgtatctgttcgtagcagtttaaagaaacattgtaacagtatatgtcagtttgatagcttggatgattttgaaaccagtcatttggcagggaagtcttttgaattcgaaagagttggatttttagacccactagtaaacatgcacatacctgaaaatgtacaacacaatgcttgtcaatggagcaaggaccaagttaacttatcaccaaagctgattcagccaggaacgtttactaaaacaaaagaagacattttagaatctaaatctgaacaaactaaaagtaagcaaagagatacacaagaaagaaaaagagaagagaaaagaaaagctaacaggagaaaatcaaaacgtatgtcaaaatataaagagaataaaagcgaaaataaaaaaactgttccccaaaaaaaaatgcacaaatctgtcagttccaatgatgcttacaattttaatttggaagagggtgttcatcttactcctttccgacaaaaagtgagcaatgactctaatagagaagaaaacaacgagtctgaagtgagcctctgtgaatcaagtggttcaggagatgattccgatgacctctatttgcccacttgcaagtacattcagaatcccacgagcaattcagatagaccagtcaccaggcctctagctaaaagagcactgaaatacacagatgaaaaagagacggagggttctaagccaacaaaaactcctaccactacaccacctgaaactcagcagtcacctcatcttagcctgaaggatatcaccaatgtctccttgtatcctgttgtgaaaatcagaagactttctctttctccaaaaaagaataaagcaagcccagcagtggctctgcctaaacgtaggtgcacagccagcgtgaactataaggagcccaccctcgcttcgaaactgagaagaggggacccttttacagatttgtgttttttgaattctcctattttcaagcagaaaaaggatttgagacgttctaaaaaaagagccctggaggtatcacctgccaaagaagcaatttttattttatattatgttcgagaatttgtttcgagattcccagactgtaggaaatgtaaacttgaaacccacatctgcttgaggtaaagtccacgggcttcacatccttagaaaacttttttagtccatgcattcactaatgtatgcagacctttaatagattctagctttatgtgttggggg

SEQ ID NO: 24946 - DNA, 1686 bp, Artificial Sequence
  derived and/or modified sequence
atggccaaggagagatgcctgaagaagagcttccaggacagcctggaggacatcaagaagagaatgaaggagaagagaaacaagaacctggccgagatcggcaagagaagaagcttcatcgccgccccctgccagatcatcaccaacaccagcaccctgctgaagaactaccaggacaacaacaagatgctggtgctggccctggagaacgagaagagcaaggtgaaggaggcccaggacatcatcctgcagctgagaaaggagtgctactacctgacctgccagctgtacgccctgaagggcaagctgaccagccagcagaccgtggagcccgcccagaaccaggagatctgcagcagcggcatggaccccaacagcgacgacagcagcagaaacctgttcgtgaaggacctgccccagatccccctggaggagaccgagctgcccggccagggcgagagcttccagatcgaggaccagatccccaccatcccccaggacaccctgggcgtggacttcgacagcggcgaggccaagagcaccgacaacgtgctgcccagaaccgtgagcgtgagaagcagcctgaagaagcactgcaacagcatctgccagttcgacagcctggacgacttcgagaccagccacctggccggcaagagcttcgagttcgagagagtgggcttcctggaccccctggtgaacatgcacatccccgagaacgtgcagcacaacgcctgccagtggagcaaggaccaggtgaacctgagccccaagctgatccagcccggcaccttcaccaagaccaaggaggacatcctggagagcaagagcgagcagaccaagagcaagcagagagacacccaggagagaaagagagaggagaagagaaaggccaacagaagaaagagcaagagaatgagcaagtacaaggagaacaagagcgagaacaagaagaccgtgccccagaagaagatgcacaagagcgtgagcagcaacgacgcctacaacttcaacctggaggagggcgtgcacctgacccccttcagacagaaggtgagcaacgacagcaacagagaggagaacaacgagagcgaggtgagcctgtgcgagagcagcggcagcggcgacgacagcgacgacctgtacctgcccacctgcaagtacatccagaaccccaccagcaacagcgacagacccgtgaccagacccctggccaagagagccctgaagtacaccgacgagaaggagaccgagggcagcaagcccaccaagacccccaccaccaccccccccgagacccagcagagcccccacctgagcctgaaggacatcaccaacgtgagcctgtaccccgtggtgaagatcagaagactgagcctgagccccaagaagaacaaggccagccccgccgtggccctgcccaagagaagatgcaccgccagcgtgaactacaaggagcccaccctggccagcaagctgagaagaggcgaccccttcaccgacctgtgcttcctgaacagccccatcttcaagcagaagaaggacctgagaagaagcaagaagagagccctggaggtgagccccgccaaggaggccatcttcatcctgtactacgtgagagagttcgtgagcagattccccgactgcagaaagtgcaagctggagacccacatctgcctgagatag

SEQ ID NO: 24947 - protein, 275 aa, Artificial Sequence
  derived and/or modified sequence
MAKERCLKKSFQDSLEDIKKRMKEKRNKNLAEIGKRRSFIAAPCQIITNTSTLLKNYQDNNKMLVLALENEKSKVKEAQDIILQLRKECYYLTCQLYALKGKLTSQQTVEPAQNQEICSSGMDPNSDDSSRNLFVKDLPQIPLEETELPGQGESFQIEDQIPTIPQDTLGVDFDSATPPETQQSPHLSLKDITNVSLYPVVKIRRLSLSPKKNKASPAVALPKRRCTASVNYKEPTLASKLRRGDPFTDLCFLNSPIFKQKKDLRRSKKSMKQIQ

SEQ ID NO: 24948 - DNA, 828 bp, Artificial Sequence
  derived and/or modified sequence
atggctaaggaacgttgcctcaaaaagagctttcaggattctttagaggacatcaagaagcggatgaaagagaaaagaaataagaatctggcggagattgggaaacgacgatcatttatagccgcgccttgccagatcattactaacacgagcacgctcctcaagaattatcaagataacaataaaatgctcgtgctggcactcgaaaatgagaaatccaaggtaaaagaagctcaggacatcatcttacagcttagaaaagaatgttattatttgacctgtcagctctatgcccttaagggaaagctcaccagccagcagacagtagagcctgcccagaatcaggaaatctgctcgtcaggcatggatcccaactccgacgactcctcacggaacttgttcgtgaaggacttgccgcaaattccactagaagagaccgaactccctggacagggcgagtccttccagatcgaagatcagataccgaccatccctcaggacacactgggcgtagatttcgatagcgctacccctcctgaaacacaacagagccctcacctatctctcaaagacatcacgaacgtatctctctaccctgtcgtcaaaattcgccgcctcagcctttcccccaagaagaacaaggcaagcccagccgtcgccttaccgaagagaaggtgtactgctagtgtcaactataaggaacctactctcgcctccaagttgcgccgaggcgaccccttcaccgacctttgttttcttaactcacccattttcaagcaaaagaaggacttgaggaggtcaaaaaagtctatgaaacagatacagtag

SEQ ID NO: 24949 - DNA, 828 bp, Artificial Sequence
  derived and/or modified sequence
atggcgaaagagcggtgcctgaaaaaaagctttcaggattctttggaagacattaagaaaagaatgaaagagaaaagaaataagaacctggccgagattggcaagcggcggagctttatcgcggccccatgccagataatcacgaacacaagtacactcttgaaaaactatcaggataataacaagatgctggtactggcgttggagaacgagaaatcaaaggtcaaagaggcacaagacattatccttcagttaaggaaggaatgctactacctcacctgccagctgtatgccctcaagggaaaattaacatcccaacagaccgtcgagccggcacagaaccaggagatctgtagctccggcatggatccaaactccgatgatagcagtcgcaatctattcgtgaaagatctcccccagatcccgctcgaggagaccgaactgccagggcaaggcgagagcttccagatcgaagatcagatacctacaataccccaggataccttaggcgtggactttgactccgctactcccccggagacccaacagtctcctcaccttagcctgaaggatataactaacgtaagcctgtaccctgtggtcaaaattaggcgattgtctctgagtccgaaaaaaaacaaggcaagcccggctgtggcactgccaaaacgacgctgcacagcctccgtaaactataaggagcccacactcgcatcgaagctaagaaggggggacccctttacggacttatgttttctgaatagccctatcttcaagcaaaagaaagatttgcggcgtagtaagaaatcaatgaagcagatccagtag

SEQ ID NO: 24950 - DNA, 828 bp, Artificial Sequence
  derived and/or modified sequence
atggccaaggagcgctgcctgaagaagagcttccaggacagcctggaggacatcaagaagaggatgaaggagaagaggaacaagaacctggccgagatcggcaagaggaggagcttcatcgccgccccctgccagatcatcaccaacaccagcaccctgctgaagaactaccaggacaacaacaagatgctggtgctggccctggagaatgagaagagcaaggtgaaggaggcccaggacatcatcctgcagctgaggaaggagtgctactacctgacctgccagctgtatgccctgaagggcaagctgaccagccagcagacagtggagcccgcccagaaccaggagatctgcagcagcggcatggaccccaacagtgatgacagcagcaggaacctgtttgtgaaggacctgccccagatccccctggaggagacagagctgcccggccagggcgagagcttccagatcgaggaccagatccccaccatcccccaggacaccctgggcgtggactttgattctgccaccccacctgagacccagcagagcccccacctgagcctgaaggacatcaccaacgtgtccctgtaccctgtggtgaagatccggcggctgagcctgagccccaagaagaacaaggccagccctgctgtggccctgcccaagaggcgctgcacagcctctgtgaactacaaggagcccaccctggccagcaagctgcggcggggggaccccttcacagacctgtgcttcctgaacagccccatcttcaagcagaagaaggacctgcggcgcagcaagaagtccatgaagcagatccagtag

SEQ ID NO: 24951 - DNA, 828 bp, Artificial Sequence
  derived and/or modified sequence
atggccaaggagcggtgcctgaagaagagcttccaggacagcctggaagatattaagaaacgcatgaaggagaaaaggaataaaaacctggcagagatcgggaagcggcggtcctttatcgcagcaccttgtcagataataactaacacctcgaccctgctaaagaattatcaggacaataataagatgcttgttctcgctctcgagaacgagaaatcaaaagtcaaggaggctcaggacattatcctccaactgcgaaaggagtgttactatctcacctgtcaactgtacgcactcaaaggcaaactaacctctcagcagacagttgagcccgcccagaatcaggaaatatgttcgtccgggatggaccccaactcggatgatagtagccgaaatcttttcgtgaaagatttgcctcagatccctctggaagaaacagagctgccaggccagggtgagtcttttcagatcgaggaccagatccccaccatcccacaggacacactgggcgtcgacttcgattcagcgactccccctgaaacacaacagtctccccatctttcacttaaagacatcacaaacgtgagcctctatcctgtggtcaaaatacggcggctgagcctgagccccaagaagaacaaggcgtcccccgccgtggctctgcctaagcggaggtgcaccgcctctgtgaactataaagaacccactctcgcgtctaaactgaggcgcggagatccgtttaccgacctgtgtttcctcaattctccaatcttcaagcagaagaaggacttacgacgcagtaagaagtcgatgaagcagatacagtag

SEQ ID NO: 24952 - DNA, 828 bp, Artificial Sequence
  derived and/or modified sequence
atggccaaggagcggtgcctgaagaagagcttccaggacagcctggaggacatcaagaagcgaatgaaggagaagagaaacaagaacttagccgaaattggaaagagacggagcttcatcgccgctccgtgtcaaatcataaccaacactagtaccctccttaagaactaccaggacaacaacaaaatgctcgtgctcgctttagagaacgagaagtcgaaggtcaaggaggctcaggatatcatccttcagctgcggaaggagtgctattatctcacatgccagctctacgccctgaaaggcaagctgactagccagcaaaccgtggaacctgctcagaatcaagagatatgcagttctgggatggaccccaactctgacgatagctctcgcaatctgttcgtgaaagacttaccccagattcctctggaggaaacagaattgcctggccaaggagagagcttccagattgaggaccagatccctaccatccctcaggacacgttaggcgttgattttgatagcgccacaccacccgaaactcaacaatctccacacctcagcctgaaagatatcacaaatgtcagtctttacccagttgtcaaaatccggcgcctcagtttatcacctaaaaagaacaaagccagcccagcagtagcacttcctaaaaggcggtgcaccgccagcgttaattataaagagcccactctggcctccaaacttagaaggggtgacccgtttactgacctgtgcttcctcaacagcccaattttcaagcagaagaaggacttgaggcgcagcaagaagagtatgaaacagatccagtag

SEQ ID NO: 24953 - DNA, 828 bp, Artificial Sequence
  derived and/or modified sequence
atggcgaaggagcggtgtttgaagaagtcctttcaggactccctggaggatataaaaaagcgcatgaaagagaagaggaataagaacctggcggagattggaaagagacggtcattcattgctgctccatgccagataataactaacacctcaaccctgctcaagaactaccaggataacaataaaatgcttgtcctggcactggagaatgaaaaaagcaaagtcaaggaggctcaagacattatcctgcagctcagaaaggaatgctactacctgacctgccagctttatgccctgaagggcaaactcactagtcagcagaccgtggagcctgctcagaatcaggagatttgcagttcaggcatggatcccaactcagacgactccagcagaaatctctttgtgaaggatctcccccagattcctctagaggagacagagctgccaggtcagggggaatctttccaaatcgaggatcaaattccgacgattcctcaggatacactcggcgttgacttcgattctgcgacaccccctgagacccagcaaagcccccatctatctctgaaggatatcaccaatgttagtttgtaccccgttgtcaaaattcgcaggctgtcccttagccccaaaaagaataaggcttctcctgcagtggccctgcctaagcgcaggtgtactgcttccgtgaactataaggaacctacactggcgagtaaactgcgaaggggcgacccattcaccgatttatgtttcctgaatagcccgatatttaaacagaagaaagacctcagaagatccaaaaaatccatgaaacaaatccagtag

SEQ ID NO: 24954 - DNA, 828 bp, Artificial Sequence
  derived and/or modified sequence
atggctaaggaacgctgcctgaagaagagtttccaggattccctagaggacatcaagaaacggatgaaagaaaagagaaataaaaacctcgccgagatcggcaagcgacgctcattcatcgctgccccttgccagattatcaccaatactagcacgctccttaagaactatcaagacaataacaaaatgctggtgctcgctctggaaaatgagaagtccaaggttaaggaggcccaggacataatcctgcagcttaggaaggaatgttactacctgacctgtcaactgtatgccctcaagggtaaactcactagccagcagaccgtggagcctgcccagaatcaggagatttgcagcagcggcatggatcccaatagtgacgactcttcccgcaatttgttcgtcaaagacctgcctcagattccactggaagagactgaactgcctggccagggggagagcttccagattgaagaccagatacctactatcccccaagatacactcggggtggacttcgacagcgctacacctccggaaactcagcagtccccccacctctccctgaaagacattacaaacgtcagcctatatcccgtggtcaaaattcggcgtttgtccctgagccctaaaaagaacaaagccagtccagccgtcgctctgcccaaaaggagatgtacagctagcgtgaactacaaggagccaacccttgcttctaagctgaggagaggtgatcctttcacggacctgtgttttctcaattcacccattttcaaacagaaaaaagacttgaggcgcagtaagaagtcaatgaagcagattcagtag

SEQ ID NO: 24955 - DNA, 1075 bp, Artificial Sequence
  derived and/or modified sequence
ctggagagcttcgaagagccttgaaatgtgaggaggaggaagatagctgttgcagaagtagtggccaaggtatcgttctggacgcgcctgcggcaggagggtcgccgcgtccacttccgccagccccacctccccccggccttcctggagtccctgaaagaggaagaagtaggttttaaggcaaaagatggccaaggaaagatgcctgaaaaagtcctttcaagatagtcttgaagacataaagaagcgaatgaaagagaaaaggaataaaaacttggcagagattggcaaacgcaggtcttttatagctgcaccatgccaaataatcaccaacacttctacactgctgaaaaattaccaagacaacaacaaaatgttagttttagctttggaaaatgaaaaatccaaagtgaaagaagcccaagatatcatcctacagctgagaaaagaatgttactatctcacatgtcagctatatgcattgaaaggaaaacttacatcacaacaaacagtagaacctgctcagaaccaggaaatatgttcctctggaatggaccccaatagtgatgacagctccagaaatttatttgtgaaggatttaccgcaaattcctcttgaagaaactgaacttccaggacaaggagaatcatttcaaatagaagatcagatacctactattcctcaagacacactgggagttgattttgattcagctacaccacctgaaactcagcagtcacctcatcttagcctgaaggatatcaccaatgtctccttgtatcctgttgtgaaaatcagaagactttctctttctccaaaaaagaataaagcaagcccagcagtggctctgcctaaacgtaggtgcacagccagcgtgaactataaggagcccaccctcgcttcgaaactgagaagaggggacccttttacagatttgtgttttttgaattctcctattttcaagcagaaaaaggatttgagacgttctaaaaaaagtatgaaacaaatacaatgaaggttttgttggatattgtttaaattcaatctacacctctttctgttgcttcaggagagg

SEQ ID NO: 24956 - DNA, 1187 bp, Artificial Sequence
  derived and/or modified sequence
agttccaggcgacggcggacggtggtacggtcctggagggcccagtgcgcggggctagccgtggctggagagcttcgaagagccttgaaatgtgaggaggaggaagatagctgttgcagaagtagtggccaaggcaaaagatggccaaggaaagatgcctgaaaaagtcctttcaagatagtcttgaagacataaagaagcgaatgaaagagaaaaggaataaaaacttggcagagattggcaaacgcaggtcttttatagctgcaccatgccaaataatcaccaacacttctacactgctgaaaaattaccaagacaacaacaaaatgttagttttagctttggaaaatgaaaaatccaaagtgaaagaagcccaagatatcatcctacagctgagaaaagaatgttactatctcacatgtcagctatatgcattgaaaggaaaacttacatcacaacaaacagtagaacctgctcagaaccaggaaatatgttcctctggaatggaccccaatagtgatgacagctccagaaatttatttgtgaaggatttaccgcaaattcctcttgaagaaactgaacttccaggacaaggagaatcatttcaaatagaagatcagatacctactattcctcaagacacactgggagttgattttgattcagctacaccacctgaaactcagcagtcacctcatcttagcctgaaggatatcaccaatgtctccttgtatcctgttgtgaaaatcagaagactttctctttctccaaaaaagaataaagcaagcccagcagtggctctgcctaaacgtaggtgcacagccagcgtgaactataaggagcccaccctcgcttcgaaactgagaagaggggacccttttacagatttgtgttttttgaattctcctattttcaagcagaaaaaggatttgagacgttctaaaaaaagtatgaaacaaatacaatgaaggttttgttggatattgtttaaattcaatctacacctctttctgttgcttcaggagaggatctgtaagagtacacaaacagagtgagccattgccatagaatattctcttgacaggaccctagctcataaacatttcttcagaactatacttcaaatgggatgctttgtattaaaactttaataaatttaatttattttttcttttgaatataaataa

SEQ ID NO: 24957 - DNA, 828 bp, Artificial Sequence
  derived and/or modified sequence
atggccaaggagagatgcctgaagaagagcttccaggacagcctggaggacatcaagaagagaatgaaggagaagagaaacaagaacctggccgagatcggcaagagaagaagcttcatcgccgccccctgccagatcatcaccaacaccagcaccctgctgaagaactaccaggacaacaacaagatgctggtgctggccctggagaacgagaagagcaaggtgaaggaggcccaggacatcatcctgcagctgagaaaggagtgctactacctgacctgccagctgtacgccctgaagggcaagctgaccagccagcagaccgtggagcccgcccagaaccaggagatctgcagcagcggcatggaccccaacagcgacgacagcagcagaaacctgttcgtgaaggacctgccccagatccccctggaggagaccgagctgcccggccagggcgagagcttccagatcgaggaccagatccccaccatcccccaggacaccctgggcgtggacttcgacagcgccaccccccccgagacccagcagagcccccacctgagcctgaaggacatcaccaacgtgagcctgtaccccgtggtgaagatcagaagactgagcctgagccccaagaagaacaaggccagccccgccgtggccctgcccaagagaagatgcaccgccagcgtgaactacaaggagcccaccctggccagcaagctgagaagaggcgaccccttcaccgacctgtgcttcctgaacagccccatcttcaagcagaagaaggacctgagaagaagcaagaagagcatgaagcagatccagtag

SEQ ID NO: 24958 - protein, 309 aa, Artificial Sequence
  derived and/or modified sequence
MAKERCLKKSFQDSLEDIKKRMKEKRNKNLAEIGKRRSFIAAPCQIITNTSTLLKNYQDNNKMLVLALENEKSKVKEAQDIILQLRKECYYLTCQLYALKGKLTSQQTVEPAQNQEICSSGMDPNSDDSSRNLFVKDLPQIPLEETELPGQGESFQIEDQIPTIPQDTLGVDFDSATPPETQQSPHLSLKDITNVSLYPVVKIRRLSLSPKKNKASPAVALPKRRCTASVNYKEPTLASKLRRGDPFTDLCFLNSPIFKQKKDLRRSKKRALEVSPAKEAIFILYYVREFVSRFPDCRKCKLETHICLR

SEQ ID NO: 24959 - DNA, 930 bp, Artificial Sequence
  derived and/or modified sequence
atggccaaagagcggtgtctaaagaagtcattccaggattcattagaggatatcaagaagcgcatgaaagaaaaaaggaataagaatttggcagagataggcaagaggcggagctttattgcagcgccttgccaaattattacaaatacatcaactctcctaaagaattatcaggacaacaacaaaatgctggttctggcactggaaaatgagaagagtaaagtgaaggaagcacaagatataattctgcagctcagaaaagaatgctactatcttacctgtcaactctatgccctgaaaggaaaactgacatcccaacaaacagtagagcccgcacagaaccaggagatctgttcttccggaatggaccccaactccgacgattcttccagaaacttattcgttaaggacttgccccaaatccctctggaagaaaccgaactgccagggcaaggggagtcattccagattgaagatcagatccccaccattcctcaggacactctgggggtcgattttgacagtgctaccccccctgaaactcagcagtcgcctcacctctctctaaaggacattacaaatgtttcactctaccctgtggtcaagattagaagacttagcctgtctccgaagaaaaataaggccagcccagcagtggctttgccaaaaagacgatgtacagcatctgtcaattataaggaaccgacactggcgtctaaacttcgacgcggagatcctttcaccgatctgtgttttttgaattccccaatctttaagcagaaaaaggaccttaggagatctaagaaacgggcacttgaagttagccccgcaaaagaagctatttttatcctctactatgtccgggaattcgtgagccggttccccgactgccgtaagtgtaagcttgagacacacatctgcctgaggtag

SEQ ID NO: 24960 - DNA, 930 bp, Artificial Sequence
  derived and/or modified sequence
atggcaaaagaaaggtgtctaaaaaaatcttttcaagactccttggaggatataaagaaaagaatgaaagagaagcggaacaaaaatcttgccgaaataggtaagcggcgaagcttcattgctgcaccttgtcagattatcaccaatacatcgactctgctgaaaaactatcaggataacaacaaaatgctggtcctggcgttggaaaatgaaaagtccaaggtcaaagaagctcaggacattattcttcaactccgcaaggagtgctattatctgacctgtcagctatatgccctcaaaggcaagctgacatctcagcagaccgtggagccggctcaaaatcaggaaatttgcagttcaggcatggatccaaactctgatgacagttccagaaatctgttcgtgaaggacttaccccagatcccgctggaagagacagagttgcccggccagggcgaatccttccagatcgaagaccagatccctaccatcccacaagacacattgggagtagacttcgacagcgccaccccacctgaaacccagcagtcccctcacctctccctcaaggacatcaccaacgtgagcctttatcctgtagttaaaatccgaaggctgtccttgagtcctaagaagaacaaggccagtcccgccgtggcactgccaaagcgccggtgcacggccagtgtcaactacaaggagcctacgcttgcctcaaaactgaggcgcggcgatccttttaccgatctctgttttttaaactctccaatctttaagcagaaaaaagacctgcggcgctccaagaagagagcgctggaggtctcccccgccaaagaggcgatatttatcctatactatgtgcgggaattcgtgtctaggttccctgactgccggaaatgcaagctcgaaactcacatctgcctccggtag

SEQ ID NO: 24961 - DNA, 930 bp, Artificial Sequence
  derived and/or modified sequence
atggccaaggagcgctgcctgaagaagagcttccaggacagcctggaggacatcaagaagaggatgaaggagaagaggaacaagaacctggccgagatcggcaagaggaggagcttcatcgccgccccctgccagatcatcaccaacaccagcaccctgctgaagaactaccaggacaacaacaagatgctggtgctggccctggagaatgagaagagcaaggtgaaggaggcccaggacatcatcctgcagctgaggaaggagtgctactacctgacctgccagctgtatgccctgaagggcaagctgaccagccagcagacagtggagcccgcccagaaccaggagatctgcagcagcggcatggaccccaacagtgatgacagcagcaggaacctgtttgtgaaggacctgccccagatccccctggaggagacagagctgcccggccagggcgagagcttccagatcgaggaccagatccccaccatcccccaggacaccctgggcgtggactttgattctgccaccccacctgagacccagcagagcccccacctgagcctgaaggacatcaccaacgtgtccctgtaccctgtggtgaagatccggcggctgagcctgagccccaagaagaacaaggccagccctgctgtggccctgcccaagaggcgctgcacagcctctgtgaactacaaggagcccaccctggccagcaagctgcggcggggggaccccttcacagacctgtgcttcctgaacagccccatcttcaagcagaagaaggacctgcggcgcagcaagaagagggccctggaggtgtccccagccaaggaggccatcttcatcctgtactacgtgcgggagtttgtgagccgcttcccagactgcaggaagtgcaagctggagacccacatctgcctgaggtag

SEQ ID NO: 24962 - DNA, 930 bp, Artificial Sequence
  derived and/or modified sequence
atggccaaggagcggtgcctgaagaagagcttccaggacagcctggaggacattaagaagagaatgaaggagaaacgaaataagaacctggccgaaataggaaaacgccggagctttatagctgccccatgtcagatcatcactaatacttccactctgctgaaaaactaccaagacaacaacaaaatgctggtcctagctttagaaaacgagaaatctaaagtgaaggaagcacaggacatcatcctacagctcaggaaggagtgttactacctgacctgccaactttacgccctgaagggcaagcttacttctcagcaaaccgtggaaccggcccagaatcaagaaatatgttcctcaggaatggatcccaacagcgacgatagttcacgaaatctgttcgtgaaggacctgccgcaaattcccctggaagaaacagagctgcctggccagggtgagtctttccagatcgaagatcagattcccacaatcccacaggataccctgggcgtcgatttcgactccgctacaccacccgaaactcaacaaagtccacatctgtctttgaaggatatcaccaatgtgtcactgtaccccgtggtgaaaatcagaagactgtccttaagtccaaagaaaaacaaagccagcccagccgtcgccttacctaagagacgatgtaccgcgtcagtgaattataaagaaccgaccctagcaagtaaattaaggaggggggaccccttcactgacttatgttttctgaatagccctatctttaaacagaagaaagacctgagacgcagcaagaaacgcgccctggaggtatcgcctgccaaggaggctatctttatcctctactacgtgagagagttcgtgtcacgattccccgattgccgaaagtgcaagctggaaactcacatttgtctgcggtag

SEQ ID NO: 24963 - DNA, 930 bp, Artificial Sequence
  derived and/or modified sequence
atggccaaggagcggtgcctgaagaagagcttccaggacagcctggaggacatcaagaaacggatgaaagagaagagaaataagaacctggccgaaattggtaaaaggaggtcctttatcgccgccccgtgccaaataataactaacacttcaactttactaaaaaactatcaggataataacaaaatgctggttctggccttggagaatgagaaaagcaaagtcaaggaggctcaagatattattctccagcttaggaaagaatgttactacctgacatgtcaactgtatgcacttaagggtaagctgacttcccaacaaactgtagagccagctcaaaaccaagagatttgcagcagcggaatggaccccaattcggatgactcttctcgcaatctgtttgttaaagacctgcctcaaatccccctggaggagacggagctgccagggcaaggtgaatcttttcagatcgaggaccagatccccaccatcccccaggacacgctcggtgtagactttgacagcgctacaccacctgagacacaacagagtccacacttatccttaaaggacattacaaatgtcagcctctaccctgtcgttaaaatacgccgcttgtcattatcacccaaaaagaacaaggccagtcccgctgtggctctgcccaaacgcaggtgcacggctagtgtcaactacaaagaacctactttggcatccaagctgcgccgcggcgatccgtttacagatctgtgttttctcaactccccgatcttcaagcagaagaaagacttgcgccggagtaaaaaacgcgccctcgaggtgtcaccagctaaagaggcaatcttcatcctgtattatgtacgtgaattcgtatctaggtttcctgactgccggaagtgtaaactggagactcatatatgcctgaggtag

SEQ ID NO: 24964 - DNA, 930 bp, Artificial Sequence
  derived and/or modified sequence
atggctaaagagagatgtctgaagaaatcctttcaggacagtctggaagacattaagaaacggatgaaggaaaagcgcaacaagaacctggccgaaataggcaaacggagatcctttatagctgcaccttgccagataattaccaatacctccacactcttgaaaaattaccaagacaacaacaaaatgcttgtgctagccctggagaacgagaagtcaaaggtgaaagaagcccaggatatcatccttcaattacgcaaggagtgttattatttaacatgccaactctatgccctcaagggtaagctgacttcccagcagacagtggagcctgcccagaatcaggagatatgcagcagcggcatggatcccaattcggacgactcatctcgtaacctgttcgtgaaggaccttccccagattcctcttgaggagacagagctccccggtcaaggcgaaagctttcagattgaagaccagataccaaccatcccccaggatacactgggagtcgattttgactctgcgactcctcccgagacccagcaatcaccacacctgtccctgaaggatatcaccaatgtctccctctacccagtggttaagatccgcagactgagcttgagccctaagaaaaataaagccagccctgcagtggccctgccaaagcgtcggtgtacagccagtgtgaactacaaagaacccacacttgcaagcaaactgagaagaggggatccctttaccgatctttgctttctgaattcgcctatattcaagcaaaaaaaagacctccggcgtagcaaaaagcgggctctggaggtgtcgcccgctaaagaggcaattttcattttgtactatgtccgcgagtttgtttctaggttcccagattgcagaaagtgcaagttagagacacacatctgtctcagatag

SEQ ID NO: 24965 - DNA, 930 bp, Artificial Sequence
  derived and/or modified sequence
atggccaaggagcgctgtctgaagaaatcatttcaggacagcctggaggatattaagaagagaatgaaggaaaagcgcaataagaaccttgccgagataggaaaacggcgatcttttattgctgcgccatgtcaaatcatcacaaacacctcgaccctgttgaagaattaccaggacaacaataaaatgttagtgcttgccctcgaaaacgagaagtcaaaagtcaaagaagcacaggatatcattcttcagttaaggaaggaatgttactatctgacatgccagttgtacgcactcaaaggcaagcttacatcccagcagacggtggagcctgcccagaaccaggaaatctgttcaagcggcatggatcctaattccgacgacagctctaggaatttgttcgtgaaggacttaccccagataccgttggaagagaccgagctccctgggcagggtgagagttttcagatagaggaccagataccaaccatcccccaggacactcttggcgtggatttcgactctgctacacctcctgaaacacagcagtcccctcacctctctctcaaggacattaccaatgtctccttgtaccctgttgtgaagattcgcaggctgtccctgtcgcctaagaagaataaggcgagcccggcagttgcgctgcccaaaaggaggtgtaccgccagtgtcaattacaaggaaccgactctcgcgagcaagcttcggaggggcgatccattcacggacttatgtttcctgaattctccgatattcaagcagaaaaaagacctgagacgctcaaagaagagggctctggaagttagccccgctaaagaggcgatcttcatcctctactatgtgagagagttcgtgagcaggttccctgactgtagaaaatgtaaactcgagacacatatatgcctgaggtag

SEQ ID NO: 24966 - DNA, 1582 bp, Artificial Sequence
  derived and/or modified sequence
agttccaggcgacggcggacggtggtacggtcctggagggcccagtgcgcggggctagccgtggctggagagcttcgaagagccttgaaatgtgaggaggaggaagatagctgttgcagaagtagtggccaaggcaaaagatggccaaggaaagatgcctgaaaaagtcctttcaagatagtcttgaagacataaagaagcgaatgaaagagaaaaggaataaaaacttggcagagattggcaaacgcaggtcttttatagctgcaccatgccaaataatcaccaacacttctacactgctgaaaaattaccaagacaacaacaaaatgttagttttagctttggaaaatgaaaaatccaaagtgaaagaagcccaagatatcatcctacagctgagaaaagaatgttactatctcacatgtcagctatatgcattgaaaggaaaacttacatcacaacaaacagtagaacctgctcagaaccaggaaatatgttcctctggaatggaccccaatagtgatgacagctccagaaatttatttgtgaaggatttaccgcaaattcctcttgaagaaactgaacttccaggacaaggagaatcatttcaaatagaagatcagatacctactattcctcaagacacactgggagttgattttgattcagctacaccacctgaaactcagcagtcacctcatcttagcctgaaggatatcaccaatgtctccttgtatcctgttgtgaaaatcagaagactttctctttctccaaaaaagaataaagcaagcccagcagtggctctgcctaaacgtaggtgcacagccagcgtgaactataaggagcccaccctcgcttcgaaactgagaagaggggacccttttacagatttgtgttttttgaattctcctattttcaagcagaaaaaggatttgagacgttctaaaaaaagagccctggaggtatcacctgccaaagaagcaatttttattttatattatgttcgagaatttgtttcgagattcccagactgtaggaaatgtaaacttgaaacccacatctgcttgaggtaaagtccacgggcttcacatccttagaaaacttttttagtccatgcattcactaatgtatgcagacctttaatagattctagctttatgtgttgggggagagatggaggggtgttgacagtctgtttcactcagcctacatacataataaaatctaagccctttaattagagatagcaactttcccagggtgaccgaggaatcagtacgtgttgaacccctcttttaagtttccttttggttgtgtcacttggagattgccttttctttcttgtaagctcagctgtgtcctcaaatatattgcattttacccagcatttccaggtgttttcaggggtcaaagtttttaagttatcttagtctttgatattgtgtaagcgaaattctccaatcccatctcctagatgatttttttttaaatcacaaaatgtgattatgcttaacagctgtttcctgtttctcttaaaataaaatccatttcctatttctcttaaaataaaatccattattcttaa

SEQ ID NO: 24967 - DNA, 1213 bp, Artificial Sequence
  derived and/or modified sequence
ctggagagcttcgaagagccttgaaatgtgaggaggaggaagatagctgttgcagaagtagtggccaaggtatcgttctggacgcgcctgcggcaggagggtcgccgcgtccacttccgccagccccacctccccccggccttcctggagtccctgaaagaggaagaagtaggttttaaggcaaaagatggccaaggaaagatgcctgaaaaagtcctttcaagatagtcttgaagacataaagaagcgaatgaaagagaaaaggaataaaaacttggcagagattggcaaacgcaggtcttttatagctgcaccatgccaaataatcaccaacacttctacactgctgaaaaattaccaagacaacaacaaaatgttagttttagctttggaaaatgaaaaatccaaagtgaaagaagcccaagatatcatcctacagctgagaaaagaatgttactatctcacatgtcagctatatgcattgaaaggaaaacttacatcacaacaaacagtagaacctgctcagaaccaggaaatatgttcctctggaatggaccccaatagtgatgacagctccagaaatttatttgtgaaggatttaccgcaaattcctcttgaagaaactgaacttccaggacaaggagaatcatttcaaatagaagatcagatacctactattcctcaagacacactgggagttgattttgattcagctacaccacctgaaactcagcagtcacctcatcttagcctgaaggatatcaccaatgtctccttgtatcctgttgtgaaaatcagaagactttctctttctccaaaaaagaataaagcaagcccagcagtggctctgcctaaacgtaggtgcacagccagcgtgaactataaggagcccaccctcgcttcgaaactgagaagaggggacccttttacagatttgtgttttttgaattctcctattttcaagcagaaaaaggatttgagacgttctaaaaaaagagccctggaggtatcacctgccaaagaagcaatttttattttatattatgttcgagaatttgtttcgagattcccagactgtaggaaatgtaaacttgaaacccacatctgcttgaggtaaagtccacgggcttcacatccttagaaaacttttttagtccatgcattcactaatgtatgcagacctttaatagattctagctttatgtgttggggg

SEQ ID NO: 24968 - DNA, 930 bp, Artificial Sequence
  derived and/or modified sequence
atggccaaggagagatgcctgaagaagagcttccaggacagcctggaggacatcaagaagagaatgaaggagaagagaaacaagaacctggccgagatcggcaagagaagaagcttcatcgccgccccctgccagatcatcaccaacaccagcaccctgctgaagaactaccaggacaacaacaagatgctggtgctggccctggagaacgagaagagcaaggtgaaggaggcccaggacatcatcctgcagctgagaaaggagtgctactacctgacctgccagctgtacgccctgaagggcaagctgaccagccagcagaccgtggagcccgcccagaaccaggagatctgcagcagcggcatggaccccaacagcgacgacagcagcagaaacctgttcgtgaaggacctgccccagatccccctggaggagaccgagctgcccggccagggcgagagcttccagatcgaggaccagatccccaccatcccccaggacaccctgggcgtggacttcgacagcgccaccccccccgagacccagcagagcccccacctgagcctgaaggacatcaccaacgtgagcctgtaccccgtggtgaagatcagaagactgagcctgagccccaagaagaacaaggccagccccgccgtggccctgcccaagagaagatgcaccgccagcgtgaactacaaggagcccaccctggccagcaagctgagaagaggcgaccccttcaccgacctgtgcttcctgaacagccccatcttcaagcagaagaaggacctgagaagaagcaagaagagagccctggaggtgagccccgccaaggaggccatcttcatcctgtactacgtgagagagttcgtgagcagattccccgactgcagaaagtgcaagctggagacccacatctgcctgagatag

SEQ ID NO: 24969 - protein, 258 aa, Artificial Sequence
  derived and/or modified sequence
MAKERCLKKSFQDSLEDIKKRMKEKRNKNLAEIGKRRSFIAAPCQIITNTSTLLKNYQDNNKMLVLALENEKSKVKEAQDIILQLRKECYYLTCQLYALKGKLTSQQTVEPAQNQEICSSGMDPNSDDSSRNLFVKDLPQIPLEETELPGQGESFQIEATPPETQQSPHLSLKDITNVSLYPVVKIRRLSLSPKKNKASPAVALPKRRCTASVNYKEPTLASKLRRGDPFTDLCFLNSPIFKQKKDLRRSKKSMKQIQ

SEQ ID NO: 24970 - DNA, 777 bp, Artificial Sequence
  derived and/or modified sequence
atggcaaaggaacggtgtctcaagaaatctttccaggacagccttgaggatattaaaaaaagaatgaaggaaaagcgtaacaagaacctggccgaaatcggaaagcgccggtcttttatcgcagccccctgtcagatcataacaaatacaagcacgctgttgaagaactaccaggataataacaagatgttggtgctcgctctggaaaacgagaaaagtaaggtaaaggaagcacaggacattattctccagctccgcaaagaatgttattaccttacctgccagctgtacgccctcaagggaaaactcaccagtcaacaaacagttgaacctgcccaaaaccaggagatctgcagtagcgggatggatccaaatagcgacgactcctccaggaacctgttcgttaaagatctgcctcagattcccctcgaagaaaccgagttgcctgggcaaggagagagtttccagattgaggctaccccacctgagactcaacaaagccctcatttatccctgaaagatattacaaacgtctcactttacccagtagtcaagatcaggcgcctgtcactgtccccgaagaaaaacaaggcctcaccagcggtggccctgcctaagcggaggtgtacagccagcgtcaactacaaggaacctacactggcttctaaattaagaagaggcgacccatttacggatctttgctttctgaatagtcccatcttcaagcagaaaaaagacctgcgcaggtccaagaagtcaatgaagcagattcaatag

SEQ ID NO: 24971 - DNA, 777 bp, Artificial Sequence
  derived and/or modified sequence
atggcaaaggagagatgccttaaaaaatcgtttcaggactcactggaggatataaagaagcggatgaaggaaaaaagaaataaaaaccttgcggagattggcaaacgtcgttcttttatcgcagccccctgtcagatcattactaataccagcaccttactgaagaactaccaggataataacaaaatgcttgttctcgccttagagaatgaaaaatcaaaagtaaaagaggcccaagatattatacttcagttgcgtaaagaatgctattatctaacatgccaactgtatgccctgaagggaaagttgactagtcaacagaccgttgagcctgcgcagaatcaggagatctgttccagcgggatggatccgaactcggatgatagctctcgcaacttgttcgtgaaagatctacctcagatacctctagaagaaactgagctccctgggcagggagagtcgttccagatcgaggcaaccccaccagagacccagcagagccctcacctgtccttgaaagacatcactaatgtctctttgtatcctgtggttaagatcagacgcctgagcctgtccccgaaaaagaacaaggcgtccccagctgttgctttacccaaacggcgatgtactgcatcggtgaactacaaggaaccaactctggccagcaaacttaggaggggggacccatttaccgacctgtgtttcctcaattccccaatatttaagcagaaaaaggatctgaggaggagcaaaaagtctatgaagcagattcaatag

SEQ ID NO: 24972 - DNA, 777 bp, Artificial Sequence
  derived and/or modified sequence
atggccaaggagcgctgcctgaagaagagcttccaggacagcctggaggacatcaagaagaggatgaaggagaagaggaacaagaacctggccgagatcggcaagaggaggagcttcatcgccgccccctgccagatcatcaccaacaccagcaccctgctgaagaactaccaggacaacaacaagatgctggtgctggccctggagaatgagaagagcaaggtgaaggaggcccaggacatcatcctgcagctgaggaaggagtgctactacctgacctgccagctgtatgccctgaagggcaagctgaccagccagcagacagtggagcccgcccagaaccaggagatctgcagcagcggcatggaccccaacagtgatgacagcagcaggaacctgtttgtgaaggacctgccccagatccccctggaggagacagagctgcccggccagggcgagagcttccagatcgaggccaccccacctgagacccagcagagcccccacctgagcctgaaggacatcaccaacgtgtccctgtaccctgtggtgaagatccggcggctgagcctgagccccaagaagaacaaggccagccctgctgtggccctgcccaagaggcgctgcacagcctctgtgaactacaaggagcccaccctggccagcaagctgcggcggggggaccccttcacagacctgtgcttcctgaacagccccatcttcaagcagaagaaggacctgcggcgcagcaagaagtccatgaagcagatccagtag

SEQ ID NO: 24973 - DNA, 777 bp, Artificial Sequence
  derived and/or modified sequence
atggccaaggagcggtgcctgaagaagagcttccaggacagcctggaggatattaagaaacgcatgaaggaaaagcggaacaagaacctggctgaaattggcaagcggcgctcgtttattgccgcaccatgtcagatcatcaccaacacctctactctgttaaaaaactaccaggataataataaaatgttagtgttggccttagagaacgagaagtccaaggtgaaggaagcgcaggatattatcctgcagttacgcaaggaatgctactatctaacttgccagctgtatgctcttaaaggcaagcttacctcacagcagacggtagagccagcccagaaccaggaaatctgcagctccggcatggaccccaacagcgatgatagctctcgtaacctgtttgttaaggatcttccccagatcccactggaggaaacagagctgccaggccagggcgaatcattccagattgaggctaccccccccgagactcagcagtcgcctcatttatccttgaaggacataactaatgtgagcctgtaccccgtagtgaagatcagaagactgtccttgagccccaaaaaaaataaagcctcaccagccgtcgcattacctaagcgtcggtgcacagcctccgttaactataaagagcctacactggcttcaaaactgaggaggggagatccgtttaccgacctctgcttcctgaacagcccgatttttaagcagaagaaagacctgaggagatcgaagaagtccatgaaacagattcagtag

SEQ ID NO: 24974 - DNA, 777 bp, Artificial Sequence
  derived and/or modified sequence
atggccaaggagcggtgcctgaagaagagcttccaggacagcctggaggatattaaaaagcggatgaaggagaaaagaaacaagaacctcgcagagataggcaagcgccgcagcttcatcgccgcgccatgtcagatcattactaacacatctactctcctcaagaactatcaagataataacaaaatgttggtactggccttggaaaacgagaaaagtaaggtcaaagaggcgcaggacatcatcctgcagctccggaaggagtgctactatctgacctgccagctgtacgcactgaagggaaaattaacttcacagcagacagttgaacccgcacaaaatcaggaaatctgctccagtggaatggatccaaattctgacgatagttcacgcaatctgtttgttaaggacttaccccagatacctctcgaggaaaccgaactgccaggccagggcgaatcctttcagattgaagcaacaccccctgagacacagcagagcccacacctgtctctgaaggacattactaacgtcagcctgtaccccgtggtgaaaattaggagactgtcgctgtcaccaaagaagaacaaagcttcccccgccgtggctttgcccaaaaggcgctgtacagccagcgtgaattacaaagagcccaccttagcaagtaaattgaggaggggcgatccgtttacagatctttgttttttgaatagccccatctttaaacagaaaaaggacctgaggagaagtaagaaatcaatgaaacagatccaatag

SEQ ID NO: 24975 - DNA, 777 bp, Artificial Sequence
  derived and/or modified sequence
atggcgaaggagcgatgtctcaaaaagagcttccaagacagcttagaagacataaagaaacgcatgaaagagaaaaggaacaaaaacctggccgagatcggtaagagacgaagtttcatagccgcaccctgtcaaattattacaaatacctctactcttctgaagaactaccaggacaacaataaaatgctagtcctggctcttgagaatgagaaatcgaaggtcaaggaggcccaagacataattcttcagttgcggaaagaatgctattatctcacgtgccagttgtacgcgttgaagggtaaactgacaagccagcagacagtggagccagcccagaatcaagagatatgctcctccggcatggacccgaattctgatgattcatcccgtaatctcttcgtcaaggatctaccacagatccctctggaggagacggaattgcctggccagggtgagtcgtttcagatcgaggccactccccctgaaacccagcagtccccacacctatctctgaaggatattactaacgtgagtctctatcccgtcgtgaaaatccgccgactgtccctgagccccaaaaagaacaaggcctctcccgctgtggctctccccaaaaggaggtgtacagcatcggtcaactacaaggaacctacgctggctagcaagctccgcagaggagatcctttcaccgatctttgctttctcaattccccaatcttcaaacagaagaaagacctccgaaggtctaagaagagtatgaagcagatccagtag

SEQ ID NO: 24976 - DNA, 777 bp, Artificial Sequence
  derived and/or modified sequence
atggcaaaagaaaggtgtttgaagaagagctttcaggatagtttggaagatatcaagaaacgcatgaaggagaaaagaaataagaacttggcagaaattggcaaacgcaggtcgtttattgcagcgccatgtcagataatcacgaacacgagtactctgttgaagaattatcaggacaacaataaaatgctcgtcttggctctcgagaacgaaaaaagcaaggttaaggaagctcaggatatcatactgcagctgcgcaaggagtgttattacctaacctgtcagctgtatgccctgaagggaaaattgacctctcagcagaccgtagagcctgctcaaaatcaggaaatctgctcttctgggatggacccaaacagtgatgactcttctagaaatctcttcgtgaaggatctgccccagatccccctcgaagaaaccgagttgcccggacaaggagagagtttccaaattgaggccactcctcccgaaacccagcagtcaccacacctgtcactgaaggacatcactaatgtgtcactctatcccgtggtgaaaatacgcaggctctctctttcgcccaaaaaaaataaagcctcccctgccgtggccctgcccaagcggcgttgtactgcgtcggtgaactataaagaaccgactctagcatcgaagctacggaggggtgaccctttcactgacctttgttttctgaattcacccatcttcaagcaaaaaaaagacctaaggcgatccaagaaaagcatgaaacaaattcagtag

SEQ ID NO: 24977 - DNA, 1128 bp, Artificial Sequence
  derived and/or modified sequence
agttccaggcgacggcggacggtggtacggtcctggagggcccagtgcgcggggctagccgtggctggagagcttcgaagagccttgaaatgtgaggaggaggaagatagctgttgcagaagtagtggccaaggcaaaagatggccaaggaaagatgcctgaaaaagtcctttcaagatagtcttgaagacataaagaagcgaatgaaagagaaaaggaataaaaacttggcagagattggcaaacgcaggtcttttatagctgcaccatgccaaataatcaccaacacttctacactgctgaaaaattaccaagacaacaacaaaatgttagttttagctttggaaaatgaaaaatccaaagtgaaagaagcccaagatatcatcctacagctgagaaaagaatgttactatctcacatgtcagctatatgcattgaaaggaaaacttacatcacaacaaacagtagaacctgctcagaaccaggaaatatgttcctctggaatggaccccaatagtgatgacagctccagaaatttatttgtgaaggatttaccgcaaattcctcttgaagaaactgaacttccaggacaaggagaatcatttcaaatagaagctacaccacctgaaactcagcagtcacctcatcttagcctgaaggatatcaccaatgtctccttgtatcctgttgtgaaaatcagaagactttctctttctccaaaaaagaataaagcaagcccagcagtggctctgcctaaacgtaggtgcacagccagcgtgaactataaggagcccaccctcgcttcgaaactgagaagaggggacccttttacagatttgtgttttttgaattctcctattttcaagcagaaaaaggatttgagacgttctaaaaaaagtatgaaacaaatacaatgaaggttttgttggatattgtttaaattcaatctacacctctttctgttgcttcaggagaggatctgtaagagtacacaaacagagtgagccattgccatagaatattctcttgacaggaccctagctcataaacatttcttcagaactatacttcaaatgggatgctttgtattaaaactttaataaatttaatttattttttcttttgaat

SEQ ID NO: 24978 - DNA, 2261 bp, Artificial Sequence
  derived and/or modified sequence
gaatgtggcggcggtagttccaggcgacggcggacggtggtacggtcctggagggcccagtgcgcggggctagccgtggctggagagcttcgaagagccttgaaatgtgaggaggaggaagatagctgttgcagaagtagtggccaaggtatcgttctggacgcgcctgcggcaggagggtcgccgcgtccacttccgccagccccacctccccccggccttcctggagtccctgaaagaggaagaagtaggttttaaggcaaaagatggccaaggaaagatgcctgaaaaagtcctttcaagatagtcttgaagacataaagaagcgaatgaaagagaaaaggaataaaaacttggcagagattggcaaacgcaggtcttttatagctgcaccatgccaaataatcaccaacacttctacactgctgaaaaattaccaagacaacaacaaaatgttagttttagctttggaaaatgaaaaatccaaagtgaaagaagcccaagatatcatcctacagctgagaaaagaatgttactatctcacatgtcagctatatgcattgaaaggaaaacttacatcacaacaaacagtagaacctgctcagaaccaggaaatatgttcctctggaatggaccccaatagtgatgacagctccagaaatttatttgtgaaggatttaccgcaaattcctcttgaagaaactgaacttccaggacaaggagaatcatttcaaatagaagctacaccacctgaaactcagcagtcacctcatcttagcctgaaggatatcaccaatgtctccttgtatcctgttgtgaaaatcagaagactttctctttctccaaaaaagaataaagcaagcccagcagtggctctgcctaaacgtaggtgcacagccagcgtgaactataaggagcccaccctcgcttcgaaactgagaagaggggacccttttacagatttgtgttttttgaattctcctattttcaagcagaaaaaggatttgagacgttctaaaaaaagtatgaaacaaatacaatgaaggttttgttggatattgtttaaattcaatctacacctctttctgttgcttcaggagaggatctgtaagagtacacaaacagagtgagccattgccatagaatattctcttgacaggaccctagctcataaacatttcttcagaactatacttcaaatgggatgctttgtattaaaactttaataaatttaatttattttttcttttgaatataaataactgagcttaagcattatcatcatatcgatttcttatgctgcctaaacctcttaattttagtcgaaatatatctttttttttttttggaggcggaatttcattcttgttgcccaggctggagtgcaatggcacgatctcagcttaccgcaacctccgcctcccaggttcaagcgattctcctgcctcagactcccgagtagctgggactacaggcatgtgccactacgcccggctaattttgtatttttagtagagacagggtttctccatgttggtcaggttgctctcaaactcccaacctcaggtgatctgcccacctcggcctcccaaagtgctgggattactgagccactgtgcccagcccaaaatgtatcttatacaaacattgtagaaatgaataatgattactcaaataagatcttttaattataagcttctggcatctctatttttcccttaagtaggggatactaaagtgaatgattttctaagaggatcttttgaaactctttagtacaatatttgagtaaaataaattattgtggatcttttgaaactctgtgtagtattcgagtaaaataaatatttgacatttacagtagggtacaccctaagttgtttatgaattccttataccactgttatatttaatttttcagataaaatatgtatgggaaaatgactagagaaattgattcttttttaggctcagggacaagataagtgactaattgtgaaccccaagctctaattgtatgttcagagtgatgtctccataaaattacaaatgtcatgtactttcagggtagctccttatttagtcagaaatctcagagattaaatgtgtgaatatttagggtttttgcatatttttgaccaaccaatgaaagcgaattagttcagtttagaaagtttgatgtctatacttgtatatacctctttaaattttagaactttgtaggttattcatttttaaagagcaataaagtttgtataaga

SEQ ID NO: 24979 - DNA, 777 bp, Artificial Sequence
  derived and/or modified sequence
atggccaaggagagatgcctgaagaagagcttccaggacagcctggaggacatcaagaagagaatgaaggagaagagaaacaagaacctggccgagatcggcaagagaagaagcttcatcgccgccccctgccagatcatcaccaacaccagcaccctgctgaagaactaccaggacaacaacaagatgctggtgctggccctggagaacgagaagagcaaggtgaaggaggcccaggacatcatcctgcagctgagaaaggagtgctactacctgacctgccagctgtacgccctgaagggcaagctgaccagccagcagaccgtggagcccgcccagaaccaggagatctgcagcagcggcatggaccccaacagcgacgacagcagcagaaacctgttcgtgaaggacctgccccagatccccctggaggagaccgagctgcccggccagggcgagagcttccagatcgaggccaccccccccgagacccagcagagcccccacctgagcctgaaggacatcaccaacgtgagcctgtaccccgtggtgaagatcagaagactgagcctgagccccaagaagaacaaggccagccccgccgtggccctgcccaagagaagatgcaccgccagcgtgaactacaaggagcccaccctggccagcaagctgagaagaggcgaccccttcaccgacctgtgcttcctgaacagccccatcttcaagcagaagaaggacctgagaagaagcaagaagagcatgaagcagatccagtag

SEQ ID NO: 24980 - protein, 328 aa, Artificial Sequence
  derived and/or modified sequence
MASRCSEPYPEVSRIPTVRGCNGSLSGALSCCEDSARGSGPPKAPTVAEGPSSCLRRNVISERERRKRMSLSCERLRALLPQFDGRREDMASVLEMSVQFLRLASALGPSQEQHAILASSKEMWHSLQEDVLQLTLSSQIQAGVPDPGTGASSGTRTPDVKAFLESPWSLDPASASPEPVPHILASSRQWDPASCTSLGTDKCEALLGLCQVRGGLPPFSEPSSLVPWPPGRSLPKAVRPPLSWPPFSQQQTLPVMSGEALGWLGQAGPLAMGAAPLGEPAKEDPMLAQEAGSALGSDVDDGTSFLLTAGPSSWPGEWGPGFRAGPPA

SEQ ID NO: 24981 - DNA, 987 bp, Artificial Sequence
  derived and/or modified sequence
atggccagcagatgcagcgagccctaccccgaggtgagcagaatccccaccgtgagaggctgcaacggcagcctgagcggcgccctgagctgctgcgaggacagcgccagaggcagcggcccccccaaggcccccaccgtggccgagggccccagcagctgcctgagaagaaacgtgatcagcgagagagagagaagaaagagaatgagcctgagctgcgagagactgagagccctgctgccccagttcgacggcagaagagaggacatggccagcgtgctggagatgagcgtgcagttcctgagactggccagcgccctgggccccagccaggagcagcacgccatcctggccagcagcaaggagatgtggcacagcctgcaggaggacgtgctgcagctgaccctgagcagccagatccaggccggcgtgcccgaccccggcaccggcgccagcagcggcaccagaacccccgacgtgaaggccttcctggagagcccctggagcctggaccccgccagcgccagccccgagcccgtgccccacatcctggccagcagcagacagtgggaccccgccagctgcaccagcctgggcaccgacaagtgcgaggccctgctgggcctgtgccaggtgagaggcggcctgccccccttcagcgagcccagcagcctggtgccctggccccccggcagaagcctgcccaaggccgtgagaccccccctgagctggccccccttcagccagcagcagaccctgcccgtgatgagcggcgaggccctgggctggctgggccaggccggccccctggccatgggcgccgcccccctgggcgagcccgccaaggaggaccccatgctggcccaggaggccggcagcgccctgggcagcgacgtggacgacggcaccagcttcctgctgaccgccggccccagcagctggcccggcgagtggggccccggcttcagagccggcccccccgcctag

SEQ ID NO: 24982 - DNA, 987 bp, Artificial Sequence
  derived and/or modified sequence
atggccagtcggtgctctgagccatacccagaagtctctaggattcccaccgttcgcggttgcaatggcagtctgtcaggggctctctcctgttgtgaagatagcgcaagaggttccggcccccccaaggctcctacggtagccgaaggaccgtcaagttgtctgcgccgcaatgtgatctcagagcgggagcgacgaaaacgtatgtcactgagctgtgagaggctgagagccctgctgcctcaattcgacggccggcgggaggacatggcgtcggtgctggaaatgtcggtgcagtttctgagactggctagcgcactgggacccagccaagagcagcacgcaattctggcttcttcaaaggaaatgtggcactctctccaggaagatgtgctgcagttaaccctgagtagtcagatccaagccggagtgccagaccctgggaccggagcttccagcggcacgcgaaccccagatgtgaaggcttttctggagagcccgtggtctctggaccccgcctccgcatctccagagcctgtgccccacatactggcttcttcccgccaatgggatccagcctcatgcacgtctctgggaaccgataagtgtgaagctctactgggtctatgtcaggtaaggggtggcctccctccctttagcgagccgagcagtctggttccttggcccccagggcgcagcctgcccaaggctgtgagaccacccctgagctggccgcccttctcccaacagcagactctcccagtaatgtctggagaggccctgggttggttgggccaggccgggccgcttgccatgggggccgctccgcttggagaacccgctaaggaggatcccatgttggcccaagaggccggatccgcactgggatcggatgtggacgatgggacatccttcctgctcaccgcagggccttcgtcatggccgggcgaatgggggcccgggtttcgggccggacccccagcctag

SEQ ID NO: 24983 - DNA, 987 bp, Artificial Sequence
  derived and/or modified sequence
atggccagccgctgcagcgagccctacccagaggtgagccgcatccccaccgtgcggggctgcaatggcagcctgagcggggccctgagctgctgtgaagattctgcccggggcagcggcccccccaaggcccccaccgtggccgagggccccagcagctgcctgcggagaaatgtcatcagcgagcgggagaggaggaagaggatgagcctgagctgtgagcggctgcgggccctgctgccccagtttgatggccggcgggaggacatggcctctgtgctggagatgtctgtgcagttcctgcggctggccagcgccctgggccccagccaggagcagcacgccatcctggccagcagcaaggagatgtggcacagcctgcaggaggatgtgctgcagctgaccctgagcagccagatccaggccggcgtgcctgaccccggcactggagccagcagcggcaccaggaccccagatgtgaaggccttcctggagagcccctggagcctggaccctgccagcgccagccctgagcctgtgccccacatcctggccagcagccggcagtgggaccctgccagctgcaccagcctgggcacagacaagtgtgaggccctgctgggcctgtgccaggtgcggggcggcctgccccccttcagcgagcccagcagcctggtgccctggcccccaggccgcagcctgcccaaggctgtgcggccccccctgtcctggccacccttcagccagcagcagaccctgcctgtgatgtctggagaggccctgggctggctgggccaggccggccccctggccatgggcgccgcccccctgggggagcccgccaaggaggaccccatgctggcccaggaggccggcagcgccctgggcagtgatgtggatgatggcaccagcttcctgctgacagctggccccagctcctggccaggagagtggggccctggcttccgggccggccccccagcctag

SEQ ID NO: 24984 - DNA, 987 bp, Artificial Sequence
  derived and/or modified sequence
atggccagccggtgcagcgagccctaccccgaggtgagccggatccccaccgtccgcggatgtaatggaagtctgagcggggccctgagctgttgtgaggatagtgcaagagggtccggaccaccgaaggccccgaccgtggccgaaggcccctcatcgtgcctccgcagaaatgtcatttccgagagggaacggcgcaagagaatgtcattatcttgtgagcgtctcagagctctccttccccagttcgacggacgtcgagaggacatggctagcgtgcttgaaatgtctgtgcaatttctgcgcctggccagcgccctagggcctagccaggagcagcacgctattctcgcgtccagtaaagaaatgtggcactcactgcaggaagacgtcctgcagctaaccctaagcagccaaatccaggccggcgtgccagatcccggcaccggcgcctcatctggcacccgcacgcccgacgtcaaggccttcctggagtccccctggagcctagaccctgcctccgcctcccctgagcccgttcctcacatcttggcttcttcgaggcagtgggatccagcctcctgcactagcttggggaccgacaagtgtgaggccttactcggtctttgccaggtgcggggcgggcttcctcctttcagcgaaccatcaagccttgtcccttggccacctggccggagtctgcctaaggccgtgaggcctccgttgtcttggcctcctttcagccaacagcagactctgccagtaatgtcaggtgaagccctagggtggctcggtcaggccgggccactcgcaatgggagctgcgcctctcggggaacccgctaaggaagatcccatgctggcgcaggaggccggctccgctctggggtctgacgttgacgatggtacttcctttctgctgaccgccggaccgtcgagttggccaggcgaatggggccctggattccgggccggtcccccagcttag

SEQ ID NO: 24985 - DNA, 987 bp, Artificial Sequence
  derived and/or modified sequence
atggctagccgctgctccgaaccttatcctgaggtctctcgcataccaacggtcagggggtgtaacggttctcttagcggggctctgagctgttgcgaagacagtgccaggggaagtgggccacccaaggcgcctacggtggctgaaggccctagttcgtgcctccgccgaaatgttatcagcgagagggagagaagaaaaagaatgagcctttcttgcgaacgcctccgggctcttctgccacaattcgacggacggagagaagacatggcatcagtgctggagatgtccgtccagttcctgaggctcgcttcagcacttggccctagtcaggagcaacatgctatcctcgcgtcttccaaggaaatgtggcactctctccaggaggacgtgctccagctgaccctgagtagtcaaatccaggccggtgtgccagacccagggaccggtgcctcgagtggaacaagaactcccgatgtgaaagcctttctcgaatccccgtggagcctggatcctgcctctgcttcaccggagcccgtcccccatatactggcctcgtctcggcagtgggatcctgcctcatgcacaagccttggcactgataaatgtgaggctctgctgggactgtgccaggtgcgaggcggattgccgccattttcggagccctccagtctggtcccgtggccccctggccgatcacttcccaaggcggtcaggccccctctatcatggcccccatttagccagcagcagacattgcctgtgatgagtggggaggcacttgggtggctcgggcaggctggccctttagccatgggggctgcaccactgggagagcccgctaaagaggaccctatgctggctcaggaggccggatctgctctgggctcagacgtggacgacgggacaagctttctcctgacagcaggccctagctcatggcccggagagtgggggccaggtttccgggctggccctcccgcttag

SEQ ID NO: 24986 - DNA, 1987 bp, Artificial Sequence
  derived and/or modified sequence
gggggcggggctgcctgcggaaggggccgtgcgcgtggggtcgctccgcagctgcgagttcatggcgtcccggtgctccgagccctacccggaggtctccagaatccctaccgtcaggggatgcaacggctccctgtctggtgccctctcctgctgcgaggactcggcccggggctcgggcccgcccaaggcccctacggtggccgagggtcccagctcctgccttcggcggaacgtgatcagcgagagggagcgcaggaagcggatgtcgttgagctgtgagcgtctgcgggccctgctgccccagttcgatggccggcgggaggacatggcctcggtcctggagatgtctgtgcagttcctgcggcttgccagcgccctggggcccagtcaggagcagcacgctattcttgcttcctccaaggaaatgtggcactcgttgcaggaggatgttttacagttgacgttgtcgagtcagattcaagcaggtgtgccagaccctgggacgggagcgtccagcgggactcgaaccccagatgtgaaggcgtttctggaaagtccttggtccctggatccagcgtcggccagcccagagcccgtgccgcacatccttgcgtcctccaggcagtgggaccccgcgagctgcacgtccctgggcacggacaagtgtgaggcactgttggggctgtgccaggtgcggggtgggctgccccctttctcagaaccttccagcctggtgccgtggcccccaggccggagtcttcctaaggctgtgaggccacccctgtcctggcctccgttctcgcagcagcagaccttgcccgtgatgagcggggaggcccttggctggctgggccaggctgggcccctggccatgggggctgcacctctgggggagccagccaaggaggaccccatgctggcgcaggaggccgggtctgcgttggggtctgatgtggacgatgggacgtccttcctgctgactgctggtcccagctcgtggccgggtgagtggggccctgggttcagggctggtccccccgcgtaagcacctgatatgagctggggaattgggactcaggcctagcgtgtgtcagggggccccagggtctgtgtctgagcccccgttttctccaccgttggtgcttagctgttgggccgtgtctggtattgagcgttataggtgatatgtgagtgtgtgagtgaacgtgatgtggacgagcctgcatgagagctggcggtgcttggagccctgtattcttccccttgaccctgtgtcagcgaggcccctggtccagcccgtgctggccggcaaaggtgtatggccctgtgacatggcgtgtgtccattccatttaggatttagtgtttgggagcccgttcctggttctggtccaacaggtgtcctgggtctggggccaccaggtatgagctcacccacctcatcacagcctctgtgcagcggggacagggcagggcagacggactgaggtgggagctctgttcctccgaccccacctgtctgcctcaagctcccagagcacctgcctgccctgccgatgtgtcctgtttgcttccagggtctctggagggtcgaggaggcagtggccctgcatgggccccagctgagagcagtccactggatgttggagagccaggcttcctaggggaccctgagcttggctcccaggagctccaggacagccctctggagccgtggggcctggatgtggactgtgcaggcctggccctgaaggacgaggtggagagcatcttccctgacttctttgcctgctagcagccaggctgtggagaggaggcgggcggggccggtggatctggagccgtgtgtgtccctgtcgcgtgcttgggcattttattttgggtttgggttgcagctgcaccctaatttgagcgaggcttacaggctgtgagaagaggatagtgaatattaaagagggaaagcagttttcctggaggaagcaaaa

SEQ ID NO: 24987 - protein, 680 aa, Artificial Sequence
  derived and/or modified sequence
MMVESASETIRSAPSGQNGVGSLSGQADGSSGGATGTTASGTGREVTTGADSNGEMSPAELLHFQQQQALQVARQFLLQQASGLSSPGNNDSKQSASAVQVPVSVAMMSPQMLTPQQMQQILSPPQLQALLQQQQALMLQQLQEYYKKQQEQLHLQLLTQQQAGKPQPKEALGNKQLAFQQQLLQMQQLQQQHLLNLQRQGLVSLQPNQASGPLQTLPQAAVCPTDLPQLWKGEGAPGQPAEDSVKQEGLDLTGTAATATSFAAPPKVSPPLSHHTLPNGQPTVLTSRRDSSSHEETPGSHPLYGHGECKWPGCETLCEDLGQFIKHLNTEHALDDRSTAQCRVQMQVVQQLEIQLAKESERLQAMMAHLHMRPSEPKPFSQPLNPVPGSSSFSKVTVSAADSFPDGLVHPPTSAAAPVTPLRPPGLGSASLHGGGPARRRSSDKFCSPISSELAQNHEFYKNADVRPPFTYASLIRQAILETPDRQLTLNEIYNWFTRMFAYFRRNTATWKNAVRHNLSLHKCFVRVENVKGAVWTVDEREYQKRRPPKMTGSPTLVKNMISGLSYGALNASYQAALAESSFPLLNSPGMLNPGSASSLLPLSHDDVGAPVEPLPSNGSSSPPRLSPPQYSHQVQVKEEPAEAEEDRQPGPPLGAPNPSASGPPEDRDLEEELPGEELS

SEQ ID NO: 24988 - DNA, 3745 bp, Artificial Sequence
  derived and/or modified sequence
cgctagagcgacatgatggtggaatctgcctcggagacaatcaggtcggctccatctggtcagaatggcgtgggcagcctctctgggcaagccgatggcagcagcggcggggccacagggacaactgcaagtggcacgggcagggaagtgaccacgggtgcagacagcaatggtgagatgagtcccgcagagctgctgcacttccagcagcaacaggctctccaagtggcccggcagttcctgctgcagcaggcctcaggcctgagctccccagggaacaatgacagcaaacagtctgcctctgctgtgcaggtgcctgtgtcggtggccatgatgtcgccgcagatgcttaccccgcaacagatgcagcagatcctgtcgcccccgcagctgcaggccttgctccagcagcagcaagccctcatgctccagcagctacaggagtactacaagaagcagcaggagcagctccacctgcagctcctcacccagcagcaggctgggaaaccgcagcccaaagaggcactggggaacaagcagctggccttccagcagcagctcctgcaaatgcaacagttgcagcagcagcacctgctcaacctgcagaggcaggggctggtcagcctgcagcccaaccaagcctcggggcccctccagacccttccgcaagcagctgtttgcccaacagacctgccccagctgtggaagggcgagggtgcccccgggcagcctgccgaggacagcgtcaagcaggaggggctggacctcactggcacggccgccaccgctacctcgtttgccgctccccccaaggtctcaccccccctctcccaccataccctgcccaacggacagcctactgtgctcacatctcggagagacagctcttcccacgaggagacccccggctcccaccccctgtacggacacggagagtgcaagtggccaggctgtgagaccctgtgtgaagacctgggccagtttatcaaacacctcaacacagagcacgccctggatgaccggagtacagcccagtgccgggtacagatgcaggtggtgcagcagctggagatccagctcgccaaggagagcgagcggctgcaggccatgatggcccacctgcacatgcggccctcggagcccaagcccttcagccagccactgaacccggtccccggctcctcctcattctccaaggtgaccgtctctgcagcagactcattcccagatggtctcgtgcaccccccgacctcggccgcagcccctgtcacccctctacggccccctggcctgggctctgcctccctgcatggtgggggcccagcccgtcggagaagcagtgacaagttctgctcccccatctcctcagagctggcccagaatcatgagttctacaagaacgccgacgtccggccccccttcacctacgcctccctcatccgccaggccatcctggaaacccctgacaggcagctgaccctgaatgagatctataactggttcaccaggatgttcgcctatttccgcagaaacactgccacctggaagaacgccgtgcgccacaacctcagcctgcacaagtgcttcgtccgcgtggagaacgtcaagggtgccgtgtggactgtggacgagcgggagtatcagaagcggagaccgccaaagatgacagggagccccaccctggtgaagaacatgatctctggcctcagctatggagcacttaatgccagctaccaggccgccctggccgagagcagcttccccctcctcaacagccctggcatgctgaaccctggctccgccagcagcctgctgcccctcagccacgatgacgtgggtgcccccgtggagccgctgcccagcaacggcagcagcagccctcctcgcctctccccgccccagtacagccaccaggtgcaggtgaaggaggagccagcagaggcagaggaagacaggcagcccgggcctcccctgggcgcccctaaccccagcgcctcggggcctccggaagacagggacctggaggaggagctgccgggagaagaactgtcctaagggcctgtagtgaccggcagggctggggtgagacccctcccttccagaatccaggccccatctcccccaactccacagcccctcccgagcctcaaggcaagtccaggactcagaccggggaggcccgggccagcagctcccagtgtgacctgacaaaaacacgtaggggcagggacggtccccacccccagggacacaacccctggtcttggaccagtagaggacacggagggttcagacccctcctcagaccctccccacatctgaaactgcctccccccaaccaccagcagcagcagggccctcctcccccaccagctctccccacagggcccctcagcatcatggagacccgcaggcggggcttagccacccctcaaacccagggccccctggcacctggctctggccgtgttttctggccagaggcccccactttcctaactcgtgctcccttccgccttcttttccgtactgtgaagaaagaactctccaccccagctcccaccctgccctggcctgggtggaggaactgtgcctccatccccagaagaaacagccccctctgctgctggggtgggactgtctgtgtgccctgtgggggtccgtgtgagcaggcccacctggctccagacccgcccccaacctgagacagaaccaggctgagccaggcctccacccccacccccgtttgctgggggctcctccagccgcccccatgggaagaggcctggtaccgcctcacccacagaggtctgtgccaggtgcgcttctgcaggtggagccaagctctccctgaggccagaggcggggcctgggccgggagcccaggggaaggccaggctggaccccggctccacacccacatccagcctgcaggcctctctgcagtcctctcaccctccctcagctccccttcctctgcagtcaccctcagctccccttccttgcccgcctctccccccgccgccccaccagttaaacggatgaccaaagacctttcttatgccggaagcaaaaaccaaaactttttgttggctttttcctttgtcgcctccccagcacctgccctcccagtctcccaccccggccccaggctggaagccctccctccacttaagttattgttttaaaccaaagtttacagtgtctgttggtggccaagaccttctctctccacccctcctccatccaccctgaggaccctggggctcagtggaggcagggccctgcccccctcccttccgctcctgcccagcctgggggaaggagaaaggaggggagaaagcgggctctcaccccctcaggagtgggcacgggagcccttctccctgaccctgggctgcttcctgggggctctccagacccctctctaggaccaagtcacccgtcgtgctgggagtgtggattctagcaaaagagctggaaaaaagtcagactctccacagaccccctatgggggacccccaactcaaggccaaggactgggcgtatcggatgctcataacacccctggcctggcccctttactgagaagactccttggatatttcccaagaaccccccacatacacccctcacaagccacccctcctgagaggcagggggccctccgccccctccccatgtattccccacctgtgttccgtttgaccagcacagaaatattaaacgtcctctattcaccggg

SEQ ID NO: 24989 - DNA, 5948 bp, Artificial Sequence
  derived and/or modified sequence
gccgtccctgcggaccggacagtgcggccggcggccggcggccgggacggagcccccagcccgcgaggagggcgcggcgcaggcggcggcggcgcggcggggaggagcccgggccggaaccagggctgggccgggggcggggacgccggggtccgggagcccgggagccggagcgagctgacgagcgtcgcggaaggaccgggaaggaagagcggagccggagcgagccaagcagcccacaaagtgccatgccccggcggggttgaggcgcgcggcggtcggcccggcgcgctgggaggacgcccgggagctgcgcgacgcggggcggcgcggaagggcagccccggcgggcggcggcgggcccgggctgcgaccggagcgagccccatgccccgcgcgggctgacgggccggagcccgcacggagcggccgggcgggacaggtaccgctagagcgacatgatggtggaatctgcctcggagacaatcaggtcggctccatctggtcagaatggcgtgggcagcctctctgggcaagccgatggcagcagcggcggggccacagggacaactgcaagtggcacgggcagggaagtgaccacgggtgcagacagcaatggtgagatgagtcccgcagagctgctgcacttccagcagcaacaggctctccaagtggcccggcagttcctgctgcagcaggcctcaggcctgagctccccagggaacaatgacagcaaacagtctgcctctgctgtgcaggtgcctgtgtcggtggccatgatgtcgccgcagatgcttaccccgcaacagatgcagcagatcctgtcgcccccgcagctgcaggccttgctccagcagcagcaagccctcatgctccagcagctacaggagtactacaagaagcagcaggagcagctccacctgcagctcctcacccagcagcaggctgggaaaccgcagcccaaagaggcactggggaacaagcagctggccttccagcagcagctcctgcaaatgcaacagttgcagcagcagcacctgctcaacctgcagaggcaggggctggtcagcctgcagcccaaccaagcctcggggcccctccagacccttccgcaagcagctgtttgcccaacagacctgccccagctgtggaagggcgagggtgcccccgggcagcctgccgaggacagcgtcaagcaggaggggctggacctcactggcacggccgccaccgctacctcgtttgccgctccccccaaggtctcaccccccctctcccaccataccctgcccaacggacagcctactgtgctcacatctcggagagacagctcttcccacgaggagacccccggctcccaccccctgtacggacacggagagtgcaagtggccaggctgtgagaccctgtgtgaagacctgggccagtttatcaaacacctcaacacagagcacgccctggatgaccggagtacagcccagtgccgggtacagatgcaggtggtgcagcagctggagatccagctcgccaaggagagcgagcggctgcaggccatgatggcccacctgcacatgcggccctcggagcccaagcccttcagccagccactgaacccggtccccggctcctcctcattctccaaggtgaccgtctctgcagcagactcattcccagatggtctcgtgcaccccccgacctcggccgcagcccctgtcacccctctacggccccctggcctgggctctgcctccctgcatggtgggggcccagcccgtcggagaagcagtgacaagttctgctcccccatctcctcagagctggcccagaatcatgagttctacaagaacgccgacgtccggccccccttcacctacgcctccctcatccgccaggccatcctggaaacccctgacaggcagctgaccctgaatgagatctataactggttcaccaggatgttcgcctatttccgcagaaacactgccacctggaagaacgccgtgcgccacaacctcagcctgcacaagtgcttcgtccgcgtggagaacgtcaagggtgccgtgtggactgtggacgagcgggagtatcagaagcggagaccgccaaagatgacagggagccccaccctggtgaagaacatgatctctggcctcagctatggagcacttaatgccagctaccaggccgccctggccgagagcagcttccccctcctcaacagccctggcatgctgaaccctggctccgccagcagcctgctgcccctcagccacgatgacgtgggtgcccccgtggagccgctgcccagcaacggcagcagcagccctcctcgcctctccccgccccagtacagccaccaggtgcaggtgaaggaggagccagcagaggcagaggaagacaggcagcccgggcctcccctgggcgcccctaaccccagcgcctcggggcctccggaagacagggacctggaggaggagctgccgggagaagaactgtcctaagggcctgtagtgaccggcagggctggggtgagacccctcccttccagaatccaggccccatctcccccaactccacagcccctcccgagcctcaaggcaagtccaggactcagaccggggaggcccgggccagcagctcccagtgtgacctgacaaaaacacgtaggggcagggacggtccccacccccagggacacaacccctggtcttggaccagtagaggacacggagggttcagacccctcctcagaccctccccacatctgaaactgcctccccccaaccaccagcagcagcagggccctcctcccccaccagctctccccacagggcccctcagcatcatggagacccgcaggcggggcttagccacccctcaaacccagggccccctggcacctggctctggccgtgttttctggccagaggcccccactttcctaactcgtgctcccttccgccttcttttccgtactgtgaagaaagaactctccaccccagctcccaccctgccctggcctgggtggaggaactgtgcctccatccccagaagaaacagccccctctgctgctggggtgggactgtctgtgtgccctgtgggggtccgtgtgagcaggcccacctggctccagacccgcccccaacctgagacagaaccaggctgagccaggcctccacccccacccccgtttgctgggggctcctccagccgcccccatgggaagaggcctggtaccgcctcacccacagaggtctgtgccaggtgcgcttctgcaggtggagccaagctctccctgaggccagaggcggggcctgggccgggagcccaggggaaggccaggctggaccccggctccacacccacatccagcctgcaggcctctctgcagtcctctcaccctccctcagctccccttcctctgcagtcaccctcagctccccttccttgcccgcctctccccccgccgccccaccagttaaacggatgaccaaagacctttcttatgccggaagcaaaaaccaaaactttttgttggctttttcctttgtcgcctccccagcacctgccctcccagtctcccaccccggccccaggctggaagccctccctccacttaagttattgttttaaaccaaagtttacagtgtctgttggtggccaagaccttctctctccacccctcctccatccaccctgaggaccctggggctcagtggaggcagggccctgcccccctcccttccgctcctgcccagcctgggggaaggagaaaggaggggagaaagcgggctctcaccccctcaggagtgggcacgggagcccttctccctgaccctgggctgcttcctgggggctctccagacccctctctaggaccaagtcacccgtcgtgctgggagtgtggattctagcaaaagagctggaaaaaagtcagactctccacagaccccctatgggggacccccaactcaaggccaaggactgggcgtatcggatgctcataacacccctggcctggcccctttactgagaagactccttggatatttcccaagaaccccccacatacacccctcacaagccacccctcctgagaggcagggggccctccgccccctccccatgtattccccacctgtgttccgtttgaccagcacagaaatattaaacgtcctctattcaccgggccctgtgtgtgtcaccgaggtgcgggaggggaggagcattaaagctgaaagatcgctctgctcggggagcctgggcagagcagcagcaacgtgagggtcgctgtggtggtggtttctgtgagtggatggaatgagcagccctgcaggggcgctgggcatgtgccctcactgtggacagggcccacccacctccggttcccctgtgcctcctgtcccttccacgcttaaacagggttctctgtcattttcctgttttcttccagagtcccaatcctttgccctagttctttcactagtttgaaatccaagttcttgccagagtgttggagcaaggcagctgatttgctgcagggatggagaggaccaccgccgcagggttcttttacctgtgccaccagctctggagacatccacacccattcccaggtgtccttccaggcccattgtccacgtcttcaagggggctgcctggataggcgtgtgtgtgtgtagtgcccaggtgtggtggtggcatcctgaagcagtaggaccattagtgtgcgtgcacacccacgtggcacactgtgtggtgaccatggtcatcatagtgggctcacggcggaaacgggatcattcaacctatacaaaggggaccctggataggctgcaaggaaagaggccaagggccaagctgctaagccaaagatggcccctgacacctcccccagccccagcacaccagcctgcacctcttatcccgtgttaagtcctggttccccacctgctgcccctcctcaacacagagcccctcccgccgcctcagacccctgtgcacatccccagggcctcagccgtctcattggtctttattttttattttttttaagatggagtttcgctcttattgcccagactggagtgcagtgatgctatctcggctcactgcaacctttgcctcccaggttcaagtgattctcctgcctcagcctcccaagtagctgggattacaggcgtgcaccaccacgccgggctaaatttttttgtatttttagtagagacggggtttctctatgttggtcaggctgatctcgaactcccgacctcaggtgatccgccagcctcagcctcccaaagtgctgggattacaggcgtgagccactgcacccggctctcactggtcttacgccaccttctggacactccctccttgagggcagaaaggagtcccaggcctgtccctagggacaaggcccagggaagagtgtatttggggagcaggggaggggagggtgttgagaaagctgaactggagtcaatcacccttcccacaaatcaccaaactgctggaactctccagccaaatgctgggagaaggacctggagggtgagtctttgctgacctctctctactctcaggcatgtcttttgtccttttcgtccatctatttctgtctgtcgctcactcgccccgctttctctgtctcaccttcatccactctgcaggcctgctccaccacagccctaatcctctggacgcttgtgtagggcctggggtgaattccctgtcccccatggtacctcgagaggggctggggagctcagcttggtctcagagtctccccaccagatactgtttaaaaaagtagcactgatgtgttttgtaatctgcccctcccagccctccgtggaggctgccagggccttgtacggtaaacctagctgcatgtaatctgtggacaatggcattctctacaatgcaataaaaacaattacccatg

SEQ ID NO: 24990 - DNA, 2043 bp, Artificial Sequence
  derived and/or modified sequence
atgatggtggagtctgccagcgaaacgattaggagcgcacccagcggtcagaacggagtaggctctctgtccggacaggcggacggcagttccgggggcgccaccggtacaaccgcttctggtacagggcgagaagtaacaaccggggccgactctaacggcgagatgagccccgccgaattactacatttccagcaacaacaggccttgcaagtcgctaggcagtttcttttacaacaggcttcgggcctctcctccccaggaaataacgacagcaaacaaagtgcaagcgccgttcaagtaccggtgagtgtggccatgatgtccccccagatgttgacaccccaacagatgcagcagattctgagtccccctcagctacaggctctgctacagcagcagcaggccctgatgctgcagcagctgcaggaatactataaaaaacaacaggagcagctgcacttgcaattactcactcagcaacaggctggcaagccccagccaaaggaggctctgggaaacaaacaacttgccttccaacagcagctgctgcagatgcagcagcttcagcagcagcacctgctcaaccttcagagacagggccttgttagcctacagcccaaccaggcctccggtccgctccagacattacctcaggctgccgtgtgtcccacagatctgccgcagttgtggaagggggagggcgctccaggccagccagctgaagattccgtcaaacaggaaggcctggaccttacaggcactgcggccacggcaacttcatttgccgcgcctccaaaggtctcacccccactctctcaccacacgctccccaacggccagccaacagtcttgacttctagacgagactcctcctctcatgaagagactccaggctcgcatcctctgtacggccatggtgaatgcaagtggcctggctgcgaaacgctgtgcgaggacctggggcagtttataaaacacctaaatacggagcacgccttggacgacagatcaactgcccaatgtagagtccagatgcaggtcgtgcagcagctcgagatccagctggcaaaagaatcagagcgactgcaagctatgatggctcatcttcatatgcgtcccagtgagcccaagccctttagccagccgctaaatcctgttccgggatcatcaagcttctccaaagtgacagtttcagccgctgacagcttccccgatggcctcgtacacccccctacctccgcagccgcgccggttactcccttacgtccacccggtctcggctctgccagcctgcatggcgggggaccagccaggagacggtccagtgataagttttgcagcccaatatccagtgagttagcccagaaccatgaattttacaaaaacgctgacgtgcggcccccatttacttatgcctctttgatacggcaggccattctcgaaaccccagacagacaattaacccttaacgagatctacaactggttcacacgaatgttcgcttatttccgaagaaacactgccacatggaagaatgccgtaagacacaatctctctctgcacaagtgctttgtccgcgtggagaatgtgaagggtgctgtctggaccgtggacgagcgggaatatcagaaacgcagacccccaaaaatgaccggctctccaactctcgtgaagaatatgatcagtggactatcttacggggccctcaatgccagttaccaggcagccctggctgagagcagttttcctctgcttaatagccccggtatgctgaatcctggctccgctagttcactgctgccactatcccacgatgatgttggagccccagtggagcctctgcccagcaacgggagcagctctcctccaaggctctcccctccgcagtatagtcaccaggtgcaggtcaaagaggaaccagccgaggctgaggaggatagacagcctggaccacctctaggggcacccaacccaagcgcgtctgggccacccgaggatcgcgatttggaggaagagcttcctggagaggagctgtcttag

SEQ ID NO: 24991 - DNA, 2043 bp, Artificial Sequence
  derived and/or modified sequence
atgatggtcgaatctgccagcgaaaccattcgatctgcccccagtggacagaatggagtgggctcgctgtcaggtcaggctgatgggtcttctggaggcgcaaccggaaccacagcctctggaacgggacgagaggtgactacgggagcagactctaatggcgaaatgtctcctgccgagctgcttcactttcaacagcagcaggccctgcaagttgccagacagtttcttttgcagcaggcctccggactctcttctcccggaaacaacgattccaaacagtccgcctcagcagtgcaggtgcccgtgtccgtcgccatgatgagtccccagatgctcacgcctcagcagatgcaacagatactgagcccgccccagcttcaggcccttctgcagcaacagcaggccctgatgttacagcagttacaggagtattacaaaaagcagcaggaacagctgcatcttcaactgctcacacagcagcaggcaggtaaacctcaacctaaggaagcactcggcaataagcagttggcgtttcaacaacagctactgcagatgcagcaactgcagcagcagcatttgctcaacctccagcgacaggggcttgtcagtttgcagccaaaccaagccagcggacccctgcagactctgcctcaagccgctgtctgtcctacggacctcccacagctgtggaagggcgaaggcgctcctggacagcctgccgaagacagcgtcaagcaggagggactggatctgacaggcaccgccgccactgcaactagcttcgccgccccccctaaggtttcaccccctttgtcccatcataccctgccgaatggtcagccaactgtactgacctcgaggcgcgattcatcctctcatgaggagacccctggaagtcacccactgtacggtcacggagagtgcaaatggccagggtgtgagaccttatgcgaggaccttggccagttcattaaacacctgaacaccgagcacgcccttgatgataggagtaccgctcagtgccgggttcagatgcaggtcgttcagcagctcgaaatccagctcgctaaagaaagtgaacgcctgcaggcaatgatggcacatctgcacatgcgaccatctgaacccaagccctttagccaacctctgaacccggtccccggttcttcttcctttagtaaggttacagtttctgctgctgacagcttccccgacggccttgtacatccacctacgtcagcagcagctcctgtgactccccttcggccaccggggctcgggtctgcctctttacacggagggggcccagccagacggagatctagcgacaagttttgttcccccatctcctccgagctggctcagaaccatgagttttataaaaacgccgatgtccgaccaccattcacctatgcctcgctcatccggcaagctatcttggagactcctgaccggcaactcacactaaacgagatctataactggttcacaaggatgttcgcctacttcagaaggaatacagcaacttggaagaatgccgtgcgacataacctgtctcttcacaagtgttttgtccgcgtggagaacgtgaagggggcagtgtggaccgtagacgagcgtgaataccaaaagcgaagaccacccaagatgacgggctccccaacactggtaaagaacatgatctcaggcttatcctacggcgctctaaatgcaagctaccaagctgcacttgctgagtcttcctttcccctgcttaattcccccgggatgctgaatcccgggtccgcatcctctcttttgccactctcccacgacgatgttggtgcccccgtcgagcctctccccagtaacggcagttctagcccacccaggctgtcgcccccccaatatagtcaccaggtgcaggtaaaagaggaaccagccgaagccgaggaagatcgacagcccggtccacctctgggtgcaccaaatccatctgcgagcggtccgcctgaagaccgagatcttgaagaagagctcccaggtgaggagctcagctag

SEQ ID NO: 24992 - DNA, 2043 bp, Artificial Sequence
  derived and/or modified sequence
atgatggtggagagcgccagcgagaccatccgcagcgcccccagcggccagaatggagtgggcagcctgagcggccaggctgatggcagcagtggaggagccaccggcaccacagccagcggcaccggccgggaggtgaccaccggggctgacagcaatggagagatgagccctgctgagctgctgcacttccagcagcagcaggccctgcaggtggcccggcagttcctgctgcagcaggccagcggcctgagcagccctggcaacaatgacagcaagcagagcgccagcgctgtgcaggtgcctgtgtctgtggccatgatgagcccccagatgctgaccccccagcagatgcagcagatcctgagccccccccagctgcaggccctgctgcagcagcagcaggccctgatgctgcagcagctgcaggagtactacaagaagcagcaggagcagctgcacctgcagctgctgacccagcagcaggccggcaagccccagcccaaggaggccctgggcaacaagcagctggccttccagcagcagctgctgcagatgcagcagctgcagcagcagcacctgctgaacctgcagaggcagggcctggtgtccctgcagcccaaccaggccagcggccccctgcagaccctgccccaggccgctgtgtgccccacagacctgccccagctgtggaagggggagggcgcccctggccagcctgctgaggacagcgtgaagcaggagggcctggacctgactggaacagctgccacagccaccagctttgctgccccacccaaggtgagcccccccctgagccaccacaccctgcccaacggccagcccaccgtgctgaccagccggcgggacagcagcagccatgaggagaccccaggcagccaccccctgtatggccacggggagtgcaagtggccaggctgtgagaccctgtgtgaggacctgggccagttcatcaagcacctgaacacagagcacgccctggatgacaggagcacagcccagtgccgggtgcagatgcaggtggtgcagcagctggagatccagctggccaaggagagcgagcggctgcaggccatgatggcccacctgcacatgaggccttctgagcccaagcccttcagccagcccctgaaccctgtgcccggcagcagcagcttcagcaaggtgacagtgtctgctgctgacagcttcccagatggcctggtgcacccccccaccagcgctgctgcccctgtgacccccctgcggcccccaggcctgggcagcgccagcctgcatggaggcggccctgcccggcggcgcagcagtgacaagttctgcagccccatcagcagcgagctggcccagaaccacgagttctacaagaatgctgatgtgcggccccccttcacctacgccagcctcatccggcaggccatcctggagaccccagaccggcagctgaccctgaatgagatctacaactggttcaccaggatgtttgcctacttcagaagaaacacagccacctggaagaatgctgtgcgccacaacctgagcctgcacaagtgctttgtgcgggtggagaatgtgaagggagctgtgtggacagtggatgagcgggagtaccagaagaggcggccccccaagatgacaggcagccccaccctggtgaagaacatgatcagcggcctgtcctatggagccctgaatgccagctaccaggccgccctggccgagagcagcttccccctgctgaacagccctggcatgctgaaccctggcagcgccagcagcctgctgcccctgagccatgatgatgtgggcgcccctgtggagcccctgcccagcaatggcagcagcagccccccccggctgagccccccccagtacagccaccaggtgcaggtgaaggaggagcctgctgaggccgaggaggaccggcagcccggcccccccctgggcgcccccaaccccagcgccagcggccccccagaggaccgggacctggaggaggagctgcctggagaggagctgtcctag

SEQ ID NO: 24993 - DNA, 2043 bp, Artificial Sequence
  derived and/or modified sequence
atgatggtggagagcgccagcgagaccatccggagcgcccccagcggtcagaacggtgtcggctcactgtcaggccaggcggacggcagctcaggaggggcaacaggtaccacagcctcaggaaccgggagggaggtgacaacaggagcagattctaatggagagatgagtcctgctgagctcttgcattttcagcagcagcaggctctgcaagtggctagacagttcctgctgcagcaagctagtgggctgtcgagtcctggtaacaacgactctaaacagtctgcgtctgccgtccaagtgcctgtcagtgtggcgatgatgagtcctcagatgcttaccccccagcaaatgcaacagatcctcagccccccacagctgcaggccctgctgcaacaacagcaggccctgatgctgcagcagttacaggagtactataagaagcagcaggagcagctgcatctgcagcttctgacgcagcagcaggcaggaaaaccccagccgaaagaggcgctgggtaataagcagctggctttccaacagcagctgctgcagatgcaacagctacagcagcagcacctactcaatctccaacggcagggactggtttctttgcagccaaatcaggcatctggaccgctccagaccctcccccaagctgctgtctgccccaccgatctcccgcagctttggaaaggcgagggcgcacctggtcagccggccgaagatagcgttaaacaggaagggctggacctgacagggaccgctgctaccgctacatcatttgcggctccccctaaagtgtctcctcccttatcccatcatacgctgcccaacggacagcctacagtattgacaagtaggagggatagttcttcacatgaggaaacccccggcagccacccgctctacggccatggcgagtgcaagtggccaggctgtgagacattatgtgaagacctgggccagttcattaaacacctaaacaccgaacatgcccttgacgatcggagcaccgcacagtgtcgagttcagatgcaggtggtgcaacagttggagattcagctggcgaaagaatctgagcggttgcaggcaatgatggcccatctgcatatgcggccaagcgaacccaagccgttttctcagcctctgaatccagtgcctgggtcttcgtctttttcaaaggttactgtatccgcagcagattctttcccagacggcttggttcacccacctacctctgctgccgcaccggtgacacctctgaggccacccgggctggggtccgcgagtctgcatggtgggggcccagccagaagacgtagtagtgacaagttctgttccccaattagctccgagttggctcagaatcatgaattctataagaatgctgacgtccggccaccgttcacgtacgcctcactgattagacaggccatcttagaaacgcctgaccgacagctgaccctcaatgaaatttacaactggttcactaggatgttcgcttacttcaggcgaaatacggccacttggaaaaacgcagtacggcacaatctgagtctacataagtgtttcgtgcgcgtggagaacgttaagggagcagtatggacggtggacgagcgggagtaccaaaagaggcggcctccaaagatgaccggcagtcccacactcgtcaagaacatgatctccggcctgagctacggtgccctgaacgcttcttaccaggccgctttggctgaaagcagcttccccctactgaattcccccggtatgcttaatccaggtagtgccagttctctgcttcccctcagtcacgatgatgttggagcgccagtcgagccactgccaagcaacgggtcatcttctccgccccggcttagcccccctcagtacagccatcaagtacaggtgaaggaggagcctgccgaagctgaagaagacaggcaaccaggacctccattaggggccccaaatccttccgctagtgggcctccggaagatcgagatctggaggaagagctgcctggagaggagctctcttag

SEQ ID NO: 24994 - DNA, 2043 bp, Artificial Sequence
  derived and/or modified sequence
atgatggtggagagcgccagcgagaccatccggagcgcccccagcgggcagaacggcgtcggaagtctgtccggccaggctgatgggtccagcggcggtgctacggggacgaccgcgtctgggaccggaagagaagtaactactggcgccgatagtaacggtgaaatgtcccccgctgagctgctgcattttcagcagcaacaggccctgcaagtcgcgaggcagttcttgctacagcaggcatcggggctgtcctcacctggaaataacgatagtaagcaaagcgctagcgccgtccaggttcccgtcagcgtcgcaatgatgagcccacaaatgctgacaccgcagcaaatgcagcagatcctgtcacctccccagctgcaggccctgctgcaacagcaacaggctcttatgctccagcagctccaggagtactacaaaaaacagcaggaacagctccatctgcaactcctgacacagcagcaggccggcaaaccccagcccaaagaggccttgggcaacaaacaactggcttttcagcagcagttgcttcaaatgcagcaactgcaacagcaacacctcctcaacctccagcgccaaggacttgtcagccttcagcccaatcaggcttcgggacctctccagactctcccacaagccgccgtgtgccccaccgacctgccccaactgtggaaaggggagggagctccgggccagcctgcagaggatagtgtcaagcaggaaggcctggacttgaccggtaccgccgccacagctacctcattcgcggcaccaccgaaggtgagtcctcctctttcccatcataccctgccaaatggccaacccacagtgctgacttcaaggagggacagcagttcacacgaggagaccccgggcagccatcctctctacggccacggggagtgtaaatggcctggatgtgagaccctttgtgaggacctcgggcaattcattaagcatctgaacaccgaacacgccctcgatgacagatccaccgcccagtgccgtgttcaaatgcaggtggtgcagcagctggagatccagctggccaaggagagcgagaggcttcaggccatgatggctcacctacatatgagacctagtgagccaaagccgttcagccagccgctaaaccctgttcctggcagctcatctttttcaaaggttacagtgtcagcggccgattccttccctgacgggctggttcatcccccgacttcggcagctgccccggtgactccactcaggccccccggcctgggatctgcaagccttcatggtgggggccctgcgcggcggcggtcgagtgacaagttttgcagcccgattagctccgaattggctcaaaaccatgaattttacaagaatgcggatgtgcgcccccctttcacctatgccagcctaatccgccaggctatactcgagacccctgacagacagcttactttgaacgagatctacaactggtttaccaggatgtttgcatacttcaggcggaatacagcaacctggaaaaacgctgtgaggcacaacctgagcctgcacaagtgctttgtaagagtggagaacgttaagggcgctgtctggacagtggacgagcgtgagtaccaaaagcgtcggcctccgaaaatgactggatcccccaccctagtgaaaaatatgatctcaggcctgagctacggggcactgaacgcatcttaccaggccgcacttgccgaatcctcattcccgctattgaacagcccgggaatgctcaacccgggcagtgcctccagcttactaccactgtcacacgatgacgtaggcgcgcctgtagagcccttgcctagcaatgggagttcatcacctccaagactcagcccacctcagtacagtcatcaagtccaagtgaaggaagagcccgctgaagccgaagaagacagacagcccggtccaccacttggcgcaccaaatccatccgcatctggtcctcctgaggacagggatctggaggaggagctgcctggagaggaattaagctag

SEQ ID NO: 24995 - DNA, 2043 bp, Artificial Sequence
  derived and/or modified sequence
atgatggtggaatccgcatccgagactatccgaagcgcccctagcggtcagaacggagtgggctctctctctggacaggctgacggctcttcaggcggtgccaccggtacaaccgcctctggtacgggccgagaggttaccacaggtgcagacagtaatggagagatgagccctgccgaactgttgcacttccagcagcagcaggcgctgcaagtggcccgacaatttctgcttcaacaggctagcggactgagctcacccggtaacaatgattcaaagcaatcagcatcagccgttcaggtacccgtgagcgtggccatgatgtcaccccaaatgttaacgccacagcagatgcagcagatactgagcccacctcagttacaggcactgttgcaacagcagcaggcactgatgctgcagcagcttcaggagtactacaaaaagcagcaagagcagctgcacctacagcttctgacacagcaacaagccggtaaaccccagcccaaagaagcattgggtaataagcagctggcatttcaacagcagctgcttcagatgcagcagctgcagcaacagcacctgcttaatctgcagcgccaggggttagtttccctgcagcccaaccaggcgagtgggcctttgcagaccctaccacaggccgctgtgtgccccaccgacctaccacagctctggaagggagagggcgcacctggtcagcctgccgaggacagcgtgaagcaagaagggcttgatctaactgggacagctgccacagccacgagcttcgcagcacctccaaaggtttctcccccacttagtcatcataccttgcccaatggccagcctactgtgctgacttcacggagagactctagcagccatgaggaaacccccggttcgcaccctctctacggtcatggtgaatgcaagtggccaggctgtgagacactgtgtgaagacttgggacagttcatcaagcacctgaacaccgagcacgctttagacgacaggtctacagctcaatgtagggtgcagatgcaagtagtccagcagctagaaatccagctggcaaaagagagcgagcggctgcaagctatgatggcacatcttcatatgcggccttccgaacctaagccattctctcaaccgctcaatcccgtacccggatcctcttcatttagcaaggttactgttagcgcagctgacagcttccccgacggcctcgtccatccacctacttcagccgcagcgcctgtgacaccactgagaccccctggactgggctcagcttcccttcacggcggaggaccggcacgccgaagatcaagcgataagttctgcagcccaattagttctgagctggcccagaatcacgagttctacaaaaatgccgacgtgaggcctcctttcacctacgcttcgctcattcgccaggccattttggagacccctgatcggcaactgacactgaatgagatttataattggtttactcggatgttcgcatatttccgacgcaacacggccacttggaaaaacgccgttcgccacaacctgtctcttcacaaatgctttgttcgggtcgaaaacgtcaagggagccgtgtggacagtggatgaaagagagtaccagaaacgtagacccccaaaaatgaccggatctcccacactggtcaagaacatgatctcaggattaagttatggcgcattgaacgcctcctaccaggccgctcttgctgagtcatctttcccgctcctgaacagcccgggaatgctgaaccccggttcggcatcatcactgttgccgctgtctcacgatgacgtgggcgctcctgtcgaaccactgccatcgaacggctcaagtagcccccctcgcctcagtccaccccagtacagccaccaggtgcaggtgaaggaggagccagctgaggcggaagaggatcgacaaccagggccaccactgggcgcaccaaacccgtcggcttccggacccccagaggaccgcgacctcgaggaagaactgcccggagaagaactgtcttag

SEQ ID NO: 24996 - DNA, 2043 bp, Artificial Sequence
  derived and/or modified sequence
atgatggtggagagcgctagtgagaccatccgttcggccccatctgggcaaaatggtgtcggctccctctctgggcaggccgacggatcgtccggaggagcgactgggactaccgcatccggcaccggccgtgaagttacaacaggggcagattcaaatggcgaaatgagccctgcagaactgctccattttcaacagcagcaagctcttcaggtggctaggcagtttcttctgcagcaggcttctggacttagtagtcccggtaataatgactccaaacagagtgctagcgccgtccaggttcccgtatcagtggccatgatgtcaccacagatgctgaccccccagcagatgcagcagatcctctctcctccccaactccaggcccttcttcagcagcaacaagctttgatgcttcagcagctccaggaatactacaaaaaacagcaagagcagcttcacctgcagctgctgacacagcaacaggccggaaagccccagccgaaggaggctctgggaaataaacaactggctttccagcagcaactgctgcagatgcagcagctccagcagcagcatctcttaaatctgcagaggcagggactggtgtcactccaacccaatcaggcttccggccctctgcaaacattaccccaggcagcagtttgccccacggatctcccgcagctgtggaagggcgaaggtgctcctggccagcctgccgaagactctgttaaacaggagggactcgacctgaccgggacagctgcaaccgccacgtcgtttgcagctccaccaaaggtcagcccacctcttagccatcacacgctgccaaatggccagcctaccgtgttaactagccgtcgcgacagctcctctcacgaagagacgcccggtagtcaccctctttacggtcacggcgaatgcaaatggcctggctgcgaaacactctgcgaagatttaggacaatttattaagcaccttaataccgaacacgccctggatgacaggtctaccgctcaatgcagggtccaaatgcaggtggtgcagcagttggagattcaactggctaaggagagcgaacgcttgcaagcaatgatggctcaccttcacatgcggccatctgagccaaagcccttttcacagcccctcaatcccgtccccggaagctctagcttcagcaaggtgaccgtatcagccgctgatagttttccagacgggcttgtccaccccccaacaagcgcagctgctccagtgactccactccgaccacccggactcggctcagcctctctgcatggcggtgggcctgcaaggcgccgtagtagcgacaagttttgtagtccaattagtagtgagctcgctcagaaccacgaattttacaaaaacgccgacgtcaggcctccttttacctatgcgtctttaattaggcaggcgattttggaaacacctgacagacagctgactcttaatgaaatctataactggttcacccggatgtttgcctatttccggagaaacaccgctacctggaaaaacgccgtgcggcataacctttccctgcataagtgctttgtccgagtggagaatgtcaaaggcgctgtgtggaccgtggacgagcgcgagtaccagaagcgccgtccacctaagatgaccggtagcccaactcttgtgaagaatatgatcagcggcctctcttacggggctttgaatgccagctaccaggcggctctagccgagagcagcttccctctgctgaattctccgggtatgctgaaccccggtagcgcttctagcctgctcccattatcacatgacgacgttggcgcacccgtggagccattgcctagtaacggctcatcatcacctcccaggctgtctccaccacagtacagccatcaggtacaggttaaggaagaaccagcagaggccgaggaggaccggcaaccaggtccacccctgggggcaccaaacccatctgcctctggccctccagaagatagggatctggaagaggaattaccgggagaggaactgagctag

SEQ ID NO: 24997 - DNA, 2043 bp, Artificial Sequence
  derived and/or modified sequence
atgatggtggagagcgccagcgagaccatcagaagcgcccccagcggccagaacggcgtgggcagcctgagcggccaggccgacggcagcagcggcggcgccaccggcaccaccgccagcggcaccggcagagaggtgaccaccggcgccgacagcaacggcgagatgagccccgccgagctgctgcacttccagcagcagcaggccctgcaggtggccagacagttcctgctgcagcaggccagcggcctgagcagccccggcaacaacgacagcaagcagagcgccagcgccgtgcaggtgcccgtgagcgtggccatgatgagcccccagatgctgaccccccagcagatgcagcagatcctgagccccccccagctgcaggccctgctgcagcagcagcaggccctgatgctgcagcagctgcaggagtactacaagaagcagcaggagcagctgcacctgcagctgctgacccagcagcaggccggcaagccccagcccaaggaggccctgggcaacaagcagctggccttccagcagcagctgctgcagatgcagcagctgcagcagcagcacctgctgaacctgcagagacagggcctggtgagcctgcagcccaaccaggccagcggccccctgcagaccctgccccaggccgccgtgtgccccaccgacctgccccagctgtggaagggcgagggcgcccccggccagcccgccgaggacagcgtgaagcaggagggcctggacctgaccggcaccgccgccaccgccaccagcttcgccgccccccccaaggtgagcccccccctgagccaccacaccctgcccaacggccagcccaccgtgctgaccagcagaagagacagcagcagccacgaggagacccccggcagccaccccctgtacggccacggcgagtgcaagtggcccggctgcgagaccctgtgcgaggacctgggccagttcatcaagcacctgaacaccgagcacgccctggacgacagaagcaccgcccagtgcagagtgcagatgcaggtggtgcagcagctggagatccagctggccaaggagagcgagagactgcaggccatgatggcccacctgcacatgagacccagcgagcccaagcccttcagccagcccctgaaccccgtgcccggcagcagcagcttcagcaaggtgaccgtgagcgccgccgacagcttccccgacggcctggtgcacccccccaccagcgccgccgcccccgtgacccccctgagaccccccggcctgggcagcgccagcctgcacggcggcggccccgccagaagaagaagcagcgacaagttctgcagccccatcagcagcgagctggcccagaaccacgagttctacaagaacgccgacgtgagaccccccttcacctacgccagcctgatcagacaggccatcctggagacccccgacagacagctgaccctgaacgagatctacaactggttcaccagaatgttcgcctacttcagaagaaacaccgccacctggaagaacgccgtgagacacaacctgagcctgcacaagtgcttcgtgagagtggagaacgtgaagggcgccgtgtggaccgtggacgagagagagtaccagaagagaagaccccccaagatgaccggcagccccaccctggtgaagaacatgatcagcggcctgagctacggcgccctgaacgccagctaccaggccgccctggccgagagcagcttccccctgctgaacagccccggcatgctgaaccccggcagcgccagcagcctgctgcccctgagccacgacgacgtgggcgcccccgtggagcccctgcccagcaacggcagcagcagcccccccagactgagccccccccagtacagccaccaggtgcaggtgaaggaggagcccgccgaggccgaggaggacagacagcccggcccccccctgggcgcccccaaccccagcgccagcggcccccccgaggacagagacctggaggaggagctgcccggcgaggagctgagctag

SEQ ID NO: 24998 - protein, 678 aa, Artificial Sequence
  derived and/or modified sequence
MMVESASETIRSAPSGQNGVGSLSGQADGSSGGATGTTASGTGREVTTGADSNGEMSPAELLHFQQQQALQVARQFLLQQASGLSSPGNNDSKQSASAVQVPVSVAMMSPQMLTPQQMQQILSPPQLQALLQQQQALMLQQEYYKKQQEQLHLQLLTQQQAGKPQPKEALGNKQLAFQQQLLQMQQLQQQHLLNLQRQGLVSLQPNQASGPLQTLPQAAVCPTDLPQLWKGEGAPGQPAEDSVKQEGLDLTGTAATATSFAAPPKVSPPLSHHTLPNGQPTVLTSRRDSSSHEETPGSHPLYGHGECKWPGCETLCEDLGQFIKHLNTEHALDDRSTAQCRVQMQVVQQLEIQLAKESERLQAMMAHLHMRPSEPKPFSQPLNPVPGSSSFSKVTVSAADSFPDGLVHPPTSAAAPVTPLRPPGLGSASLHGGGPARRRSSDKFCSPISSELAQNHEFYKNADVRPPFTYASLIRQAILETPDRQLTLNEIYNWFTRMFAYFRRNTATWKNAVRHNLSLHKCFVRVENVKGAVWTVDEREYQKRRPPKMTGSPTLVKNMISGLSYGALNASYQAALAESSFPLLNSPGMLNPGSASSLLPLSHDDVGAPVEPLPSNGSSSPPRLSPPQYSHQVQVKEEPAEAEEDRQPGPPLGAPNPSASGPPEDRDLEEELPGEELS

SEQ ID NO: 24999 - DNA, 3300 bp, Artificial Sequence
  derived and/or modified sequence
gcgagccaagcagcccacaaagtgccatgccccggcggggttgaggcgcgcggcggtcggcccggcgcgctgggaggacgcccgggagctgcgcgacgcggggcggcgcggaagggcagccccggcgggcggcggcgggcccgggctgcgaccggagcgagccccatgccccgcgcgggctgacgggccggagcccgcacggagcggccgggcgggacaggtaccgctagagcgacatgatggtggaatctgcctcggagacaatcaggtcggctccatctggtcagaatggcgtgggcagcctctctgggcaagccgatggcagcagcggcggggccacagggacaactgcaagtggcacgggcagggaagtgaccacgggtgcagacagcaatggtgagatgagtcccgcagagctgctgcacttccagcagcaacaggctctccaagtggcccggcagttcctgctgcagcaggcctcaggcctgagctccccagggaacaatgacagcaaacagtctgcctctgctgtgcaggtgcctgtgtcggtggccatgatgtcgccgcagatgcttaccccgcaacagatgcagcagatcctgtcgcccccgcagctgcaggccttgctccagcagcagcaagccctcatgctccagcaggagtactacaagaagcagcaggagcagctccacctgcagctcctcacccagcagcaggctgggaaaccgcagcccaaagaggcactggggaacaagcagctggccttccagcagcagctcctgcaaatgcaacagttgcagcagcagcacctgctcaacctgcagaggcaggggctggtcagcctgcagcccaaccaagcctcggggcccctccagacccttccgcaagcagctgtttgcccaacagacctgccccagctgtggaagggcgagggtgcccccgggcagcctgccgaggacagcgtcaagcaggaggggctggacctcactggcacggccgccaccgctacctcgtttgccgctccccccaaggtctcaccccccctctcccaccataccctgcccaacggacagcctactgtgctcacatctcggagagacagctcttcccacgaggagacccccggctcccaccccctgtacggacacggagagtgcaagtggccaggctgtgagaccctgtgtgaagacctgggccagtttatcaaacacctcaacacagagcacgccctggatgaccggagtacagcccagtgccgggtacagatgcaggtggtgcagcagctggagatccagctcgccaaggagagcgagcggctgcaggccatgatggcccacctgcacatgcggccctcggagcccaagcccttcagccagccactgaacccggtccccggctcctcctcattctccaaggtgaccgtctctgcagcagactcattcccagatggtctcgtgcaccccccgacctcggccgcagcccctgtcacccctctacggccccctggcctgggctctgcctccctgcatggtgggggcccagcccgtcggagaagcagtgacaagttctgctcccccatctcctcagagctggcccagaatcatgagttctacaagaacgccgacgtccggccccccttcacctacgcctccctcatccgccaggccatcctggaaacccctgacaggcagctgaccctgaatgagatctataactggttcaccaggatgttcgcctatttccgcagaaacactgccacctggaagaacgccgtgcgccacaacctcagcctgcacaagtgcttcgtccgcgtggagaacgtcaagggtgccgtgtggactgtggacgagcgggagtatcagaagcggagaccgccaaagatgacagggagccccaccctggtgaagaacatgatctctggcctcagctatggagcacttaatgccagctaccaggccgccctggccgagagcagcttccccctcctcaacagccctggcatgctgaaccctggctccgccagcagcctgctgcccctcagccacgatgacgtgggtgcccccgtggagccgctgcccagcaacggcagcagcagccctcctcgcctctccccgccccagtacagccaccaggtgcaggtgaaggaggagccagcagaggcagaggaagacaggcagcccgggcctcccctgggcgcccctaaccccagcgcctcggggcctccggaagacagggacctggaggaggagctgccgggagaagaactgtcctaagggcctgtagtgaccggcagggctggggtgagacccctcccttccagaatccaggccccatctcccccaactccacagcccctcccgagcctcaaggcaagtccaggactcagaccggggaggcccgggccagcagctcccagtgtgacctgacaaaaacacgtaggggcagggacggtccccacccccagggacacaacccctggtcttggaccagtagaggacacggagggttcagacccctcctcagaccctccccacatctgaaactgcctccccccaaccaccagcagcagcagggccctcctcccccaccagctctccccacagggcccctcagcatcatggagacccgcaggcggggcttagccacccctcaaacccagggccccctggcacctggctctggccgtgttttctggccagaggcccccactttcctaactcgtgctcccttccgccttcttttccgtactgtgaagaaagaactctccaccccagctcccaccctgccctggcctgggtggaggaactgtgcctccatccccagaagaaacagccccctctgctgctggggtgggactgtctgtgtgccctgtgggggtccgtgtgagcaggcccacctggctccagacccgcccccaacctgagacagaaccaggctgagccaggcctccacccccacccccgtttgctgggggctcctccagccgcccccatgggaagaggcctggtaccgcctcacccacagaggtctgtgccaggtgcgcttctgcaggtggagccaagctctccctgaggccagaggcggggcctgggccgggagcccaggggaaggccaggctggaccccggctccacacccacatccagcctgcaggcctctctgcagtcctctcaccctccctcagctccccttcctctgcagtcaccctcagctccccttccttgcccgcctctccccccgccgccccaccagttaaacggatgaccaaagacctttcttatgccggaagcaaaaaccaaaa

SEQ ID NO: 25000 - DNA, 2037 bp, Artificial Sequence
  derived and/or modified sequence
atgatggtggagtccgcttccgagacaatcagaagcgcgccaagcggccagaatggagtcggatccttatccgggcaggcagatgggagttctgggggagccacgggtactaccgccagcgggacaggtcgtgaagtgaccaccggagctgactcaaatggcgaaatgagtcctgccgagctgctacacttccaacagcagcaagcgctccaggtcgctcgccaattcctgctacagcaggcgtctggcctgtcaagccctgggaacaacgactcaaaacagagcgcctctgcggtccaggtccccgtgtcagtcgccatgatgtccccacagatgctgactccccagcagatgcaacagattctctccccaccacagctccaggctctgctccagcagcagcaggccttgatgttacagcaggaatactataaaaaacagcaagaacagctccatctgcagcttctgacacaacagcaggcgggaaaaccccagcctaaagaggcactgggaaataagcaactggcctttcagcaacaactgttgcagatgcagcagctccagcagcagcacctgctcaacctgcagcgacagggtctcgtgtccctccaacccaatcaagctagtgggcctttacagaccctccctcaggctgccgtgtgtcccaccgacttacctcaactctggaaaggggaaggggcgcctggacagcccgcagaagactctgtcaagcaggaggggctcgatctgactgggacagctgcgacagctaccagcttcgcagcaccccctaaggtatcacctccccttagtcaccacactctcccgaacggccagcctacggtcctgacctcccggagagacagttctagccacgaggagaccccagggagccacccattgtacggccatggcgagtgtaaatggcccgggtgcgaaactttgtgtgaggatttgggacaatttattaagcacttaaacaccgaacatgccctggacgatcgctctaccgctcagtgtcgggttcagatgcaggtggttcagcagcttgagattcagttagcaaaagagtccgagaggttacaggctatgatggctcatttacatatgcgcccatccgaacctaaaccattctcacagccgctgaatcccgtgcccgggtcctcgagttttagcaaagtaaccgtatcagcggcggattcgttccccgatggtctcgtgcatcccccgactagcgcagctgcccctgttactcctttgaggcctcccggactggggtctgcttcgttacacggtggcggtcccgcccgccgaaggtcttccgacaagttctgctcccctatttccagtgagctggcacagaatcacgagttttataaaaatgcagacgttagaccaccatttacctatgccagcctgatcagacaagctattttagagacacccgaccggcagctaacgctcaatgagatctataattggtttacaagaatgtttgcctacttcaggcggaacacagcaacgtggaaaaacgcagtgcggcataacctcagcttgcataagtgtttcgtccgggtagagaacgtcaagggggctgtatggactgtagatgagagagaataccagaagaggaggcctccaaaaatgacaggctctcccacgctcgtgaagaatatgatctctggcttgagctatggggccctgaatgcatcataccaagccgctctcgccgagagcagtttccccttactaaattccccaggcatgctaaaccccggctcagcctcctccttgctgcctctctcacacgatgacgtgggcgcccccgtggaacctttgccatcaaatggctctagcagccccccccggctaagtccgcctcagtacagccatcaagtccaagtgaaggaggagcctgccgaggcagaagaggaccgccagcccggcccacccctgggtgctccaaacccgagtgcctccggcccgccagaggaccgagacttagaagaagagctgcccggggaagaactctcttag

SEQ ID NO: 25001 - DNA, 2037 bp, Artificial Sequence
  derived and/or modified sequence
atgatggtggagagcgccagcgagaccatccgcagcgcccccagcggccagaatggagtgggcagcctgagcggccaggctgatggcagcagtggaggagccaccggcaccacagccagcggcaccggccgggaggtgaccaccggggctgacagcaatggagagatgagccctgctgagctgctgcacttccagcagcagcaggccctgcaggtggcccggcagttcctgctgcagcaggccagcggcctgagcagccctggcaacaatgacagcaagcagagcgccagcgctgtgcaggtgcctgtgtctgtggccatgatgagcccccagatgctgaccccccagcagatgcagcagatcctgagccccccccagctgcaggccctgctgcagcagcagcaggccctgatgctgcagcaggagtactacaagaagcagcaggagcagctgcacctgcagctgctgacccagcagcaggccggcaagccccagcccaaggaggccctgggcaacaagcagctggccttccagcagcagctgctgcagatgcagcagctgcagcagcagcacctgctgaacctgcagaggcagggcctggtgtccctgcagcccaaccaggccagcggccccctgcagaccctgccccaggccgctgtgtgccccacagacctgccccagctgtggaagggggagggcgcccctggccagcctgctgaggacagcgtgaagcaggagggcctggacctgactggaacagctgccacagccaccagctttgctgccccacccaaggtgagcccccccctgagccaccacaccctgcccaacggccagcccaccgtgctgaccagccggcgggacagcagcagccatgaggagaccccaggcagccaccccctgtatggccacggggagtgcaagtggccaggctgtgagaccctgtgtgaggacctgggccagttcatcaagcacctgaacacagagcacgccctggatgacaggagcacagcccagtgccgggtgcagatgcaggtggtgcagcagctggagatccagctggccaaggagagcgagcggctgcaggccatgatggcccacctgcacatgaggccttctgagcccaagcccttcagccagcccctgaaccctgtgcccggcagcagcagcttcagcaaggtgacagtgtctgctgctgacagcttcccagatggcctggtgcacccccccaccagcgctgctgcccctgtgacccccctgcggcccccaggcctgggcagcgccagcctgcatggaggcggccctgcccggcggcgcagcagtgacaagttctgcagccccatcagcagcgagctggcccagaaccacgagttctacaagaatgctgatgtgcggccccccttcacctacgccagcctcatccggcaggccatcctggagaccccagaccggcagctgaccctgaatgagatctacaactggttcaccaggatgtttgcctacttcagaagaaacacagccacctggaagaatgctgtgcgccacaacctgagcctgcacaagtgctttgtgcgggtggagaatgtgaagggagctgtgtggacagtggatgagcgggagtaccagaagaggcggccccccaagatgacaggcagccccaccctggtgaagaacatgatcagcggcctgtcctatggagccctgaatgccagctaccaggccgccctggccgagagcagcttccccctgctgaacagccctggcatgctgaaccctggcagcgccagcagcctgctgcccctgagccatgatgatgtgggcgcccctgtggagcccctgcccagcaatggcagcagcagccccccccggctgagccccccccagtacagccaccaggtgcaggtgaaggaggagcctgctgaggccgaggaggaccggcagcccggcccccccctgggcgcccccaaccccagcgccagcggccccccagaggaccgggacctggaggaggagctgcctggagaggagctgtcctag

SEQ ID NO: 25002 - DNA, 2037 bp, Artificial Sequence
  derived and/or modified sequence
atgatggtggagagcgccagcgagaccatccggagcgcccccagcggtcagaatggagtcgggagtctaagcggacaagccgacggatcatccggcggcgcgacgggaaccactgcctccggtaccggccgcgaagtgacaaccggtgccgactctaatggggagatgagtccagcagagcttttgcacttccagcagcagcaggcgctgcaggttgcacggcagttcctgcttcagcaggccagcgggttgtcatcacctgggaataacgactccaaacagtctgcatctgccgtgcaggtccctgtgagtgttgccatgatgtcgccacaaatgctaacccctcagcaaatgcagcagattttgtcccccccccagcttcaagcacttctccaacagcaacaggccttgatgctccagcaagagtactataaaaagcagcaggagcagttacatctgcagctactcacccagcaacaagccggtaagccgcagcccaaggaagcgctaggcaacaaacagcttgccttccagcaacagctgttgcagatgcagcagttgcagcagcagcacctccttaatctgcagagacaaggactggtttccttgcagcccaaccaggctagtggtcccttgcagacactccctcaagccgccgtgtgcccgactgatctgcctcagttgtggaaaggtgagggcgctcccggccagccagccgaagattcggttaaacaggaaggcctagacctgactggtacagcggctacagcaacatcttttgcggcgcctcccaaggtgtccccccctctctcacaccacactctgcccaatggacagcccaccgtgctcacttctcgcagggactcttcttcccacgaggagaccccagggagccatccattatatggccatggtgagtgtaagtggccaggatgcgagactctgtgcgaggacctgggacagtttattaagcatctgaacacggagcacgccctcgatgacagatccaccgctcagtgtagagtgcagatgcaggtggtccagcagctggaaatacagttggcgaaggagtcagaacgcctgcaggcaatgatggcccatctgcatatgcggccttctgagcctaaaccattttctcagcccctcaatccagtacccggtagcagcagcttttctaaagtaacagtaagcgcggctgattcctttcccgatggcctcgtgcatccacccacttccgcagctgcaccagtgactcccttgaggccccccggcctcggttctgccagtttgcacggaggagggcccgccagaaggcgctcctcagataaattttgttcacctatatccagcgaactggctcagaaccatgaattctacaaaaacgcagacgtgcggccacctttcacgtatgcatccctcataaggcaggcaattctcgagacaccggacaggcagctcaccttaaatgaaatctataattggtttacccgcatgttcgcctactttaggcgcaacactgccacatggaagaatgccgtgcgtcataacctgagcctgcacaagtgcttcgtcagggtggaaaacgttaaaggagccgtgtggactgttgacgagagagagtatcagaaacgccgtcccccaaagatgactggatcaccaacacttgtcaagaatatgataagcggacttagttacggtgccctgaacgcaagctaccaagccgccctggctgagtcatcatttcctcttctgaacagccctggtatgctgaatcctggctccgcaagcagcctgctacccctcagtcatgatgacgtaggggcacctgtggagccactaccctcaaatgggagttccagccctccacgtttatccccacctcagtactcccaccaggttcaggttaaggaggagcctgcagaggcagaggaggatcgccagccaggcccacctctgggcgctccaaatccttcagcatccggccctcctgaggaccgggacctcgaggaggaactaccgggagaagagctatcatag

SEQ ID NO: 25003 - DNA, 2037 bp, Artificial Sequence
  derived and/or modified sequence
atgatggttgagtccgcgtcagagactattaggtctgctcccagtgggcagaacggtgttggatccctcagtggccaagctgatgggtcctctggtggcgctaccggtactaccgcgagcggaacgggtcgcgaggtcaccactggcgcagactcaaacggggaaatgtctccagcagagctccttcactttcagcagcaacaggctctacaggtggcccgtcagttcttgttacaacaggcctctggtctcagcagcccaggtaacaatgatagcaagcagagtgctagtgcagtacaagtccccgttagtgtagccatgatgtccccccagatgctgacgcctcagcaaatgcagcagatcctgagtcccccacaactgcaggcacttctgcagcagcagcaagctctaatgctgcagcaagaatactacaagaagcagcaagagcagctgcatctgcagttgctgactcagcaacaggctgggaagcctcagcctaaagaggccctgggtaataaacagctggccttccagcagcagctcctgcaaatgcagcagcttcaacagcagcacctacttaatctgcagcgccagggcctagtgtcgctgcagccaaatcaggccagcggtcctcttcaaacgctgccccaggcagccgtctgcccgactgacctgccccagctctggaagggcgaaggcgcaccaggtcagcccgctgaggacagcgtgaagcaggaggggctagacctgaccggcacagcagctacagcaacatccttcgccgcaccgcctaaagtgagcccacccctcagccaccacaccttgccgaacggtcaacccactgtcctgacctcaaggcgcgacagctcctcacacgaagaaacccccggatctcacccattatacgggcatggcgagtgcaagtggcccggttgcgagaccctgtgtgaagatctcgggcaatttatcaaacacctcaataccgaacacgccctggacgacaggagcaccgcccagtgccgggttcagatgcaggtagtacagcagcttgagatccagctagccaaggaaagtgaacggctccaggctatgatggctcatctccacatgcggccttccgaaccgaagccattctctcagccactgaacccagtgcccggatccagcagcttttccaaggtgaccgtgtcggcagccgacagctttcctgacggactagtgcaccctccgacaagcgcggcagcccctgtcacccccctgagaccaccgggacttggaagtgcttccctgcacggaggtggacctgctagacgtcgtagtagcgacaagttttgctcccccatcagctctgaattagcccagaatcacgagttttacaaaaatgcagacgtcaggccccctttcacatacgcctccctcattcgacaagcaatcctggaaaccccagatcggcagctgacgctcaacgagatttataattggttcacaagaatgtttgcttacttcagaaggaatacggcaacatggaaaaacgccgttaggcataatttatctctccataagtgcttcgttagggttgagaacgttaagggcgcagtgtggactgtggatgagcgggagtatcaaaaacgcagacctcctaaaatgaccggctcccctaccctagttaaaaacatgatatcagggctgtcatatggggctctcaatgcatcctaccaagccgctctcgctgagtctagttttcccctcctgaattcacccggaatgttgaaccctggttctgcctcttctctgttgcccctgtctcacgacgatgttggcgctccagttgagcccctcccgtcaaatggcagcagctcacccccacgcctgagccccccacagtattcacaccaggtgcaggtgaaggaggagccagctgaggcagaagaagatagacaaccaggcccacctttaggcgctccaaaccctagcgcctctggccctcccgaggaccgtgatttggaggaggagctccctggggaggaactatcctag

SEQ ID NO: 25004 - DNA, 2037 bp, Artificial Sequence
  derived and/or modified sequence
atgatggtggagagcgccagcgagaccatcagaagcgcccccagcggccagaacggcgtgggcagcctgagcggccaggccgacggcagcagcggcggcgccaccggcaccaccgccagcggcaccggcagagaggtgaccaccggcgccgacagcaacggcgagatgagccccgccgagctgctgcacttccagcagcagcaggccctgcaggtggccagacagttcctgctgcagcaggccagcggcctgagcagccccggcaacaacgacagcaagcagagcgccagcgccgtgcaggtgcccgtgagcgtggccatgatgagcccccagatgctgaccccccagcagatgcagcagatcctgagccccccccagctgcaggccctgctgcagcagcagcaggccctgatgctgcagcaggagtactacaagaagcagcaggagcagctgcacctgcagctgctgacccagcagcaggccggcaagccccagcccaaggaggccctgggcaacaagcagctggccttccagcagcagctgctgcagatgcagcagctgcagcagcagcacctgctgaacctgcagagacagggcctggtgagcctgcagcccaaccaggccagcggccccctgcagaccctgccccaggccgccgtgtgccccaccgacctgccccagctgtggaagggcgagggcgcccccggccagcccgccgaggacagcgtgaagcaggagggcctggacctgaccggcaccgccgccaccgccaccagcttcgccgccccccccaaggtgagcccccccctgagccaccacaccctgcccaacggccagcccaccgtgctgaccagcagaagagacagcagcagccacgaggagacccccggcagccaccccctgtacggccacggcgagtgcaagtggcccggctgcgagaccctgtgcgaggacctgggccagttcatcaagcacctgaacaccgagcacgccctggacgacagaagcaccgcccagtgcagagtgcagatgcaggtggtgcagcagctggagatccagctggccaaggagagcgagagactgcaggccatgatggcccacctgcacatgagacccagcgagcccaagcccttcagccagcccctgaaccccgtgcccggcagcagcagcttcagcaaggtgaccgtgagcgccgccgacagcttccccgacggcctggtgcacccccccaccagcgccgccgcccccgtgacccccctgagaccccccggcctgggcagcgccagcctgcacggcggcggccccgccagaagaagaagcagcgacaagttctgcagccccatcagcagcgagctggcccagaaccacgagttctacaagaacgccgacgtgagaccccccttcacctacgccagcctgatcagacaggccatcctggagacccccgacagacagctgaccctgaacgagatctacaactggttcaccagaatgttcgcctacttcagaagaaacaccgccacctggaagaacgccgtgagacacaacctgagcctgcacaagtgcttcgtgagagtggagaacgtgaagggcgccgtgtggaccgtggacgagagagagtaccagaagagaagaccccccaagatgaccggcagccccaccctggtgaagaacatgatcagcggcctgagctacggcgccctgaacgccagctaccaggccgccctggccgagagcagcttccccctgctgaacagccccggcatgctgaaccccggcagcgccagcagcctgctgcccctgagccacgacgacgtgggcgcccccgtggagcccctgcccagcaacggcagcagcagcccccccagactgagccccccccagtacagccaccaggtgcaggtgaaggaggagcccgccgaggccgaggaggacagacagcccggcccccccctgggcgcccccaaccccagcgccagcggcccccccgaggacagagacctggaggaggagctgcccggcgaggagctgagctag

SEQ ID NO: 25005 - protein, 309 aa, Artificial Sequence
  derived and/or modified sequence
MSKIRGLPPEVREPGPGVELGVENGLLCQLIHSPEFNLFSNSVVFESNFIQTHVPEADFQVTKPGNWRDVCEGSATVILGVTSSVPSLPLPNVLLMANVTWPQGPFTTWSTPGDAPVINLSRLLPLKYVELRIYDRLQRILRVRTVTEKIYYLKLHEKHPEIVFQFWVRLVKILQKGLSITTKDPRIKFTHCLVPKMPTNSTETTPENSLLSSPQPSEPLVLLAAEQTSGSFSQLSGKPQLTADRNNDTAIEIDNCSSYKIPSPVASPINLNIPMRAALSHSLWEQEDWNEHLLQVHIASYLGEHFLGA

SEQ ID NO: 25006 - DNA, 930 bp, Artificial Sequence
  derived and/or modified sequence
atgagcaagatcagaggcctgccccccgaggtgagagagcccggccccggcgtggagctgggcgtggagaacggcctgctgtgccagctgatccacagccccgagttcaacctgttcagcaacagcgtggtgttcgagagcaacttcatccagacccacgtgcccgaggccgacttccaggtgaccaagcccggcaactggagagacgtgtgcgagggcagcgccaccgtgatcctgggcgtgaccagcagcgtgcccagcctgcccctgcccaacgtgctgctgatggccaacgtgacctggccccagggccccttcaccacctggagcacccccggcgacgcccccgtgatcaacctgagcagactgctgcccctgaagtacgtggagctgagaatctacgacagactgcagagaatcctgagagtgagaaccgtgaccgagaagatctactacctgaagctgcacgagaagcaccccgagatcgtgttccagttctgggtgagactggtgaagatcctgcagaagggcctgagcatcaccaccaaggaccccagaatcaagttcacccactgcctggtgcccaagatgcccaccaacagcaccgagaccacccccgagaacagcctgctgagcagcccccagcccagcgagcccctggtgctgctggccgccgagcagaccagcggcagcttcagccagctgagcggcaagccccagctgaccgccgacagaaacaacgacaccgccatcgagatcgacaactgcagcagctacaagatccccagccccgtggccagccccatcaacctgaacatccccatgagagccgccctgagccacagcctgtgggagcaggaggactggaacgagcacctgctgcaggtgcacatcgccagctacctgggcgagcacttcctgggcgcctag

SEQ ID NO: 25007 - DNA, 930 bp, Artificial Sequence
  derived and/or modified sequence
atgtccaagattagggggctccctcctgaggtgagagagcccggccctggagttgaactgggcgtggagaacggcctgttgtgtcagctgatccattctcccgaattcaatttgttctcgaattcagtggttttcgagagcaatttcattcagacacacgttcccgaggccgatttccaggtcacaaagcctgggaactggcgggatgtgtgcgagggctctgcaactgtgatcttaggcgtgacttcttcagttccctcactccccctcccaaatgtgctcctgatggctaacgtaacatggccccaaggaccgttcactacatggagtactcccggggacgctccagtgatcaacctcagtcgactgctaccgctcaaatacgtggagcttaggatctacgataggctgcagcgcattttgagggtgagaaccgtcaccgagaagatctattacctgaagctgcatgaaaagcaccccgagatcgtattccaattctgggtgagattggtgaagatcctgcaaaaaggcctctccattacaaccaaagatcccaggatcaagtttactcattgtcttgttcccaagatgcccacgaatagcacagagactacaccagaaaatagtttgttgtcttcgcctcagccctccgagcccctcgtcctcctggccgccgagcaaacttccggtagttttagtcagctgtccggcaagccacagcttacggctgaccggaacaacgatactgccatcgaaatagacaattgttcttcatataagattccaagccctgtagcttcccctatcaacctgaacattcccatgagagccgcgttatcacactcactctgggaacaggaagactggaacgaacacctactccaggtccacatcgcctcctacttgggtgaacatttcctgggagcctag

SEQ ID NO: 25008 - DNA, 2147 bp, Artificial Sequence
  derived and/or modified sequence
aggaaatgctggggaggtgggggcagatcacatcaacatcctggcattgggctgggtcggcgtggagccccagaaatgttcccaagcccattcttaccaagaaccaatgagtaaaatcaggggcctcccacctgaggtcagggaaccaggccctggagtggaacttggggtggaaaatggccttctttgtcaactgattcattctccagaattcaatttgttctccaactcggtggtgtttgaaagcaactttatccagacccatgtacctgaggctgatttccaggtcactaagcccgggaactggagagatgtctgtgaagggtctgccaccgtgatcctcggggtcacctcctcggtgccctccctgccactccccaatgtcctcctgatggccaatgttacctggccccagggtccatttaccacctggagcacacctggtgacgccccagtcatcaacctcagcaggcttctccccctgaagtacgtggagctacgaatctacgaccggctccagcgcatcctgagggttaggacagtgaccgaaaagatctactatctgaagctccacgaaaaacacccagagattgtgtttcaattctgggtccgcttggtgaaaattctgcagaaaggcctgtccatcaccaccaaagacccgagaatcaaattcactcactgcctggtgcccaagatgcccaccaactccacagaaacaacacctgaaaacagcctcctgtcatccccccagcccagcgagcccctcgtgctgctggcggctgagcagaccagtggcagtttctcacagctctcaggaaagccccagctcacagcagacaggaacaatgacactgccattgaaatagacaactgcagcagctacaagataccctctccagtggcatctccaatcaatttgaatatacccatgagagctgccttgagccacagcctctgggaacaagaggactggaatgagcaccttctacaagttcatatagccagttacctaggagagcacttcttgggagcctgacacctaggcaaaacatgctcttccttgcatacgtgtacttgctaccacctcttataatgctccttttccactgtgagccaagtgaccttgggagaggtaagatggtgtttccaacaaggtgcttctctacttccaccaataaacttccaagtgagtccctaatttttgcaggttgggctatagggaggctccagtttgggaaaggactgactgagaacaggagcagtttttggaaaaataggtgggaaaagttactgtctgtgtgtacagagaactacctgagactgggtaattttatttatttatttatttatttatttatttattttggagatagagtcttgctctgtctccaggctggagtacagtggtgcgatcatggctcactgcaacctccacctcctgggttcaagcaattctccagcctcagcctcccaagtagctgggactacaggcacacactacacctggctaagtttttatattttagtagagatggggtttcaccacgttgcccaggctggtctccagctcctgagctcaggccatccagtcacattggcctctcaaagggttaggattacaggcgtgagccaccaggcccagcctcgagtctgggtaatttataaagaaaagaggtttaattggctcatggttccccaggctgtacaggaagcatgactggggaggcctcaggaaacttacaatcaaggcagaaggcaaaagagaagcagacctgtcctacgagtctggagcaggagaaagaaagaagtgggaggtgctatgcacttttaaacaaccaaatctcgtgagaactcactatcatgagaacagcaaggaggaaatccacccccatgatccaatcacctcccaccaggcacctcctccaacactggggattaaattcaacatgagatttgggcagggagacagatccaaatcatatatcagtctgctcagttgaaaccacacaatagccaagcaaagccaagaaagccagtccaaggctggcttggaaagggcctctgaggagaaatcaactttcaaaggggcagggggaaatagaggttgagctactgcaagcccaaaataaaagaaatcctgagaagga

SEQ ID NO: 25009 - DNA, 930 bp, Artificial Sequence
  derived and/or modified sequence
atgagcaagatccggggcctgcccccagaggtgcgggagcccggccctggggtggagctgggcgtggagaatggcctgctgtgccagctgatccacagccctgagttcaacctcttcagcaacagcgtggtgtttgagagcaacttcatccagacccacgtgcctgaggccgacttccaggtgaccaagccaggcaactggagagatgtgtgtgagggcagcgccaccgtcatcctgggcgtgaccagctctgtgcccagcctgcccctgcccaacgtgctgctgatggccaacgtgacctggccccagggccccttcaccacctggagcaccccaggagatgcccctgtgatcaacctgagccggctgctgcccctgaagtatgtggagctgcgcatctatgaccggctgcagaggatcctgcgggtgaggacagtgacagagaagatctactacctgaagctgcacgagaagcaccctgagatcgtgttccagttctgggtgcggctggtgaagatcctgcagaagggcctgagcatcaccaccaaggacccccgcatcaagttcacccactgcctggtgcccaagatgcccaccaacagcacagagaccaccccagagaacagcctgctgagcagcccccagcccagcgagcccctggtgctgctggccgctgagcagaccagcggcagcttcagccagctgagcggcaagccccagctgacagctgacagaaataatgacacagccattgaaattgacaactgcagcagctacaagatccccagccctgtggccagccccatcaacctgaacatccccatgagagctgccctgagccacagcctgtgggagcaggaggactggaatgagcacctgctgcaggtgcacatcgccagctacctgggggagcacttcctgggcgcctag

SEQ ID NO: 25010 - DNA, 930 bp, Artificial Sequence
  derived and/or modified sequence
atgagcaagatccggggcctgccccccgaggtgcgggagcccggccctggagtggaattgggggtagagaacggcctgctgtgccaactgattcactccccggaatttaatttgtttagcaattcagttgtttttgagagcaacttcattcagactcatgtgccagaagctgactttcaagtgactaagcccggtaattggagagacgtgtgcgaagggagcgccacagtaatcctgggggtgacttcctccgtgccctctctccctttgccaaacgtcctactgatggcaaacgtgacatggccccaggggccatttacaacatggtccacgcccggtgacgcaccagtgatcaatctgtcccgtctgctcccgttgaaatacgtggagctgcgcatttatgatcgactgcaacgtatcctgcgggttcggacggtgacagagaagatatattatttgaagctccacgagaaacacccagaaatagtgtttcagttctgggtccggctggttaagatcttacagaagggtctgtccatcaccaccaaagaccctcggatcaaatttacgcattgtctagtccccaaaatgcctacaaactctacagaaacaacccccgagaactcgcttctcagctctccccagcccagtgagccactggtactgctagctgctgaacaaaccagcgggtccttcagccagttgagcgggaaaccacaactaaccgcagatagaaacaacgataccgcgattgagatcgacaactgctcaagctacaaaatccctagtcctgtggcttcaccgatcaacctcaacatcccaatgagagccgctctgtcacattctctctgggaacaggaggattggaatgagcatctgttgcaggtacatatcgctagctatctgggcgagcacttcctgggtgcatag

SEQ ID NO: 25011 - DNA, 930 bp, Artificial Sequence
  derived and/or modified sequence
atgagcaagatcagaggcctgcctcctgaagtgagggagcctggcccaggtgttgaactgggtgtcgagaacggactgttatgtcaactgatccacagtcctgagttcaacctattttctaactcggtggtgtttgagtctaactttatccagactcacgtgcccgaggccgacttccaggtaaccaagccgggtaattggcgggatgtatgcgaggggtccgctacagtcatcctgggtgtcaccagcagcgtgccgagcctccctttacccaatgtactcttgatggccaacgttacttggccacaaggtccattcaccacctggtcaaccccaggagacgccccagtcatcaacctgtccaggttgctgccactaaagtatgtggagctgagaatttacgatcgtttacagagaatcttgcgggtccggaccgtgacggagaagatatattatctaaagcttcatgaaaaacatccagagatagtgttccagttttgggttaggctagtgaagattctacagaagggcctgagcattaccaccaaagatcccagaatcaaattcacccactgcctcgttccaaagatgcctaccaacagcactgagaccacccccgagaacagcctgcttagttctccgcagccaagcgaacctctcgtcttgttagccgcagagcaaacgtcaggcagcttctcgcaactgtcaggcaagcctcagctgactgccgaccgcaataacgacaccgccatcgaaatagataattgctcttcctataaaatcccatctccagtggcctccccaatcaacctgaacattcccatgagagcagcgctgagccacagcttgtgggagcaagaggattggaatgaacatcttctacaagtgcacatcgcgtcataccttggcgaacacttcttgggtgcgtag

SEQ ID NO: 25012 - protein, 471 aa, Artificial Sequence
  derived and/or modified sequence
MSDFDEFERQLNENKQERDKENRHRKRSHSRSRSRDRKRRSRSRDRRNRDQRSASRDRRRRSKPLTRGAKEEHGGLIRSPRHEKKKKVRKYWDVPPPGFEHITPMQYKAMQAAGQIPATALLPTMTPDGLAVTPTPVPVVGSQMTRQARRLYVGNIPFGITEEAMMDFFNAQMRLGGLTQAPGNPVLAVQINQDKNFAFLEFRSVDETTQAMAFDGIIFQGQSLKIRRPHDYQPLPGMSENPSVYVPGVVSTVVPDSAHKLFIGGLPNYLNDDQVKELLTSFGPLKAFNLVKDSATGLSKGYAFCEYVDINVTDQAIAGLNGMQLGDKKLLVQRASVGAKNATLSTINQTPVTLQVPGLMSSQVQMGGHPTEVLCLMNMVLPEELLDDEEYEEIVEDVRDECSKYGLVKSIEIPRPVDGVEVPGCGKIFVEFTSVFDCQKAMQGLTGRKFANRVVVTKYCDPDSYHRRDFW

SEQ ID NO: 25013 - DNA, 1416 bp, Artificial Sequence
  derived and/or modified sequence
atgagcgacttcgacgagttcgagagacagctgaacgagaacaagcaggagagagacaaggagaacagacacagaaagagaagccacagcagaagcagaagcagagacagaaagagaagaagcagaagcagagacagaagaaacagagaccagagaagcgccagcagagacagaagaagaagaagcaagcccctgaccagaggcgccaaggaggagcacggcggcctgatcagaagccccagacacgagaagaagaagaaggtgagaaagtactgggacgtgcccccccccggcttcgagcacatcacccccatgcagtacaaggccatgcaggccgccggccagatccccgccaccgccctgctgcccaccatgacccccgacggcctggccgtgacccccacccccgtgcccgtggtgggcagccagatgaccagacaggccagaagactgtacgtgggcaacatccccttcggcatcaccgaggaggccatgatggacttcttcaacgcccagatgagactgggcggcctgacccaggcccccggcaaccccgtgctggccgtgcagatcaaccaggacaagaacttcgccttcctggagttcagaagcgtggacgagaccacccaggccatggccttcgacggcatcatcttccagggccagagcctgaagatcagaagaccccacgactaccagcccctgcccggcatgagcgagaaccccagcgtgtacgtgcccggcgtggtgagcaccgtggtgcccgacagcgcccacaagctgttcatcggcggcctgcccaactacctgaacgacgaccaggtgaaggagctgctgaccagcttcggccccctgaaggccttcaacctggtgaaggacagcgccaccggcctgagcaagggctacgccttctgcgagtacgtggacatcaacgtgaccgaccaggccatcgccggcctgaacggcatgcagctgggcgacaagaagctgctggtgcagagagccagcgtgggcgccaagaacgccaccctgagcaccatcaaccagacccccgtgaccctgcaggtgcccggcctgatgagcagccaggtgcagatgggcggccaccccaccgaggtgctgtgcctgatgaacatggtgctgcccgaggagctgctggacgacgaggagtacgaggagatcgtggaggacgtgagagacgagtgcagcaagtacggcctggtgaagagcatcgagatccccagacccgtggacggcgtggaggtgcccggctgcggcaagatcttcgtggagttcaccagcgtgttcgactgccagaaggccatgcagggcctgaccggcagaaagttcgccaacagagtggtggtgaccaagtactgcgaccccgacagctaccacagaagagacttctggtag

SEQ ID NO: 25014 - DNA, 1416 bp, Artificial Sequence
  derived and/or modified sequence
atgagtgattttgacgagttcgagcgccagttgaatgaaaataaacaggagagggataaggagaacagacaccggaaaagatcccattcccgctccaggtcaagagatcggaagaggcgtagtcggtccagagaccgcagaaatagagatcaacggtccgctagcagggacaggcggcgcaggagcaaaccccttactcgcggtgcaaaggaggaacacggtggacttatacgaagcccccggcacgaaaaaaagaagaaagtcagaaagtattgggatgtacctccgcccggattcgagcacattacaccaatgcaatacaaggccatgcaggccgccgggcagatccccgccacagccctacttcctaccatgacaccagatgggctcgcagtcacacccacccccgtccccgtggtaggttcacagatgactcggcaggcgaggaggctgtacgtgggcaacataccctttgggatcaccgaggaagccatgatggacttcttcaacgctcagatgcgtctgggcggactcactcaagcacctggaaaccccgtgctggccgtccagataaatcaagacaagaactttgcatttctggagtttagatcagtggacgagacaactcaggccatggcatttgacggaatcatttttcagggccagagtcttaagatacgtcggccacacgactaccagcctctgcctggaatgagtgaaaatccctcggtctatgtgcccggtgtcgtgagcactgtagtcccagattccgctcacaagcttttcatagggggcctacccaactacttaaatgacgaccaggtgaaagagctgctgacgagctttggaccgctaaaggctttcaatctggtcaaagacagcgctacagggttgtccaaggggtacgccttctgtgagtacgtggatattaacgttactgatcaggcgattgccgggctgaatggaatgcagcttggagacaaaaaattgctggttcagcgagcgtccgttggcgccaagaatgctactctctctaccataaaccaaacacctgtgacactgcaggtgcctgggctcatgtctagccaggtccaaatgggaggtcatcctactgaggtcttgtgcctcatgaacatggtgctgccagaggagctgcttgatgacgaggagtacgaagagatcgtggaagacgttcgtgacgagtgctcaaaatacggtctggtgaagtctatcgagatacccaggcccgtggatggagtcgaggtgcctggttgcggaaagatattcgtggagtttacaagtgtgtttgactgtcagaaggccatgcagggcttgaccggccggaaatttgctaatcgcgtggtggtgactaaatactgtgatcccgactcataccaccggcgggatttctggtag

SEQ ID NO: 25015 - DNA, 1416 bp, Artificial Sequence
  derived and/or modified sequence
atgtctgactttgatgaatttgagcggcagctgaatgaaaacaagcaggagcgggacaaggaaaatagacacaggaagaggagccacagccgcagccgcagccgggacaggaagagaagaagccgcagccgggacagaagaaacagagaccagaggtctgccagccgggacagaagaagaagaagcaagcccctgaccaggggggccaaggaggagcacggcggcctcatccgcagccccaggcatgagaagaagaagaaggtgaggaagtactgggatgtgcccccacctggctttgagcacatcacccccatgcagtacaaggccatgcaggccgccggccagatcccagccacagccctgctgcccaccatgaccccagatggcctggccgtgacccccacccctgtgcctgtggtgggcagccagatgacccggcaggcccggcggctgtatgtgggcaacatccccttcggcatcacagaggaggccatgatggacttcttcaatgcccagatgaggctgggcggcctgacccaggcccctggcaaccctgtgctggccgtgcagatcaaccaggacaagaactttgccttcctggagttccgctctgtggatgagaccacccaggccatggcctttgatggcatcatcttccagggccagagcctgaagatcagaagacctcatgactaccagcccctgcccggcatgtctgagaaccccagcgtgtatgtgcctggggtggtgtccacagtggtgcctgattctgcccacaagctgttcatcggcggcctgcccaactacctgaatgatgaccaggtgaaggagctgctgaccagctttggccccctgaaggccttcaacctggtgaaggacagcgccaccggcctgagcaagggctacgccttctgtgaatatgtggacatcaacgtgacagaccaggccatcgccggcctgaatggcatgcagctgggggacaagaagctgctggtgcagagggcctctgtgggcgccaagaatgccaccctgagcaccatcaaccagacccctgtgaccctgcaggtgcccggcctgatgagcagccaggtgcagatgggcggccaccccacagaggtgctgtgcctgatgaacatggtgctgcctgaggagctgctggatgatgaggagtatgaggagatcgtggaggatgtgagagatgaatgttccaaatatggcctggtgaagagcattgagatccccaggcctgtggatggagtggaggtgcccggctgcggcaagatctttgtggagttcacctctgtgtttgactgccagaaggccatgcagggcctgaccggcaggaagtttgccaacagagtggtggtgaccaagtactgtgaccctgacagctaccacagaagagacttctggtag

SEQ ID NO: 25016 - DNA, 1416 bp, Artificial Sequence
  derived and/or modified sequence
atgagcgacttcgacgagttcgagcggcagctgaacgagaacaagcaggagcgggacaaagaaaaccggcaccgaaagagatctcactctaggtcacgaagtcgcgaccggaaacgaagaagcaggtcaagagacaggcgcaatcgagatcagcgcagcgcatctagggatagacgccgcaggtcaaaacctttaacccgtggcgcgaaggaagagcacggcggactcatccgcagtcctaggcatgaaaagaaaaaaaaggttcgcaagtactgggacgtcccacctcccgggtttgagcacattacgcctatgcagtacaaagcgatgcaagccgcaggtcagattcctgctaccgccttgctgccgaccatgacacccgatggactggccgtcaccccaacaccggtccctgtggtgggcagccagatgactaggcaggccagaaggttgtacgtagggaatatcccgtttggcatcacggaagaggcaatgatggactttttcaacgctcagatgcggcttggcggcttgacgcaggctcccggtaacccagttctcgctgtccagatcaatcaggataagaattttgctttcctcgaatttaggtcagtggacgagacaacccaggccatggcatttgacggtattatattccaggggcagtcgttgaaaattcggcggccccatgactaccagcctctaccagggatgtccgaaaacccttctgtgtatgtgcctggtgttgtgagtaccgtggtcccagatagtgctcacaagctcttcattggcggactgccgaactaccttaatgatgatcaggtcaaagaactgctgacttctttcggtccactgaaggcgttcaacctggtgaaggactccgctacaggcctcagcaaaggctatgccttctgtgaatatgtggacataaatgtgactgaccaagccattgccggcctgaacggcatgcagctaggtgataaaaagctcctcgtgcagcgcgcctctgtcggcgcaaagaacgctaccttgtctacaatcaaccagacacccgtcacactgcaggtacctggtctgatgagcagtcaagtacagatgggcggacatccgaccgaggtcctgtgcttgatgaatatggtgttgccggaggagctgcttgatgatgaagagtacgaggaaatcgtggaggacgtgcgcgacgagtgtagcaaatacggccttgtaaagtctatcgagatcccccggcccgtggacggggtggaagtcccgggctgtggaaagattttcgttgagttcacttctgtgttcgattgtcagaaagccatgcagggcctcactgggcgcaaattcgctaatagggtggtagtcactaaatactgcgaccccgatagttatcatcgccgcgacttctggtag

SEQ ID NO: 25017 - DNA, 1416 bp, Artificial Sequence
  derived and/or modified sequence
atgtctgacttcgacgaatttgagcgccagctcaatgaaaataaacaagagagagacaaggagaacagacataggaaacgttcccactcaaggagtcggtctagagatcgaaagaggagatcacgctctagggaccggagaaacagggatcagcggagcgcctcacgcgaccgcagacgccgatcaaaaccactgactagaggagcaaaggaggagcacggcggattgattcgttctccacgccatgagaaaaagaaaaaggtccgcaaatattgggatgtgcctccccctggatttgagcacatcactcccatgcaatacaaagcgatgcaagcagcaggacagattccagctaccgcactcctgcccaccatgaccccagatggcctcgctgtcactccaactcctgtccctgttgtggggagccagatgacccggcaggcgagaagattatacgttggcaacatcccattcggtatcactgaggaggccatgatggacttttttaacgcccaaatgaggctaggtggcctgactcaagcccctggcaacccggtgctggcggtgcaaattaatcaggataagaacttcgctttcctggagtttcgctccgtggatgaaaccactcaggccatggcttttgacggcataatctttcaaggtcaatccctcaagatcagacgtccgcacgactatcagccgctccccggtatgagtgagaaccccagtgtctacgtgcctggggtagttagcaccgtcgttcccgattctgcacacaaactcttcattggcggactgcctaattacttgaacgacgaccaggtgaaagagctgctgacctccttcggacccctgaaggcatttaacctagttaaggatagtgcaacagggctgtcaaaaggctatgccttctgcgagtacgtcgatataaatgtcacggaccaggccattgcaggcctcaatggcatgcagctcggcgataagaagttacttgtccagcgggcatctgtgggcgctaaaaacgctacactgtccaccattaaccagacaccagtgacacttcaggtgcctggtttgatgagttcccaagttcagatgggcggacaccctactgaggtgctctgtctcatgaatatggtcctgcctgaagagctgctagatgacgaagaatatgaggaaatagtcgaagatgtacgcgacgaatgctccaagtatgggttggtaaagagtattgagatcccaaggccggtggatggcgtggaagttcccggttgtggaaagatctttgtggaattcacctccgtgttcgattgccagaaagctatgcaagggttgacggggcgtaaatttgccaacagggtagtcgtgactaagtactgcgacccagattcatatcacaggcgagatttctggtag

SEQ ID NO: 25018 - DNA, 3118 bp, Artificial Sequence
  derived and/or modified sequence
ggagagcgcgccacagaacgacttttacgcaggcgcagaagcctgtttcccctcacccgcggcttccaccctgcgcaggcgcaaaaagccgcgctggcaacctccgcagcggtcgcgcgcacccttcatccctcttgctgcttttgtctggcacaaccttctcaggccctccgcgaggccggccctttttttctttcactttccccacccggagagccaggtgccgagaactaggacctcgtccccttctctatcccttcccctgatccatctcgtctctgttctccttcccttttccgttcccgaagccggaaggagccgaggtacccacggaaaaagtcgaagctgtccccggagagtgaggccttcacgaagcggtggcggaaggagccgaagttctctgatcggaggcgtgagcaagtggcatctccggaaagagccgaaacacggactcgagcttaatcccaggaggggcccgagggcgagatccggaaatctccggaaagagccgaaggccgggacggttaggattgtcggaagtggccgattgcttggacagggccggcggagaagatcggagcaagtccgtggaagaagccaaagactgggacggattgaattgttggaagaacccgaactcgcagaggggactgggcgcagtggcacacgaggacacacggaaacctccgaacgttgaggagataatctcggaaaagttacggaaacctgggaagtcggcgaaaccctacgttcgggtgttttcggaagcagccgaagcggccgcctgcttcgccttcgtccagtatccggagatagccgaggcgcttcggagccaggctcggggggaggggcaagctcgcgggcgggcgggcgggtgagggggcggagcccgggcggggcggggagggctgccggaggcttgattaggtaggaggtggcgaagcgccggcggcggccggaagtagccgaagccagcggcggaagtagccgaagcggctggagcgggcggcaaggcgaggcgaaagctgcacagggccctacgcggccgcctcagcatgtcggacttcgacgagttcgagcggcagctcaacgagaataaacaagagcgggacaaggagaaccggcatcggaagcgcagccacagccgctctcggagccgggaccgcaaacgccggagccggagccgcgaccggcgcaaccgggaccagcggagcgcctcccgggacaggcgacgacgcagcaaacctttgaccagaggcgctaaagaggagcacggtggactgattcgttccccccgccacgagaagaagaagaaggtccgtaaatactgggacgtgccacccccaggctttgagcacatcaccccaatgcagtacaaggccatgcaagctgcgggtcagattccagccactgctcttctccccaccatgacccctgacggtctggctgtgaccccaacgccggtgcccgtggtcgggagccagatgaccagacaagcccggcgcctctacgtgggcaacatcccctttggcatcactgaggaggccatgatggatttcttcaacgcccagatgcgcctgggggggctgacccaggcccctggcaacccagtgttggctgtgcagattaaccaggacaagaattttgcctttttggagttccgctcagtggacgagactacccaggctatggcctttgatggcatcatcttccagggccagtcactaaagatccgcaggcctcacgactaccagccgcttcctggcatgtcagagaacccctccgtctatgtgcctggggttgtgtccactgtggtccccgactctgcccacaagctgttcatcgggggcttacccaactacctgaacgatgaccaggtcaaagagctgctgacatcctttgggcccctcaaggccttcaacctggtcaaggacagtgccacggggctctccaagggctacgccttctgtgagtacgtggacatcaacgtcacggatcaggccattgcggggctgaacggcatgcagctgggggataagaagctgctggtccagagggcgagtgtgggagccaagaatgccacgctgagcaccatcaatcagacgcctgtgaccctgcaagtgccgggcttgatgagctcccaggtgcagatgggcggccacccgactgaggtcctgtgcctcatgaacatggtgctgcctgaggagctgctggacgacgaggagtatgaggagatcgtggaggacgtgcgggacgagtgcagcaagtacgggcttgtcaagtccatcgagatcccccggcctgtggacggcgtcgaggtgcccggctgcggaaagatctttgtggagttcacctctgtgtttgactgccagaaagccatgcagggcctgacgggccgcaagttcgccaacagagtggttgtcacaaaatactgtgaccccgactcttatcaccgccgggacttctggtagaggcggctgggggagggtgggggcagggctggctgggggcttctccccactcccgccccccccttatccccctctgaagacgatgggcagaggagtgacagccgcagacacacgacagccggcagcaactggaatggcagcaattaagggtggggggcgggggttggggggttggggggttagggcagggaggggactggggaagtgcgcacacagcccacacagacaacacgcacccacacagacacagagggaaggggttgggatggggacagggtgcacagcagggcggggtaggaccccagcccctcccaaaacagcctctccttctcccatagacccctttcttctccccttccccacggtaggaacatagcgtgtttatattttatggccaaactattttgaattttgttgtccggccctcagtgccctgccctctcccttaccaggaccacagctctgttccttcggcctctggtcctctctggtcccctcctgggtttcttacgtagttgatttttcctctttagtctcccccgacctgcgcccagccccgtggcccctgcccctctcctactctctgtggcagtttcatatttgctaagacgaatttgctcattaaacattttgttgtattttacttt

SEQ ID NO: 25019 - protein, 114 aa, Artificial Sequence
  derived and/or modified sequence
MMQESGTETKSNGSAIQNGSGGSNHLLECGGLREGRSNGETPAVDIGAADLAHAQQQQQQWHLINHQPSRSPSSWLKRLISSPWELEVLQVPLWGAVAETKMSGPVCQPNPSPF

SEQ ID NO: 25020 - DNA, 240 bp, Artificial Sequence
  derived and/or modified sequence
atgcaccatgtccggcagctgatgatgccgatttgtccaatggccttaaattctaccacgagctcatcaacaactttcggggcttttcgaatcatgaccctgaatgtcgaggagtgggcgacagcctggaaggttctgattctgctcgaagccgctgtggaagaagagaaacgatcagaagaaaagaggatactggtgtgtggcacttgtggcacccgcagctctcaaaagaacttatag

SEQ ID NO: 25021 - DNA, 843 bp, Artificial Sequence
  derived and/or modified sequence
gctcggggggccgctggagtgcccagcgggaacccgaaagtttgtaagaggaagagagcgcgcggcgagcgagcgagcgggccgggggcagcggcagcggcgccggggaccatggtgctgccggcgcctcctccgcgggcgtgaaggcggcgctcctactccctccccggactccgcggtgtcccagaagcttttgttgacaattccagtttccgaacaaaacatttcggcaatggtgagggcttcgatcccttctctgatttgctgtcagccatgaacggatggatgtgatgcctgctagccaaaaggcttccctctgtgtgttgcagtcctgtggcattatgcatgccccctcccagtgaccccaggctttttatggctgtgagacacgttaaaatttcaggggtaagacgtgaccttttgaggtgactataactgaagattgctttacagaagccaaaaaaggtttttgagtcatgatgcaagaatctgggactgagacaaaaagtaacggttcagccatccagaatgggtcgggcggcagcaaccacttactagagtgcggcggtcttcgggaggggcggtccaacggagagacgccggccgtggacatcggggcagctgacctcgcccacgcccagcagcagcagcaacagtggcatctcataaaccatcagccctctaggagtcccagcagttggcttaagagactaatttcaagcccttgggagttggaagtcctgcaggtccccttgtggggagcagttgctgagacgaagatgagtggacctgtgtgtcagcctaacccttccccattttgaataaaattattctttggagaaa

SEQ ID NO: 25022 - DNA, 345 bp, Artificial Sequence
  derived and/or modified sequence
atgatgcaagagtctggcacggaaactaagtcaaatggaagcgcaatacagaacggcagtgggggtagtaaccatctgctggaatgcggaggcctccgcgaaggcaggtctaatggcgagaccccagctgtcgatatcggggctgccgatctggctcatgcacagcagcagcaacaacagtggcatctcatcaatcaccagccttctcggagccccagttcgtggctcaagcggctgatcagcagtccctgggagctggaggtactccaggtacccctgtggggtgccgtcgccgagacgaaaatgtctggccctgtctgccagccaaacccgtctccattctag

SEQ ID NO: 25023 - DNA, 345 bp, Artificial Sequence
  derived and/or modified sequence
atgatgcaggagagcggcacagagaccaagagcaatggcagcgccatccagaatggcagcggcggcagcaaccacctgctggagtgtggcggcctgcgggagggccgcagcaatggagagaccccagctgtggacatcggggctgctgacctggcccacgcccagcagcagcagcagcagtggcacctgatcaaccaccagcccagccgcagccccagctcctggctgaagaggctcatcagcagcccctgggagctggaggtgctgcaggtgcccctgtggggcgctgtggccgagaccaagatgagcggccctgtgtgccagcccaaccccagccccttctag

SEQ ID NO: 25024 - DNA, 345 bp, Artificial Sequence
  derived and/or modified sequence
atgatgcaggagagcggcaccgagaccaagagcaacggcagcgccatccagaacggttccggcggcagcaatcatctgctggaatgcggcggcctgagagaaggccgatcgaacggcgagactcccgctgtagacattggcgccgccgatctcgcccacgcacagcagcagcagcaacagtggcacctgatcaaccatcagcctagtcggtcgcccagcagctggttaaagcgcttgatcagcagcccatgggagctggaagtgctgcaagtacccctttggggagccgtggccgagactaagatgagcggccccgtctgtcaaccaaacccttcacccttttag

SEQ ID NO: 25025 - DNA, 345 bp, Artificial Sequence
  derived and/or modified sequence
atgatgcaggagtcaggtaccgaaacaaagagcaacggtagcgccatccaaaatggatcaggtggaagtaaccatctccttgaatgcggcggtctgcgcgagggccgtagcaatggagagacaccggcagtcgacataggcgcagccgacctggcacatgctcagcaacaacaacagcagtggcatttgattaatcaccaaccctccagatccccatctagctggctcaaacggctcatatccagtccctgggaactggaggtgctacaggttcctttgtggggggcagtggcggaaaccaagatgtcaggcccagtgtgccaacccaatccttcccctttttag

SEQ ID NO: 25026 - DNA, 345 bp, Artificial Sequence
  derived and/or modified sequence
atgatgcaggagagcggcaccgagaccaagagcaacggcagcgccatccagaacggcagcggcggcagcaaccacctgctggagtgcggcggcctgagagagggcagaagcaacggcgagacccccgccgtggacatcggcgccgccgacctggcccacgcccagcagcagcagcagcagtggcacctgatcaaccaccagcccagcagaagccccagcagctggctgaagagactgatcagcagcccctgggagctggaggtgctgcaggtgcccctgtggggcgccgtggccgagaccaagatgagcggccccgtgtgccagcccaaccccagccccttctag

SEQ ID NO: 25027 - protein, 914 aa, Artificial Sequence
  derived and/or modified sequence
MGNKAKIAKCPLRTKTGHILKSTQDTCIGSEKLLQKKPVGSETSQAKGEKNGMTFSSTKDLCKQCIDKDCLHIQKEISPATPNMQKTRNTVNTSLVGKQKPHKKHITAENMKSSLVCLTQDQLQQILMTVNQGNRSLSLTENGKEAKSQYSLYLNSISNQPKDENIMGLFKKTEMVSSVPAENKSVLNEHQETSKQCEQKIAIENEWKPADIFSTLGERECDRSSLEAKKAQWRKELDEQVALKKKEKEVSEKWNDPWKKSESDKIIWEKHQILDQSRETVLLEHPFSAVKQELQRKWIEELNKQIEDDRQRKIEEKIIYSKGEEHDRWAMHFDSLKSYPGSQSQLFSQSTHKQPEYFCVSPDTQELADVSSVCTPTTGSQVEPSEEEHIAKPIKDVVMANSKKTNFLRSMTALLDPAQIEERDRRRQKQLEHQKAITAQVEEKRRKKQLEEEQRKKEEQEEELRLAQEREEMQKQYEEDILKQKQKEEIMTLKTNELFQTMQRAQELAQRLKQEQRIRELAQKGHDTSRLIKNLGVDTIQMEYNASNISNSRHDSDEISGKMNTYMNSTTSKKDTGVQTDDLNIGIFTNAESHCGSLMERDITNCSSPEISAELIGQFSTKKNKQELTQDKGASLEKENNRCNDQCNQFTRIEKQTKHMKKYPKRPDWNINKPPKRYIPASEKYPKQLQKQREEKKVRRQMELLHLVEKNNPGHLSQNRGISPEIFHSSHQETESKLRWHLVKKEEEPLNIHSFSKERSPSSPVPVVKNRTQQTQNTLHLPLKNSSYERENLISGSNQTELSSGISESSHFIPYVRTNEIYYLDPDAPLSGPSTQDPQYQNSQDCGQKRQLFDSDCVRDPLLNPNMVKNRDRQQAILKGLSELRQGLLQKQKELESSLLPLAENQEESFGSSF

SEQ ID NO: 25028 - DNA, 2745 bp, Artificial Sequence
  derived and/or modified sequence
atgggcaacaaggccaagatcgccaagtgccccctgagaaccaagaccggccacatcctgaagagcacccaggacacctgcatcggcagcgagaagctgctgcagaagaagcccgtgggcagcgagaccagccaggccaagggcgagaagaacggcatgaccttcagcagcaccaaggacctgtgcaagcagtgcatcgacaaggactgcctgcacatccagaaggagatcagccccgccacccccaacatgcagaagaccagaaacaccgtgaacaccagcctggtgggcaagcagaagccccacaagaagcacatcaccgccgagaacatgaagagcagcctggtgtgcctgacccaggaccagctgcagcagatcctgatgaccgtgaaccagggcaacagaagcctgagcctgaccgagaacggcaaggaggccaagagccagtacagcctgtacctgaacagcatcagcaaccagcccaaggacgagaacatcatgggcctgttcaagaagaccgagatggtgagcagcgtgcccgccgagaacaagagcgtgctgaacgagcaccaggagaccagcaagcagtgcgagcagaagatcgccatcgagaacgagtggaagcccgccgacatcttcagcaccctgggcgagagagagtgcgacagaagcagcctggaggccaagaaggcccagtggagaaaggagctggacgagcaggtggccctgaagaagaaggagaaggaggtgagcgagaagtggaacgacccctggaagaagagcgagagcgacaagatcatctgggagaagcaccagatcctggaccagagcagagagaccgtgctgctggagcaccccttcagcgccgtgaagcaggagctgcagagaaagtggatcgaggagctgaacaagcagatcgaggacgacagacagagaaagatcgaggagaagatcatctacagcaagggcgaggagcacgacagatgggccatgcacttcgacagcctgaagagctaccccggcagccagagccagctgttcagccagagcacccacaagcagcccgagtacttctgcgtgagccccgacacccaggagctggccgacgtgagcagcgtgtgcacccccaccaccggcagccaggtggagcccagcgaggaggagcacatcgccaagcccatcaaggacgtggtgatggccaacagcaagaagaccaacttcctgagaagcatgaccgccctgctggaccccgcccagatcgaggagagagacagaagaagacagaagcagctggagcaccagaaggccatcaccgcccaggtggaggagaagagaagaaagaagcagctggaggaggagcagagaaagaaggaggagcaggaggaggagctgagactggcccaggagagagaggagatgcagaagcagtacgaggaggacatcctgaagcagaagcagaaggaggagatcatgaccctgaagaccaacgagctgttccagaccatgcagagagcccaggagctggcccagagactgaagcaggagcagagaatcagagagctggcccagaagggccacgacaccagcagactgatcaagaacctgggcgtggacaccatccagatggagtacaacgccagcaacatcagcaacagcagacacgacagcgacgagatcagcggcaagatgaacacctacatgaacagcaccaccagcaagaaggacaccggcgtgcagaccgacgacctgaacatcggcatcttcaccaacgccgagagccactgcggcagcctgatggagagagacatcaccaactgcagcagccccgagatcagcgccgagctgatcggccagttcagcaccaagaagaacaagcaggagctgacccaggacaagggcgccagcctggagaaggagaacaacagatgcaacgaccagtgcaaccagttcaccagaatcgagaagcagaccaagcacatgaagaagtaccccaagagacccgactggaacatcaacaagccccccaagagatacatccccgccagcgagaagtaccccaagcagctgcagaagcagagagaggagaagaaggtgagaagacagatggagctgctgcacctggtggagaagaacaaccccggccacctgagccagaacagaggcatcagccccgagatcttccacagcagccaccaggagaccgagagcaagctgagatggcacctggtgaagaaggaggaggagcccctgaacatccacagcttcagcaaggagagaagccccagcagccccgtgcccgtggtgaagaacagaacccagcagacccagaacaccctgcacctgcccctgaagaacagcagctacgagagagagaacctgatcagcggcagcaaccagaccgagctgagcagcggcatcagcgagagcagccacttcatcccctacgtgagaaccaacgagatctactacctggaccccgacgcccccctgagcggccccagcacccaggacccccagtaccagaacagccaggactgcggccagaagagacagctgttcgacagcgactgcgtgagagaccccctgctgaaccccaacatggtgaagaacagagacagacagcaggccatcctgaagggcctgagcgagctgagacagggcctgctgcagaagcagaaggagctggagagcagcctgctgcccctggccgagaaccaggaggagagcttcggcagcagcttctag

SEQ ID NO: 25029 - DNA, 2745 bp, Artificial Sequence
  derived and/or modified sequence
atggggaacaaggcaaagatagcaaagtgcccactgaggaccaagactggccacattctgaagagcacccaggatacttgtattggcagtgaaaagctccttcagaaaaagccagtgggtagtgaaacctcccaggctaagggagagaagaacggtatgactttctcatcaactaaggacctgtgcaaacagtgcattgataaggactgccttcatatacaaaaggaaatctcccctgcaacacctaatatgcagaagacccgtaacaccgtcaatacgtctttggtgggaaagcagaagccccacaaaaagcatattaccgccgagaacatgaagtcctctttggtctgtttaacccaggaccaactgcaacaaatcctcatgactgtaaaccaggggaaccggagtctgtcactgacagaaaatggcaaggaggcgaaatcacaatatagcttgtacttaaactcgatcagcaaccagcctaaagacgagaacatcatgggattattcaaaaaaaccgaaatggtctcgtcagtgccagcggaaaataagagcgtcctcaacgagcatcaggagacctcaaaacagtgcgaacagaagattgccattgaaaatgagtggaagccggctgatatctttagtactctgggggaacgagagtgcgatcgcagctctttagaggccaagaaagcacagtggcgtaaagagctggatgaacaggttgctctcaagaaaaaagagaaagaagtatccgagaagtggaatgacccctggaaaaaaagtgagagtgacaaaatcatctgggagaaacatcaaattctggatcagtcacgcgaaaccgtgcttctagaacaccccttttcggctgtgaagcaagagttgcagagaaaatggatagaggaactgaacaaacagatcgaggatgaccggcagcggaaaattgaagagaagataatctactccaaaggggaagagcacgacagatgggctatgcatttcgattccctcaagtcgtatccaggatctcagtcccagttgttctctcagtcaacccacaagcagccagagtacttttgcgtgagcccagatacacaggagttagccgacgtcagttccgtgtgcacacctactaccggatctcaggttgaaccaagcgaggaggagcacatcgcaaaacctatcaaggatgttgtgatggctaattctaagaagaccaattttctccggagcatgaccgctctgctcgatccggctcagattgaagagagagaccggcgtaggcagaagcaacttgagcaccaaaaagccatcacggcacaggtcgaggaaaaaaggcggaagaaacagttggaggaagagcaaagaaagaaggaagagcaggaagaagagttgcggctcgcccaggaacgagaagagatgcaaaagcagtatgaggaggatatccttaagcagaaacagaaagaagagattatgaccctgaagaccaacgagctctttcagaccatgcagcgcgcacaagaattagcacagcggctgaagcaagaacagcgcattagggaattggcccagaagggccacgacacctctagactcatcaagaatttgggcgttgatacaatacaaatggagtacaatgcatccaatatttccaacagcaggcacgatagtgacgagatctctggaaaaatgaacacttatatgaatagcactactagcaaaaaggacactggggtccagacagatgatttaaatattggaattttcacaaatgccgagtcgcactgcgggtccttaatggaacgcgacatcacaaattgctcctctcccgagatttcagccgaactcatcgggcagttcagtactaagaagaacaagcaggagctgacccaagacaaaggtgcatctctcgaaaaggagaataacagatgcaatgaccagtgtaatcaattcacacggatcgaaaagcaaactaaacacatgaagaagtatcctaagaggccggactggaatatcaataagcccccaaagagatatatccctgcctcggagaagtatccgaaacagcttcagaaacagcgtgaggaaaagaaggtaagaagacaaatggaacttctacatctagtggaaaaaaataaccctgggcatctgagtcaaaacagaggcatctctcctgagatttttcactcctctcaccaggagactgagtccaaacttaggtggcatctggtgaagaaggaggaagaaccactgaacattcactccttcagcaaggagcgctccccatccagccctgtgcccgtagtaaagaaccgtacacagcaaacacaaaatacattgcacttacctctgaaaaattccagctacgagagagaaaacctgatatccggctccaatcagaccgagctgtcttctggaatttcggagtcatcccattttatcccttatgtaagaactaacgaaatctattacttagatccagacgctcctctctctggaccctctactcaggaccctcagtaccagaactcacaggattgcggccagaagcggcagctctttgattctgattgcgtgagggaccccctgctcaatccgaatatggttaagaaccgggacaggcagcaggccatattgaagggccttagcgagctgagacagggtctgttacagaagcagaaagagcttgagagcagcttattgcctctcgccgagaatcaggaagaaagcttcggatcatccttctag

SEQ ID NO: 25030 - DNA, 2745 bp, Artificial Sequence
  derived and/or modified sequence
atgggcaacaaggccaagatcgccaagtgccccctgcggaccaagacaggccacatcctgaagagcacccaggacacctgcatcggcagcgagaagctgctgcagaagaagcctgtgggcagcgagaccagccaggccaagggggagaagaatggcatgaccttcagcagcaccaaggacctgtgcaagcagtgcatcgacaaggactgcctgcacatccagaaggagatcagccctgccacccccaacatgcagaagaccaggaacacagtgaacaccagcctggtgggcaagcagaagccccacaagaagcacatcacagctgagaacatgaagagcagcctggtgtgcctgacccaggaccagctgcagcagatcctgatgacagtgaaccagggcaacagaagcctgagcctgacagaaaatggcaaggaggccaagagccagtacagcctgtacctgaacagcatcagcaaccagcccaaggatgagaacatcatgggcctcttcaagaagacagagatggtgtcctctgtgcctgctgagaacaagtctgtgctgaatgagcaccaggagaccagcaagcagtgtgagcagaagatcgccattgaaaatgagtggaagccagctgacatcttcagcaccctgggggagcgggagtgtgacaggagcagcctggaggccaagaaggcccagtggaggaaggagctggatgagcaggtggccctgaagaagaaggagaaggaggtgtctgagaagtggaatgacccctggaagaagtctgagagtgacaagatcatctgggagaagcaccagatcctggaccagagccgggagaccgtgctgctggagcaccccttctctgctgtgaagcaggagctgcagaggaagtggattgaggagctgaacaagcagattgaagatgaccggcagaggaagattgaggagaagatcatctacagcaagggggaggagcatgaccgctgggccatgcactttgacagcctgaagagctacccaggcagccagagccagctgttcagccagagcacccacaagcagcctgagtacttctgtgtgtccccagacacccaggagctggctgatgtgtcctctgtgtgcacccccaccaccggcagccaggtggagcccagcgaggaggagcacatcgccaagcccatcaaggatgtggtgatggccaacagcaagaagaccaacttcctgcgctccatgacagccctgctggaccctgcccagatcgaggagcgggacagaagacggcagaagcagctggagcaccagaaggccatcacagcccaggtggaggagaagaggaggaagaagcagctggaggaggagcagaggaagaaggaggagcaggaggaggagctgcggctggcccaggagcgggaggagatgcagaagcagtatgaggaggacatcctgaagcagaagcagaaggaggagatcatgaccctgaagaccaatgagctgttccagaccatgcagagggcccaggagctggcccagaggctgaagcaggagcagaggatccgggagctggcccagaagggccatgacaccagccgcctcatcaagaacctgggcgtggacaccatccagatggagtacaatgccagcaacatcagcaacagcagacatgacagtgatgagatcagcggcaagatgaacacctacatgaacagcaccaccagcaagaaggacaccggggtgcagacagatgacctgaacatcggcatcttcaccaatgctgagagccactgcggcagcctgatggagcgggacatcaccaactgcagcagccctgagatctctgctgagctgattggccagttcagcaccaagaagaacaagcaggagctgacccaggacaagggggccagcctggagaaggagaacaaccgctgcaatgaccagtgcaaccagttcaccagaattgagaagcagaccaagcacatgaagaagtaccccaagaggccagactggaacatcaacaagccacccaagcgctacatcccagccagcgagaagtaccccaagcagctgcagaagcagcgggaggagaagaaggtgcggcggcagatggagctgctgcacctggtggagaagaacaaccctggccacctgagccagaacagaggcatcagccctgagatcttccacagcagccaccaggagacagagagcaagctgcgctggcacctggtgaagaaggaggaggagcccctgaacatccacagcttcagcaaggagaggagccccagcagccctgtgcctgtggtgaagaacagaacccagcagacccagaacaccctgcacctgcccctgaagaacagcagctatgaaagagaaaatctcatcagcggcagcaaccagacagagctgagcagcggcatcagcgagagcagccacttcatcccctacgtgaggaccaatgagatctactacctggaccctgatgcccccctgagcggccccagcacccaggacccccagtaccagaacagccaggactgtggccagaagaggcagctgtttgacagcgactgtgtgcgggaccccctgctgaaccccaacatggtgaagaacagagaccggcagcaggccatcctgaagggcctgtctgagctgcggcagggcctgctgcagaagcagaaggagctggagagcagcctgctgcccctggccgagaaccaggaggagagctttggcagcagcttctag

SEQ ID NO: 25031 - DNA, 2745 bp, Artificial Sequence
  derived and/or modified sequence
atgggcaacaaggccaagatcgccaagtgccccctgcggaccaagacgggccacatattgaaaagtacccaagacacgtgcatcggctccgagaaacttctacagaaaaaacccgttggctctgaaacgtcgcaggccaagggggagaaaaacggcatgacctttagctcaacaaaggacctatgtaaacaatgcattgataaggattgtctgcacattcagaaagaaatatctccagccaccccaaatatgcagaaaaccaggaacaccgtgaacacatctctcgtcggcaagcaaaagccacataagaagcacattactgcggaaaatatgaagtcttcgctggtctgtctaacccaagatcagttacagcaaatcctgatgactgtcaaccaaggaaaccggagtctgagtctcaccgagaatggtaaggaagcaaaaagccagtattcactctatcttaacagcatcagcaatcaaccaaaagatgagaatatcatgggcctgtttaagaaaacagaaatggtgtcaagcgtgcctgctgagaataaaagtgtattgaacgaacaccaggagacctcaaaacagtgtgagcagaagattgccatcgagaacgaatggaagccagcggatatcttcagcactctgggtgagcgcgagtgcgacaggtcctccctcgaagccaaaaaagctcagtggagaaaggagctggacgaacaagtagctctgaagaaaaaggagaaggaggtgtccgagaagtggaatgatccctggaaaaaaagtgagagcgacaaaatcatatgggaaaagcaccaaatcctggatcaaagccgcgagacggtgctgctggagcaccctttcagcgccgttaaacaggagctccagagaaagtggatagaggaactaaacaaacaaatcgaagacgatagacaaagaaagatcgaggaaaagatcatctactccaaaggagaagaacacgaccgatgggccatgcatttcgacagcctgaagagctaccctggctcgcaaagtcagctgttttcccagtccactcacaagcaaccagagtacttttgtgttagtcctgatacgcaggaactcgctgacgtttcgtctgtatgcactcctacgactggttcccaagttgagccatccgaggaggaacacattgcgaagccaatcaaagatgtcgtgatggcaaatagcaagaaaacaaactttttgcgcagtatgacagcgctccttgatcccgcccagatcgaggagagagataggcggcggcagaagcaacttgagcaccagaaagccatcaccgctcaggtggaggagaagagacgcaagaaacagctggaggaagaacagagaaaaaaagaggagcaggaggaggagctgagattggcccaggaaagggaggaaatgcaaaagcaatacgaagaagacatcttaaaacaaaaacaaaaagaggaaattatgaccctgaagaccaacgagctcttccagaccatgcagagagcacaggaacttgcacagcgtctcaagcaggagcagcgaataagagagctcgcccaaaagggccatgacacttctcggctgatcaaaaatctgggggtggacaccatccaaatggagtataatgcttccaatatctctaacagtaggcatgacagcgatgagatttccggtaaaatgaacacttacatgaacagcacgacatccaaaaaggacaccggggtccagacagatgacctgaatattgggatttttaccaatgccgagtcccattgtggatctttgatggagagggacattacaaactgctcctctccagaaatcagtgcggagctgatcggccaattttctacaaagaaaaacaaacaggagcttacacaggacaagggagcctcactggagaaagaaaataaccgctgcaacgaccagtgcaaccagttcacaaggattgaaaaacaaacaaaacatatgaagaaatatccgaagagacccgactggaatataaataaaccccccaaacgctacatcccagccagtgaaaagtatcctaagcagttacagaagcaacgggaggagaagaaggtgagacgacagatggaactactgcacctagtggagaagaacaacccaggccacctgagccaaaatagggggatctcacccgaaatttttcattcttcacaccaagagactgaatccaaactgcgttggcacctcgttaagaaggaggaggagccactgaacattcacagtttctccaaggagcgctccccctcctcacctgtaccagtcgtcaaaaaccgtactcagcagacgcagaatactctgcacctgcctctgaaaaattcgagttacgaaagagaaaaccttatctctggcagcaaccagaccgagctgtctagcggcattagtgagtcaagtcacttcatcccttatgtcagaacaaacgaaatctactatttggacccagacgcaccacttagtggccccagcacacaggaccctcaataccagaattctcaggattgtggccagaaacggcagctgttcgactccgattgtgtgcgcgaccccttgcttaacccaaacatggttaagaatcgagacaggcagcaggctattctgaaaggtttatctgaactaagacagggcttgctgcagaaacagaaagaattggaatccagcctgcttccgcttgccgagaatcaggaagaaagctttggctccagtttttag

SEQ ID NO: 25032 - DNA, 2745 bp, Artificial Sequence
  derived and/or modified sequence
atgggtaataaagccaaaattgcaaaatgtcctctgcgtaccaagactgggcacatcctgaaatccacacaagacacctgcatcggctcggagaaactgctgcagaaaaagccagtggggtctgaaacttctcaggccaaaggcgagaaaaatggtatgaccttttcaagtactaaggacctgtgcaagcagtgtatcgacaaggactgcctgcacattcagaaggagatatcgccagcaacccctaacatgcagaagactcgaaatactgtgaacaccagcctagtgggtaaacagaaaccacacaagaaacacatcacggccgagaacatgaaaagtagcctggtgtgcttgactcaggatcagctccagcaaattctgatgacagtgaatcagggcaatcggagcctctcacttaccgagaacggcaaagaagccaagagccaatattccctctacctgaattctattagcaaccagcccaaagacgaaaatatcatgggcctctttaaaaaaactgaaatggtaagttcagtgccagcagagaacaagtccgttttgaacgaacatcaggaaaccagtaaacagtgcgaacagaaaatcgccattgaaaacgaatggaagccagccgacatcttcagtaccctcggggagcgggaatgtgacaggtcatctttggaggccaagaaagctcaatggaggaaagagcttgacgagcaggtggctcttaaaaaaaaggagaaagaggtcagcgagaagtggaacgatccatggaagaagagcgagtccgataaaatcatctgggaaaaacatcagattctggatcagagcagagagacagttctgctcgagcaccccttctctgcggtgaagcaggagctgcagcgaaaatggatcgaggagctgaataagcaaatcgaagacgatcgccagaggaaaatcgaagagaagattatctatagcaagggtgaagaacacgatcgatgggctatgcattttgattcactgaaatcgtatccgggatctcaaagccagctcttttcacaatctacccacaagcaacctgagtacttctgcgtttctccagatactcaggagctagccgatgtttcttctgtgtgtacgcctactactggtagccaggtggaaccctcggaggaggagcatatcgccaagccaatcaaggatgtcgttatggccaactctaagaagaccaattttctccggtccatgactgccctgctggacccggcacagatcgaggagagagataggcgtcggcaaaagcaactcgaacatcaaaaggccatcacagcgcaagtggaggagaaacggcgtaagaagcagctggaagaggagcagagaaagaaagaggagcaggaagaagagcttcgcctggcccaggaaagggaggaaatgcagaaacagtacgaggaggatatcctgaagcagaaacagaaagaggaaattatgaccttgaaaaccaacgagctgttccaaactatgcagcgcgctcaggagctcgcacagagactgaaacaggaacagcgcattcgggagctcgctcagaaggggcacgatacctcgaggttgataaaaaaccttggtgtcgatacaatccagatggagtacaacgcatcaaacatttccaactcccgccacgatagtgacgaaatctcgggcaagatgaatacatatatgaacagcacaaccagtaagaaggatacaggggttcagacggacgaccttaacatagggatatttactaatgctgagtcccactgtggttctctgatggaaagggacataacaaactgttcctcccctgaaatctcagccgagctgattggccaattctctacaaaaaaaaataaacaggaactgacacaagataagggcgcttcactagagaaggagaacaaccgctgtaatgaccagtgcaaccagtttactcggattgagaaacaaaccaagcacatgaaaaaatatcctaagaggcccgactggaatatcaataagcctcccaaaaggtacatacccgcatcggagaagtaccccaaacagttacagaagcagcgagaggaaaaaaaagtaaggaggcaaatggaactgctgcacttagtggaaaaaaataacccgggacacctctctcaaaatcggggaatttcccccgaaatctttcacagtagccaccaagagacagagtccaagctccgctggcatctcgtgaagaaagaagaggaaccgctgaatatccactccttctccaaagaacgcagcccatctagtccagttccagtggtcaaaaaccggactcagcagacacaaaacaccctccacttgcctcttaagaattcgagctatgaacgcgagaacttgattagcggcagtaaccaaaccgagctgtcctcgggtatttccgagtcatcccattttatcccttacgtccgcaccaacgagatttactaccttgaccccgacgcgccactgagcgggccaagcactcaggatccacagtaccaaaattctcaggattgcggacagaagaggcaactgtttgactcagactgcgtacgcgatccattactcaacccgaacatggtcaaaaatcgcgatcgccagcaagccatcctgaagggcctatctgaactgagacagggcctgttgcagaaacagaaggagctggagtcctctttacttcccttggcggagaaccaggaggagtcattcgggtccagcttctag

SEQ ID NO: 25033 - protein, 88 aa, Artificial Sequence
  derived and/or modified sequence
MALSTIVSQRKQIKRKAPRGFLKRVFKRKKPQLRLEKSGDLLVHLNCLLFVHRLAEESRTNACASKCRVINKEHVLAAAKVILKKSRG

SEQ ID NO: 25034 - DNA, 267 bp, Artificial Sequence
  derived and/or modified sequence
atggcacttagtaccatcgtcagccagaggaagcagataaagcgaaaggcacccaggggattcctaaaacgcgtatttaagcggaaaaagccacagctaaggctggagaagtccggtgatcttctggtccatctgaattgcttacttttcgtgcatcgactggccgaggaatctcgcaccaacgcctgtgccagcaagtgcagggtcattaataaggagcacgtattggccgctgcaaaagtgatccttaagaaatcacggggctag

SEQ ID NO: 25035 - DNA, 267 bp, Artificial Sequence
  derived and/or modified sequence
atggccctgagcaccatcgtgtcccagaggaagcagatcaagaggaaggccccccggggcttcctgaagagggtcttcaagaggaagaagccccagctgcggctggagaagagcggggacctgctggtgcacctgaactgcctgctgtttgtgcaccggctggccgaggagagcaggaccaatgcctgtgccagcaagtgcagggtcatcaacaaggagcacgtgctggccgccgccaaggtgatcctgaagaagagccggggctag

SEQ ID NO: 25036 - DNA, 267 bp, Artificial Sequence
  derived and/or modified sequence
atggccctgagcaccatcgtgagccagcggaagcagatcaagcggaaggctccaaggggcttcctgaaacgggtctttaaacgcaagaagccacaactgaggctcgaaaagtcaggcgacctgctggttcaccttaattgtttattgttcgtgcatcggctggctgaggaatcacggactaatgcgtgtgcctccaagtgtcgtgtaattaataaggagcacgtgctggctgccgcaaaggtgattcttaagaagtccaggggatag

SEQ ID NO: 25037 - DNA, 267 bp, Artificial Sequence
  derived and/or modified sequence
atggcactgagcacaatcgtcagtcaaaggaaacaaatcaagcggaaggcccctcggggattcttgaagcgggtttttaagaggaagaagccacagctgaggctcgagaaaagtggagatcttttggtacatctgaactgccttctattcgttcatcgacttgctgaagaatccaggaccaacgcatgtgcaagtaaatgcagagtgatcaacaaggaacatgttctggcggctgcaaaagtgatactgaaaaaaagtagggggtag

SEQ ID NO: 25038 - DNA, 750 bp, Artificial Sequence
  derived and/or modified sequence
atacggaccggattgttttcgctggcccagtgtccccggagcttgtgtgcgatacagagagcacctcggaagctgaggcagctggtacttgacagagaggatggcgctgtcgaccatagtctcccagaggaagcagataaagcggaaggctccccgtggctttctaaagcgagtcttcaagcgaaagaagcctcaacttcgtctggagaaaagtggtgacttattggtccatctgaactgtttactgtttgttcatcgattagcagaagagtccaggacaaacgcttgtgcgagtaaatgtagagtcattaacaaggagcatgtactggccgcagcaaaggtaattctaaagaagagcagaggttagaagtcaaagaacatattcttgaaagttatgatgcattcttttgggtggtaacagatcataaagacattttttacacatcagttaatatgggattattaaatattggctataagtgatgtgtgtgtttgtattttttttctggcatgaaatatctcaagtaaatgcataggactatttaacccttttatgggaattactattatttttattttaaatgtcctctagttcagtttgcttttgttttgttgctgctgcaaatattttatgtatcaaaaatgaaatcttactatattaaatactttgaaaatgtacttcttagaattaagtttatatatatttagatttagccacagttaactatggaatttaatctctgaagaaag

SEQ ID NO: 25039 - DNA, 267 bp, Artificial Sequence
  derived and/or modified sequence
atggccctgagcaccatcgtgagccagagaaagcagatcaagagaaaggcccccagaggcttcctgaagagagtgttcaagagaaagaagccccagctgagactggagaagagcggcgacctgctggtgcacctgaactgcctgctgttcgtgcacagactggccgaggagagcagaaccaacgcctgcgccagcaagtgcagagtgatcaacaaggagcacgtgctggccgccgccaaggtgatcctgaagaagagcagaggctag

SEQ ID NO: 25040 - protein, 151 aa, Artificial Sequence
  derived and/or modified sequence
MNWAPATCWALLLAAAFLCDSGAAKGGRGGARGSARGGVRGGARGASRVRVRPAQRYGAPGSSLRVAAAGAAAGAAAGAAAGLAAGSGWRRAAGPGERGLEDEEDGVPGGNGTGPGIYSYRAWTSGAGPTRGPRLCLVLGGALGALGLLRP

SEQ ID NO: 25041 - DNA, 681 bp, Artificial Sequence
  derived and/or modified sequence
atggacgagaacaacggcctgctgctgctggagctgaacccccccaacccgtgggatctgcagcctcggtctccagaggaactggctttcggagaagtgcagatcacctacttgacccatgcttgcatggatctcaagctgggggacaaacgaatggtgtttgatccctggcttatcggcccagccttcgccaggggctggtggctgttgcacgaacccccctccgattggctggagagactgtgccaggctgatttgatctacatttctcatttgcactctgatcatctgagctatcctacactgaaaaagcttgcaggcagacgccccgatatccctatatacgtcgggaataccgagagaccagtgttctggaaccttaaccaatcgggtgtacagctgaccaacattaatgtcgtgccgtttggaatttggcagcaggtggacaaaaatctgaggttcatgatccttatggatggagtacaccctgaaatggacacgtgtattatcgtggagtacaagggccataaaatcttgaatattgttgattgcaccaggcctaacggaggtaggctgcctatgaaggtggcgctgatgatgtcagacttcgccggaggcgcttccggctttcctatgactttttccggggggaaatttacagccgaggaaactctgatttag

SEQ ID NO: 25042 - DNA, 456 bp, Artificial Sequence
  derived and/or modified sequence
atgaactgggcccctgcaacctgctgggccctcctgctggccgctgccttcctgtgcgactcaggggccgcaaaaggtggccgcggtggggcccgaggctcagctcggggcggtgtcagagggggagctcggggagcaagccgggtgcgtgtcaggccagcacagagatacggggcccctggcagcagtctgcgggtggccgccgctggggcggctgccggtgcggcagcaggtgccgccgccgggctcgccgcgggcagcgggtggcgaagagctgccggtcccggcgagcgaggcctcgaggacgaggaagacggcgtccctggcggaaacggcacgggtcccggtatttacagttaccgggcttggacctcaggcgcgggtcctacacgaggccctagactctgtttggtgctaggaggtgcccttggggctttgggactactccgaccctag

SEQ ID NO: 25043 - DNA, 456 bp, Artificial Sequence
  derived and/or modified sequence
atgaactgggctccagccacatgctgggctttgctattggcggccgcttttttatgcgatagcggtgcagccaagggaggacgcggaggggctcggggctccgccaggggcggtgtgcggggaggggcccggggcgcttctagggtcagagttagacctgcacaacggtatggtgcccctggttccagcctgcgagtagcagcagccggcgctgccgctggggcagctgcgggggcggcagctggcctggcagccggttctgggtggcgcagagccgccgggccaggcgaaagaggtctcgaagatgaggaggatggggttcccgggggtaacggaaccggcccaggaatctactcctatagagcatggacgtccggcgctgggccgactagaggccctcgcctatgcctcgtattgggtggcgctttaggcgcgctgggcctgctgcggccttag

SEQ ID NO: 25044 - DNA, 456 bp, Artificial Sequence
  derived and/or modified sequence
atgaactgggccccagccacctgctgggccctgctgctggccgccgccttcctgtgtgacagcggggccgccaagggcggccggggcggggcccggggcagcgcccggggcggcgtgcggggcggggcccggggggccagccgggtgcgggtgcggcctgcccagagatatggagcccctggcagcagcctgcgggtggccgctgctggagctgctgctggagctgctgctggagctgctgctggcctggccgccggcagcggctggaggagagctgctggccctggagagcggggcctggaggatgaggaggatggagtgcctggaggaaatggaactggacctggcatctacagctaccgggcctggaccagcggggccggccccacccggggcccccggctgtgcctggtgctgggcggggccctgggcgccctgggcctgctgcggccctag

SEQ ID NO: 25045 - DNA, 456 bp, Artificial Sequence
  derived and/or modified sequence
atgaactgggcccccgccacctgctgggccctgctgctggccgccgccttcctctgtgacagcggggcagcgaagggcggtcggggcggagccagaggatcagccagagggggggtcagaggaggggcacgcggggcaagccgagtgagagtgcgacccgcccagagatatggtgccccaggttctagcctccgcgtagcagccgccggcgccgccgccggggctgcagccggtgcagccgcgggtctggcagcaggtagtggttggcggcgcgctgctggtccaggcgaaagagggcttgaggatgaggaagacggcgtgcccggcggcaacgggaccggaccggggatttactcatatagggcgtggacctccggcgctggtcctacccgcgggcccagattatgtctggttctcggcggggccctgggcgccctcggcttacttagaccatag

SEQ ID NO: 25046 - DNA, 456 bp, Artificial Sequence
  derived and/or modified sequence
atgaactgggcccccgccacctgctgggccctgctgctggccgccgcatttctgtgcgattcaggggcggcaaagggaggaagaggcggcgctcggggttcagcacgaggcggcgttagggggggtgccaggggcgctagccgtgtgcgcgtaagacctgcccaaagatacggggctccaggtagcagtctgcgggtggctgctgcaggcgctgccgcaggggcggccgctggggccgcagctggacttgctgcgggttccggctggcgaagagcagccggtcctggggagaggggcctggaggacgaggaagacggtgtgccaggaggaaatggaacaggtccgggaatatattcttaccgggcctggactagcggcgccgggccaacaagaggaccccggctgtgcctagtgctcggaggagcactgggcgctctgggactgctaaggccatag

SEQ ID NO: 25047 - DNA, 456 bp, Artificial Sequence
  derived and/or modified sequence
atgaattgggcaccggctacctgctgggcgctgcttctggctgctgctttcctgtgcgattccggagccgcaaagggtgggagaggcggagctcggggtagcgcaagggggggagtacggggtggggctagaggggcaagccgcgtgagggtcaggcctgcccaaaggtacggcgcaccaggatcctccctgcgcgtggcagcagcgggtgccgcagccggagcagctgccggagccgcagccggactagctgcaggcagtggctggcgcagagcagcaggccctggggagagggggctggaagacgaggaggacggggtgccaggtggcaacgggaccggcccaggtatctattcatatagggcttggacaagtggggcaggacccacccgcggtcccaggctttgtctggtgctgggcggagcactcggggcactgggcttattaagaccatag

SEQ ID NO: 25048 - DNA, 456 bp, Artificial Sequence
  derived and/or modified sequence
atgaattgggcacctgccacctgctgggcactgctgctggctgcagccttcctgtgcgactcaggagccgcaaaaggaggtcggggaggcgcacgcggatcagctcgaggcggagtgcgcggtggggcacgtggagcctcacgggttcgtgttagacccgcacaacgttacggggctcccggatctagtctgcgggttgccgcagccggtgccgctgcgggagcagcggcaggagcggctgccggactagccgctggcagcgggtggcggagggcagctggccctggagagcgtgggctggaggacgaagaagacggtgtccctggcggaaatggtactgggcctggaatctactcttaccgggcttggactagtggggcaggacccacacgcggacctcgactgtgtctcgtcctaggcggagctctgggcgctttaggcttgctcagaccttag

SEQ ID NO: 25049 - DNA, 3128 bp, Artificial Sequence
  derived and/or modified sequence
ggctgagggtccgcgccgccgcccgcccgctccttcccgctcggccgcggcctcagggacggatactccagcgcgcggttccaaccgaggcccgtggtttagccccacgaagatgaactgggcacccgcaacgtgctgggctctgctactggcggccgccttcctctgcgacagcggcgcagccaagggcggccgcggaggtgcgcggggcagtgcccggggaggggtccgcgggggtgcgcgcggggcctcgagggtgcgcgtgaggccggcgcagcgctacggtgccccgggctcctccctgcgcgtggctgccgccggggcggcagccggggcggcggcgggagcggccgcgggcctggcggcgggctcgggctggagaagggccgcgggacccggggaacgcggcctggaggacgaggaggacggggtgcccggaggcaacgggacaggccccggcatctacagctaccgggcgtggacttcgggcgctggacccacgcgcggcccgcgtctctgtctcgtgctgggcggcgccctcggagccctggggctgctgcggccctaggcctggctgggctcggggaccacatctggcccccggcccgcgccatcccccaggatcctccggcctgggctcccccttcctcccttgcccacggtcttggagccccactgggtgcaggagctgctggctgtccctgtggacccgccatccaccgtcctgcccacgccgcctcagcctgccacctcccacctagaggagaccatgggccctgccccacccactccaggatgttagggtcccctcagccaaaaaggcagctgcctgtggctcctgtaccaaccgcccagccacgctccatcgccgcccaaagggaggtgccaaggccaggaacccaagccaccccggctcccctcgcctgcccaggggccgtggtgactcacgggcagggaggcgacatcaggctggttctgccactgagcccctgaggaatctgaccctccccaaaagaagcagtgaaatggaccaaaggacttaagaatttggggggaagtgagggaaaaacgttaggtgctaaccacctgcccagaagagtggatctcacagcccaggaacattcccaagcaggaaaaccgtccgtccgaggaacgtccatcctggctctctgcggctggtgggaaaacacaccctgccctgaggggctgtccaggccttctcccccacaccctcaggccgagatccgtgagagacccactttgctccaacaacttgaaacaagtcactttaccctccttaggacccattttgggggggaaaaaccaacacattccagagctttccaagtcctttgaacttcaggttcacattcagggatcacacagttctgcctgttctcagggcacagcaactgccaatcccgctgaagaggcctccctgggcacagcacaggctgcacggtgcacgcatttccctgaaggcagccccttcttcggaagcagctgttccaggcctcggaacagggcctgggtatccgcgtggtgggctggcagctgacggcctgctcagtggagccaggagctaactcagaccccaaagcaagcagggggccagtggcggggcccagcgcccagcaggacacccatgcaagaggctgagccccccaacatccaaggacaggagagacatggagtggcgctggacagtcacgacaaggacttgcctccagcactggacacacctgtgttaagaccagccctctgcttcccagtcccgccagcctggggcatcctccatgggctcagcactgagaggtcttgggtctgccacgttctctagctctccagtcacccactcatccagggtaggaggggttctccctgccccccgccgtggccttgggatctcaccctctccatgtcctggggacagcctcgccctcagccggactgcatccctcctgggcctgagcctcgggactcagtggacaccaaagtcaagaccagcacccaccacgggccctgccagcctctgccttccccagctggcctgggttctggcctgggtgaggatctggaagctgttggcaggactcaaccaagcactgctctctagctccagggcactaagccacaggaggcagcgccctgcagcctcccgtccacactgccagcaatgcccctggcccagtgagcccagacgctcctccaccccttccagaccaagctcaacgcctccaagaccagcaggccaaggccaagccctgccccagatcctcataggcagagaagcccttctgacatttcccccaggaggcagggggtggtctgagtctcctcacagcagagagacccaccggagccccctcaactttgcagatgcccacctggaaaatgggctgagctgcaccagaccctcacacaccacagcactgcaagctgatggaatgttccagttatgatggacacttcgtgatctgcaatgactgttgattcagcacattagcatctgacacagccaacctgaatacttcctgccccaggcggtcagggttatggcacgatgcaggtggcactcaggggctaacttcaggctgatgagtgtgtggggtatggggcagcagaggcagccagccagcaaagaggggccactgagcaccagggccctggtggaggctgctgtgggacggtcaggccaccaccgcaaagaggcagccggagcttctgcacaggatgtccctggccccaggtcctgcagcaccttagtccatactaccagccccacccaccttccttcctcttccctcttctaggacacaggctgtggaccccttcaggtgcactataatggggctggaggggcccccacatctctcagccccactaatgcagaatcccactacccgtgagctagaaggtgctcagaggccaggggtctctactgcccatgccgggcggccttccagtcattgcacagcaaagccatgtgcagggcgtccccctcaaccctgccctgaacatgccccagggcactgaggggcgaagccagtgcttgggctctgctgctgggagtctctggtctgtgtctgtgtgtgcctgtaagtgtgaaataaacctctctgatggca

SEQ ID NO: 25050 - DNA, 3172 bp, Artificial Sequence
  derived and/or modified sequence
ggcggaggcctcgcgcaaaacccaggcgccgcggctccgcgctccggctgagggtccgcgccgccgcccgcccgctccttcccgctcggccgcggcctcagggacggatactccagcgcgcggttccaaccgaggcccgtggtttagccccacgaagatgaactgggcacccgcaacgtgctgggctctgctactggcggccgccttcctctgcgacagcggcgcagccaagggcggccgcggaggtgcgcggggcagtgcccggggaggggtccgcgggggtgcgcgcggggcctcgagggtgcgcgtgaggccggcgcagcgctacggtgccccgggctcctccctgcgcgtggctgccgccggggcggcagccggggcggcggcgggagcggccgcgggcctggcggcgggctcgggctggagaagggccgcgggacccggggaacgcggcctggaggacgaggaggacggggtgcccggaggcaacgggacaggccccggcatctacagctaccgggcgtggacttcgggcgctggacccacgcgcggcccgcgtctctgtctcgtgctgggcggcgccctcggagccctggggctgctgcggccctaggcctggctgggctcggggaccacatctggcccccggcccgcgccatcccccaggatcctccggcctgggctcccccttcctcccttgcccacggtcttggagccccactgggtgcaggagctgctggctgtccctgtggacccgccatccaccgtcctgcccacgccgcctcagcctgccacctcccacctagaggagaccatgggccctgccccacccactccaggatgttagggtcccctcagccaaaaaggcagctgcctgtggctcctgtaccaaccgcccagccacgctccatcgccgcccaaagggaggtgccaaggccaggaacccaagccaccccggctcccctcgcctgcccaggggccgtggtgactcacgggcagggaggcgacatcaggctggttctgccactgagcccctgaggaatctgaccctccccaaaagaagcagtgaaatggaccaaaggacttaagaatttggggggaagtgagggaaaaacgttaggtgctaaccacctgcccagaagagtggatctcacagcccaggaacattcccaagcaggaaaaccgtccgtccgaggaacgtccatcctggctctctgcggctggtgggaaaacacaccctgccctgaggggctgtccaggccttctcccccacaccctcaggccgagatccgtgagagacccactttgctccaacaacttgaaacaagtcactttaccctccttaggacccattttgggggggaaaaaccaacacattccagagctttccaagtcctttgaacttcaggttcacattcagggatcacacagttctgcctgttctcagggcacagcaactgccaatcccgctgaagaggcctccctgggcacagcacaggctgcacggtgcacgcatttccctgaaggcagccccttcttcggaagcagctgttccaggcctcggaacagggcctgggtatccgcgtggtgggctggcagctgacggcctgctcagtggagccaggagctaactcagaccccaaagcaagcagggggccagtggcggggcccagcgcccagcaggacacccatgcaagaggctgagccccccaacatccaaggacaggagagacatggagtggcgctggacagtcacgacaaggacttgcctccagcactggacacacctgtgttaagaccagccctctgcttcccagtcccgccagcctggggcatcctccatgggctcagcactgagaggtcttgggtctgccacgttctctagctctccagtcacccactcatccagggtaggaggggttctccctgccccccgccgtggccttgggatctcaccctctccatgtcctggggacagcctcgccctcagccggactgcatccctcctgggcctgagcctcgggactcagtggacaccaaagtcaagaccagcacccaccacgggccctgccagcctctgccttccccagctggcctgggttctggcctgggtgaggatctggaagctgttggcaggactcaaccaagcactgctctctagctccagggcactaagccacaggaggcagcgccctgcagcctcccgtccacactgccagcaatgcccctggcccagtgagcccagacgctcctccaccccttccagaccaagctcaacgcctccaagaccagcaggccaaggccaagccctgccccagatcctcataggcagagaagcccttctgacatttcccccaggaggcagggggtggtctgagtctcctcacagcagagagacccaccggagccccctcaactttgcagatgcccacctggaaaatgggctgagctgcaccagaccctcacacaccacagcactgcaagctgatggaatgttccagttatgatggacacttcgtgatctgcaatgactgttgattcagcacattagcatctgacacagccaacctgaatacttcctgccccaggcggtcagggttatggcacgatgcaggtggcactcaggggctaacttcaggctgatgagtgtgtggggtatggggcagcagaggcagccagccagcaaagaggggccactgagcaccagggccctggtggaggctgctgtgggacggtcaggccaccaccgcaaagaggcagccggagcttctgcacaggatgtccctggccccaggtcctgcagcaccttagtccatactaccagccccacccaccttccttcctcttccctcttctaggacacaggctgtggaccccttcaggtgcactataatggggctggaggggcccccacatctctcagccccactaatgcagaatcccactacccgtgagctagaaggtgctcagaggccaggggtctctactgcccatgccgggcggccttccagtcattgcacagcaaagccatgtgcagggcgtccccctcaaccctgccctgaacatgccccagggcactgaggggcgaagccagtgcttgggctctgctgctgggagtctctggtctgtgtctgtgtgtgcctgtaagtgtgaaataaacctctctgatggc

SEQ ID NO: 25051 - DNA, 456 bp, Artificial Sequence
  derived and/or modified sequence
atgaactgggcccccgccacctgctgggccctgctgctggccgccgccttcctgtgcgacagcggcgccgccaagggcggcagaggcggcgccagaggcagcgccagaggcggcgtgagaggcggcgccagaggcgccagcagagtgagagtgagacccgcccagagatacggcgcccccggcagcagcctgagagtggccgccgccggcgccgccgccggcgccgccgccggcgccgccgccggcctggccgccggcagcggctggagaagagccgccggccccggcgagagaggcctggaggacgaggaggacggcgtgcccggcggcaacggcaccggccccggcatctacagctacagagcctggaccagcggcgccggccccaccagaggccccagactgtgcctggtgctgggcggcgccctgggcgccctgggcctgctgagaccctag

SEQ ID NO: 25052 - protein, 460 aa, Artificial Sequence
  derived and/or modified sequence
MGSNSGQAGRHIYKSLADDGPFDSVEPPKRPTSRLIMHSMAMFGREFCYAVEAAYVTPVLLSVGLPSSLYSIVWFLSPILGFLLQPVVGSASDHCRSRWGRRRPYILTLGVMMLVGMALYLNGATVVAALIANPRRKLVWAISVTMIGVVLFDFAADFIDGPIKAYLFDVCSHQDKEKGLHYHALFTGFGGALGYLLGAIDWAHLELGRLLGTEFQVMFFFSALVLTLCFTVHLCSISEAPLTEVAKGIPPQQTPQDPPLSSDGMYEYGSIEKVKNGYVNPELAMQGAKNKNHAEQTRRAMTLKSLLRALVNMPPHYRYLCISHLIGWTAFLSNMLFFTDFMGQIVYRGDPYSAHNSTEFLIYERGVEVGCWGLCINSVFSSLYSYFQKVLVSYIGLKGLYFTGYLLFGLGTGFIGLFPNVYSTLVLCSLFGVMSSTLYTVPFNLITEYHREEEKEVCCH

SEQ ID NO: 25053 - DNA, 1383 bp, Artificial Sequence
  derived and/or modified sequence
atgggcagcaacagcggccaggccggcagacacatctacaagagcctggccgacgacggccccttcgacagcgtggagccccccaagagacccaccagcagactgatcatgcacagcatggccatgttcggcagagagttctgctacgccgtggaggccgcctacgtgacccccgtgctgctgagcgtgggcctgcccagcagcctgtacagcatcgtgtggttcctgagccccatcctgggcttcctgctgcagcccgtggtgggcagcgccagcgaccactgcagaagcagatggggcagaagaagaccctacatcctgaccctgggcgtgatgatgctggtgggcatggccctgtacctgaacggcgccaccgtggtggccgccctgatcgccaaccccagaagaaagctggtgtgggccatcagcgtgaccatgatcggcgtggtgctgttcgacttcgccgccgacttcatcgacggccccatcaaggcctacctgttcgacgtgtgcagccaccaggacaaggagaagggcctgcactaccacgccctgttcaccggcttcggcggcgccctgggctacctgctgggcgccatcgactgggcccacctggagctgggcagactgctgggcaccgagttccaggtgatgttcttcttcagcgccctggtgctgaccctgtgcttcaccgtgcacctgtgcagcatcagcgaggcccccctgaccgaggtggccaagggcatccccccccagcagaccccccaggacccccccctgagcagcgacggcatgtacgagtacggcagcatcgagaaggtgaagaacggctacgtgaaccccgagctggccatgcagggcgccaagaacaagaaccacgccgagcagaccagaagagccatgaccctgaagagcctgctgagagccctggtgaacatgcccccccactacagatacctgtgcatcagccacctgatcggctggaccgccttcctgagcaacatgctgttcttcaccgacttcatgggccagatcgtgtacagaggcgacccctacagcgcccacaacagcaccgagttcctgatctacgagagaggcgtggaggtgggctgctggggcctgtgcatcaacagcgtgttcagcagcctgtacagctacttccagaaggtgctggtgagctacatcggcctgaagggcctgtacttcaccggctacctgctgttcggcctgggcaccggcttcatcggcctgttccccaacgtgtacagcaccctggtgctgtgcagcctgttcggcgtgatgagcagcaccctgtacaccgtgcccttcaacctgatcaccgagtaccacagagaggaggagaaggaggtgtgctgccactag

SEQ ID NO: 25054 - DNA, 1383 bp, Artificial Sequence
  derived and/or modified sequence
atgggaagtaatagtggccaggccggacggcacatttataagtctctggccgacgatggcccattcgactccgttgagccccccaagcgacctactagcaggttgatcatgcacagcatggcaatgtttggacgagagttctgttacgcggtagaagccgcttatgtcacacccgttttactgtccgtgggacttcccagttccttgtattcaatcgtttggttcctatcccctattttaggcttcctcctccagcctgtggtggggtccgccagtgatcactgccgttctcggtgggggaggcgcagaccctacattttgaccctgggcgttatgatgctggttgggatggctttgtatctgaatggcgcaacagtggttgctgcattgatcgcaaacccccgtcgcaaactggtgtgggcaatatcggtaactatgataggcgtagtgctcttcgacttcgctgcggattttatagacggccccatcaaagcctatctcttcgatgtctgctctcatcaggataaagagaagggattgcactaccacgccctgttcaccggcttcgggggtgccttgggatatttgttaggagcgatagactgggcccacctggaactcggtaggttactgggcaccgaattccaagttatgttttttttcagcgcattagttcttactctctgcttcacagtccacctgtgtagtatatctgaggccccattaaccgaagtggccaagggcatccctcctcagcagaccccacaggatccccccctatccagcgatggtatgtacgagtacggctccattgagaaggtgaagaacggctacgtgaaccccgagctagctatgcagggggcaaaaaacaagaatcacgcggaacagacccgcagagcaatgaccctgaaaagcctactgcgcgccttggtcaatatgcccccgcattacagatacttgtgtatttcacatctgatcggatggacagcttttctctctaatatgctgttctttacggactttatgggccaaatagtctaccgaggtgacccatatagcgcccataattccacggaatttctgatctatgagaggggagtggaggtgggctgctggggcttgtgcatcaattcagttttctcttccctgtacagttacttccagaaagttcttgtctcctatataggcctgaaaggtttgtactttaccggatacttgctttttggcctgggaactggctttattggcctgtttcccaacgtatacagcactctcgtcctgtgcagtttattcggagtgatgtcttcaactctgtacacagtgccttttaacctaatcaccgagtaccatcgagaggaagagaaggaggtgtgctgccactag

SEQ ID NO: 25055 - DNA, 1383 bp, Artificial Sequence
  derived and/or modified sequence
atgggcagcaacagcggccaggccggccgccacatctacaagagcctggctgatgatggcccctttgacagcgtggagccccccaagaggcccaccagccgcctcatcatgcacagcatggccatgtttggccgggagttctgctatgctgtggaggccgcctacgtgacccctgtgctgctgtctgtgggcctgcccagcagcctgtacagcatcgtgtggttcctgagccccatcctgggcttcctgctgcagcctgtggtgggcagcgccagtgaccactgccgcagccgctggggcagaagaagaccctacatcctgaccctgggcgtgatgatgctggtgggcatggccctgtacctgaatggagccaccgtggtggccgccctgattgccaaccccaggaggaagctggtgtgggccatctctgtgaccatgattggagtggtgctgtttgattttgctgctgacttcattgatggccccatcaaggcctacctgtttgatgtgtgcagccaccaggacaaggagaagggcctgcactaccacgccctcttcaccggctttggaggagccctgggctacctgctgggcgccatcgactgggcccacctggagctgggccgcctgctgggcacagagttccaggtgatgttcttcttcagcgccctggtgctgaccctgtgcttcaccgtgcacctgtgcagcatcagcgaggcccccctgacagaggtggccaagggcatccccccccagcagaccccccaggacccccccctgagcagtgatggcatgtatgaatatggcagcattgagaaggtgaagaatggctacgtgaaccctgagctggccatgcagggcgccaagaacaagaaccacgccgagcagacccggcgggccatgaccctgaagagcctgctgcgggccctggtgaacatgccaccccactaccgctacctgtgcatcagccacctgattggctggacagccttcctgagcaacatgctgttcttcacagacttcatgggccagatcgtgtacagaggagacccctacagcgcccacaacagcacagagttcctgatctatgagcggggcgtggaggtgggctgctggggcctgtgcatcaacagcgtcttcagcagcctgtacagctacttccagaaggtgctggtgtcctacatcggcctgaagggcctgtacttcaccggctacctgctgtttggcctgggcaccggcttcatcggcctcttccccaacgtgtacagcaccctggtgctgtgcagcctgtttggagtgatgagcagcaccctgtacacagtgcccttcaacctgatcacagagtaccaccgggaggaggagaaggaggtgtgctgccactag

SEQ ID NO: 25056 - DNA, 1383 bp, Artificial Sequence
  derived and/or modified sequence
atgggcagcaacagcggccaggccggccggcacatctacaagagccttgccgatgacggcccttttgacagtgtggaaccgcctaagcggcccacatcacggttaatcatgcactccatggcgatgttcgggcgcgagttttgttatgcggtcgaggctgcctacgtgactcccgtcctgttgtctgtagggcttccctctagtctctactccatcgtgtggtttctgagtcccattttaggatttctgctccagcctgtagtgggaagtgcaagtgatcactgtaggagcagatggggccgacgccggccctacatactgactctgggcgtgatgatgctggtcgggatggccctctatctcaacggagccactgtggtagcagcgctgattgctaacccccgcagaaaattggtgtgggcgatttctgtgaccatgattggggtcgttctgtttgactttgcggctgacttcattgatggcccaattaaagcctacttgtttgacgtctgctctcaccaagataaggagaaaggcctgcactatcacgccctgtttaccggatttgggggcgctctaggttacctgttgggtgccattgattgggcccatcttgaacttggccgcctgctaggaacggaatttcaggtgatgttcttctttagcgcactcgtcctgactttatgctttactgtgcacttgtgttctatctccgaagcgccacttaccgaggtagccaaggggatccccccccagcagacgccccaggacccaccgctttcttctgacgggatgtacgagtacgggtctattgagaaggttaagaatggatatgtcaatcctgagctggcaatgcaaggagctaagaacaagaatcatgctgaacagacacggagggctatgaccctgaaaagtctgctccgcgccttggttaacatgccaccgcattataggtatttgtgcatttcccacctgattggatggactgccttcctctccaatatgctgttcttcacagattttatggggcaaatcgtgtataggggcgatccctacagcgcccacaactcgacagagtttctgatctatgagaggggcgtcgaagtgggctgctggggcctgtgcattaattctgtctttagctctttgtattcctatttccagaaagttctcgtctcatatatcggcttaaaagggctttacttcactggatacctattattcggactaggcactggtttcatcgggctgttcccaaacgtctattccaccctcgtcctgtgtagcctcttcggcgtaatgagtagcactttgtacaccgttcccttcaacctcattactgagtatcatcgcgaagaggagaaagaagtgtgttgtcactag

SEQ ID NO: 25057 - DNA, 1383 bp, Artificial Sequence
  derived and/or modified sequence
atgggaagcaattctggccaggctggtagacacatctataagagtttggccgatgatggcccattcgacagcgttgagccacctaagcgacctacaagccgattgattatgcactctatggctatgtttgggagagaattctgctatgctgtggaggccgcatatgtgacccccgtgctgctgagcgtcggcctgccttccagcctctattctatcgtctggtttctttctccaatcctggggttcctcttacagcccgtggtggggtccgcctcagatcattgccgtagcaggtggggcagaagacggccatatatcttaacactgggagtcatgatgctagttgggatggcactgtacctgaacggcgctactgttgtggcagcattaattgctaacccccgacgcaagctggtgtgggccattagtgttacaatgatcggcgtcgtactgtttgattttgccgcagatttcatcgatggcccaattaaagcatatcttttcgacgtgtgctcacaccaggataaggagaaagggctgcattatcacgccctgttcacaggatttggaggagctctgggatatctgcttggggctattgactgggcccacctggagctcggcagactactgggtacagagttccaggtaatgttctttttctccgcactcgtgctaacactgtgctttacggtacatctgtgctcaattagtgaggctccattaaccgaagtcgccaaagggatcccaccacagcagacccctcaggacccccctctgagcagcgacggaatgtacgagtacggatctatcgagaaggtgaagaatggctacgttaaccccgaactcgcgatgcagggcgcaaagaacaagaatcacgcggagcagactcgtcgggcaatgactctgaagtccctgctgagggctctggtcaacatgccccctcattacagatacctctgcattagtcacctgattggatggacagcgttcctcagcaacatgttgttcttcaccgattttatggggcagatagtttaccgcggtgacccatattccgctcataactcaaccgaattcctgatttacgagcggggtgtggaagttggctgttgggggttgtgtatcaatagtgtgttctcctcactctactcttattttcaaaaggtcctggtgtcatacatcggcttgaaaggactgtattttacggggtacctgttgtttgggctgggaaccggctttatcggactcttcccgaacgtctacagtacccttgtgctgtgctcactcttcggagttatgtcctctaccttgtataccgtcccgttcaatttgatcaccgagtaccatcgggaggaagaaaaggaagtctgctgccactag

SEQ ID NO: 25058 - DNA, 2723 bp, Artificial Sequence
  derived and/or modified sequence
gaccctaggaccacgcaggaggtggtgggctcgcaggaaggttcctctcccagtggccatgggtagcaacagtgggcaggctggccgccacatctataaatccctagctgatgatggcccctttgactctgtggagccgcctaaaagacccaccagcagactcatcatgcacagcatggccatgttcggaagagagttctgctacgcggtggaggcagcgtatgtgaccccagtcctgctcagcgtaggtctgcccagcagcctgtacagcattgtgtggttcctcagccccatcctgggattcctgctgcagcccgtggtcggatcggccagcgaccactgccggtccaggtggggccgccggagaccctacatcctcaccctgggagtcatgatgctcgtgggcatggctctgtacctcaatggggctactgttgtagcagctttgattgctaacccaaggaggaagctggtttgggccataagtgtcaccatgataggtgtcgttctctttgattttgctgccgacttcattgatgggcccatcaaagcctacttatttgatgtctgctcccatcaggacaaggagaagggcctccactaccatgccctcttcacaggttttggaggtgccctgggttaccttttgggtgctatagactgggcccatctggagctgggaagactgttgggtacagaattccaggtcatgttcttcttctctgcattggtgctcactttgtgttttactgttcatctgtgcagtatctctgaagccccacttacagaggttgcaaagggcattcccccacagcaaacccctcaggaccctccattgtcatcagatggaatgtacgagtatggttctatcgagaaagttaaaaatggttacgtaaatccagagctggcaatgcagggagcaaaaaacaaaaatcatgctgaacagactcgcagggcaatgacattaaagtcactgctgagagcactggtgaacatgcctcctcactaccgctacctttgcatcagccacctcattggatggacagccttcctgtccaacatgctgttcttcacagatttcatgggccagattgtgtaccgcggggatccctatagtgcacacaactccacagagtttctcatctacgaaagaggagtcgaggttggatgttggggcttgtgcatcaactccgtgttttcctcactttattcttactttcagaaagttttggtatcctacattggattaaagggtctttacttcacgggatatttgctgtttggcctggggacgggatttattgggctcttcccgaatgtctactccaccctggtcctgtgcagcctgtttggtgtaatgtccagcaccctgtacactgtgccctttaacctcattactgagtaccaccgcgaggaagaaaaggaggtgtgctgtcattgaacctctgccttgggtaacatccagactcatctgaaggctggggaggatttggtagcaatgtgtagagcagagctggaaaataagggttcttgaaacagcaacagtcaaatgcccaaccaactgcaaccatgatctggtacaggcatgctcaccagcccagcccagcccagctgtcctgtcctccttattctcaactcctgctcacttagggagctgtagggcaagaagtgttactcccatttttctaattagaaaaaggcttggtgaggctgagaaaccagcccacaattacacaaagacaaaaaaagggggacccaggtcttctgtaaccacctcataggtctccctggtgccacctgcagcatttctagataccgacaataagggtctccctatccccaactttcagaggtacatagtggaatttcttggcattatttgctgagggtaggaaagtcctaggcaatggagtccagattttagtaagtcagaccccatgtgtgagaaggaaagctggaatcatgggtggtaatccccactttgctgccctgagcgggacctgtgccatttaaaccttggaacgcaactagtgaacaagcgcctatgcagtgcttataacagagttggtgtttccactctaaaattaccacctcttcttatcaaaatttgcaactttcttcctgtgaaaataggcttatagttccttaactggagcaatgatataaaagctacagagataactccaagtttaatccagctcagcatgaaactgcaaaaacactgaacatataaccatcagactataattctggccatgtttttcatcatttgatctggcagcagggcagaggtgcaccaggagtaaaaacctttcaaaaaagaggtgtggctttcctcatcccctggcaaacattgtcaccaaggtgggatgttgctgctaatgggagagtcatcataaaaaactgtccctacaaggagagtgttacatggtgttgggggaagaaaacctacgcttcaggctcagagaaacctggattcaaatcctgcctctctcacttggaagctgtgttacactggggatgttatttacttgtttattagttagcacttagaatgagttcatttttaggtgagataatatattcacaatgatacacaaaagtgcacactgtgtgctccctttaccatttactatctccctccagccccaacgtgttaccactcttactagttttttgttaatctttccggcatttttaaataaaaaccaagcaaatgtaaa

SEQ ID NO: 25059 - protein, 195 aa, Artificial Sequence
  derived and/or modified sequence
MDPLFQQTHKQVHEIQSCMGRLETADKQSVHIVENEIQASIDQIFSRLERLEILSSKEPPNKRQNARLRVDQLKYDVQHLQTALRNFQHRRHAREQQERQREELLSRTFTTNDSDTTIPMDESLQFNSSLQKVHNGMDDLILDGHNILDGLRTQRLTLKVGSLLGDREKASCFSLIQQFSNCVYILITCPQIVIF

SEQ ID NO: 25060 - DNA, 588 bp, Artificial Sequence
  derived and/or modified sequence
atggatcccctgttccagcaaacgcataaacaggttcacgagattcagtcctgcatgggcagactggaaactgctgataagcaatctgtgcacattgtggagaatgagattcaagcaagcatcgatcaaatcttcagcagactggagcgcctggagattctgtcgtcaaaggagcccccaaacaagcgacagaacgcacggctgcgggtggaccaactgaaatacgatgtgcagcatcttcaaacagcactacggaattttcagcaccgtcgtcacgcgagagagcagcaagaacggcaaagggaggagcttcttagcagaacatttaccactaacgattcggacactactattccaatggacgagtcactacagttcaactctagcctgcagaaggtgcataatggtatggacgacctgatcctggacggacataatatcctagacggcttacggacgcagaggttgaccttgaaagtaggtagtctgctgggggaccgcgaaaaagcttcttgtttcagtctcattcaacagttcagcaactgtgtgtatattctgattacttgtccccagatagtgatattctag

SEQ ID NO: 25061 - DNA, 2220 bp, Artificial Sequence
  derived and/or modified sequence
aaccggaaggggggctgtgaggacgtgttccgaggaagccagagccggagccgtggcctgcggggccggcgacatggatcccctgttccagcaaacgcacaagcaggtccacgagatccagtcttgcatgggacgcctggagacggcagacaagcagtctgtgcacatagtagaaaacgaaatccaagcaagcatagaccagatattcagccgtctagaacgtctggagattttgtccagcaaggagccccctaacaaaaggcaaaatgccagacttcgggttgaccagttaaagtatgatgtccagcacctgcagactgcgctcagaaacttccagcatcggcgccatgcaagggagcagcaggagagacagcgagaagagcttctgtctcgaaccttcaccactaacgactctgacaccaccataccaatggacgaatcactgcagtttaactcctccctccagaaagttcacaacggcatggatgacctcattttagatgggcacaatattttagatggactgaggacccagagactgaccttgaaggtggggtccctgctgggggacagagagaaggcctcttgttttagcctcatccaacagtttagtaactgtgtttatattttgattacgtgtcctcaaattgtgatattttgatgacaagacagagcccttgagtttgggatcctttctgttggagttgagttattgtgagcctgaaagtacccagttcctttgccagtgcttgaaacaaaccatgaagtggcctctcttaggatccaggtcttttcccatttactgaacttatcatgaaagtgagtgctactacgaggggtccaatcacaggctgagaaattgtgttacagaatctactcttggaagaatgaagacgtggctgtcctttggtacctcgctttaaggtggctttcccttaggacccctactgtggactgccttataactaaaaccttttgtattttagtaactgaatccccactgtgcagtgttagggctgcctggttgtttgcagtagattagagctttagaagcttctagagcttctaaagcccgtgctggtgatcccagcgactcttcactccctagccttaggtattcctagaagccctgaccagttggcactgctgagactccagcccctgggagtggtttacagaaacattacacagactctgatgtcagtcatgatgtttcagcctctgcccttttcctgtatcaaccctgatggataatagggcgtgggttctgtctgttatcagggtgtggtcccctgtgaatgaagcactcccagccactgagctgtgagaaacagtcactcggaagtgtgagctttatcttagtttttgttggatcatgttgagtctgtcagctccacaggacttcagtacgtttctgaacagtccctgccatctctacgggggagagggtcaggcaagctgcaagtgacactcacctcctgctgacagttgcagtgtctcagatggcctggaagggtggtctccagcagcctgctgggcgctcccctttcatgagagccacctgcagtgacctgaactgatacatgttgattagtctgccctttctttagaaaactgctactctccttttcatatctcagaaaaacagtagaggccttttaggaccaaactccatgtcacactgatgaagagccagtgggggttagagcgtcctgttaaggcacatgctaacttcccactcaagtctggcagcgctggggcatcagcacacctcttgccacccacactgataccagaggggaaggctgtgaggtggctgggggttgagacttgaggtttctaactttcctctgcacacctgtggctacctggtgtttgtctcttgattccctccacctgcctcacaccctgcctccgtcgggattttccacctacaccattcaaaaggaacataggagagggcatgaaggggctaggctgaagcactctgatgactggggccaatttgtggctgaaaatgaatacattttttgaaatttatggtcattttcaagtgatttagaaggttgatccttagcctcatacagtgatgaaataatctgtgtgttcagagccaagcaggactttagcaagagtctgattgtattgtcactatctcggggaaaaaaaaatacaaatacatttctctgatctctgatggcaatgaagtttgacttgtaa

SEQ ID NO: 25062 - DNA, 588 bp, Artificial Sequence
  derived and/or modified sequence
atggaccccctcttccagcagacccacaagcaggtgcatgagatccagagctgcatgggccgcctggagacagctgacaagcagagcgtgcacatcgtggagaatgagatccaggccagcattgaccagatcttcagccggctggagcggctggagatcctgagcagcaaggagccccccaacaagaggcagaatgcccggctgcgggtggaccagctgaagtatgatgtgcagcacctgcagacagccctgaggaacttccagcacagaagacatgcccgggagcagcaggagcggcagcgggaggagctgctgagcaggaccttcaccaccaatgacagcgacaccaccatccccatggatgagagcctgcagttcaacagcagcctgcagaaggtgcacaacggcatggatgacctgatcctggatggccacaacatcctggatggcctgcggacccagaggctgaccctgaaggtgggcagcctgctgggggaccgggagaaggccagctgcttcagcctcatccagcagttcagcaactgtgtgtacatcctgatcacctgcccccagatcgtcatcttctag

SEQ ID NO: 25063 - DNA, 588 bp, Artificial Sequence
  derived and/or modified sequence
atggaccccctgttccagcagacccacaagcaggtgcacgagatccagagttgcatggggcgcttggagaccgcggataaacagagtgtgcacatcgttgaaaacgagattcaagcttctattgatcagatcttttctcgcctcgagcgtctcgagatcctgtcctctaaagaaccccccaacaaacgccagaacgcccgcctcagggtggaccagctaaaatacgatgtgcaacatctccaaactgcgttgcggaacttccagcatcgcaggcacgccagagagcagcaggaaaggcagcgggaggagttgctttcacgcaccttcaccaccaatgactccgataccacaattccaatggatgaaagtctgcagttcaattcgagcctacagaaggtgcacaatggtatggatgacctgattctggacggacataatattctcgacggtttacgtacccaaagactgactctgaaagtgggatccttactcggcgatcgagagaaggcttcttgtttcagtttgattcagcagttctccaattgtgtgtacatactgatcacctgccctcaaatcgtgattttctag

SEQ ID NO: 25064 - DNA, 588 bp, Artificial Sequence
  derived and/or modified sequence
atggaccccctcttccagcaaacacacaaacaggttcatgagattcaaagttgcatgggcagattggagaccgctgacaagcagagcgtacatatcgttgagaacgagattcaggccagcatcgatcaaatttttagtaggctcgaacggctggaaattctaagttctaaagaaccaccaaacaagcgtcagaatgctcgtctgcgcgtggaccagctcaaatacgacgttcagcatctccagacagccctgcggaattttcagcatcgcagacacgccagagaacagcaggaacgacagcgggaggaactcctttccaggacctttacaaccaatgactctgacacaactattccgatggacgagagcctgcagttcaactcgagccttcagaaggtacacaatggcatggatgaccttatacttgacggacacaatatactggacgggctgagaacccaacggttaacacttaaggttgggagtctgcttggagaccgtgagaaagcctcctgcttcagtttgattcagcagttcagcaactgtgtctacattctcattacctgtccacaaatcgttatcttctag

SEQ ID NO: 25065 - DNA, 588 bp, Artificial Sequence
  derived and/or modified sequence
atggaccccctgttccagcagacccacaagcaggtgcacgagatccagagctgcatgggcagactggagaccgccgacaagcagagcgtgcacatcgtggagaacgagatccaggccagcatcgaccagatcttcagcagactggagagactggagatcctgagcagcaaggagccccccaacaagagacagaacgccagactgagagtggaccagctgaagtacgacgtgcagcacctgcagaccgccctgagaaacttccagcacagaagacacgccagagagcagcaggagagacagagagaggagctgctgagcagaaccttcaccaccaacgacagcgacaccaccatccccatggacgagagcctgcagttcaacagcagcctgcagaaggtgcacaacggcatggacgacctgatcctggacggccacaacatcctggacggcctgagaacccagagactgaccctgaaggtgggcagcctgctgggcgacagagagaaggccagctgcttcagcctgatccagcagttcagcaactgcgtgtacatcctgatcacctgcccccagatcgtgatcttctag

SEQ ID NO: 25066 - protein, 141 aa, Artificial Sequence
  derived and/or modified sequence
MRGRELPLVLLALVLCLAPRGRAVPLPAGGGTVLTKMYPRGNHWAVGHLMGKKSTGESSSVSERGSLKQQLREYIRWEEAARNLLGLIEAKENRNHQPPQPKALGNQQPSWDSEDSSNFKDVGSKGKGSQREGRNPQLNQQ

SEQ ID NO: 25067 - DNA, 426 bp, Artificial Sequence
  derived and/or modified sequence
atgcggggccgggaattgcccctggtactacttgccctagtcctgtgcctggctccgcgcgggagggccgtgcccctcccagctggcggaggaacagtgctgacgaagatgtacccaagaggtaaccactgggccgtcggccatctgatgggcaaaaaatcaaccggggaatcctcctcggtcagtgaacgcggtagccttaagcagcagttgagagagtatatacgctgggaagaagccgcacggaatcttctggggctcattgaagcaaaggaaaacagaaatcatcagccaccacagcctaaggctctaggaaatcagcagccttcttgggactccgaggactcttctaattttaaagatgtgggctcaaaaggtaagggtagccagcgcgaaggacgaaatccccagctgaaccagcaatag

SEQ ID NO: 25068 - DNA, 579 bp, Artificial Sequence
  derived and/or modified sequence
atgcgcggccgtgagctcccgctggtcctgctggcgctggtcctctgcctggcgccccgggggcgagcggtcccgctgcctgcgggcggagggaccgtgctgaccaagatgtacccgcgcggcaaccactgggcggtggggcacttaatggggaaaaagagcacaggggagtcttcttctgtttctgagagagggagcctgaagcagcagctgagagagtacatcaggtgggaagaagctgcaaggaatttgctgggtctcatagaagcaaaggagaacagaaaccaccagccacctcaacccaaggccctgggcaatcagcagccttcgtgggattcagaggatagcagcaacttcaaagatgtaggttcaaaaggcaaaggttctcaacgtgaaggaaggaacccccagctgaaccagcaatgataatgatggcctctctcaaaagagaaaaacaaaacccctaagagactgcgttctgcaagcatcagttctacggatcatcaacaagatttccttgtgcaaaatatttgactattctgtatctttcatccttgactaaattcgtgattttcaagc

SEQ ID NO: 25069 - DNA, 426 bp, Artificial Sequence
  derived and/or modified sequence
atgaggggccgggagctgcccctggtgctgctggccctggtgctgtgcctggccccccggggccgggctgtgcccctgcctgctgggggcggcaccgtgctgaccaagatgtacccccggggcaaccactgggccgtgggccacctgatgggcaagaagagcactggagagagcagctctgtgtctgagcggggcagcctgaagcagcagctgcgggagtacatccgctgggaggaggccgccaggaacctgctgggcctcatcgaggccaaggagaacagaaaccaccagcccccccagcccaaggccctgggcaaccagcagcccagctgggacagcgaggacagcagcaacttcaaggatgtgggcagcaagggcaagggcagccagcgggagggcaggaacccccagctgaaccagcagtag

SEQ ID NO: 25070 - DNA, 426 bp, Artificial Sequence
  derived and/or modified sequence
atgcggggccgggagctgcccctggtgctgctggccctggtgctgtgcctcgccccccggggtcgggcagtccccctgcccgccggcggcggcaccgtcctcacaaagatgtaccctaggggtaaccattgggccgttggacacctgatgggcaaaaaatcgactggagaatctagctcggtgagcgagcgcggctccctgaaacagcaattgagagaatatattcggtgggaggaagcagcccggaaccttctgggcctgatagaggccaaagagaaccggaaccatcagccaccacagcccaaggctctggggaatcagcagcccagctgggactctgaggattcttctaactttaaagatgtgggcagcaaagggaagggaagccagagggaaggccgaaatccccagctgaatcagcagtag

SEQ ID NO: 25071 - DNA, 426 bp, Artificial Sequence
  derived and/or modified sequence
atgcgcggacgcgagctgcccctcgtcctactggctctggtcctgtgcctggcaccccgaggaagagccgtgcctctacccgctggcggaggaaccgttctgaccaagatgtatcctcgaggcaaccactgggctgtgggacacctaatgggaaagaagagcacgggcgagtcaagcagcgtttcggagcgcggttctctgaaacagcagttaagggagtacattcgatgggaagaggcagccagaaaccttctgggcctgatcgaggcaaaggaaaacaggaaccatcaacccccacaaccaaaggccctcggaaatcagcagccatcttgggacagcgaggactcctcaaattttaaggacgtgggatcaaagggaaagggatctcagcgggaaggtagaaacccccagctcaaccagcagtag

SEQ ID NO: 25072 - DNA, 426 bp, Artificial Sequence
  derived and/or modified sequence
atgagaggcagagagctgcccctggtgctgctggccctggtgctgtgcctggcccccagaggcagagccgtgcccctgcccgccggcggcggcaccgtgctgaccaagatgtaccccagaggcaaccactgggccgtgggccacctgatgggcaagaagagcaccggcgagagcagcagcgtgagcgagagaggcagcctgaagcagcagctgagagagtacatcagatgggaggaggccgccagaaacctgctgggcctgatcgaggccaaggagaacagaaaccaccagcccccccagcccaaggccctgggcaaccagcagcccagctgggacagcgaggacagcagcaacttcaaggacgtgggcagcaagggcaagggcagccagagagagggcagaaacccccagctgaaccagcagtag

SEQ ID NO: 25073 - protein, 138 aa, Artificial Sequence
  derived and/or modified sequence
MRGRELPLVLLALVLCLAPRGRAVPLPAGGGTVLTKMYPRGNHWAVGHLMGKKSTGESSSVSERGSLKQQLREYIRWEEAARNLLGLIEAKENRNHQPPQPKALGNQQPSWDSEDSSNFKDLVDSLLQVLNVKEGTPS

SEQ ID NO: 25074 - DNA, 417 bp, Artificial Sequence
  derived and/or modified sequence
atgaggggaagagagctgccactggtgctacttgcccttgtgctgtgtctcgcacctcgtggacgggccgtgcccctccctgccggaggaggcacagtacttaccaagatgtatccaagaggaaatcattgggccgtgggacatctgatgggaaagaagtccacaggtgaaagttcctccgtctcagagcgaggatccttgaaacaacagcttagggagtacatcagatgggaggaagcggctcgcaacctgttgggacttatcgaggcaaaggaaaaccgcaatcatcagcctccacaacctaaagccctgggaaaccagcaaccaagctgggactctgaggactcgagcaactttaaggacctggtggatagtctgttacaggtgctgaacgtcaaggaaggcactccctcatag

SEQ ID NO: 25075 - DNA, 417 bp, Artificial Sequence
  derived and/or modified sequence
atgcgcggccgtgagctcccgctggtcctgctggcgctggtcctctgcctggcgccccgggggcgagcggtcccgctgcctgcgggcggagggaccgtgctgaccaagatgtacccgcgcggcaaccactgggcggtggggcacttaatggggaaaaagagcacaggggagtcttcttctgtttctgagagagggagcctgaagcagcagctgagagagtacatcaggtgggaagaagctgcaaggaatttgctgggtctcatagaagcaaaggagaacagaaaccaccagccacctcaacccaaggccctgggcaatcagcagccttcgtgggattcagaggatagcagcaacttcaaagatttggtagactctctgctccaggttctcaacgtgaaggaaggaacccccagctga

SEQ ID NO: 25076 - DNA, 417 bp, Artificial Sequence
  derived and/or modified sequence
atgaggggccgggagctgcccctggtgctgctggccctggtgctgtgcctggccccccggggccgggctgtgcccctgcctgctgggggcggcaccgtgctgaccaagatgtacccccggggcaaccactgggccgtgggccacctgatgggcaagaagagcactggagagagcagctctgtgtctgagcggggcagcctgaagcagcagctgcgggagtacatccgctgggaggaggccgccaggaacctgctgggcctcatcgaggccaaggagaacagaaaccaccagcccccccagcccaaggccctgggcaaccagcagcccagctgggacagcgaggacagcagcaacttcaaggacctggtggacagcctgctgcaggtgctgaatgtgaaggagggcacccccagctag

SEQ ID NO: 25077 - DNA, 417 bp, Artificial Sequence
  derived and/or modified sequence
atgcggggccgggagctgcccctggtgctgctggccctggtgctgtgcttggcccccaggggacgggcagtccccctgccagctggaggggggaccgtcctaaccaaaatgtaccccagaggtaaccattgggcagtgggccacctaatgggcaaaaaaagtaccggagaatcttccagcgtttcagaacgagggtccttgaaacagcaactgcgggaatacattaggtgggaagaggcagcccggaacttgctcggcttgatcgaagccaaggaaaacagaaatcaccagccaccacagcctaaggccctcggaaatcagcaaccctcctgggattcggaagattcctcgaacttcaaagatttggtagatagtctgctccaagtattaaatgtgaaagagggtacaccctcgtag

SEQ ID NO: 25078 - DNA, 417 bp, Artificial Sequence
  derived and/or modified sequence
atgcgtggcagggaacttccacttgtgcttctcgcactggttctgtgtttggctccaagaggcagggctgtcccgttgccagctggaggcggtacagtcttaactaagatgtaccccagaggcaaccattgggccgtgggccacctgatgggcaaaaagtctacaggagagagttcttcagtttctgaacgaggatctctgaaacagcagctccgagagtatatcaggtgggaagaggccgcacgcaatttactggggctcatcgaagccaaggaaaatcgcaaccaccagccccctcagcctaaggcccttggcaaccagcagccgtcgtgggactcagaagattccagcaacttcaaagacctcgtggactctctcttgcaggtgcttaatgtgaaggagggtactccaagctag

SEQ ID NO: 25079 - DNA, 417 bp, Artificial Sequence
  derived and/or modified sequence
atgagaggcagagagctgcccctggtgctgctggccctggtgctgtgcctggcccccagaggcagagccgtgcccctgcccgccggcggcggcaccgtgctgaccaagatgtaccccagaggcaaccactgggccgtgggccacctgatgggcaagaagagcaccggcgagagcagcagcgtgagcgagagaggcagcctgaagcagcagctgagagagtacatcagatgggaggaggccgccagaaacctgctgggcctgatcgaggccaaggagaacagaaaccaccagcccccccagcccaaggccctgggcaaccagcagcccagctgggacagcgaggacagcagcaacttcaaggacctggtggacagcctgctgcaggtgctgaacgtgaaggagggcacccccagctag

SEQ ID NO: 25080 - protein, 220 aa, Artificial Sequence
  derived and/or modified sequence
MVKISFQPAVAGIKGDKADKASASAPAPASATEILLTPARLARDNFFRCGVLYEDSLSSQVRTQMELEEDVKIYLDENYERINVPVPQFGGGDPADIIHDFQRGLTAYHDISLDKCYVIELNTTIVLPPRNFWELLMNVKRGTYLPQTYIIQEEMVVTEHVSDKEALGSFIYHLCNGKDTYRLRRRATRRRINKRGAKNCNAIRHFENTFVVETLICGVV

SEQ ID NO: 25081 - DNA, 663 bp, Artificial Sequence
  derived and/or modified sequence
atggtcaagatcagcttccagccagcagtcgccggaatcaagggcgataaagccgataaggcttcagcatcagcacccgctccagcttcagcaaccgagattctcctgacgccggcgaggctggcccgggacaattttttccggtgtggagtcctgtatgaggacagtctctcttcgcaggtgcgcacccagatggaactggaggaggatgttaagatctaccttgatgagaactacgagcgcatcaacgtgcctgtcccgcagttcggcggaggtgatcccgctgacatcatccacgatttccagaggggtctgaccgcataccacgatatctctttggacaaatgttatgtgattgaactgaatactaccattgtcctgccgccgcgcaatttctgggaactcctgatgaatgtgaaaagaggcacttacctcccacagacgtatatcatacaggaggaaatggtggttactgagcatgtttctgacaaggaggctctggggtcattcatctaccatctgtgtaatggaaaggatacatacaggctgagacgtagggctacacgcaggagaatcaacaagcgaggagctaagaattgcaacgccattaggcatttcgaaaacacctttgtggtagaaacactaatctgtggagttgtctag

SEQ ID NO: 25082 - DNA, 1889 bp, Artificial Sequence
  derived and/or modified sequence
agagctcggagcggcggaggcagagaccgaggctgcaccggcagaggctgcggggcggacgcgcgggccggcgcagccatggtgaagattagcttccagcccgccgtggctggcatcaagggcgacaaggctgacaaggcgtcggcgtcggcccctgcgccggcctcggccaccgagatcctgctgacgccggctaggctggcccgagataacttcttccgctgtggtgtgctgtatgaggactccctgtcctcccaggtccggactcagatggagctggaagaggatgtgaaaatctacctcgacgagaactacgagcgcatcaacgtgcctgtgccccagtttggcggcggtgaccctgcagacatcatccatgacttccagcggggtctgactgcgtaccatgatatctccctggacaagtgctatgtcatcgaactcaacaccaccattgtgctgccccctcgcaacttctgggagctcctcatgaacgtgaagagggggacctacctgccgcagacgtacatcatccaggaggagatggtggtcacggagcatgtcagtgacaaggaggccctggggtccttcatctaccacctgtgcaacgggaaagacacctaccggctccggcgccgggcaacgcggaggcggatcaacaagcgtggggccaagaactgcaatgccatccgccacttcgagaacaccttcgtggtggagacgctcatctgcggggtggtgtgaggccctcctcccccagaaccccctgccgtgttcctcttttcttctttccggctgctctctggccctcctccttccccctgcttagcttgtactttggacgcgtttctatagaggtgacatgtctctccattcctctccaaccctgcccacctccctgtaccagagctgtgatctctcggtggggggcccatctctgctgacctgggtgtggcggagggagaggcgatgctgcaaagtgttttctgtgtcccactgtcttgaagctgggcctgccaaagcctgggcccacagctgcaccggcagcccaaggggaaggaccggttgggggagccgggcatgtgaggccctgggcaaggggatggggctgtgggggcggggcggcatgggcttcagaagtatctgcacaattagaaaagtcctcagaagctttttcttggagggtacactttcttcactgtccctattcctagacctggggcttgagctgaggatgggacgatgtgcccagggagggacccaccagagcacaagagaaggtggctacctgggggtgtcccagggactctgtcagtgccttcagcccaccagcaggagcttggagtttggggagtggggatgagtccgtcaagcacaactgttctctgagtggaaccaaagaagcaaggagctaggacccccagtcctgccccccaggagcacaagcagggtcccctcagtcaaggcagtgggatgggcggctgaggaacggggcaggcaaggtcactgctcagtcacgtccacgggggacgagccgtgggttctgctgagtaggtggagctcattgctttctccaagcttggaactgttttgaaagataacacagagggaaagggagagccacctggtacttgtccaccctgcctcctctgttctgaaattccatccccctcagcttaggggaatgcacctttttccctttccttctcacttttgcatgtttttactgatcattcgatatgctaaccgttctcagccctgagccttggagaggagggctgtaacgccttcagtcagtctctggggatgaaactcttaaatgctttgtatattttctcaattagatctcttttcagaagtgtctatagaacaataaaaatcttttacttctg

SEQ ID NO: 25083 - DNA, 663 bp, Artificial Sequence
  derived and/or modified sequence
atggtgaagatctccttccagcctgctgtggccggcatcaagggggacaaggctgacaaggccagcgccagcgccccagccccagccagcgccacagagatcctgctgaccccagcccggctggcccgggacaacttcttccgctgtggggtgctgtatgaggacagcctgagcagccaggtgaggacccagatggagctggaggaggatgtgaagatctacctggatgaaaattatgagcgcatcaacgtgcctgtgccccagtttggaggaggagaccctgctgacatcatccatgacttccagaggggcctgacagcctaccatgacatcagcctggacaagtgctacgtgattgagctgaacaccaccatcgtgctgccccccaggaacttctgggagctgctgatgaatgtgaagaggggcacctacctgccccagacctacatcatccaggaggagatggtggtgacagagcacgtgtctgacaaggaggccctgggcagcttcatctaccacctgtgcaatggcaaggacacctaccgcctgcggcggcgggccacccggcggcgcatcaacaagagaggagccaagaactgcaatgccatccgccactttgagaacacctttgtggtggagaccctcatctgtggggtggtgtag

SEQ ID NO: 25084 - DNA, 663 bp, Artificial Sequence
  derived and/or modified sequence
atggtgaagatcagcttccagcccgccgtggccggcatcaagggcgataaagccgacaaagccagtgcctcagctcccgccccggcgtccgcaactgagatcctcttgacccctgctcgccttgcgcgggacaatttttttcgatgtggagtactgtatgaggacagcctgagcagccaggtacgtacccagatggagctagaagaggacgttaagatctatctcgatgagaactatgaacgcattaatgtacccgttcctcagtttggtggaggagaccctgcagatataattcatgacttccagcgtggattgacagcttaccatgacatttccctcgacaaatgttatgttatcgaacttaacactaccatcgtactgcccccccgaaatttctgggaactgttaatgaacgtgaagagggggacatatctccctcaaacctacattattcaggaagaaatggtggtgacagaacatgtaagcgataaggaggccttaggcagctttatctaccacttgtgtaacggaaaagacacttacagacttcgtcgtagagcaactagacggaggattaataaaagaggcgctaagaactgcaacgcgattagacactttgaaaacaccttcgtggtagaaaccctgatctgcggggttgtgtag

SEQ ID NO: 25085 - DNA, 663 bp, Artificial Sequence
  derived and/or modified sequence
atggtcaaaatatcctttcaacccgcagttgctgggatcaagggcgacaaggccgataaagcctccgcttcagctcctgccccagctagtgccacagaaattctcctaacccccgctcggctcgcaagggataactttttcagatgtggcgttctgtatgaggattccctgtcaagccaggttcggacccagatggagctggaagaggacgttaaaatctatctagatgagaactacgaaaggatcaatgtgccagtcccacaattcggcggaggggaccccgcagatatcatccatgatttccaaagaggcctcaccgcctaccacgatatatcactagacaagtgttacgtgatcgagctgaacaccacgatagtactccccccaagaaacttctgggaattgctgatgaacgtaaagagagggacctatctgccacagacttacatcattcaggaggagatggtagtgactgagcacgtctcagacaaagaggctctcgggtcattcatctatcatctgtgcaacggtaaagacacataccgtctgagacgcagggccactcgccgtagaataaacaagaggggagccaaaaactgcaacgctatcaggcatttcgagaatacctttgtggtggagacgctcatctgcggcgtggtatag

SEQ ID NO: 25086 - DNA, 663 bp, Artificial Sequence
  derived and/or modified sequence
atggtgaagatcagcttccagcccgccgtggccggcatcaagggcgacaaggccgacaaggccagcgccagcgcccccgcccccgccagcgccaccgagatcctgctgacccccgccagactggccagagacaacttcttcagatgcggcgtgctgtacgaggacagcctgagcagccaggtgagaacccagatggagctggaggaggacgtgaagatctacctggacgagaactacgagagaatcaacgtgcccgtgccccagttcggcggcggcgaccccgccgacatcatccacgacttccagagaggcctgaccgcctaccacgacatcagcctggacaagtgctacgtgatcgagctgaacaccaccatcgtgctgccccccagaaacttctgggagctgctgatgaacgtgaagagaggcacctacctgccccagacctacatcatccaggaggagatggtggtgaccgagcacgtgagcgacaaggaggccctgggcagcttcatctaccacctgtgcaacggcaaggacacctacagactgagaagaagagccaccagaagaagaatcaacaagagaggcgccaagaactgcaacgccatcagacacttcgagaacaccttcgtggtggagaccctgatctgcggcgtggtgtag

SEQ ID NO: 25087 - protein, 429 aa, Artificial Sequence
  derived and/or modified sequence
MRSLGANMAAALRAAGVLLRDPLASSSWRVCQPWRWKSGAAAAAVTTETAQHAQGAKPQVQPQKRYESNIRKPKTGILMLNMGGPETLGDVHDFLLRLFLDRDLMTLPIQNKLAPFIAKRRTPKIQEQYRRIGGGSPIKIWTSKQGEGMVKLLDELSPNTAPHKYYIGFRYVHPLTEEAIEEMERDGLERAIAFTQYPQYSCSTTGSSLNAIYRYYNQVGRKPTMKWSTIDRWPTHHLLIQCFADHILKELDHFPLEKRSEVVILFSAHSLPMSVVNRGDPYPQEVSATVQKVMERLEYCNPYRLVWQSKVGPMPWLGPQTDESIKGLCERGRKNILLVPIAFTSDHIETLYELDIEYSQVLAKECGVENIRRAESLNGNPLFSKALADLVHSHIQSNELCSKQLTLSCPLCVNPVCRETKSFFTSQQL

SEQ ID NO: 25088 - DNA, 2526 bp, Artificial Sequence
  derived and/or modified sequence
aggagcccggactcgggccgaggctgcccaggcaatgcgttcactcggcgcaaacatggctgcggccctgcgcgccgcgggcgtcctgctccgcgatccgctggcatccagcagctggagggtctgtcagccatggaggtggaagtcaggtgcagctgcagcggccgtcaccacagaaacagcccagcatgcccagggtgcaaaacctcaagttcaaccgcagaagaggtatgagtctaacatcaggaagccgaaaactggaatattaatgctaaacatgggaggccctgaaactcttggagatgttcacgacttccttctgagactcttcttggaccgagacctcatgacacttcctattcagaataagctggcaccattcatcgccaaacgccgaacccccaagattcaagagcagtaccgcaggattggaggcggatcccccatcaagatatggacttccaagcagggagagggcatggtgaagctgctggatgaattgtcccccaacacagcccctcacaaatactatattggatttcggtacgtccatcctttaacagaagaagcaattgaagagatggagagagatggcctagaaagggctattgctttcacacagtatccacagtacagctgctccaccacaggcagcagcttaaatgccatttacagatactataatcaagtgggacggaagcccacgatgaagtggagcactattgacaggtggcccacacatcacctcctcatccagtgctttgcagatcatattctaaaggaactggaccattttccacttgagaagagaagcgaggtggtcattctgttttctgctcactcactgcccatgtctgtggtcaacagaggcgacccatatcctcaggaggtaagcgccactgtccaaaaagtcatggaaaggctggagtactgcaacccctaccgactggtgtggcaatccaaggttggtccaatgccctggttgggtcctcaaacagacgaatctatcaaagggctttgtgagagggggaggaagaatatcctcttggttccgatagcatttaccagtgaccatattgaaacgctgtatgagctggacatcgagtactctcaagttttagccaaggagtgtggagttgaaaacatcagaagagctgagtctcttaatggaaatccattgttctctaaggccctggccgacttggtgcattcacacatccagtcaaacgagctgtgttccaagcagctgaccctgagctgtccgctctgtgtcaatcctgtctgcagggagactaaatccttcttcaccagccagcagctgtgacccccgccggtggaccccgtggcgttaggcaaatgcccaacctccagatacctccgatgtggagagggtgttatttagagatcaaggaaggaagtcatccttccttgatatatatacagcctttgggtacaaattgtgtggtttcttgaggattggactcttgatggatttctatttttatataactatacagtaagcatttgtattttctctctctaggtataagttactagtttggaatgtccatcaggacctttaataaatgagttaaaaatttgtcttatgagacacacctatttaagtacagattttggctttattgcccaaaaccctcctgaaagggtacggagagtcccctctgtgggctggcagtgtgaatgagatctgtttagtctcgtgcatatagttgctgttttttaaatgaacacagttgagtatttgaagtgaatttgaaaaagaaatgttacttaatctttccctaagcccatgggttacagaatgctagggaggcaatttggttacctgcaatggctgcttttgccagcgaggccaccattcattggtcatcttggtatttgtgtgtgaatctcactttcctcaatgtaaaaaggaatcaagtatggatttcagaggtgctcttagattccccatacacccaagggtaataaacgtgtacaagtacagtgttcatgatacgtgccttggtgggagtccgtggtgccacagggaaggggctcccactgcttctggtctccagggacagtgctgctggaaaggctagtgatgagcttcaccctggagctcctcccgggaccttgcaagcctctccatccagcatcttctctatcttagttgaatgccttctttctgaacatttgttttaagaattattttataaagtcaacaatactttgcttgaattctttcttaatttacgattttttattataaaaatgtatagtgatacaatgggacatgtgaagaatacagaaaagtaaccactttaatgcaataactgttatcataatattgtatttcgtggtagtcctttcctgtagatatttttaatgccatttaatgccattgtcaccttggatttatgagtgaaaagtgtttctaaaaatatagaaataatgtcagatcagagtctgatcttctatgtttgtatttaaatggattaaaagatccccggtggttccatg

SEQ ID NO: 25089 - DNA, 1290 bp, Artificial Sequence
  derived and/or modified sequence
atgcgcagcctcggtgccaatatggcggccgcgcttcgggctgctggcgtcctgcttcgagaccccctcgccagttcctcttggagagtgtgccaaccttggagatggaagagcggtgctgctgctgccgcagtgactacagaaactgcgcagcatgcacagggagctaagcctcaagtacagcctcagaaacggtatgaaagcaacattcgaaagcccaagacagggattttgatgcttaatatgggcggtcctgagaccctgggcgacgttcatgattttcttctgcggttatttcttgacagagacctgatgacactgcccatccagaataagctggcaccatttattgcaaagcggaggactcctaagatccaagagcagtacagaaggattggaggtggtagcccgatcaagatctggaccagcaagcaaggagagggaatggtcaaactcctggacgagctgagcccgaacacggcaccccataagtactacattgggtttcgctatgtccatcccctcaccgaagaggccatcgaagagatggagcgagacgggctggagagggcaatcgcatttacacagtacccacagtactcctgcagtaccaccggctcttctttgaacgccatataccgttactacaatcaggtcggaagaaagcccacaatgaagtggagcactatcgatcgatggcccacccaccaccttctgattcaatgctttgcggatcacattctaaaggagcttgaccacttcccgctcgagaagcgcagcgaggtggtgatcctctttagtgctcactccctgcctatgagcgtggtgaacaggggcgatccataccctcaagaagtgtccgcaacggtgcagaaggtgatggagaggctcgagtactgcaatccctaccgccttgtatggcagagcaaggtgggccctatgccttggctgggcccccagacggatgagtctattaagggcctatgcgagagggggcgaaaaaatatactgttggtgccgattgctttcaccagcgatcacatcgaaaccctgtatgaactggacatagagtactcacaagtgctcgcgaaagaatgtggggtggagaatatccgacgcgcggagtcactcaacgggaaccccctattttctaaggctctggcggatctcgttcacagccacattcagtcaaatgaattatgtagtaagcagctgaccctgtcctgcccattatgcgtgaaccccgtgtgtagggaaaccaaaagcttttttacttcccagcagctgtag

SEQ ID NO: 25090 - DNA, 1290 bp, Artificial Sequence
  derived and/or modified sequence
atgaggagcctgggcgccaacatggccgccgccctgcgggctgctggggtgctgctgcgggaccccctggccagcagctcctggagggtgtgccagccctggcgctggaagagcggggctgctgctgctgctgtgaccacagaaacagcccagcacgcccagggcgccaagccccaggtgcagccccagaagagatatgagagcaacatcaggaagcccaagacaggcatcctgatgctgaacatgggcggccctgagaccctgggagatgtgcatgacttcctgctgcggctcttcctggaccgggacctgatgaccctgcccatccagaacaagctggcccccttcatcgccaagaggaggacccccaagatccaggagcagtaccgccgcatcggcggcggcagccccatcaagatctggaccagcaagcagggcgagggcatggtgaagctgctggatgagctgagccccaacacagccccccacaagtactacatcggcttccgctacgtgcaccccctgacagaggaggccatcgaggagatggagagagatggcctggagcgggccatcgccttcacccagtacccccagtacagctgcagcaccaccggcagcagcctgaatgccatctaccgctactacaaccaggtgggcaggaagcccaccatgaagtggagcaccatcgaccgctggcccacccaccacctgctgatccagtgctttgctgaccacatcctgaaggagctggaccacttccccctggagaagaggtctgaggtggtgatcctcttcagcgcccacagcctgcccatgtctgtggtgaacagaggagacccctacccccaggaggtgtctgccaccgtgcagaaggtgatggagcggctggagtactgcaacccctaccgcctggtgtggcagagcaaggtgggccccatgccctggctgggcccccagacagatgagagcatcaagggcctgtgtgagcggggcaggaagaacatcctgctggtgcccatcgccttcaccagtgaccacatcgagaccctgtatgagctggacatcgagtacagccaggtgctggccaaggaatgtggggtggagaacatccggcgggcagagagcctgaatggaaaccccctcttcagcaaggccctggccgacctggtgcacagccacatccagagcaatgagctgtgcagcaagcagctgaccctgagctgccccctgtgtgtgaaccctgtgtgccgggagaccaagagcttcttcaccagccagcagctgtag

SEQ ID NO: 25091 - DNA, 1290 bp, Artificial Sequence
  derived and/or modified sequence
atgcggagcctgggcgccaacatggccgccgccctgcgggccgccggcgttctgttgagagaccccctcgccagttcttcatggcgcgtctgccagccttggaggtggaaatcaggagctgccgcagccgcagttaccacagagactgcacagcacgcccagggcgctaagccgcaggttcagccacagaaacgctacgagagcaatatcaggaagccaaaaacaggcattttaatgctcaatatggggggacccgaaacactaggagatgtacacgatttcttacttaggctctttctggatagggatttgatgaccctgccaatccaaaacaaactggccccattcatagcaaagagaaggacacccaagattcaagagcaataccggcgaatcgggggcggttctcctatcaaaatatggacgtctaaacagggtgaggggatggtcaagctcctggatgagctgtcacctaacacggctccgcataagtattatatcggattccgctatgtgcacccactcacagaggaagccattgaagagatggaacgagacggactggagagagccattgcattcacacagtaccctcagtattcttgctccaccaccggttcctcattgaacgctatttaccgctattacaatcaggtgggaagaaagcccacaatgaagtggagcacaatcgaccgatggccaactcatcacctcttgatccagtgcttcgcagaccacattctgaaggaactagaccatttcccgctggagaaacgtagcgaggttgtcatcctcttctccgcgcattcattgcctatgtccgtggttaaccggggagatccgtacccgcaagaagtctctgccacagtgcaaaaggtaatggaacgccttgagtattgcaacccataccgcctggtctggcagtcaaaagtgggtcctatgccctggcttgggccccagacggacgagagcatcaaaggcctctgcgagcgcggccgcaagaacatccttctcgtaccgatcgccttcactagcgaccatatcgagaccctgtacgagctggacattgaatactcccaggtcctcgcaaaagagtgcggagtcgaaaatattcggcgcgccgaatccttgaatgggaacccattattcagcaaagcattagcagaccttgtccatagtcatatccagagtaacgaactatgttccaaacagttgacgctgtcatgcccactatgcgttaaccctgtctgcagagaaacaaagagcttcttcactagccagcagctctag

SEQ ID NO: 25092 - DNA, 1290 bp, Artificial Sequence
  derived and/or modified sequence
atgagaagtcttggagcgaacatggctgctgctttaagggcagcaggggtgctcttacgcgatcctttggctagtagctcatggcgggtatgtcagccgtggcgttggaagtccggggctgcagctgcagcagtaaccaccgagacagcccaacatgctcagggagccaaaccacaggtgcagcctcagaagcgatacgaatccaatatcaggaaacccaagactggaatccttatgctcaacatgggaggtccagagaccctgggcgatgtccacgactttctcctgaggctttttctggaccgagacctcatgaccttacctattcagaacaagctggctcccttcatagctaagcgccgtacccccaaaattcaggaacagtaccggaggattggcggtggctctcctatcaaaatctggacatcgaagcaaggcgagggaatggtgaagttgctcgatgagttgtcacccaatacggcaccacacaagtattatattgggttcaggtacgtccacccgcttaccgaggaagctattgaggagatggaacgggacggcctcgaacgggcaatagcttttacgcaatacccgcagtacagttgtagcacaactggaagcagcctgaacgctatctatcgatactacaaccaggtggggcgtaagcctacaatgaagtggagcacaattgatcggtggccgactcaccaccttctcatccagtgctttgctgaccacatcctgaaagaattggatcactttcccctggagaagcggtccgaggtcgtcatcctgttttctgcgcattcgctgcctatgtccgtggtgaataggggcgatccctacccacaagaggtatcagctactgtgcagaaggtgatggagcgcttagaatattgtaacccataccggctcgtttggcagtctaaagtgggaccgatgccatggctcgggcctcagaccgatgagtcgattaagggattatgcgagagaggtcgaaagaatatcctactggtgcccattgccttcacaagcgatcatatagagacattgtacgagctggatatcgagtactcccaagtcctggcaaaggaatgcggcgtagagaatattaggcgggctgagtccctgaacggcaatcccctattctccaaggccttggctgatttggttcactcccatattcagtccaatgagctatgcagtaaacagcttacactaagttgtcctctttgcgtaaatccggtatgtcgcgagacaaaatctttcttcactagccagcagctctag

SEQ ID NO: 25093 - DNA, 1290 bp, Artificial Sequence
  derived and/or modified sequence
atgagaagcctgggcgccaacatggccgccgccctgagagccgccggcgtgctgctgagagaccccctggccagcagcagctggagagtgtgccagccctggagatggaagagcggcgccgccgccgccgccgtgaccaccgagaccgcccagcacgcccagggcgccaagccccaggtgcagccccagaagagatacgagagcaacatcagaaagcccaagaccggcatcctgatgctgaacatgggcggccccgagaccctgggcgacgtgcacgacttcctgctgagactgttcctggacagagacctgatgaccctgcccatccagaacaagctggcccccttcatcgccaagagaagaacccccaagatccaggagcagtacagaagaatcggcggcggcagccccatcaagatctggaccagcaagcagggcgagggcatggtgaagctgctggacgagctgagccccaacaccgccccccacaagtactacatcggcttcagatacgtgcaccccctgaccgaggaggccatcgaggagatggagagagacggcctggagagagccatcgccttcacccagtacccccagtacagctgcagcaccaccggcagcagcctgaacgccatctacagatactacaaccaggtgggcagaaagcccaccatgaagtggagcaccatcgacagatggcccacccaccacctgctgatccagtgcttcgccgaccacatcctgaaggagctggaccacttccccctggagaagagaagcgaggtggtgatcctgttcagcgcccacagcctgcccatgagcgtggtgaacagaggcgacccctacccccaggaggtgagcgccaccgtgcagaaggtgatggagagactggagtactgcaacccctacagactggtgtggcagagcaaggtgggccccatgccctggctgggcccccagaccgacgagagcatcaagggcctgtgcgagagaggcagaaagaacatcctgctggtgcccatcgccttcaccagcgaccacatcgagaccctgtacgagctggacatcgagtacagccaggtgctggccaaggagtgcggcgtggagaacatcagaagagccgagagcctgaacggcaaccccctgttcagcaaggccctggccgacctggtgcacagccacatccagagcaacgagctgtgcagcaagcagctgaccctgagctgccccctgtgcgtgaaccccgtgtgcagagagaccaagagcttcttcaccagccagcagctgtag

SEQ ID NO: 25094 - protein, 230 aa, Artificial Sequence
  derived and/or modified sequence
MVKISFQPAVAGIKGDKADKASASAPAPASATEILLTPAREEQPPQHRSKRGGSVGGVCYLSMGMVVLLMGLVFASVYIYRYFFLAQLARDNFFRCGVLYEDSLSSQVRTQMELEEDVKIYLDENYERINVPVPQFGGGDPADIIHDFQRRGTYLPQTYIIQEEMVVTEHVSDKEALGSFIYHLCNGKDTYRLRRRATRRRINKRGAKNCNAIRHFENTFVVETLICGVV

SEQ ID NO: 25095 - DNA, 693 bp, Artificial Sequence
  derived and/or modified sequence
atggtgaaaatttcattccaaccagctgtggctggcatcaaaggagataaagccgacaaggcgagcgcctctgccccagcaccagcttctgccacggagatcctgctgacgcccgctagagaagagcagccaccccagcaccggagtaagcgcggaggctctgtagggggcgtatgttacctgagtatgggcatggtggtgctactcatggggctggtgtttgctagcgtctatatttaccgatatttcttcctggctcaattggcacgggacaactttttccggtgcggagtgctgtatgaagattcacttagcagtcaggttcgcacgcagatggaactggaggaggatgtgaagatctatctggatgagaattatgagcgaataaatgtgccagtgccccagtttgggggcggtgatcctgctgatatcattcatgactttcagaggcgtggtacgtatctcccacagacctacatcattcaggaagagatggtcgttacagagcatgtgtccgataaggaagccctcggtagtttcatatatcacctttgcaacgggaaagacacttaccgtcttaggcgaagagctacccggcggaggattaacaagcggggtgccaaaaattgcaatgcaatcagacacttcgagaacacatttgtggttgagacgcttatatgtggcgtggtctag

SEQ ID NO: 25096 - DNA, 1888 bp, Artificial Sequence
  derived and/or modified sequence
ctgcaccggcagaggctgcggggcggacgcgcgggccggcgcagccatggtgaagattagcttccagcccgccgtggctggcatcaagggcgacaaggctgacaaggcgtcggcgtcggcccctgcgccggcctcggccaccgagatcctgctgacgccggctagggaggagcagcccccacaacatcgatccaagagggggggctcagtgggcggcgtgtgctacctgtcgatgggcatggtcgtgctgctcatgggcctcgtgttcgcctctgtctacatctacagatacttcttccttgcgcagctggcccgagataacttcttccgctgtggtgtgctgtatgaggactccctgtcctcccaggtccggactcagatggagctggaagaggatgtgaaaatctacctcgacgagaactacgagcgcatcaacgtgcctgtgccccagtttggcggcggtgaccctgcagacatcatccatgacttccagcggagggggacctacctgccgcagacgtacatcatccaggaggagatggtggtcacggagcatgtcagtgacaaggaggccctggggtccttcatctaccacctgtgcaacgggaaagacacctaccggctccggcgccgggcaacgcggaggcggatcaacaagcgtggggccaagaactgcaatgccatccgccacttcgagaacaccttcgtggtggagacgctcatctgcggggtggtgtgaggccctcctcccccagaaccccctgccgtgttcctcttttcttctttccggctgctctctggccctcctccttccccctgcttagcttgtactttggacgcgtttctatagaggtgacatgtctctccattcctctccaaccctgcccacctccctgtaccagagctgtgatctctcggtggggggcccatctctgctgacctgggtgtggcggagggagaggcgatgctgcaaagtgttttctgtgtcccactgtcttgaagctgggcctgccaaagcctgggcccacagctgcaccggcagcccaaggggaaggaccggttgggggagccgggcatgtgaggccctgggcaaggggatggggctgtgggggcggggcggcatgggcttcagaagtatctgcacaattagaaaagtcctcagaagctttttcttggagggtacactttcttcactgtccctattcctagacctggggcttgagctgaggatgggacgatgtgcccagggagggacccaccagagcacaagagaaggtggctacctgggggtgtcccagggactctgtcagtgccttcagcccaccagcaggagcttggagtttggggagtggggatgagtccgtcaagcacaactgttctctgagtggaaccaaagaagcaaggagctaggacccccagtcctgccccccaggagcacaagcagggtcccctcagtcaaggcagtgggatgggcggctgaggaacggggcaggcaaggtcactgctcagtcacgtccacgggggacgagccgtgggttctgctgagtaggtggagctcattgctttctccaagcttggaactgttttgaaagataacacagagggaaagggagagccacctggtacttgtccaccctgcctcctctgttctgaaattccatccccctcagcttaggggaatgcacctttttccctttccttctcacttttgcatgtttttactgatcattcgatatgctaaccgttctcagccctgagccttggagaggagggctgtaacgccttcagtcagtctctggggatgaaactcttaaatgctttgtatattttctcaattagatctcttttcagaagtgtctatagaacaataaaaatcttttacttctga

SEQ ID NO: 25097 - DNA, 693 bp, Artificial Sequence
  derived and/or modified sequence
atggtgaagatctccttccagcctgctgtggccggcatcaagggggacaaggctgacaaggccagcgccagcgccccagccccagccagcgccacagagatcctgctgaccccagcccgggaggagcagcccccccagcacaggagcaagaggggcggctctgtgggcggcgtgtgctacctgtccatgggcatggtggtgctgctgatgggcctggtgtttgcctctgtgtacatctaccgctacttcttcctggcccagctggcccgggacaacttcttccgctgtggggtgctgtatgaggacagcctgagcagccaggtgaggacccagatggagctggaggaggatgtgaagatctacctggatgagaactatgaaagaatcaacgtgcctgtgccccagtttggaggaggagaccctgctgacatcatccatgacttccagaggcggggcacctacctgccccagacctacatcatccaggaggagatggtggtgacagagcacgtgtctgacaaggaggccctgggcagcttcatctaccacctgtgcaatggcaaggacacctaccgcctgcggcggcgggccacccggcggcgcatcaacaagagaggagccaagaactgcaatgccatccgccactttgagaacacctttgtggtggagaccctcatctgtggggtggtgtag

SEQ ID NO: 25098 - DNA, 693 bp, Artificial Sequence
  derived and/or modified sequence
atggtgaagatcagcttccagcccgccgtggccggcatcaagggcgacaaggctgacaaggcatctgcctctgcacctgctcctgctagcgctactgaaattctgctgaccccagcccgagaggagcagcctccccaacaccggtctaagagaggtggctcagtcggaggggtgtgctacctctcaatgggaatggtagtgctgctgatgggtctggtgttcgcgtccgtatacatttatcgctatttttttctcgcacagctagctcgggataatttttttaggtgtggcgttttatatgaggactcgctgagctctcaggtgagaacgcagatggagttggaggaagatgttaagatttatttagacgagaactacgagaggataaacgtgcccgtgccacagttcggtgggggtgatccagcagacattatccatgatttccaacgtcgcggcacatatctccctcagacatatatcattcaggaagagatggtcgtgaccgagcatgtgtcagacaaagaggcactgggaagtttcatatatcatctgtgtaacggaaaagatacgtatcggctgcgcaggcgggctacacggcggcgaattaataagcgtggagccaagaattgtaacgcaattcggcacttcgagaatacattcgtggtggagacactgatatgcggggtggtatag

SEQ ID NO: 25099 - DNA, 693 bp, Artificial Sequence
  derived and/or modified sequence
atggtgaaaatcagtttccagcctgctgtcgcaggcattaagggggataaggctgacaaggctagtgcctccgctccagctcctgcctcagccactgaaatccttctcacacctgcacgggaagaacagccccctcagcatagatcaaaacggggaggctctgtgggtggagtgtgctacctgtctatgggtatggtcgtgttgctgatggggctggtgtttgcgtcggtgtacatttacaggtacttcttcctcgcacagctggctcgtgataactttttccggtgtggcgtactgtacgaagactcactcagttcccaggtccggacccagatggaactcgaggaagacgtgaaaatctacctggatgaaaactacgaacggattaacgttcctgtgccacagttcggaggaggtgaccccgcagacatcatccacgactttcaacggcgaggaacgtacttgccacagacctacattatccaagaagaaatggtagtaacagaacacgtgtccgacaaggaagccctcggctcatttatctatcacctgtgcaacgggaaggatacctacaggttgagacgcagggccacaagaagacggattaataagcgcggtgccaaaaattgtaatgctattagacacttcgagaacacctttgtggtggagacactaatttgcggcgtcgtatag

SEQ ID NO: 25100 - DNA, 693 bp, Artificial Sequence
  derived and/or modified sequence
atggtgaagatcagcttccagcccgccgtggccggcatcaagggcgacaaggccgacaaggccagcgccagcgcccccgcccccgccagcgccaccgagatcctgctgacccccgccagagaggagcagcccccccagcacagaagcaagagaggcggcagcgtgggcggcgtgtgctacctgagcatgggcatggtggtgctgctgatgggcctggtgttcgccagcgtgtacatctacagatacttcttcctggcccagctggccagagacaacttcttcagatgcggcgtgctgtacgaggacagcctgagcagccaggtgagaacccagatggagctggaggaggacgtgaagatctacctggacgagaactacgagagaatcaacgtgcccgtgccccagttcggcggcggcgaccccgccgacatcatccacgacttccagagaagaggcacctacctgccccagacctacatcatccaggaggagatggtggtgaccgagcacgtgagcgacaaggaggccctgggcagcttcatctaccacctgtgcaacggcaaggacacctacagactgagaagaagagccaccagaagaagaatcaacaagagaggcgccaagaactgcaacgccatcagacacttcgagaacaccttcgtggtggagaccctgatctgcggcgtggtgtag

SEQ ID NO: 25101 - protein, 429 aa, Artificial Sequence
  derived and/or modified sequence
MSGVRPPIMNGPLHPRPLVALLDGRDCTVEMPILKDVATVAFCDAQSTQEIHEKVLNEAVGALMYHTITLTREDLEKFKALRIIVRIGSGFDNIDIKSAGDLGIAVCNVPAASVEETADSTLCHILNLYRRATWLHQALREGTRVQSVEQIREVASGAARIRGETLGIIGLGRVGQAVALRAKAFGFNVLFYDPYLSDGVERALGLQRVSTLQDLLFHSDCVTLHCGLNEHNHHLINDFTVKQMRQGAFLVNTARGGLVDEKALAQALKEGRIRGAALDVHESEPFSFSQGPLKDAPNLICTPHAAWYSEQASIEMREEAAREIRRAITGRIPDSLKNCVNKDHLTAATHWASMDPAVVHPELNGAAYRYPPGVVGVAPTGIPAAVEGIVPSAMSLSHGLPPVAHPPHAPSPGQTVKPEADRDHASDQL

SEQ ID NO: 25102 - DNA, 1290 bp, Artificial Sequence
  derived and/or modified sequence
atgagcggcgtgagaccccccatcatgaacggccccctgcaccccagacccctggtggccctgctggacggcagagactgcaccgtggagatgcccatcctgaaggacgtggccaccgtggccttctgcgacgcccagagcacccaggagatccacgagaaggtgctgaacgaggccgtgggcgccctgatgtaccacaccatcaccctgaccagagaggacctggagaagttcaaggccctgagaatcatcgtgagaatcggcagcggcttcgacaacatcgacatcaagagcgccggcgacctgggcatcgccgtgtgcaacgtgcccgccgccagcgtggaggagaccgccgacagcaccctgtgccacatcctgaacctgtacagaagagccacctggctgcaccaggccctgagagagggcaccagagtgcagagcgtggagcagatcagagaggtggccagcggcgccgccagaatcagaggcgagaccctgggcatcatcggcctgggcagagtgggccaggccgtggccctgagagccaaggccttcggcttcaacgtgctgttctacgacccctacctgagcgacggcgtggagagagccctgggcctgcagagagtgagcaccctgcaggacctgctgttccacagcgactgcgtgaccctgcactgcggcctgaacgagcacaaccaccacctgatcaacgacttcaccgtgaagcagatgagacagggcgccttcctggtgaacaccgccagaggcggcctggtggacgagaaggccctggcccaggccctgaaggagggcagaatcagaggcgccgccctggacgtgcacgagagcgagcccttcagcttcagccagggccccctgaaggacgcccccaacctgatctgcaccccccacgccgcctggtacagcgagcaggccagcatcgagatgagagaggaggccgccagagagatcagaagagccatcaccggcagaatccccgacagcctgaagaactgcgtgaacaaggaccacctgaccgccgccacccactgggccagcatggaccccgccgtggtgcaccccgagctgaacggcgccgcctacagatacccccccggcgtggtgggcgtggcccccaccggcatccccgccgccgtggagggcatcgtgcccagcgccatgagcctgagccacggcctgccccccgtggcccaccccccccacgcccccagccccggccagaccgtgaagcccgaggccgacagagaccacgccagcgaccagctgtag

SEQ ID NO: 25103 - DNA, 438 bp, Artificial Sequence
  derived and/or modified sequence
atgagcggcgtgagaccccccatcatgaacggccccctgcaccccagacccctggtggccctgctggacggcagagactgcaccgtggagatgcccatcctgaaggacgtggccaccgtggccttctgcgacgcccagagcacccaggagatccacgagaaggtgctgaacgaggccgtgggcgccctgatgtaccacaccatcaccctgaccagagaggacctggagaagttcaaggccctgagaatcatcgtgagaatcggcagcggcttcgacaacatcgacatcaagagcgccggcgacctgggcatcgccgtgtgcaacgtgcccgccgccagcgtggaggagaccgccgacagcaccctgtgccacatcctgaacctgtacagaagagccacctggctgcaccaggccctgagagagggcaccagagtgtag

SEQ ID NO: 25104 - DNA, 516 bp, Artificial Sequence
  derived and/or modified sequence
atgagcggcgtgagaccccccatcatgaacggccccctgcaccccagacccctggtggccctgctggacggcagagactgcaccgtggagatgcccatcctgaaggacgtggccaccgtggccttctgcgacgcccagagcacccaggagatccacgagaaggtgctgaacgaggccgtgggcgccctgatgtaccacaccatcaccctgaccagagaggacctggagaagttcaaggccctgagaatcatcgtgagaatcggcagcggcttcgacaacatcgacatcaagagcgccggcgacctgggcatcgccgtgtgcaacgtgcccgccgccagcgtggaggagaccgccgacagcaccctgtgccacatcctgaacctgtacagaagagccacctggctgcaccaggccctgagagagggcaccagagtgcagagcgtggagcagatcagagaggtggccagcggcgccgccagaatcagaggcgagaccctgggcatcatcggcctgtag

SEQ ID NO: 25105 - DNA, 2467 bp, Artificial Sequence
  derived and/or modified sequence
gcgcggctcagcggcgcggcggagactcggcacggcggcggccaggcgcaggcgggcgggcggagcagcggacggcgccgaggccgccccacgcgccgggctcgcggcggcgcagcgcgccggagtggtcggggcccgcggccgctcgcgcctctcgatgggcagctcgcacttgctcaacaagggcctgccgcttgtaagactttgaccccgacgcaggcttcagtgattgccgcggatcagaagcctgagcactttggctcgagacaattaaggacgtgggatgaggctccgagacaggacgcggttctgcctggggatcctgaagataaaaagctttgaaaagtcgaattcatggtcgtggaagctgagcccatattaagagatgtcaggcgtccgacctccgatcatgaacgggcccctgcacccgcggcccctggtggcattgctggatggccgggactgcacagtggagatgcccatcctgaaggacgtggccactgtggccttctgcgacgcgcagtccacgcaggagatccatgagaaggtcctgaacgaggctgtgggggccctgatgtaccacaccatcactctcaccagggaggacctggagaagttcaaagccctccgcatcatcgtccggattggcagtggttttgacaacatcgacatcaagtcggccggggatttaggcattgccgtctgcaacgtgcccgcggcgtctgtggaggagacggccgactcgacgctgtgccacatcctgaacctgtaccggcgggccacctggctgcaccaggcgctgcgggagggcacacgagtccagagcgtcgagcagatccgcgaggtggcgtccggcgctgccaggatccgcggggagaccttgggcatcatcggacttggtcgcgtggggcaggcagtggcgctgcgggccaaggccttcggcttcaacgtgctcttctacgacccttacttgtcggatggcgtggagcgggcgctggggctgcagcgtgtcagcaccctgcaggacctgctcttccacagcgactgcgtgaccctgcactgcggcctcaacgagcacaaccaccacctcatcaacgacttcaccgtcaagcagatgagacaaggggccttcctggtgaacacagcccggggtggcctggtggatgagaaggcgctggcccaggccctgaaggagggccggatccgcggcgcggccctggatgtgcacgagtcggaacccttcagctttagccagggccctctgaaggatgcacccaacctcatctgcaccccccatgctgcatggtacagcgagcaggcatccatcgagatgcgagaggaggcggcacgggagatccgcagagccatcacaggccggatcccagacagcctgaagaactgtgtcaacaaggaccatctgacagccgccacccactgggccagcatggaccccgccgtcgtgcaccctgagctcaatggggctgcctataggtaccctccgggcgtggtgggcgtggcccccactggcatcccagctgctgtggaaggtatcgtccccagcgccatgtccctgtcccacggcctgccccctgtggcccacccgccccacgccccttctcctggccaaaccgtcaagcccgaggcggatagagaccacgccagtgaccagttgtagcccgggaggagctctccagcctcggcgcctgggcagagggcccggaaaccctcggaccagagtgtgtggaggaggcatctgtgtggtggccctggcactgcagagactggtccgggctgtcaggaggcgggagggggcagcgctgggcctcgtgtcgcttgtcgtcgtccgtcctgtgggcgctctgccctgtgtccttcgcgttcctcgttaagcagaagaagtcagtagttattctcccatgaacgttcttgtctgtgtacagtttttagaacattacaaaggatctgtttgcttagctgtcaacaaaaagaaaacctgaaggagcatttggaagtcaatttgaggtttttttttttgttttttttttttttgtatgttggaacgtgccccagaatgaggcagttggcaaacttctcaggacaatgaatccttcccgtttttctttttatgccacacagtgcattgttttttctacctgcttgtcttatttttagaataatttagaaaaacaaaacaaaggctgtttttcctaattttggcatgaacccccccttgttccaaatgaagacggcatcacgaagcagctccaaaaggaaaagcttgggcggtgcccagcgtgcccgctgcccatcgacgtctgtcctggggacgtggagggtggcagcgtccccgcctgcaccagtgccgtcctgctgatgtggtaggctagcaatattttggttaaaatcatgtttgtgactgtaaccatttgtatgaattattttaaagaaataaaaatcctggaaagag

SEQ ID NO: 25106 - DNA, 704 bp, Artificial Sequence
  derived and/or modified sequence
gggaagggtcttgcgcatgcgcgggccgctgcgtgtgcgcgagcgccgcagtctgctctccccgcccgcggcccgtgcagtaagactttgaccccgacgcaggcttcagtgattgccgcggatcagaagcctgagcactttggctcgagacaattaaggacgtgggatgaggctccgagacaggacgcggttctgcctggggatcctgaagataaaaagctttgaaaagtcgaattcatggtcgtggaagctgagcccatattaagagatgtcaggcgtccgacctccgatcatgaacgggcccctgcacccgcggcccctggtggcattgctggatggccgggactgcacagtggagatgcccatcctgaaggacgtggccactgtggccttctgcgacgcgcagtccacgcaggagatccatgagaaggtcctgaacgaggctgtgggggccctgatgtaccacaccatcactctcaccagggaggacctggagaagttcaaagccctccgcatcatcgtccggattggcagtggttttgacaacatcgacatcaagtcggccggggatttaggcattgccgtctgcaacgtgcccgcggcgtctgtggaggagacggccgactcgacgctgtgccacatcctgaacctgtaccggcgggccacctggctgcaccaggcgctgcgggagggcacacgagtcc

SEQ ID NO: 25107 - DNA, 985 bp, Artificial Sequence
  derived and/or modified sequence
ggactttcgggccctcccgggtcggggcttcaccggtagcaggcagggctttgatattaatgcttaaagggaaagcagagctgagctgtcaggacgttggttagctacaaaccctactcttgttaaaagagaaatggggtcggggaaggggttctccagccctgaacttcccgggccgggcaggacgcggtccctccaggagtcggggctcccccgcctggggacgcactggggcaggcgcgcttctcctctcggggtcccatgtgccgccggctctcggacgtaagactttgaccccgacgcaggcttcagtgattgccgcggatcagaagcctgagcactttggctcgagacaattaaggacgtgggatgaggctccgagacaggacgcggttctgcctggggatcctgaagataaaaagctttgaaaagtcgaattcatggtcgtggaagctgagcccatattaagagatgtcaggcgtccgacctccgatcatgaacgggcccctgcacccgcggcccctggtggcattgctggatggccgggactgcacagtggagatgcccatcctgaaggacgtggccactgtggccttctgcgacgcgcagtccacgcaggagatccatgagaaggtcctgaacgaggctgtgggggccctgatgtaccacaccatcactctcaccagggaggacctggagaagttcaaagccctccgcatcatcgtccggattggcagtggttttgacaacatcgacatcaagtcggccggggatttaggcattgccgtctgcaacgtgcccgcggcgtctgtggaggagacggccgactcgacgctgtgccacatcctgaacctgtaccggcgggccacctggctgcaccaggcgctgcgggagggcacacgagtccagagcgtcgagcagatccgcgaggtggcgtccggcgctgccaggatccgcggggagaccttgggcatcatcggacttg

SEQ ID NO: 25108 - DNA, 1290 bp, Artificial Sequence
  derived and/or modified sequence
atgtctggtgtgcgaccaccgatcatgaacgggcctcttcatccacgccctcttgtcgcactgttggacggaagggactgcaccgtagagatgcccatcctgaaggatgtggcgacggttgctttttgtgacgctcagtccactcaggagatccatgaaaaggtgctcaacgaggctgtgggggccctgatgtatcatactataaccctgacccgagaagatctcgagaaatttaaggctctccggataattgtgcggattgggtccggcttcgataacattgacatcaaaagcgccggagatctggggatcgccgtgtgcaacgtccccgctgccagcgtcgaggagactgctgattctactctttgccatatactgaacttatatcgtcgcgcaacatggcttcatcaggcattgagggaaggcacccgcgtgcagagcgtggagcagattagagaggtggcctctggcgctgcgaggatccgtggtgagacactggggatcatcggcctgggaagggtggggcaggctgtcgcgttaagagccaaggccttcgggtttaatgtgctgttctacgatccctacctatccgatggcgtggaacgcgccctcggtctccagagagtgagcactctgcaggatttacttttccacagtgactgcgtaacactgcactgcggcttgaatgaacacaatcaccatctcattaatgatttcactgtaaagcagatgcggcagggtgccttcctggttaatacagcccggggtgggctggtcgatgagaaagcactggcacaggcactcaaagagggaaggattcgaggagccgctcttgacgtccacgaatccgagccattctctttctcacaaggcccattaaaggacgcccccaatttgatttgcaccccgcacgctgcatggtacagtgagcaggccagtattgagatgcgcgaggaggctgctagggaaatacggcgggcgataaccggcagaattccggacagtttgaagaattgcgtgaataaggaccacctgactgcagccacacactgggcttctatggatccagccgtggtccaccctgagttgaacggtgccgcctaccggtatcctccgggcgtagtgggtgtggcacccaccgggatccccgccgcagtcgaagggatcgtcccttcggcaatgtctttgtctcatggtctccccccagtagcccaccctccacatgccccttcaccaggacagactgtgaaaccggaggcagacagggaccacgcgtcggaccagttgtag

SEQ ID NO: 25109 - DNA, 438 bp, Artificial Sequence
  derived and/or modified sequence
atgtcaggcgttcgccctcccattatgaatggacccctgcaccccagaccattggttgctctcctcgatggcagagactgtacagtcgagatgccaatcctcaaagacgtggcaacagtcgccttttgcgatgctcagagtacccaggaaatacatgagaaggtccttaacgaagctgttggcgccttgatgtaccacactatcaccctaacgcgagaggatctggaaaaattcaaggctcttaggatcattgtccggatcggcagcgggttcgataatattgacataaagtcggctggagatcttggtatcgccgtgtgtaatgtacccgcagcgtctgtcgaggagaccgcagacagcacactttgtcatatcctcaacctgtatcggcgcgctacatggttgcaccaggcccttcgggagggcactcgcgtttag

SEQ ID NO: 25110 - DNA, 516 bp, Artificial Sequence
  derived and/or modified sequence
atgtctggagtccggcctcctattatgaacggccctctgcaccctcggcccctggtcgcactgctagatggtcgcgattgtacagtggaaatgcctatcctgaaggatgtggccaccgtggccttctgtgatgctcagtctacccaggaaatccatgaaaaagtgctgaacgaggctgtgggagcactgatgtaccataccatcacgctcacccgtgaggacctggaaaagtttaaggcactaagaattattgtgcgtattggttccggttttgataacatcgatattaagagcgcaggggatctgggcattgcggtttgtaatgtccccgctgcatcagtcgaggagacggcggattcaaccctctgtcatattctgaatttgtaccgcagagcgacttggctccaccaggcgctccgagagggaactcgagttcagagtgttgaacagatccgcgaagtggcatcaggcgcggcacgtattaggggtgagacccttggcattatcgggctctag

SEQ ID NO: 25111 - DNA, 1290 bp, Artificial Sequence
  derived and/or modified sequence
atgtctggagtgcggccccccatcatgaatggccccctgcacccccggcccctggtggccctgctggatggccgggactgcaccgtggagatgcccatcctgaaggatgtggccaccgtggccttctgtgatgcccagagcacccaggagatccacgagaaggtgctgaatgaagctgtgggcgccctgatgtaccacaccatcaccctgacccgggaggacctggagaagttcaaggccctgcgcatcatcgtgagaattggcagcggctttgacaacatcgacatcaagtctgctggggacctgggcattgctgtgtgcaatgtgcctgctgcctctgtggaggagacagctgacagcaccctgtgccacatcctgaacctgtaccgccgggccacctggctgcaccaggccctgcgggagggcaccagggtgcagagcgtggagcagatccgggaggtggccagcggggccgcccgcatccggggggagaccctgggcatcatcggcctgggccgggtgggccaggccgtggccctgcgggccaaggccttcggcttcaacgtgctcttctatgacccctacctgagtgatggagtggagcgggccctgggcctgcagagggtgtccaccctgcaggacctgctcttccacagcgactgtgtgaccctgcactgcggcctgaatgagcacaaccaccacctgatcaatgacttcaccgtgaagcagatgaggcagggcgccttcctggtgaacacagcccggggcggcctggtggatgagaaggccctggcccaggccctgaaggagggccgcatccggggggccgccctggatgtgcatgaaagtgagcccttctccttcagccagggccccctgaaggatgcccccaacctgatctgcacccctcatgctgcctggtacagcgagcaggccagcattgagatgagggaggaggccgcccgggagatcagaagagccatcaccggccgcatcccagacagcctgaagaactgtgtgaacaaggaccacctgacagctgccacccactgggcctccatggaccctgctgtggtgcaccctgagctgaatggagctgcctaccgctacccacctggggtggtgggcgtggcccccaccggcatcccagctgctgtggagggcatcgtgcccagcgccatgagcctgagccacggcctgccccctgtggcccaccccccccacgcccccagccctggccagacagtgaagccagaggccgaccgggaccacgccagtgaccagctgtag

SEQ ID NO: 25112 - DNA, 438 bp, Artificial Sequence
  derived and/or modified sequence
atgtctggagtgcggccccccatcatgaatggccccctgcacccccggcccctggtggccctgctggatggccgggactgcaccgtggagatgcccatcctgaaggatgtggccaccgtggccttctgtgatgcccagagcacccaggagatccacgagaaggtgctgaatgaagctgtgggcgccctgatgtaccacaccatcaccctgacccgggaggacctggagaagttcaaggccctgcgcatcatcgtgagaattggcagcggctttgacaacatcgacatcaagtctgctggggacctgggcattgctgtgtgcaatgtgcctgctgcctctgtggaggagacagctgacagcaccctgtgccacatcctgaacctgtaccgccgggccacctggctgcaccaggccctgcgggagggcaccagggtgtag

SEQ ID NO: 25113 - DNA, 516 bp, Artificial Sequence
  derived and/or modified sequence
atgtctggagtgcggccccccatcatgaatggccccctgcacccccggcccctggtggccctgctggatggccgggactgcaccgtggagatgcccatcctgaaggatgtggccaccgtggccttctgtgatgcccagagcacccaggagatccacgagaaggtgctgaatgaagctgtgggcgccctgatgtaccacaccatcaccctgacccgggaggacctggagaagttcaaggccctgcgcatcatcgtgagaattggcagcggctttgacaacatcgacatcaagtctgctggggacctgggcattgctgtgtgcaatgtgcctgctgcctctgtggaggagacagctgacagcaccctgtgccacatcctgaacctgtaccgccgggccacctggctgcaccaggccctgcgggagggcaccagggtgcagagcgtggagcagatccgggaggtggccagcggggccgcccgcatccggggggagaccctgggcatcatcggcctgtag

SEQ ID NO: 25114 - DNA, 1290 bp, Artificial Sequence
  derived and/or modified sequence
atgagcggcgtgcggccccccatcatgaacggccccctgcacccccgacctctggtggccctgctagacgggagggattgcactgttgagatgccaattctcaaggacgtggccacagtcgctttttgtgacgcacagagcactcaggagatccacgagaaagttcttaacgaggctgtaggggctttaatgtatcacactattacactgacacgcgaagatctcgaaaaattcaaagccctcaggattattgtgcgtatcggcagcggctttgacaacattgatatcaagtcagccggggacctggggattgcagtctgtaacgtgcctgccgcttccgtggaggagaccgcagattcgaccctctgtcatatcttaaacctctaccggagggccacatggctccaccaggctctgcgggagggaaccagggtccagtccgtagagcagatccgagaggtggcctcaggagccgccagaattcggggggaaactctagggatcatcgggctgggccgggtgggacaggctgtagccctgagggctaaggcctttggttttaatgtgctattctatgatccctacctgtcagatggcgttgagagggctctgggcttgcaacgcgtgtctaccctccaggacttactattccattctgactgcgtgactctccactgtggccttaacgagcacaatcatcacttgataaacgacttcacagtgaagcagatgcgacagggagccttcctggtgaacactgcccgcggaggcctggtggatgaaaaggcccttgctcaagccctgaaggagggcagaattcgaggagccgcacttgatgtgcatgagagcgagcctttcagcttctcccagggcccgctgaaggatgcccctaatttgatctgtactccccacgcagcgtggtatagcgagcaggcctccatcgagatgagggaggaggccgcaagggaaatacgaagggctatcactggccggatcccagattccttgaagaattgtgtaaataaggatcatctgaccgctgctacccattgggcgagtatggaccctgcagttgttcaccctgagcttaatggtgcagcatatcggtaccctcccggcgtcgtgggtgtcgcaccaaccggtatccccgccgctgtggagggtatcgtccctagcgccatgtctctgagccacgggctgcctccagttgcacacccgccgcatgctccatctccaggccaaaccgttaaacccgaggcagatagagatcacgcgtctgaccaattgtag

SEQ ID NO: 25115 - DNA, 438 bp, Artificial Sequence
  derived and/or modified sequence
atgagcggcgtgcggccccccatcatgaacggccccctgcacccccgcccattggtcgcgctcctagatggacgagattgcaccgttgagatgcccatcctaaaggatgtagccaccgtggccttctgcgacgcacaaagcactcaggagatccatgaaaaggtcttgaacgaagcagtgggcgcgttgatgtatcacaccatcaccctgacccgagaggacttggagaagttcaaagcattacgcattatcgtcaggatcggctctggatttgataatatagacattaaaagcgctggcgaccttggcattgcagtgtgcaatgtgccagcagcctcagtcgaggagacagcagactctacactatgtcacatccttaacttatacagaagggctacctggctgcaccaagctctgagggagggaactagagtttag

SEQ ID NO: 25116 - DNA, 516 bp, Artificial Sequence
  derived and/or modified sequence
atgagcggcgtgcggccccccatcatgaacggccccctgcaccccagacccctggtagcactgctggatggacgtgattgcacagtggagatgcccatcttgaaggatgtggctaccgtcgctttttgcgacgcacagtctacacaggagattcacgagaaggttcttaacgaagctgtgggagccttgatgtatcatactatcaccctgacccgcgaggacttagagaagttcaaggcccttaggataatagtaaggattggatctggctttgataacattgatattaaatccgccggcgatctgggtatcgcagtctgtaacgtccccgccgcttcggtggaagagacggctgattccaccctgtgtcacatccttaatctttacaggagagccacttggttacaccaggctctccgcgaaggcacaagagtgcagagcgtggaacaaattcgtgaggttgccagcggggcggccaggattcgtggagagacactcggtatcatagggctctag

SEQ ID NO: 25117 - DNA, 1290 bp, Artificial Sequence
  derived and/or modified sequence
atgagcggggtgaggccccctatcatgaacggccctttgcatccgagaccactggtagcactgctggatggcagggactgtaccgtcgagatgccaattttaaaggatgtggccacagttgccttctgcgatgctcagagtacgcaagagatacatgagaaggtgttgaatgaagccgtcggcgcactgatgtaccataccattacactcacaagggaagatctggagaaattcaaggccttacgaatcattgtgcggatcggttcagggtttgataatattgatattaaatcagctggggacttaggtattgccgtctgtaatgtacctgccgcttccgtggaagagaccgccgattctactttgtgccacatactgaacttatacagaagggctacctggctccaccaggcactgcgcgagggaaccagagttcagagcgttgaacagatacgggaggtggctagcggtgctgcccgtatcagaggagagaccctggggattatcggacttggccgtgttggccaggcagttgcactacgcgctaaggcctttgggtttaacgtccttttttacgacccgtatctgtctgacggcgtcgagagagctctcggcctgcagagagtatcaactctacaagaccttcttttccattcggattgcgtcacactgcactgcggacttaatgagcacaatcaccacctgatcaatgacttcacagtgaagcaaatgcgccaaggggcttttttagttaacactgcgagaggcggacttgtcgatgagaaggcgctcgctcaagctctgaaagaaggaagaatcaggggggctgcattggacgtgcacgagtctgagccattttcgttcagtcagggacctttaaaggacgcgccaaatctgatttgcactcctcacgcagcatggtattcagagcaggcctcaattgagatgcgtgaggaggctgccagggagattcgacgcgctatcaccgggaggattcctgattcccttaagaactgtgttaacaaagaccacttgaccgccgcaacacattgggcgtccatggatcctgccgtggtccatcctgagttgaatggagcagcgtaccgttatccgcctggggttgtcggcgtagctcctactggtatcccggcagccgtcgaaggtatcgtgccatcagctatgagcctgtcccacggactacccccagtggcacatccaccacacgcaccaagccccggtcaaacagtgaagccggaggccgatagggaccatgcttccgaccaactctag

SEQ ID NO: 25118 - DNA, 438 bp, Artificial Sequence
  derived and/or modified sequence
atgagcggagtgcgcccaccaatcatgaatgggcctctgcatcctcgtcctctggttgcactactggatggcagggactgcaccgtagaaatgcccattctgaaagatgtcgcaactgtggcgttttgtgacgcacagagtacacaggagatccatgagaaggtgttaaatgaagcggttggcgcattgatgtaccacacaatcacgctgacgcgcgaagacctcgagaaattcaaagctctcagaattattgtgcgcattggcagtggctttgataatattgacatcaaaagcgccggagacctgggaatcgctgtctgcaacgtgccagccgcaagtgtggaggaaacagcagactccacactttgtcacattctcaacctctacagacgcgctacttggctccaccaggcccttcgggagggaactcgtgtttag

SEQ ID NO: 25119 - DNA, 516 bp, Artificial Sequence
  derived and/or modified sequence
atgtccggagtgcgtcccccaattatgaacggccctctgcatcccagaccgctggtggcgcttcttgatggcagggactgtacagtggagatgccaattttgaaggatgtagcaacagtggccttttgcgacgcccagtctactcaggaaatacacgaaaaagttctcaacgaagccgtcggggctttgatgtatcatacaataacactgacgcgtgaagacttggagaagttcaaagctctgcgaatcatagtccgcatcggcagcggcttcgacaacattgacatcaagtcagccggagacctggggattgcggtgtgtaacgtcccagccgcatctgtcgaggagacagcagactctactctgtgtcacattctgaatctgtatcgcagagccacctggttgcatcaggctcttcgggaggggactagggtgcagtccgtggagcagattcgggaagttgcttcaggcgcagcgagaatacggggagagactctgggcattatcggcttatag

SEQ ID NO: 25120 - protein, 131 aa, Artificial Sequence
  derived and/or modified sequence
MCFPKVLSDDMKKLKARMHQAIERFYDKMQNAESGRGQVMSSLAELEDDFKEGYLETVAAYYEEQHPELTPLLEKERDGLRCRGNRSPVPDVEDPATEEPGESFCDKSYGAPRGDKEELTPQKCSEPQSSK

SEQ ID NO: 25121 - DNA, 396 bp, Artificial Sequence
  derived and/or modified sequence
atgtgcttccccaaggtgctgagcgacgacatgaagaagctgaaggccagaatgcaccaggccatcgagagattctacgacaagatgcagaacgccgagagcggcagaggccaggtgatgagcagcctggccgagctggaggacgacttcaaggagggctacctggagaccgtggccgcctactacgaggagcagcaccccgagctgacccccctgctggagaaggagagagacggcctgagatgcagaggcaacagaagccccgtgcccgacgtggaggaccccgccaccgaggagcccggcgagagcttctgcgacaagagctacggcgcccccagaggcgacaaggaggagctgaccccccagaagtgcagcgagccccagagcagcaagtag

SEQ ID NO: 25122 - DNA, 396 bp, Artificial Sequence
  derived and/or modified sequence
atgtgcttcccaaaagtgctctctgatgatatgaagaagctcaaggctaggatgcatcaggccattgagcgcttctatgataagatgcagaatgccgaaagcgggcggggccaggtcatgtcttcactggctgaactggaggacgattttaaggaaggctacctcgagacggtggccgcctattatgaggagcaacacccagagttaacaccactgctggaaaaagagcgcgacggactgaggtgtagaggaaaccgttctccagtgcctgatgtggaggaccccgcaaccgaagaaccaggcgagtccttttgtgataagtcttacggggcccccagaggagataaggaggaactgactccccagaaatgcagtgagcctcagagctcaaaatag

SEQ ID NO: 25123 - DNA, 396 bp, Artificial Sequence
  derived and/or modified sequence
atgtgctttccaaaggtactctccgatgacatgaagaagctgaaagctcgtatgcatcaggccatcgaaaggttctatgacaaaatgcagaatgccgaatccggtcgaggccaggttatgagctcacttgccgagctggaggatgactttaaagagggatacctggagaccgtggcagcctattacgaggagcagcacccggagttaaccccgttgctggaaaaagagagagacggtctcaggtgtcgtggaaataggtccccagtgcctgatgtggaggaccctgcaaccgaggaacccggcgagtcattctgcgacaaaagctacggtgcacccaggggtgataaggaggaactgacgccccaaaagtgttctgagccgcaatcttctaagtag

SEQ ID NO: 25124 - DNA, 396 bp, Artificial Sequence
  derived and/or modified sequence
atgtgcttccccaaggtgctgtccgacgatatgaaaaagctgaaggcgcggatgcaccaggccatcgagcgattttatgacaagatgcagaacgccgaaagcggcaggggccaagtaatgtcttccctggccgaactagaagacgattttaaagaggggtacttggagacagtagctgcttactacgaggaacagcacccagagcttacacctctgcttgaaaaggaacgcgatggactgcggtgtcgaggcaaccgctcccccgtccccgacgtcgaggacccagcaacagaggaacctggagaaagcttttgcgacaaatcctatggggctccccgcggggacaaggaagaactgacccctcaaaaatgcagcgaaccccagtcaagcaagtag

SEQ ID NO: 25125 - DNA, 396 bp, Artificial Sequence
  derived and/or modified sequence
atgtgcttccccaaggtgctgagtgatgacatgaagaagctgaaggccaggatgcaccaggccatcgagcgcttctatgacaagatgcagaatgctgagagcggccggggccaggtgatgagcagcctggccgagctggaggatgacttcaaggagggctacctggagaccgtggccgcctactatgaggagcagcaccctgagctgacccccctgctggagaaggagagagatggcctgcgctgccggggcaacagaagccctgtgcctgatgtggaggaccctgccacagaggagcccggggagagcttctgtgacaagagctatggagcccccaggggggacaaggaggagctgaccccccagaagtgcagcgagccccagagcagcaagtag

SEQ ID NO: 25126 - DNA, 396 bp, Artificial Sequence
  derived and/or modified sequence
atgtgcttccccaaggtgctgagcgacgacatgaagaagctgaaggcgcggatgcaccaggccatagagcgattctacgataagatgcagaacgctgagtccgggaggggtcaggttatgtcctcactggcagagctcgaggatgacttcaaggaaggctacctggaaactgtggccgcttattacgaagagcaacatccggaactgactcctctgctcgaaaaggaaagggatgggctcagatgtcgtggaaataggtccccagtccccgacgtggaagatcctgcaactgaggagcctggagaatcattttgcgataagtcttacggcgcccctcgtggagacaaagaagagttaacgcctcagaagtgctcagaaccacagtcatctaagtag

SEQ ID NO: 25127 - DNA, 396 bp, Artificial Sequence
  derived and/or modified sequence
atgtgcttccccaaggtgctgagcgacgacatgaagaagctgaaggccagaatgcatcaggcaatagagcggttttacgataaaatgcaaaacgcagaatcaggacgcgggcaggtcatgagtagcctggctgagttggaagatgactttaaagaaggctacctcgagaccgttgccgcgtattacgaagagcaacatcccgagctgacccccctgctggagaaggagagggacggcctgcgatgtcgtggcaatcggtccccggtcccggacgtcgaggatcccgccactgaggaacctggtgaatcattctgcgacaaatcctacggcgcccccagaggagataaggaagagctgacccctcagaagtgctcggaacctcaatcctccaaatag

SEQ ID NO: 25128 - DNA, 396 bp, Artificial Sequence
  derived and/or modified sequence
atgtgcttccccaaggtgctgagcgacgacatgaagaagctgaaggccagaatgcatcaagccatcgagcgtttctatgataagatgcagaacgccgagagtggtcgaggacaggtgatgagttcattagcggaactggaagatgatttcaaagagggatacctggaaacagttgcagcttattacgaggagcagcatcccgaacttacacctctgctggaaaaggagcgcgacggtcttagatgcagagggaaccgtagcccagtgccggatgtggaagaccctgccactgaggaaccgggggagagtttttgcgataagagctacggtgctccacggggcgataaagaagaactcacgccgcagaaatgctcagagccccagtcctccaaatag

SEQ ID NO: 25129 - DNA, 396 bp, Artificial Sequence
  derived and/or modified sequence
atgtgctttcccaaagtcctaagtgacgacatgaagaagctcaaggctcggatgcaccaggcaatcgaacgattctatgacaagatgcaaaatgccgaaagcgggagaggtcaagttatgtcaagtcttgctgagttagaggatgacttcaaggagggctacttggagactgtggctgcctactatgaggagcagcatcccgaactaaccccactcttagagaaagagagggatgggttgcgctgtagggggaatagatcgccagtgcccgacgtcgaggaccctgctacggaagaacctggcgagagtttttgcgataaaagctacggggcacctcggggagataaggaggagttaaccccccagaaatgttcagaacctcagtcaagcaagtag

SEQ ID NO: 25130 - DNA, 396 bp, Artificial Sequence
  derived and/or modified sequence
atgtgtttccctaaggtgcttagtgatgatatgaagaaactgaaggcacgcatgcaccaagctatcgagcgattttatgacaaaatgcagaatgccgaatctggacgcggacaagttatgtcgagtctggctgaattagaagatgactttaaagagggctacctggagacggtcgctgcgtactatgaagagcaacaccctgaactcacacctctgctcgaaaaagaacgggatggcctcagatgcagaggaaaccgatcacccgtacctgatgtggaggaccctgcaacggaggaaccaggggagtcgttttgtgacaagtcctacggtgctccacgcggagataaggaggagctgactccccagaaatgcagcgaaccccagtcatccaagtag

SEQ ID NO: 25131 - DNA, 396 bp, Artificial Sequence
  derived and/or modified sequence
atgtgctttcccaaagtgctttctgacgacatgaaaaagctgaaagcccgtatgcatcaggccatagagagattctacgacaagatgcagaatgctgagagcggaaggggtcaggttatgagttctctggcagagctggaggacgattttaaagaaggctaccttgagactgttgccgcttattacgaggagcagcaccctgagctgactcctctgctggaaaaagaacgagatggactgaggtgtagagggaataggagtcctgtccccgatgtagaggaccccgcaacagaagagccaggggagagtttctgtgataagtcttacggcgctcctcggggagataaggaggagctgacaccgcagaagtgctccgagccacagagtagcaaatag

SEQ ID NO: 25132 - DNA, 789 bp, Artificial Sequence
  derived and/or modified sequence
ctgtcccgagtctggactttccctctgcccctccccactctcaggctggtggggtggggaaagcagcccattcctgggctcagagactcccaccccagctcagagggagcaggggcccagccagggacggaccctcattcctcccagggaccccagacctctgtctctctcgggccttggctccttgaacttttggccgccatgtgcttcccgaaggtcctctctgatgacatgaagaagctgaaggcccgaatgcaccaggccatagaaagattttatgataaaatgcaaaatgcagaatcaggacgtggacaggtgatgtcgagcctggcagagctggaggacgacttcaaagagggctacctggagacagtggcggcttattatgaggagcagcacccagagctcactcctctacttgaaaaagaaagagatggattacggtgccgaggcaacagatcccctgtcccggatgttgaggatcccgcaaccgaggagcctggggagagcttttgtgacaagtcctacggagccccacggggggacaaggaggagctgacaccccagaagtgctctgaaccccaatcctcaaaatgaagatactgacaccacctttgccctccccgtcaccgcgcacccaccctgacccctccctcagctgtcctgtgccccgccctctcccgcacactcagtccccctgcctggcgttcctgccgcagctctgacctggtgctgtcgccctggcatcttaataaaacctgcttatacttccctggcaggggagatacc

SEQ ID NO: 25133 - DNA, 654 bp, Artificial Sequence
  derived and/or modified sequence
aggtgactgtctcagtggagctgggtcatctcaggccttggctccttgaacttttggccgccatgtgcttcccgaaggtcctctctgatgacatgaagaagctgaaggcccgaatgcaccaggccatagaaagattttatgataaaatgcaaaatgcagaatcaggacgtggacaggtgatgtcgagcctggcagagctggaggacgacttcaaagagggctacctggagacagtggcggcttattatgaggagcagcacccagagctcactcctctacttgaaaaagaaagagatggattacggtgccgaggcaacagatcccctgtcccggatgttgaggatcccgcaaccgaggagcctggggagagcttttgtgacaagtcctacggagccccacggggggacaaggaggagctgacaccccagaagtgctctgaaccccaatcctcaaaatgaagatactgacaccacctttgccctccccgtcaccgcgcacccaccctgacccctccctcagctgtcctgtgccccgccctctcccgcacactcagtccccctgcctggcgttcctgccgcagctctgacctggtgctgtcgccctggcatcttaataaaacctgcttatacttccctggcaggggagataccatga

SEQ ID NO: 25134 - DNA, 733 bp, Artificial Sequence
  derived and/or modified sequence
gaaagcagcccattcctgggctcagagactcccaccccagctcagagggagcaggggcccagccagggacggaccctcattcctcccagggaccccagacctctgtctctctcggcaggccttggctccttgaacttttggccgccatgtgcttcccgaaggtcctctctgatgacatgaagaagctgaaggcccgaatgcaccaggccatagaaagattttatgataaaatgcaaaatgcagaatcaggacgtggacaggtgatgtcgagcctggcagagctggaggacgacttcaaagagggctacctggagacagtggcggcttattatgaggagcagcacccagagctcactcctctacttgaaaaagaaagagatggattacggtgccgaggcaacagatcccctgtcccggatgttgaggatcccgcaaccgaggagcctggggagagcttttgtgacaagtcctacggagccccacggggggacaaggaggagctgacaccccagaagtgctctgaaccccaatcctcaaaatgaagatactgacaccacctttgccctccccgtcaccgcgcacccaccctgacccctccctcagctgtcctgtgccccgccctctcccgcacactcagtccccctgcctggcgttcctgccgcagctctgacctggtgctgtcgccctggcatcttaataaaacctgcttatacttccctggcaggggagatac

SEQ ID NO: 25135 - protein, 168 aa, Artificial Sequence
  derived and/or modified sequence
MCFPKVLSDDMKKLKARMVMSSLAELEDDFKEGYLETVAAYYEEQHPELTPLLEKERDGLRCRGNRSPVPDVEDPATEEPGESFCDKVMRWFQAMLQRLQTWWHGVLAWVKEKVVALVHAVQALWKQFQSFCCSLSELFMSSFQSYGAPRGDKEELTPQKCSEPQSSK

SEQ ID NO: 25136 - DNA, 507 bp, Artificial Sequence
  derived and/or modified sequence
atgtgcttccccaaggtgctgagcgacgacatgaagaagctgaaggccagaatggtgatgagcagcctggccgagctggaggacgacttcaaggagggctacctggagaccgtggccgcctactacgaggagcagcaccccgagctgacccccctgctggagaaggagagagacggcctgagatgcagaggcaacagaagccccgtgcccgacgtggaggaccccgccaccgaggagcccggcgagagcttctgcgacaaggtgatgagatggttccaggccatgctgcagagactgcagacctggtggcacggcgtgctggcctgggtgaaggagaaggtggtggccctggtgcacgccgtgcaggccctgtggaagcagttccagagcttctgctgcagcctgagcgagctgttcatgagcagcttccagagctacggcgcccccagaggcgacaaggaggagctgaccccccagaagtgcagcgagccccagagcagcaagtag

SEQ ID NO: 25137 - DNA, 507 bp, Artificial Sequence
  derived and/or modified sequence
atgtgctttcctaaggttctcagcgacgatatgaaaaaactgaaggctcgcatggttatgagttcactcgccgagctggaggacgattttaaggaagggtaccttgagactgtcgcagcgtattatgaggaacagcaccccgaacttacgccactccttgaaaaggagcgcgatgggctgcggtgtcggggaaaccgctctcctgtgcccgacgtcgaagatcctgctacagaagaaccgggggaatcattctgcgacaaagtcatgcgctggttccaagcaatgctgcaacggctccagacttggtggcacggagtgctggcgtgggtgaaggagaaggtcgtcgctctcgtccacgccgtgcaggcactgtggaagcagttccagtccttctgttgcagtctgtctgagctctttatgtcatccttccagtcctatggcgcaccgcgaggagacaaagaagagctgacccctcagaagtgctccgagccccagtccagtaaatag

SEQ ID NO: 25138 - DNA, 507 bp, Artificial Sequence
  derived and/or modified sequence
atgtgctttcccaaggtcctgtcagacgatatgaagaaattgaaggcccggatggtcatgtcatctctggctgaacttgaagacgacttcaaggaaggatatctggaaactgtggcggcatattatgaagaacaacatcctgagctaactcctctgctggagaaggagagggatggacttaggtgtcggggcaatcggtctcccgtccctgacgtggaggatcccgcaactgaggaaccaggcgagtcgttctgtgataaggtaatgcggtggttccaggctatgttgcagagacttcaaacatggtggcatggcgttttagcatgggtgaaagaaaaagtcgtagctctagtgcacgctgtccaggccttgtggaaacagttccagtctttttgctgctctctgagtgaattgtttatgtcgtcgtttcaatcatatggcgcacctaggggcgataaggaagagcttactccccaaaaatgctctgagccgcagtcaagcaaatag

SEQ ID NO: 25139 - DNA, 507 bp, Artificial Sequence
  derived and/or modified sequence
atgtgtttccccaaagttctgagcgatgatatgaagaaactaaaagcgagaatggttatgtctagcctggcggagctggaggatgactttaaggaaggctacctggagaccgtggctgcctactacgaggagcagcaccctgaactcacaccactgttagagaaagagcgcgacggtctgcgatgcagaggcaacaggtctccagttccagacgtggaagatccagccaccgaggagcccggtgaatcattctgcgacaaagtcatgagatggttccaggcgatgcttcagaggttacaaacctggtggcacggagtcctggcctgggtcaaggagaaagtggtggccttggtgcacgctgtgcaggcactgtggaagcagtttcagtctttctgttgttcactcagcgagttatttatgtcttctttccaatcatatggcgcgcctcgcggcgacaaggaggagctaactccacagaaatgttccgagccccagagttctaaatag

SEQ ID NO: 25140 - DNA, 507 bp, Artificial Sequence
  derived and/or modified sequence
atgtgcttccccaaggtgctgagtgatgacatgaagaagctgaaggccaggatggtgatgagcagcctggccgagctggaggatgacttcaaggagggctacctggagaccgtggccgcctactatgaggagcagcaccctgagctgacccccctgctggagaaggagagagatggcctgcgctgccggggcaacagaagccctgtgcctgatgtggaggaccctgccacagaggagcccggggagagcttctgtgacaaggtgatgcgctggttccaggccatgctgcagaggctgcagacctggtggcacggcgtgctggcctgggtgaaggagaaggtggtggccctggtgcatgctgtgcaggccctgtggaagcagttccagagcttctgctgcagcctgtctgagctgttcatgagcagcttccagagctatggagcccccaggggggacaaggaggagctgaccccccagaagtgcagcgagccccagagcagcaagtag

SEQ ID NO: 25141 - DNA, 507 bp, Artificial Sequence
  derived and/or modified sequence
atgtgcttccccaaggtgctgagcgacgacatgaagaagctgaaggcccgcatggtgatgtcttccctcgccgagctggaagatgattttaaggaagggtacctggagactgtggccgcctattatgaggaacagcatcccgaactcactcctctactggagaaggaacgcgatggactgagatgcagggggaacaggtctccagttcccgatgttgaggatcccgcgacagaagagcctggagaatcgttttgcgataaagtgatgcgctggtttcaggctatgctccagagacttcagacctggtggcacggggtcttggcgtgggtcaaagagaaggtggtggccctcgttcacgccgtccaagcactatggaagcagttccaaagcttttgctgcagcctctcagaactgtttatgagcagctttcagtcttatggcgctcccaggggggacaaggaggaactgacgccccagaagtgcagcgagcctcagagttccaagtag

SEQ ID NO: 25142 - DNA, 507 bp, Artificial Sequence
  derived and/or modified sequence
atgtgcttccccaaggtgctgagcgacgacatgaagaagctgaaggcacgaatggtgatgtcttctctggccgaattggaggacgactttaaggaaggctacctggagaccgtcgccgcttactatgaggagcagcaccctgaactgacacccttgctcgaaaaggaacgggacggattacgctgccgaggcaacagaagccccgtcccggacgtagaagatccggcaaccgaagagcccggcgaaagtttttgcgataaagttatgcgctggtttcaggccatgctgcagagattacagacctggtggcatggagttctggcatgggtgaaagaaaaggtggtcgcattggttcatgccgtccaggccctgtggaagcagtttcagagtttctgctgctccctgagtgaactgtttatgtccagtttccagtcttacggtgcacccagaggcgataaggaggaattgacaccccagaaatgctcagagccccagagctctaaatag

SEQ ID NO: 25143 - DNA, 507 bp, Artificial Sequence
  derived and/or modified sequence
atgtgcttccccaaggtgctgagcgacgacatgaagaagctgaaggccaggatggttatgagctcactagccgagcttgaggacgattttaaggagggttaccttgaaacagtcgccgcatattacgaggaacaacaccccgaactcacgcctctgcttgaaaaggaacgcgatggactgaggtgccgggggaacagaagcccggtccccgatgtcgaggaccctgcaacggaggaacccggcgagagtttctgcgacaaggtgatgagatggtttcaagccatgctccaaaggttgcagacctggtggcatggggtgctggcgtgggtgaaggaaaaagtcgtcgcccttgtgcacgccgtgcaagccctgtggaagcagttccagagtttttgctgtagcctgagcgaattgtttatgagctctttccaaagctacggggcgccccgcggcgataaggaggaattgaccccacagaagtgctcagaaccccaatcatctaagtag

SEQ ID NO: 25144 - DNA, 507 bp, Artificial Sequence
  derived and/or modified sequence
atgtgtttcccaaaagtgttgagtgacgacatgaagaagctcaaagcacgcatggtcatgtcatcactggccgagctcgaggacgacttcaaggaaggttacttggagaccgttgcagcctactatgaagagcaacaccctgaactgactccactgctcgaaaaggaaagggatggcttaaggtgtaggggcaaccgaagtcccgttcctgacgtggaggaccccgcaaccgaagagccaggcgaatcattttgtgacaaggtcatgcgctggttccaggcaatgctccaacgccttcagacttggtggcatggcgtcctggcctgggtgaaagaaaaggttgttgcgctggttcacgcagtacaagcgctgtggaagcagttccagagtttctgctgcagtctgtccgagctgttcatgtcgagcttccagagctatggagcaccacgcggagacaaggaagaactgactccgcagaaatgttctgagccccagtctagcaagtag

SEQ ID NO: 25145 - DNA, 507 bp, Artificial Sequence
  derived and/or modified sequence
atgtgcttccccaaagtgctgagcgatgacatgaagaaattgaaagcccgaatggtgatgagtagtttagcggagttagaagacgatttcaaggaggggtatctggaaaccgtagcagcatactatgaagaacagcacccggagctgacaccattgctggagaaggaaagggacggcctgcggtgtaggggaaaccgctctccggttcctgatgtggaggatcctgctacggaggagccaggagaatcattctgtgacaaggtgatgcgctggttccaagccatgctccagcgactccagacgtggtggcatggggtgctggcctgggttaaggagaaggttgtggccctggtccacgctgtgcaagctctgtggaagcagttccaatcgttttgttgctctctatcggagctgtttatgtcttccttccaatcctatggtgccccacggggtgacaaggaggagttgactccgcagaaatgtagcgagccacagagcagcaagtag

SEQ ID NO: 25146 - DNA, 507 bp, Artificial Sequence
  derived and/or modified sequence
atgtgcttccccaaggttttaagcgatgacatgaaaaaacttaaagcacgcatggtgatgtcctccctcgcggagttggaagacgacttcaaagagggttaccttgaaacagttgccgcttattatgaagaacagcaccctgagctgaccccactgctggagaaagagcgtgatggtctgagatgccggggtaataggagtcctgtgcctgacgtggaggaccccgctacggaggaaccaggggagagcttctgcgacaaggttatgaggtggtttcaggcaatgttgcagaggctgcagacctggtggcatggcgtactggcttgggttaaagagaaggtggtagcattggttcacgcagtgcaagccctgtggaaacagttccagtccttctgttgtagcctttcagagctcttcatgtctagctttcaatcatacggcgctccccgaggggataaagaggagttgaccccacagaaatgcagcgaacctcagtctagcaagtag

SEQ ID NO: 25147 - DNA, 507 bp, Artificial Sequence
  derived and/or modified sequence
atgtgtttccccaaggtgctgagcgacgatatgaagaaactaaaagctcggatggtgatgtcaagcctggccgagctggaagacgactttaaagaagggtatttagagactgtggctgcctattatgaggaacaacacccagagctgaccccactgcttgaaaaagaaagggatggcctccggtgccgcggcaatcgttccccggtgcccgatgttgaggaccccgcaacagaggagcccggagagagcttctgtgacaaggtcatgcgatggtttcaggcgatgctgcagaggttgcagacttggtggcatggcgttctggcatgggtcaaagaaaaagtggttgcactcgtacacgctgtccaggcattatggaaacagtttcagtctttttgttgtagtctgtccgaattatttatgtcctctttccagagttacggggctcccagaggcgacaaagaggagctgaccccacaaaagtgttcagaaccccaatcatcaaagtag

SEQ ID NO: 25148 - DNA, 507 bp, Artificial Sequence
  derived and/or modified sequence
atgtgtttcccaaaagttctaagcgacgacatgaagaaactgaaggctagaatggtgatgagtagcctcgctgagctggaggatgatttcaaggaaggatacctggaaacagtcgctgcttactatgaagagcaacaccctgaactgacacccctcctggagaaagagagagacggcttaagatgtaggggtaaccgtagtccggtcccggatgtcgaagaccctgccacagaggagcccggagaaagtttttgcgataaggtaatgaggtggtttcaagccatgctgcagagactgcaaacatggtggcatggtgtactggcctgggtaaaagaaaaagtggtggctttagtgcacgccgtccaagcattgtggaagcaatttcagtccttctgctgttcgctgagcgagttattcatgtcctccttccagtcttacggggcaccaagaggagataaggaggagttaacgccccaaaagtgctctgaacctcagtcctctaagtag

SEQ ID NO: 25149 - DNA, 1056 bp, Artificial Sequence
  derived and/or modified sequence
gtgccaggaagactgcgtgcagaaggtgactgtctcagtggagctgggtcatctcaggccttggctccttgaacttttggccgccatgtgcttcccgaaggtcctctctgatgacatgaagaagctgaaggcccgaatggtgatgtcgagcctggcagagctggaggacgacttcaaagagggctacctggagacagtggcggcttattatgaggagcagcacccagagctcactcctctacttgaaaaagaaagagatggattacggtgccgaggcaacagatcccctgtcccggatgttgaggatcccgcaaccgaggagcctggggagagcttttgtgacaaggtcatgagatggttccaggccatgctgcagcggctgcagacctggtggcacggggttctggcctgggtgaaggagaaggtggtggccctggtccatgcagtgcaggccctctggaaacagttccagagtttctgctgctctctgtcagagctcttcatgtcctctttccagtcctacggagccccacggggggacaaggaggagctgacaccccagaagtgctctgaaccccaatcctcaaaatgaagatactgacaccacctttgccctccccgtcaccgcgcacccaccctgacccctccctcagctgtcctgtgccccgccctctcccgcacactcagtccccctgcctggcgttcctgccgcagctctgacctggtgctgtcgccctggcatcttaataaaacctgcttatacttccctggcaggggagataccatgatcgcggaggtgggtttcccagggcaaggctgatctgttgccgtattagtccgttttcacacagctataaagaatgcctgagactgggtgatgtataaagaaaagaagtttaactgactcacagttccacatggctggggaagcctgaggaagcttacaatcatgggggaaggcggaagagaagcaaggcacgtcctacatggcagcaggagaagcagggtggggggaactaccaaacacttttgtccgcgtgtttgtgtgtttttttt

SEQ ID NO: 25150 - DNA, 774 bp, Artificial Sequence
  derived and/or modified sequence
cataaaaccagctgagtatttgtgccaggaagactgcgtgcagaaggccttggctccttgaacttttggccgccatgtgcttcccgaaggtcctctctgatgacatgaagaagctgaaggcccgaatggtgatgtcgagcctggcagagctggaggacgacttcaaagagggctacctggagacagtggcggcttattatgaggagcagcacccagagctcactcctctacttgaaaaagaaagagatggattacggtgccgaggcaacagatcccctgtcccggatgttgaggatcccgcaaccgaggagcctggggagagcttttgtgacaaggtcatgagatggttccaggccatgctgcagcggctgcagacctggtggcacggggttctggcctgggtgaaggagaaggtggtggccctggtccatgcagtgcaggccctctggaaacagttccagagtttctgctgctctctgtcagagctcttcatgtcctctttccagtcctacggagccccacggggggacaaggaggagctgacaccccagaagtgctctgaaccccaatcctcaaaatgaagatactgacaccacctttgccctccccgtcaccgcgcacccaccctgacccctccctcagctgtcctgtgccccgccctctcccgcacactcagtccccctgcctggcgttcctgccgcagctctgacctggtgctgtcgccctggcatcttaataaaacctgcttatacttccctggcaggggagatacca

SEQ ID NO: 25151 - DNA, 623 bp, Artificial Sequence
  derived and/or modified sequence
ggtcatctcaggtggggagttggggtccccgaaggccttggctccttgaacttttggccgccatgtgcttcccgaaggtcctctctgatgacatgaagaagctgaaggcccgaatggtgatgtcgagcctggcagagctggaggacgacttcaaagagggctacctggagacagtggcggcttattatgaggagcagcacccagagctcactcctctacttgaaaaagaaagagatggattacggtgccgaggcaacagatcccctgtcccggatgttgaggatcccgcaaccgaggagcctggggagagcttttgtgacaaggtcatgagatggttccaggccatgctgcagcggctgcagacctggtggcacggggttctggcctgggtgaaggagaaggtggtggccctggtccatgcagtgcaggccctctggaaacagttccagagtttctgctgctctctgtcagagctcttcatgtcctctttccagtcctacggagccccacggggggacaaggaggagctgacaccccagaagtgctctgaaccccaatcctcaaaatgaagatactgacaccacctttgccctccccgtcaccgcgcacccaccctgacccct

SEQ ID NO: 25152 - RNA, 507 nt, Artificial Sequence
  derived and/or modified sequence
auguguuuccccaaggugcugagcgacgauaugaagaaacuaaaagcucggauggugaugucaagccuggccgagcuggaagacgacuuuaaagaaggguauuuagagacuguggcugccuauuaugaggaacaacacccagagcugaccccacugcuugaaaaagaaagggauggccuccggugccgcggcaaucguuccccggugcccgauguugaggaccccgcaacagaggagcccggagagagcuucugugacaaggucaugcgaugguuucaggcgaugcugcagagguugcagacuugguggcauggcguucuggcaugggucaaagaaaaagugguugcacucguacacgcuguccaggcauuauggaaacaguuucagucuuuuuguuguagucuguccgaauuauuuauguccucuuuccagaguuacggggcucccagaggcgacaaagaggagcugaccccacaaaaguguucagaaccccaaucaucaaaguag

SEQ ID NO: 25153 - RNA, 507 nt, Artificial Sequence
  derived and/or modified sequence
auguguuucccaaaaguucuaagcgacgacaugaagaaacugaaggcuagaauggugaugaguagccucgcugagcuggaggaugauuucaaggaaggauaccuggaaacagucgcugcuuacuaugaagagcaacacccugaacugacaccccuccuggagaaagagagagacggcuuaagauguagggguaaccguaguccggucccggaugucgaagacccugccacagaggagcccggagaaaguuuuugcgauaagguaaugaggugguuucaagccaugcugcagagacugcaaacaugguggcaugguguacuggccuggguaaaagaaaaagugguggcuuuagugcacgccguccaagcauuguggaagcaauuucaguccuucugcuguucgcugagcgaguuauucauguccuccuuccagucuuacggggcaccaagaggagauaaggaggaguuaacgccccaaaagugcucugaaccucaguccucuaaguag

SEQ ID NO: 25154 - protein, 179 aa, Artificial Sequence
  derived and/or modified sequence
MCFPKVLSDDMKKLKARMHQAIERFYDKMQNAESGRGQDDFKEGYLETVAAYYEEQHPELTPLLEKERDGLRCRGNRSPVPDVEDPATEEPGESFCDKVMRWFQAMLQRLQTWWHGVLAWVKEKVVALVHAVQALWKQFQSFCCSLSELFMSSFQSYGAPRGDKEELTPQKCSEPQSSK

SEQ ID NO: 25155 - DNA, 540 bp, Artificial Sequence
  derived and/or modified sequence
atgtgcttccccaaggtgctgagcgacgacatgaagaagctgaaggccagaatgcaccaggccatcgagagattctacgacaagatgcagaacgccgagagcggcagaggccaggacgacttcaaggagggctacctggagaccgtggccgcctactacgaggagcagcaccccgagctgacccccctgctggagaaggagagagacggcctgagatgcagaggcaacagaagccccgtgcccgacgtggaggaccccgccaccgaggagcccggcgagagcttctgcgacaaggtgatgagatggttccaggccatgctgcagagactgcagacctggtggcacggcgtgctggcctgggtgaaggagaaggtggtggccctggtgcacgccgtgcaggccctgtggaagcagttccagagcttctgctgcagcctgagcgagctgttcatgagcagcttccagagctacggcgcccccagaggcgacaaggaggagctgaccccccagaagtgcagcgagccccagagcagcaagtag

SEQ ID NO: 25156 - DNA, 540 bp, Artificial Sequence
  derived and/or modified sequence
atgtgctttcctaaggtattgagcgatgacatgaagaagttgaaagctcggatgcatcaagcgatcgaaagattttatgacaaaatgcaaaacgccgaatctggacgcgggcaagatgatttcaaggaaggttacttggagacagtagccgcttactacgaggagcagcaccccgagctcacgccactacttgagaaagaaagagatggcctccggtgcagaggaaataggagccccgtacccgatgtagaggaccccgccaccgaggagcccggcgaatccttttgtgacaaagtcatgaggtggttccaggcaatgctgcaaaggctccagacttggtggcatggcgttctcgcttgggtgaaagaaaaagtggtggccctggtgcacgccgttcaagcactatggaagcaattccagagtttctgctgttcattgagcgagttatttatgtcctcttttcagtcatacggggctccccgcggcgacaaggaggaactgactccacagaaatgcagcgagccacagagtagcaagtag

SEQ ID NO: 25157 - DNA, 540 bp, Artificial Sequence
  derived and/or modified sequence
atgtgcttcccaaaagtgttgtcagatgacatgaagaaactaaaggccagaatgcaccaggccatcgagcgattctatgacaagatgcagaatgcggaatccgggcgaggacaggacgacttcaaggagggctacctggagaccgttgctgcttactatgaagagcagcacccagagctgaccccgctcctggagaaagagcgcgacggactcaggtgccgtggcaacaggagcccagtgcccgatgttgaagatccagccaccgaggagccaggagagtctttttgcgataaagtcatgagatggtttcaagctatgctgcaacgattgcaaacatggtggcacggcgttctggcgtgggtcaaggagaaggtggttgccctggttcacgccgtgcaggctctgtggaaacagttccagagcttttgctgctcactgtcggaattgttcatgtcgagcttccagtcgtatggagcacccaggggggacaaagaagaattaaccccccagaagtgcagtgaacctcagtcctcaaaatag

SEQ ID NO: 25158 - DNA, 540 bp, Artificial Sequence
  derived and/or modified sequence
atgtgcttccccaaggtgctgagtgatgacatgaagaagctgaaggccaggatgcaccaggccatcgagcgcttctatgacaagatgcagaatgctgagagcggccggggccaggatgacttcaaggagggctacctggagaccgtggccgcctactatgaggagcagcaccctgagctgacccccctgctggagaaggagagagatggcctgcgctgccggggcaacagaagccctgtgcctgatgtggaggaccctgccacagaggagcctggagagagcttctgtgacaaggtgatgcgctggttccaggccatgctgcagaggctgcagacctggtggcatggagtgctggcctgggtgaaggagaaggtggtggccctggtgcatgctgtgcaggccctgtggaagcagttccagagcttctgctgcagcctgtctgagctgttcatgagcagcttccagagctatggagcccccaggggggacaaggaggagctgaccccccagaagtgcagcgagccccagagcagcaagtag

SEQ ID NO: 25159 - DNA, 540 bp, Artificial Sequence
  derived and/or modified sequence
atgtgcttccccaaggtgctgagcgacgacatgaagaagctgaaggcccgtatgcatcaagcaattgagaggttctacgataaaatgcagaacgctgagtctggcagggggcaggacgattttaaagagggctacctggagaccgtcgctgcatactacgaggagcaacatccagagctgactcctctgctagagaaagagcgggacggcctcaggtgtagggggaatagatcgccagtgcctgatgttgaggacccagcaaccgaagagcccggtgagagcttctgtgacaaagttatgcggtggttccaggcaatgcttcaaaggttgcagacctggtggcacggcgtactggcatgggtcaaagaaaaggtggtggccttggtgcacgccgtgcaagctctttggaaacagtttcagtctttttgttgctccctatccgaattgttcatgtcgagttttcagagctacggagccccacggggtgacaaggaggaactgaccccccagaaatgtagtgagcctcagtcgtctaagtag

SEQ ID NO: 25160 - DNA, 540 bp, Artificial Sequence
  derived and/or modified sequence
atgtgcttccccaaggtgctgagcgacgacatgaagaagctgaaggcaagaatgcatcaggccattgagaggttttatgacaaaatgcagaacgctgaatctggacggggccaagacgactttaaggagggctacttggaaacagtcgcagcatattacgaagagcagcaccccgagctgacacctttacttgagaaagagcgggacggcttgcgttgccgcgggaaccgatctccagtgcccgacgtcgaagatcccgccactgaggaacctggcgagagcttctgcgacaaggtgatgcgctggttccaagccatgctccagcgcctgcagacatggtggcatggtgtactggcctgggtcaaagaaaaggtagtcgcgctcgtgcatgcagttcaagccctgtggaaacagtttcaaagcttctgttgtagcctgagcgagctcttcatgagctctttccaatcttacggtgcccctaggggagataaagaggaactgactccccagaagtgcagcgagccgcagagtagtaaatag

SEQ ID NO: 25161 - DNA, 540 bp, Artificial Sequence
  derived and/or modified sequence
atgtgcttcccaaaggtcctgtccgacgatatgaagaaacttaaagcccgtatgcatcaggctatcgaacggttttacgataagatgcagaacgctgaaagtggcagaggccaggacgattttaaggaagggtatctggagaccgtggcggcttattacgaggaacaacatcccgaactaacccctctcctggagaaggagagggatggattaaggtgtaggggcaacagatcaccggtacccgatgtggaagatcccgctactgaggaaccaggagagtcattctgcgataaagtgatgcggtggttccaggcgatgctgcagagactgcagacttggtggcatggggtgctggcctgggttaaagaaaaggtcgtagctcttgtgcacgctgtgcaggcattatggaagcagttccaaagcttctgttgttctctgtccgagctattcatgtcatccttccagtcttatggagcacctagaggtgacaaagaggagcttaccccacagaaatgtagtgagcctcagtcttccaagtag

SEQ ID NO: 25162 - DNA, 540 bp, Artificial Sequence
  derived and/or modified sequence
atgtgcttcccaaaggtcctgagtgatgacatgaagaaactgaaagccagaatgcaccaggctatcgagcgcttctatgataagatgcagaatgccgagtccgggaggggccaggatgacttcaaggagggttatctggagacagtggccgcttactatgaggagcaacaccccgaacttacacccctcctggagaaagagcgggatggtctgagatgtaggggcaacagatctcctgtgccagacgtggaagatcccgctacagaagaaccaggggagtcgttttgcgacaaagtcatgaggtggttccaggccatgcttcagcgccttcagacttggtggcatggcgttctcgcttgggtgaaggaaaaagttgtggccctcgtgcacgcggtgcaggctctgtggaaacagttccagagtttctgttgttctttgtcagagctatttatgtcgagctttcaaagctacggggcacctagaggggataaggaggagctgacccctcagaagtgtagtgagccacaatccagcaagtag

SEQ ID NO: 25163 - DNA, 880 bp, Artificial Sequence
  derived and/or modified sequence
gccttggctccttgaacttttggccgccatgtgcttcccgaaggtcctctctgatgacatgaagaagctgaaggcccgaatgcaccaggccatagaaagattttatgataaaatgcaaaatgcagaatcaggacgtggacaggacgacttcaaagagggctacctggagacagtggcggcttattatgaggagcagcacccagagctcactcctctacttgaaaaagaaagagatggattacggtgccgaggcaacagatcccctgtcccggatgttgaggatcccgcaaccgaggagcctggggagagcttttgtgacaaggtcatgagatggttccaggccatgctgcagcggctgcagacctggtggcacggggttctggcctgggtgaaggagaaggtggtggccctggtccatgcagtgcaggccctctggaaacagttccagagtttctgctgctctctgtcagagctcttcatgtcctctttccagtcctacggagccccacggggggacaaggaggagctgacaccccagaagtgctctgaaccccaatcctcaaaatgaagatactgacaccacctttgccctccccgtcaccgcgcacccaccctgacccctccctcagctgtcctgtgccccgccctctcccgcacactcagtccccctgcctggcgttcctgccgcagctctgacctggtgctgtcgccctggcatcttaataaaacctgcttatacttccctggcaggggagataccatgatcgcggaggtgggtttcccagggcaaggctgatctgttgccgtattagtccgttttcacacagctataaagaatgcctgagactgggtgatgtataaagaaaagaagtttaactga

SEQ ID NO: 25164 - DNA, 812 bp, Artificial Sequence
  derived and/or modified sequence
agactgcgtgcagaaggtgactgtctcagtggagctgggtcatctcaggccttggctccttgaacttttggccgccatgtgcttcccgaaggtcctctctgatgacatgaagaagctgaaggcccgaatgcaccaggccatagaaagattttatgataaaatgcaaaatgcagaatcaggacgtggacaggacgacttcaaagagggctacctggagacagtggcggcttattatgaggagcagcacccagagctcactcctctacttgaaaaagaaagagatggattacggtgccgaggcaacagatcccctgtcccggatgttgaggatcccgcaaccgaggagcctggggagagcttttgtgacaaggtcatgagatggttccaggccatgctgcagcggctgcagacctggtggcacggggttctggcctgggtgaaggagaaggtggtggccctggtccatgcagtgcaggccctctggaaacagttccagagtttctgctgctctctgtcagagctcttcatgtcctctttccagtcctacggagccccacggggggacaaggaggagctgacaccccagaagtgctctgaaccccaatcctcaaaatgaagatactgacaccacctttgccctccccgtcaccgcgcacccaccctgacccctccctcagctgtcctgtgccccgccctctcccgcacactcagtccccctgcctggcgttcctgccgcagctctgacctggtgctgtcgccctggcatcttaataaaacctgcttatacttccctggcaggggagataccatga

SEQ ID NO: 25165 - protein, 529 aa, Artificial Sequence
  derived and/or modified sequence
MSQDTEVDMKEVELNELEPEKQPMNAASGAAMSLAGAEKNGLVKIKVAEDEAEAAAAAKFTGLSKEELLKVAGSPGWVRTRWALLLLFWLGWLGMLAGAVVIIVRAPRCRELPAQKWWHTGALYRIGDLQAFQGHGAGNLAGLKGRLDYLSSLKVKGLVLGPIHKNQKDDVAQTDLLQIDPNFGSKEDFDSLLQSAKKKSIRVILDLTPNYRGENSWFSTQVDTVATKVKDALEFWLQAGVDGFQVRDIENLKDASSFLAEWQNITKGFSEDRLLIAGTNSSDLQQILSLLESNKDLLLTSSYLSDSGSTGEHTKSLVTQYLNATGNRWCSWSLSQARLLTSFLPAQLLRLYQLMLFTLPGTPVFSYGDEIGLDAAALPGQPMEAPVMLWDESSFPDIPGAVSANMTVKGQSEDPGSLLSLFRRLSDQRSKERSLLHGDFHAFSAGPGLFSYIRHWDQNERFLVVLNFGDVGLSAGLQASDLPASASLPAKADLLLSTQPGREEGSPLELERLKLEPHEGLLLRFPYAA

SEQ ID NO: 25166 - protein, 631 aa, Artificial Sequence
  derived and/or modified sequence
MELQPPEASIAVVSIPRQLPGSHSEAGVQGLSAGDDSETGSDCVTQAGLQLLASSDPPALASKNAEVTVETGFHHVSQADIEFLTSIDPTASASGSAGITGTMSQDTEVDMKEVELNELEPEKQPMNAASGAAMSLAGAEKNGLVKIKVAEDEAEAAAAAKFTGLSKEELLKVAGSPGWVRTRWALLLLFWLGWLGMLAGAVVIIVRAPRCRELPAQKWWHTGALYRIGDLQAFQGHGAGNLAGLKGRLDYLSSLKVKGLVLGPIHKNQKDDVAQTDLLQIDPNFGSKEDFDSLLQSAKKKSIRVILDLTPNYRGENSWFSTQVDTVATKVKDALEFWLQAGVDGFQVRDIENLKDASSFLAEWQNITKGFSEDRLLIAGTNSSDLQQILSLLESNKDLLLTSSYLSDSGSTGEHTKSLVTQYLNATGNRWCSWSLSQARLLTSFLPAQLLRLYQLMLFTLPGTPVFSYGDEIGLDAAALPGQPMEAPVMLWDESSFPDIPGAVSANMTVKGQSEDPGSLLSLFRRLSDQRSKERSLLHGDFHAFSAGPGLFSYIRHWDQNERFLVVLNFGDVGLSAGLQASDLPASASLPAKADLLLSTQPGREEGSPLELERLKLEPHEGLLLRFPYAA

SEQ ID NO: 25167 - protein, 661 aa, Artificial Sequence
  derived and/or modified sequence
MELQPPEASIAVVSIPRQLPGSHSEAGVQGLSAGDDSELGSHCVAQTGLELLASGDPLPSASQNAEMIETGSDCVTQAGLQLLASSDPPALASKNAEVTETGFHHVSQADIEFLTSIDPTASASGSAGITGTMSQDTEVDMKEVELNELEPEKQPMNAASGAAMSLAGAEKNGLVKIKVAEDEAEAAAAAKFTGLSKEELLKVAGSPGWVRTRWALLLLFWLGWLGMLAGAVVIIVRAPRCRELPAQKWWHTGALYRIGDLQAFQGHGAGNLAGLKGRLDYLSSLKVKGLVLGPIHKNQKDDVAQTDLLQIDPNFGSKEDFDSLLQSAKKKSIRVILDLTPNYRGENSWFSTQVDTVATKVKDALEFWLQAGVDGFQVRDIENLKDASSFLAEWQNITKGFSEDRLLIAGTNSSDLQQILSLLESNKDLLLTSSYLSDSGSTGEHTKSLVTQYLNATGNRWCSWSLSQARLLTSFLPAQLLRLYQLMLFTLPGTPVFSYGDEIGLDAAALPGQPMEAPVMLWDESSFPDIPGAVSANMTVKGQSEDPGSLLSLFRRLSDQRSKERSLLHGDFHAFSAGPGLFSYIRHWDQNERFLVVLNFGDVGLSAGLQASDLPASASLPAKADLLLSTQPGREEGSPLELERLKLEPHEGLLLRFPYAA

SEQ ID NO: 25168 - protein, 511 aa, Artificial Sequence
  derived and/or modified sequence
MSQDTEVDMKEVELNELEPEKQPMNAASGAAMSLAGAEKNGLVKIKVAEDEAEAAAAAKFTGLSKEELLFWLGWLGMLAGAVVIIVRAPRCRELPAQKWWHTGALYRIGDLQAFQGHGAGNLAGLKGRLDYLSSLKVKGLVLGPIHKNQKDDVAQTDLLQIDPNFGSKEDFDSLLQSAKKKSIRVILDLTPNYRGENSWFSTQVDTVATKVKDALEFWLQAGVDGFQVRDIENLKDASSFLAEWQNITKGFSEDRLLIAGTNSSDLQQILSLLESNKDLLLTSSYLSDSGSTGEHTKSLVTQYLNATGNRWCSWSLSQARLLTSFLPAQLLRLYQLMLFTLPGTPVFSYGDEIGLDAAALPGQPMEAPVMLWDESSFPDIPGAVSANMTVKGQSEDPGSLLSLFRRLSDQRSKERSLLHGDFHAFSAGPGLFSYIRHWDQNERFLVVLNFGDVGLSAGLQASDLPASASLPAKADLLLSTQPGREEGSPLELERLKLEPHEGLLLRFPYAA

SEQ ID NO: 25169 - protein, 135 aa, Artificial Sequence
  derived and/or modified sequence
MSQDTEVDMKEVELNELEPEKQPMNAASGAAMSLAGAEKNGLVKIKVAEDEAEAAAAAKFTGLSKEELLKVAGSPGWVRTRWALLLLFWLGWLGMLAGAVVIIVRAPRCRELPAQKWWHTGALYRIGDLQAFQGH

SEQ ID NO: 25170 - DNA, 1896 bp, Artificial Sequence
  derived and/or modified sequence
atggaactccaaccaccagaagcttctattgccgtcgtgagtatcccaagacaattaccagggagtcacagtgaggccggagtgcagggattgtctgccggggacgacagtgagactggctctgattgtgtgacacaagccggccttcagctgttagcatcctctgatcccccggcactagcctcaaaaaacgctgaagttaccgttgagacaggctttcaccacgtgagtcaagccgacatcgaatttctaacgtccatcgatcccaccgcaagcgcgtctggctcagccgggattacaggcaccatgtcccaggataccgaggtggacatgaaagaagtggagctcaacgagctcgaacctgagaagcagcctatgaatgctgctagcggcgcagctatgtccttagccggggcagaaaaaaatgggttggtgaagattaaggtggcagaagacgaagcagaggccgctgcagcggcaaaatttacagggctgtccaaagaggaactcctaaaagtggccggatcccctggatgggtgcgtacaagatgggccctgctactgctgttctggctagggtggttgggaatgctcgccggggccgttgtcattatcgttagggcgcctcggtgcagagagctgcctgcacagaagtggtggcataccggcgcactttaccgcatcggagatctgcaggcgttccagggccacggcgctggtaacctagccggtctgaaaggccgtctcgattacctgtcctctctcaaagtaaaagggcttgtactgggacctattcacaagaatcagaaggacgatgtcgcgcagactgatttactacagattgatcccaatttcgggtcaaaggaggattttgacagtctgttgcagagcgcaaaaaagaaatctattcgcgtcattctggatctcacccccaattatcgcggagagaactcctggttttcaacgcaggttgacactgtggctactaaggtcaaggatgccttggagttttggctccaggccggcgtcgacggttttcaggtgcgcgacatagaaaatctaaaggacgcaagctctttccttgccgagtggcaaaacatcacaaagggcttctctgaggatagacttttgatcgccgggacgaactcgtcagatctacagcagattctttccttattagaaagtaataaggacctgcttctaactagcagctacctgtctgatagtggctcgactggagagcataccaaaagcttggttacccagtatctgaatgccacagggaatcgttggtgcagctggagcttaagtcaagcccggcttctgacttcattcctgccagcgcagcttctgaggttgtaccagctgatgttgttcaccttacccggcactcccgtcttttcctacggggacgagattgggctcgacgcagctgcgttgcctggccagcctatggaggcccccgtgatgctgtgggacgagtcctcattcccagacatcccaggggctgtctcagccaatatgacagtgaagggtcagtcagaggatcctggaagcctactgagtctatttaggcggctctccgaccagcgctctaaggagcggagtcttcttcatggagacttccatgctttcagcgcgggaccaggcctgttttcatacattagacactgggaccaaaacgagaggtttttggtggtgctcaactttggcgatgtcgggctgtcggcggggcttcaggcgtcagacctgccggctagcgcatccctccctgcaaaagcagatctgctacttagcacacagcccggcagggaggagggcagccctctggagctggaacgcctcaaattggaacctcatgagggtctgttattaaggtttccgtacgccgcatag

SEQ ID NO: 25171 - DNA, 1986 bp, Artificial Sequence
  derived and/or modified sequence
atggaactgcagcccccggaggccagcattgcagttgtgagtatcccaagacagctccccggaagccacagcgaggcaggggttcaaggactctccgcaggcgatgactccgaactaggatcacattgcgtcgcccagaccggactcgagctgctggctagtggagatccattgccatcagctagtcaaaacgctgagatgattgagactggaagcgactgtgtgacacaggcaggcttgcagctgttggcttccagcgaccctccggcactcgcctctaaaaatgcagaagtaactgagaccggcttccaccacgttagtcaggcagacatcgagttcctgacatctattgaccccacggcctccgccagtggttctgcagggatcactggcacgatgtcccaggatacggaagttgacatgaaggaagtcgaactgaacgagttagaaccggagaaacagcctatgaatgctgccagcggcgccgctatgtccttggccggtgctgaaaaaaatggtctcgttaagattaaggtggcagaggatgaagcggaggccgctgccgccgcaaagtttacagggttatctaaagaggagctcctcaaggtggcagggagcccaggctgggtgcgtacaagatgggccctcttgcttctcttctggctgggttggctgggaatgctcgccggcgccgttgttattatcgtgagagcaccgcgctgcagagaacttcccgcccagaagtggtggcatactggggctctttaccggatcggagacctgcaagctttccaagggcatggagctggaaatctggccggcctcaaaggacgccttgactacctcagtagcctgaaggtgaaggggctggtcctgggtcccattcataaaaaccagaaagacgacgttgcacagacggatcttttgcaaattgaccccaactttggctccaaggaggactttgactcattgctgcagtcagccaaaaagaaaagtatacgggttattctggatttaacaccaaactacagaggagaaaactcctggttttctacccaggtagacacggtggccactaaagtgaaggacgctctcgagttttggctgcaggccggcgtcgatggcttccaggttagggacatcgaaaatctgaaagacgctagctcctttctcgccgagtggcagaatattacaaagggttttagtgaagaccgcctcctgatagccggaactaattcgtctgacctccaacagattctctccctgctggagagtaacaaggacctcctccttactagttcttatctgtccgactcaggttcgacgggcgagcatacaaagagcctcgtgactcaatacctcaacgctacaggcaacaggtggtgcagttggtccctaagtcaggcccggttgctaactagcttcttgccagcccagctccttcgattatatcagctcatgctgttcaccctgcctggcacacctgtgttttcgtacggtgacgaaattggactggacgctgctgccctgcccgggcagcctatggaggcacctgttatgttgtgggacgagtccagttttccggatataccaggcgctgtttccgcaaacatgacagtgaaaggacaatcagaagaccccggaagcttattgtcactgtttaggcgactgagtgatcagagatccaaagagcgttccctgctccatggagatttccacgctttttccgccgggccaggactatttagttacattcggcattgggaccaaaacgagaggtttctggtcgtcctgaactttggagacgtcggtctgtctgcaggattgcaagccagcgatttgcctgccagcgcctccctacctgccaaagccgatctgctcctcagtacacagccaggtagagaggaaggctcaccccttgagctcgagcgcttgaagctggaaccccatgagggtcttttgctgagatttccatatgccgcctag

SEQ ID NO: 25172 - DNA, 1896 bp, Artificial Sequence
  derived and/or modified sequence
atggagctgcagcccccagaggccagcattgctgtggtgtccatcccccggcagctgcccggcagccacagcgaggccggcgtgcagggcctgtctgctggagatgattctgaaacaggcagtgactgtgtgacccaggccggcctgcagctgctggccagcagtgaccccccagccctggccagcaagaatgctgaggtgacagtggagaccggcttccaccacgtgtcccaggccgacatcgagttcctgaccagcattgaccccacagccagcgccagcggcagcgctggcatcaccggcaccatgagccaggacacagaggtggacatgaaggaggtggagctgaatgagctggagcctgagaagcagcccatgaatgctgccagcggggccgccatgagcctggccggggctgagaagaatggcctggtgaagatcaaggtggctgaagatgaggccgaggccgctgctgctgccaagttcaccggcctgagcaaggaggagctgctgaaggtggccggcagccctggctgggtgaggacccgctgggccctgctgctgctcttctggctgggctggctgggcatgctggccggggctgtggtgatcatcgtgcgggccccccgctgccgggagctgcctgcccagaagtggtggcacactggagccctgtaccgcatcggggacctgcaggccttccagggccatggagctggcaacctggccggcctgaagggccgcctggactacctgagcagcctgaaggtgaagggcctggtgctgggccccatccacaagaaccagaaggatgatgtggcccagacagacctgctgcagattgaccccaactttggcagcaaagaagattttgacagcctgctgcagagcgccaagaagaagagcatccgggtcatcctggacctgacccccaactacagaggagagaacagctggttcagcacccaggtggacacagtggccaccaaggtgaaggatgccctggagttctggctgcaggccggcgtggatggcttccaggtgcgggacatcgagaacctgaaggatgccagcagcttcctggccgagtggcagaacatcaccaagggcttctctgaagatcggctgctgattgctggcaccaacagcagtgacctgcagcagatcctgagcctgctggagagcaacaaggacctgctgctgaccagcagctacctgagtgacagcggcagcactggagagcacaccaagagcctggtgacccagtacctgaatgccactggaaaccgctggtgctcctggagcctgagccaggcccggctgctgaccagcttcctgcctgcccagctgctgcggctgtaccagctgatgctgttcaccctgcccggcacccctgtgttctcctatggagatgaaattggcctggatgctgctgccctgcccggccagcccatggaggcccctgtgatgctgtgggatgagagcagcttcccagacatccctggagctgtgtctgccaacatgacagtgaagggccagagtgaagatcctggcagcctgctgagcctcttccggcggctgagtgaccagaggagcaaggagaggagcctgctgcatggagacttccacgccttctctgctggccctggcctcttctcctacatccgccactgggaccagaatgaacgcttcctggtggtgctgaactttggagatgtgggcctgtctgctggcctgcaggccagtgacctgcctgccagcgccagcctgcctgccaaggctgacctgctgctgagcacccagcccggccgggaggagggcagccccctggagctggagcggctgaagctggagccccatgagggcctgctgctgcgcttcccctatgctgcctag

SEQ ID NO: 25173 - DNA, 1986 bp, Artificial Sequence
  derived and/or modified sequence
atggagctgcagcccccagaggccagcattgctgtggtgtccatcccccggcagctgcccggcagccacagcgaggccggcgtgcagggcctgtctgctggagatgattctgagctgggcagccactgtgtggcccagacaggcctggagctgctggccagcggggaccccctgcccagcgccagccagaatgctgagatgattgagaccggcagtgactgtgtgacccaggccggcctgcagctgctggccagcagtgaccccccagccctggccagcaagaatgctgaggtgacagaaacaggcttccaccacgtgtcccaggccgacatcgagttcctgaccagcattgaccccacagccagcgccagcggcagcgctggcatcaccggcaccatgagccaggacacagaggtggacatgaaggaggtggagctgaatgagctggagcctgagaagcagcccatgaatgctgccagcggggccgccatgagcctggccggggctgagaagaatggcctggtgaagatcaaggtggctgaagatgaggccgaggccgctgctgctgccaagttcaccggcctgagcaaggaggagctgctgaaggtggccggcagccctggctgggtgaggacccgctgggccctgctgctgctcttctggctgggctggctgggcatgctggccggggctgtggtgatcatcgtgcgggccccccgctgccgggagctgcctgcccagaagtggtggcacactggagccctgtaccgcatcggggacctgcaggccttccagggccatggagctggcaacctggccggcctgaagggccgcctggactacctgagcagcctgaaggtgaagggcctggtgctgggccccatccacaagaaccagaaggatgatgtggcccagacagacctgctgcagattgaccccaactttggcagcaaagaagattttgacagcctgctgcagagcgccaagaagaagagcatccgggtcatcctggacctgacccccaactacagaggagagaacagctggttcagcacccaggtggacacagtggccaccaaggtgaaggatgccctggagttctggctgcaggccggcgtggatggcttccaggtgcgggacatcgagaacctgaaggatgccagcagcttcctggccgagtggcagaacatcaccaagggcttctctgaagatcggctgctgattgctggcaccaacagcagtgacctgcagcagatcctgagcctgctggagagcaacaaggacctgctgctgaccagcagctacctgagtgacagcggcagcactggagagcacaccaagagcctggtgacccagtacctgaatgccactggaaaccgctggtgctcctggagcctgagccaggcccggctgctgaccagcttcctgcctgcccagctgctgcggctgtaccagctgatgctgttcaccctgcccggcacccctgtgttctcctatggagatgaaattggcctggatgctgctgccctgcccggccagcccatggaggcccctgtgatgctgtgggatgagagcagcttcccagacatccctggagctgtgtctgccaacatgacagtgaagggccagagtgaagatcctggcagcctgctgagcctcttccggcggctgagtgaccagaggagcaaggagaggagcctgctgcatggagacttccacgccttctctgctggccctggcctcttctcctacatccgccactgggaccagaatgaacgcttcctggtggtgctgaactttggagatgtgggcctgtctgctggcctgcaggccagtgacctgcctgccagcgccagcctgcctgccaaggctgacctgctgctgagcacccagcccggccgggaggagggcagccccctggagctggagcggctgaagctggagccccatgagggcctgctgctgcgcttcccctatgctgcctag

SEQ ID NO: 25174 - DNA, 1896 bp, Artificial Sequence
  derived and/or modified sequence
atggagctgcagccccccgaggccagcatcgccgtggtgagcatcccacgtcagctgcccggaagtcactctgaggccggagtgcaggggctctcggccggcgatgactctgagacaggaagcgactgcgtaacacaagccgggctgcagctgctcgccagttccgacccccctgctttagcttccaaaaacgctgaggtgaccgtggaaacgggctttcatcacgtcagccaagctgacatagaattcctcaccagcattgatcctaccgcctctgcttccggttcagccggcatcaccggaacaatgtctcaagacaccgaggtggatatgaaagaggtggaactgaatgagttagaacccgaaaagcagccgatgaacgcagcaagcggtgctgctatgagcctggccggcgcagaaaaaaacggcttggtgaagattaaggtcgccgaggatgaggctgaggccgctgccgcggcaaaatttactgggctaagcaaggaggagttgctgaaggtagccgggagcccaggatgggtccggacaagatgggccctcctgctcctattttggttgggatggctgggcatgctggcaggtgcagttgtcattattgtaagagctcctagatgccgggaattacccgctcagaagtggtggcacactggggcactctaccgaattggcgatttgcaggcatttcaggggcatggggccggtaacctcgctggcctcaagggacgcttggattatctctcatcgttgaaggtgaaaggactggtgctcggccccatccataaaaatcagaaggacgatgtggcacagacggatcttctgcagatagacccaaatttcggatcaaaggaagatttcgatagcctcctgcagtccgcaaagaagaagagcattcgggtcatcctggacttgactccaaattatcgcggcgagaactcgtggttttctacccaagttgatacagttgccacaaaagtgaaggacgctctcgagttctggctgcaggccggggtggacggttttcaggtccgtgatatcgaaaacctaaaggatgcctcttcgttcctggcagaatggcaaaacataacaaaaggattcagcgaggacaggctgctaatcgccgggactaatagtagcgatctgcagcagattttgtcgcttctcgagagcaacaaggacctccttcttacctcttcctacctgtccgattccggcagtacaggtgagcacacaaaaagtctggtcactcagtacttgaatgccaccggaaatagatggtgcagttggagtctgagtcaggccaggctactaacgtctttcttgccagcacagctgctgaggctgtaccagcttatgctgttcaccttgccaggcaccccagttttctcctatggggatgaaatcgggctggatgcagccgccctacccggacagccgatggaagccccggttatgctctgggatgagagttcctttccagacatcccaggagcggtgagcgctaatatgacagtgaaaggccagtccgaagaccccggcagcctactatcactatttcggcgattgagcgaccagagaagcaaagagagaagtttgttgcacggagacttccacgcatttagtgcaggtcctgggctattctcttacatccgacactgggaccagaacgaaaggttcttggtggtgctgaacttcggcgacgttgggctgagtgctgggctccaggcatccgatctccctgcctctgcctctttgcctgcgaaagctgacctgctcctctcaacacagcctggccgagaggaagggtctccgttagagctggagcgtctgaaactcgagccgcacgagggcctcttgctgcgatttccgtacgccgcatag

SEQ ID NO: 25175 - DNA, 1986 bp, Artificial Sequence
  derived and/or modified sequence
atggagctgcagccccccgaggccagcatcgccgtggtgagcatcccacggcagctccctggttcccactccgaggcaggagtacagggcctaagcgccggagatgatagcgaactgggctctcattgtgtcgcccaaacaggcttagaactgctcgcttctggagacccgctcccgagtgcttcgcaaaatgccgagatgattgagaccggctccgactgcgtcacgcaagccggtctgcaactgttggcttcctctgatccccctgcgctggcctccaagaatgcagaagtgacagagaccggtttccaccatgtctctcaggcagacatcgagtttctgaccagtatagatcccactgcgagcgcatccggcagcgctgggatcaccggcaccatgtctcaggatacggaggttgacatgaaagaagttgaactgaatgaacttgagccggagaaacaaccaatgaacgcagcctcaggggctgccatgtctctagctggtgctgagaaaaatggcttggtgaagatcaaggtggccgaggatgaggcagaggcagccgcagctgccaagttcactgggctatccaaggaagagctgctgaaagtagcggggagtccaggctgggtgcgcactagatgggcactcctgttactattttggcttgggtggctcgggatgctggctggcgcagtggtgattatcgttagagctccaagatgcagagaacttcccgctcagaagtggtggcacacaggagccctgtatcgcatcggcgatctgcaggcttttcaagggcacggagccgggaatcttgctggactgaagggcagactggactatctgtcctccctcaaggtgaagggtctagtgctggggcccatacataaaaatcagaaagacgacgtggcccagaccgaccttctgcagattgatccgaacttcggaagcaaggaggatttcgactcgctgttgcagtcagccaaaaaaaaaagcattcgcgttatcctggacctcaccccgaactaccggggagaaaactcatggttcagcactcaggtcgatacagtggctactaaagtaaaagatgctctcgagttctggctacaggctggcgtggacggattccaggtgagagacattgagaacctgaaggacgcctctagcttcctggccgagtggcagaatatcactaaaggtttcagtgaggatagacttctgatagcaggaacaaactcttctgatctacagcagatcctgagcctgctggagtctaacaaagacctgcttttaaccagttcgtatctgtctgacagtggcagcacgggcgagcacacaaagagtctggtaacccagtacctcaatgccacgggtaataggtggtgttcctggtctttatcccaagctcgactcctcactagttttctccccgcccagctgttgcgtttatatcagctgatgctgttcacgcttcccggtactcccgtgttttcctacggagatgaaatcggcctggatgctgccgcactgcccggacagccaatggaggcccccgtaatgttgtgggacgaatcctccttccccgatatcccaggagccgtgagcgctaatatgactgtgaaggggcagtcagaggatccaggctccttgcttagcctttttagaaggctgtctgatcaacggtcgaaagaaaggtcactgctgcatggtgatttccatgctttcagcgcaggccctgggttgttctcctacatacgccattgggatcaaaacgagcgatttctggtggtgcttaacttcggagacgtgggattgtcagcagggcttcaggcttcagacctgccagccagtgccagcctgccagccaaagctgacctcctattgtcaactcagcccggcagagaagagggttctccactggaacttgagagacttaaactggagccccatgagggattactgctgaggttcccttacgccgcctag

SEQ ID NO: 25176 - DNA, 1896 bp, Artificial Sequence
  derived and/or modified sequence
atggagctgcagcctccggaggcatccattgctgtcgtatccatcccaagacaactgcctgggtctcactcagaggctggcgtgcagggtctttcagctggggacgatagtgaaacaggatccgactgtgtgacacaggccggactgcagctgctagcatcgtccgatcctccggcactagcctccaagaacgccgaagttaccgtggaaacaggctttcatcacgtctcacaggctgacatcgaatttttaacaagcattgaccccactgccagcgccagtggaagcgccggaatcacagggacgatgagtcaagataccgaagtggacatgaaagaggtggaacttaatgagctcgagccagagaaacagcccatgaatgctgcatctggcgcagctatgtccctcgctggtgctgagaagaatgggctcgtgaaaattaaggtcgctgaggatgaggccgaagcggctgccgcagccaagttcacaggtctaagtaaagaggagttgctcaaggttgccggatctccaggctgggtcagaacccgctgggcactgcttcttctgttctggctggggtggctcggaatgttagccggagccgtggtcattatcgtgagggccccacggtgtcgagaactcccggctcaaaaatggtggcacaccggggctctttatcgcattggtgatttacaggcatttcaggggcacggcgcagggaacctggctggcctcaagggacgactggactacctctcctcgttgaaagtgaagggccttgtactgggcccaattcataagaatcaaaaagacgacgtggctcaaaccgatcttctccagattgatcctaattttggttcaaaggaggacttcgattctctactgcagtccgcgaagaagaagagcattagggtcatcctggatctcaccccaaattataggggcgagaattcctggttttctacgcaggttgacactgttgcaacgaaggtgaaggatgccctggagttctggctgcaggcaggagtcgatgggtttcaagtccgggatatcgagaatctgaaagacgcatccagcttcctggccgaatggcagaacatcaccaaggggttttctgaagacaggttgctaattgctggtacaaacagtagtgatttacagcagatcttgtccctgttagaatccaataaggacctgctgctcactagctcatacctcagtgattccggcagtacaggcgagcacacgaaaagtctggtgacacaatacctgaacgccacaggcaatagatggtgctcatggtcgctgtcacaggcacggttgctgacatcctttctcccggctcagttgctgcgactgtatcagttgatgctgtttactctccccggtacacctgtgtttagctacggcgatgagatcggtctggacgcagctgcactccctggccagcctatggaagcccctgtcatgctttgggatgaaagcagctttccagacatcccgggagcagtgtctgccaacatgacagttaaagggcagtccgaggatccaggctcattgctctctctgtttcgccgactgagtgaccaacggagtaaagaacgttctctgctgcacggtgactttcacgcattctcagcgggtccagggctgttttcatacatccgacactgggatcagaatgagcgctttttggtcgtgcttaatttcggcgacgtgggcttgtccgctgggcttcaagcttccgatctccccgcaagtgcctccttgcccgctaaggcagacttattgctttcaacgcagccaggacgcgaggaagggtctcccttggaactggagcgcctgaagctggagccacatgaaggcctgttgctgcggttcccctacgccgcatag

SEQ ID NO: 25177 - DNA, 1986 bp, Artificial Sequence
  derived and/or modified sequence
atggaactgcagcctcctgaggcatccattgccgtcgtgagcattccacgccagctgcccggaagtcacagcgaagccggagtgcagggcctctctgccggagacgactcagaactgggtagccattgtgtggcccagaccgggctggagctcttggcaagcggagatccactccctagtgctagccagaatgccgaaatgatcgagactggatcggattgcgtgacacaggctggactgcaactgcttgcttccagcgatcctcctgctctggcatcaaaaaatgctgaagtcacagagaccgggttccatcatgtttcccaggcagacatcgaatttcttaccagcatagatcctaccgcttctgcctctgggtccgcgggtataaccggaacaatgtcacaagacaccgaagttgacatgaaagaagtggaactcaacgaactagagccggagaagcagccgatgaatgcagcctctggagccgcaatgtcccttgccggagcagagaagaatggacttgtgaaaataaaagttgcggaagacgaagccgaggccgcagctgctgccaaatttaccgggctgtccaaagaggaactgcttaaagtggccggatccccgggatgggtaagaactaggtgggcacttctgttgcttttttggctgggctggttggggatgttagcaggtgccgtggtcataatcgtgcgtgctccacggtgtagggagctgcccgctcagaaatggtggcatacgggagccctctataggatcggagaccttcaggcattccaggggcatggtgccggaaacttagctggcctgaaaggcaggctcgattacctgagttctctcaaggttaagggattagtgctcggccctattcacaagaatcaaaaggatgatgtggcgcagactgacctattgcaaatcgatcccaatttcggcagtaaggaagactttgacagcctgctacaatctgccaagaaaaagtctattagggtgatcctagatctgactccaaattaccgcggtgaaaatagttggttttctacccaggtcgataccgtagctacaaaggttaaagacgccctggaattctggttgcaagccggtgtggacgggttccaagtgcgtgatatagagaacctgaaggacgccagctccttcctagctgaatggcagaatatcaccaaagggtttagcgaggatcgtctgctgatagcaggcactaattcctccgacctacaacagattctttccctcttagaaagcaacaaggatctgctgctgactagtagttatctgtccgattcaggatctacaggggaacataccaaaagtctcgttacgcagtatctcaatgccactggtaatagatggtgcagctggagcctctctcaggccagacttctgacttcattcctgccggctcagctgctccggctgtatcaactcatgctgttcactctcccaggcacacccgtgttctcttacggggatgagataggcctggacgctgctgcactgcccggacaaccaatggaggctcccgtgatgctctgggacgagtccagtttccctgatatacccggagcagtgtcagctaatatgacagtcaaaggacagtcagaagatcctggatcactactgagcttgtttaggagactgtccgatcagaggtccaaggaacgctcactgcttcacggtgattttcatgctttttctgcagggcctggcctattcagctatatcaggcattgggatcagaatgagagatttctcgtggtgctcaactttggcgatgtgggcctttctgcaggactgcaggccagcgatctccctgcgtccgcatctctgcctgccaaggcagatctgctgctgagcacccagcccggacgggaagaagggtccccacttgagctggagaggttaaagctggagccacacgagggactcctcctgagattcccttacgccgcttag

SEQ ID NO: 25178 - DNA, 1904 bp, Artificial Sequence
  derived and/or modified sequence
cagaggccgcgcctgctgctgagcagatgcagtagccgaaactgcgcggaggcacagaggccggggagagcgttctgggtccgagggtccaggtaggggttgagccaccatctgaccgcaagctgcgtcgtgtcgccggttctgcaggcaccatgagccaggacaccgaggtggatatgaaggaggtggagctgaatgagttagagcccgagaagcagccgatgaacgcggcgtctggggcggccatgtccctggcgggagccgagaagaatggtctggtgaagatcaaggtggcggaagacgaggcggaggcggcagccgcggctaagttcacgggcctgtccaaggaggagctgctgaaggtggcaggcagccccggctgggtacgcacccgctgggcactgctgctgctcttctggctcggctggctcggcatgcttgctggtgccgtggtcataatcgtgcgagcgccgcgttgtcgcgagctaccggcgcagaagtggtggcacacgggcgccctctaccgcatcggcgaccttcaggccttccagggccacggcgcgggcaacctggcgggtctgaaggggcgtctcgattacctgagctctctgaaggtgaagggccttgtgctgggtccaattcacaagaaccagaaggatgatgtcgctcagactgacttgctgcagatcgaccccaattttggctccaaggaagattttgacagtctcttgcaatcggctaaaaaaaagagcatccgtgtcattctggaccttactcccaactaccggggtgagaactcgtggttctccactcaggttgacactgtggccaccaaggtgaaggatgctctggagttttggctgcaagctggcgtggatgggttccaggttcgggacatagagaatctgaaggatgcatcctcattcttggctgagtggcaaaatatcaccaagggcttcagtgaagacaggctcttgattgcggggactaactcctccgaccttcagcagatcctgagcctactcgaatccaacaaagacttgctgttgactagctcatacctgtctgattctggttctactggggagcatacaaaatccctagtcacacagtatttgaatgccactggcaatcgctggtgcagctggagtttgtctcaggcaaggctcctgacttccttcttgccggctcaacttctccgactctaccagctgatgctcttcaccctgccagggacccctgttttcagctacggggatgagattggcctggatgcagctgcccttcctggacagcctatggaggctccagtcatgctgtgggatgagtccagcttccctgacatcccaggggctgtaagtgccaacatgactgtgaagggccagagtgaagaccctggctccctcctttccttgttccggcggctgagtgaccagcggagtaaggagcgctccctactgcatggggacttccacgcgttctccgctgggcctggactcttctcctatatccgccactgggaccagaatgagcgttttctggtagtgcttaactttggggatgtgggcctctcggctggactgcaggcctccgacctgcctgccagcgccagcctgccagccaaggctgacctcctgctcagcacccagccaggccgtgaggagggctcccctcttgagctggaacgcctgaaactggagcctcacgaagggctgctgctccgcttcccctacgcggcctgacttcagcctgacatggacccactacccttctcctttccttcccaggccctttggcttctgatttttctcttttttaaaaacaaacaaacaaactgttgcagattatgagtgaacccccaaatagggtgttttctgccttcaaataaaagtcacccctgcatg

SEQ ID NO: 25179 - DNA, 2222 bp, Artificial Sequence
  derived and/or modified sequence
attgcggcttggttttctcacccagtgcatgtggcaggagcggtgagatcactgcctcacggcgatcctggactgacggtcacgactgcctaccctctaaccctgttctgagctgccccttgcccacacaccccaaacctgtgtgcaggatccgcctccatggagctacagcctcctgaagcctcgatcgccgtcgtgtcgattccgcgccagttgcctggctcacattcggaggctggtgtccagggtctcagcgcgggggacgactcagagacggggtctgactgtgttacccaggctggtcttcaactcttggcctcaagtgatcctcctgccttagcttccaagaatgctgaggttacagtagaaacggggtttcaccatgttagccaggctgatattgaattcctgacctcaattgatccgactgcctcggcctccggaagtgctgggattacaggcaccatgagccaggacaccgaggtggatatgaaggaggtggagctgaatgagttagagcccgagaagcagccgatgaacgcggcgtctggggcggccatgtccctggcgggagccgagaagaatggtctggtgaagatcaaggtggcggaagacgaggcggaggcggcagccgcggctaagttcacgggcctgtccaaggaggagctgctgaaggtggcaggcagccccggctgggtacgcacccgctgggcactgctgctgctcttctggctcggctggctcggcatgcttgctggtgccgtggtcataatcgtgcgagcgccgcgttgtcgcgagctaccggcgcagaagtggtggcacacgggcgccctctaccgcatcggcgaccttcaggccttccagggccacggcgcgggcaacctggcgggtctgaaggggcgtctcgattacctgagctctctgaaggtgaagggccttgtgctgggtccaattcacaagaaccagaaggatgatgtcgctcagactgacttgctgcagatcgaccccaattttggctccaaggaagattttgacagtctcttgcaatcggctaaaaaaaagagcatccgtgtcattctggaccttactcccaactaccggggtgagaactcgtggttctccactcaggttgacactgtggccaccaaggtgaaggatgctctggagttttggctgcaagctggcgtggatgggttccaggttcgggacatagagaatctgaaggatgcatcctcattcttggctgagtggcaaaatatcaccaagggcttcagtgaagacaggctcttgattgcggggactaactcctccgaccttcagcagatcctgagcctactcgaatccaacaaagacttgctgttgactagctcatacctgtctgattctggttctactggggagcatacaaaatccctagtcacacagtatttgaatgccactggcaatcgctggtgcagctggagtttgtctcaggcaaggctcctgacttccttcttgccggctcaacttctccgactctaccagctgatgctcttcaccctgccagggacccctgttttcagctacggggatgagattggcctggatgcagctgcccttcctggacagcctatggaggctccagtcatgctgtgggatgagtccagcttccctgacatcccaggggctgtaagtgccaacatgactgtgaagggccagagtgaagaccctggctccctcctttccttgttccggcggctgagtgaccagcggagtaaggagcgctccctactgcatggggacttccacgcgttctccgctgggcctggactcttctcctatatccgccactgggaccagaatgagcgttttctggtagtgcttaactttggggatgtgggcctctcggctggactgcaggcctccgacctgcctgccagcgccagcctgccagccaaggctgacctcctgctcagcacccagccaggccgtgaggagggctcccctcttgagctggaacgcctgaaactggagcctcacgaagggctgctgctccgcttcccctacgcggcctgacttcagcctgacatggacccactacccttctcctttccttcccaggccctttggcttctgatttttctcttttttaaaaacaaacaaacaaactgttgcagattatgagtgaacccccaaatagggtgttttctgccttcaaataaaagtcacccctgcatggtgaa

SEQ ID NO: 25180 - DNA, 2397 bp, Artificial Sequence
  derived and/or modified sequence
cctgaacttgcggcgcgaaaaaggcgcgcatgcgtcctacgggagcgtgctggctcaccgaccgcattgcggcttggttttctcacccagtgcatgtggcaggagcggtgagatcactgcctcacggcgatcctggactgacggtcacgactgcctaccctctaaccctgttctgagctgccccttgcccacacaccccaaacctgtgtgcaggatccgcctccatggagctacagcctcctgaagcctcgatcgccgtcgtgtcgattccgcgccagttgcctggctcacattcggaggctggtgtccagggtctcagcgcgggggacgactcagagttggggtctcactgtgttgcccagactggtctcgaactcttggcctcaggtgatcctcttccctcagcttcccagaatgccgagatgatagagacggggtctgactgtgttacccaggctggtcttcaactcttggcctcaagtgatcctcctgccttagcttccaagaatgctgaggttacagaaacggggtttcaccatgttagccaggctgatattgaattcctgacctcaattgatccgactgcctcggcctccggaagtgctgggattacaggcaccatgagccaggacaccgaggtggatatgaaggaggtggagctgaatgagttagagcccgagaagcagccgatgaacgcggcgtctggggcggccatgtccctggcgggagccgagaagaatggtctggtgaagatcaaggtggcggaagacgaggcggaggcggcagccgcggctaagttcacgggcctgtccaaggaggagctgctgaaggtggcaggcagccccggctgggtacgcacccgctgggcactgctgctgctcttctggctcggctggctcggcatgcttgctggtgccgtggtcataatcgtgcgagcgccgcgttgtcgcgagctaccggcgcagaagtggtggcacacgggcgccctctaccgcatcggcgaccttcaggccttccagggccacggcgcgggcaacctggcgggtctgaaggggcgtctcgattacctgagctctctgaaggtgaagggccttgtgctgggtccaattcacaagaaccagaaggatgatgtcgctcagactgacttgctgcagatcgaccccaattttggctccaaggaagattttgacagtctcttgcaatcggctaaaaaaaagagcatccgtgtcattctggaccttactcccaactaccggggtgagaactcgtggttctccactcaggttgacactgtggccaccaaggtgaaggatgctctggagttttggctgcaagctggcgtggatgggttccaggttcgggacatagagaatctgaaggatgcatcctcattcttggctgagtggcaaaatatcaccaagggcttcagtgaagacaggctcttgattgcggggactaactcctccgaccttcagcagatcctgagcctactcgaatccaacaaagacttgctgttgactagctcatacctgtctgattctggttctactggggagcatacaaaatccctagtcacacagtatttgaatgccactggcaatcgctggtgcagctggagtttgtctcaggcaaggctcctgacttccttcttgccggctcaacttctccgactctaccagctgatgctcttcaccctgccagggacccctgttttcagctacggggatgagattggcctggatgcagctgcccttcctggacagcctatggaggctccagtcatgctgtgggatgagtccagcttccctgacatcccaggggctgtaagtgccaacatgactgtgaagggccagagtgaagaccctggctccctcctttccttgttccggcggctgagtgaccagcggagtaaggagcgctccctactgcatggggacttccacgcgttctccgctgggcctggactcttctcctatatccgccactgggaccagaatgagcgttttctggtagtgcttaactttggggatgtgggcctctcggctggactgcaggcctccgacctgcctgccagcgccagcctgccagccaaggctgacctcctgctcagcacccagccaggccgtgaggagggctcccctcttgagctggaacgcctgaaactggagcctcacgaagggctgctgctccgcttcccctacgcggcctgacttcagcctgacatggacccactacccttctcctttccttcccaggccctttggcttctgatttttctcttttttaaaaacaaacaaacaaactgttgcagattatgagtgaacccccaaatagggtgttttctgccttcaaataaaagtcacccctgcatggtgaagtcttccctctgcttctctc

SEQ ID NO: 25181 - DNA, 1736 bp, Artificial Sequence
  derived and/or modified sequence
gcagtagccgaaactgcgcggaggcacagaggccggggagagcgttctgggtccgagggtccaggtaggggttgagccaccatctgaccgcaagctgcgtcgtgtcgccggttctgcaggcaccatgagccaggacaccgaggtggatatgaaggaggtggagctgaatgagttagagcccgagaagcagccgatgaacgcggcgtctggggcggccatgtccctggcgggagccgagaagaatggtctggtgaagatcaaggtggcggaagacgaggcggaggcggcagccgcggctaagttcacgggcctgtccaaggaggagctgctcttctggctcggctggctcggcatgcttgctggtgccgtggtcataatcgtgcgagcgccgcgttgtcgcgagctaccggcgcagaagtggtggcacacgggcgccctctaccgcatcggcgaccttcaggccttccagggccacggcgcgggcaacctggcgggtctgaaggggcgtctcgattacctgagctctctgaaggtgaagggccttgtgctgggtccaattcacaagaaccagaaggatgatgtcgctcagactgacttgctgcagatcgaccccaattttggctccaaggaagattttgacagtctcttgcaatcggctaaaaaaaagagcatccgtgtcattctggaccttactcccaactaccggggtgagaactcgtggttctccactcaggttgacactgtggccaccaaggtgaaggatgctctggagttttggctgcaagctggcgtggatgggttccaggttcgggacatagagaatctgaaggatgcatcctcattcttggctgagtggcaaaatatcaccaagggcttcagtgaagacaggctcttgattgcggggactaactcctccgaccttcagcagatcctgagcctactcgaatccaacaaagacttgctgttgactagctcatacctgtctgattctggttctactggggagcatacaaaatccctagtcacacagtatttgaatgccactggcaatcgctggtgcagctggagtttgtctcaggcaaggctcctgacttccttcttgccggctcaacttctccgactctaccagctgatgctcttcaccctgccagggacccctgttttcagctacggggatgagattggcctggatgcagctgcccttcctggacagcctatggaggctccagtcatgctgtgggatgagtccagcttccctgacatcccaggggctgtaagtgccaacatgactgtgaagggccagagtgaagaccctggctccctcctttccttgttccggcggctgagtgaccagcggagtaaggagcgctccctactgcatggggacttccacgcgttctccgctgggcctggactcttctcctatatccgccactgggaccagaatgagcgttttctggtagtgcttaactttggggatgtgggcctctcggctggactgcaggcctccgacctgcctgccagcgccagcctgccagccaaggctgacctcctgctcagcacccagccaggccgtgaggagggctcccctcttgagctggaacgcctgaaactggagcctcacgaagggctgctgctccgcttcccctacgcggcctgacttcagcctgacatggacccactacccttctcctttccttcccaggccctttggcttctgatttttctctttttta

SEQ ID NO: 25182 - DNA, 1896 bp, Artificial Sequence
  derived and/or modified sequence
atggagctgcagccccccgaggccagcatcgccgtggtgagcatccccagacagctgcccggcagccacagcgaggccggcgtgcagggcctgagcgccggcgacgacagcgagaccggcagcgactgcgtgacccaggccggcctgcagctgctggccagcagcgacccccccgccctggccagcaagaacgccgaggtgaccgtggagaccggcttccaccacgtgagccaggccgacatcgagttcctgaccagcatcgaccccaccgccagcgccagcggcagcgccggcatcaccggcaccatgagccaggacaccgaggtggacatgaaggaggtggagctgaacgagctggagcccgagaagcagcccatgaacgccgccagcggcgccgccatgagcctggccggcgccgagaagaacggcctggtgaagatcaaggtggccgaggacgaggccgaggccgccgccgccgccaagttcaccggcctgagcaaggaggagctgctgaaggtggccggcagccccggctgggtgagaaccagatgggccctgctgctgctgttctggctgggctggctgggcatgctggccggcgccgtggtgatcatcgtgagagcccccagatgcagagagctgcccgcccagaagtggtggcacaccggcgccctgtacagaatcggcgacctgcaggccttccagggccacggcgccggcaacctggccggcctgaagggcagactggactacctgagcagcctgaaggtgaagggcctggtgctgggccccatccacaagaaccagaaggacgacgtggcccagaccgacctgctgcagatcgaccccaacttcggcagcaaggaggacttcgacagcctgctgcagagcgccaagaagaagagcatcagagtgatcctggacctgacccccaactacagaggcgagaacagctggttcagcacccaggtggacaccgtggccaccaaggtgaaggacgccctggagttctggctgcaggccggcgtggacggcttccaggtgagagacatcgagaacctgaaggacgccagcagcttcctggccgagtggcagaacatcaccaagggcttcagcgaggacagactgctgatcgccggcaccaacagcagcgacctgcagcagatcctgagcctgctggagagcaacaaggacctgctgctgaccagcagctacctgagcgacagcggcagcaccggcgagcacaccaagagcctggtgacccagtacctgaacgccaccggcaacagatggtgcagctggagcctgagccaggccagactgctgaccagcttcctgcccgcccagctgctgagactgtaccagctgatgctgttcaccctgcccggcacccccgtgttcagctacggcgacgagatcggcctggacgccgccgccctgcccggccagcccatggaggcccccgtgatgctgtgggacgagagcagcttccccgacatccccggcgccgtgagcgccaacatgaccgtgaagggccagagcgaggaccccggcagcctgctgagcctgttcagaagactgagcgaccagagaagcaaggagagaagcctgctgcacggcgacttccacgccttcagcgccggccccggcctgttcagctacatcagacactgggaccagaacgagagattcctggtggtgctgaacttcggcgacgtgggcctgagcgccggcctgcaggccagcgacctgcccgccagcgccagcctgcccgccaaggccgacctgctgctgagcacccagcccggcagagaggagggcagccccctggagctggagagactgaagctggagccccacgagggcctgctgctgagattcccctacgccgcctag

SEQ ID NO: 25183 - DNA, 1986 bp, Artificial Sequence
  derived and/or modified sequence
atggagctgcagccccccgaggccagcatcgccgtggtgagcatccccagacagctgcccggcagccacagcgaggccggcgtgcagggcctgagcgccggcgacgacagcgagctgggcagccactgcgtggcccagaccggcctggagctgctggccagcggcgaccccctgcccagcgccagccagaacgccgagatgatcgagaccggcagcgactgcgtgacccaggccggcctgcagctgctggccagcagcgacccccccgccctggccagcaagaacgccgaggtgaccgagaccggcttccaccacgtgagccaggccgacatcgagttcctgaccagcatcgaccccaccgccagcgccagcggcagcgccggcatcaccggcaccatgagccaggacaccgaggtggacatgaaggaggtggagctgaacgagctggagcccgagaagcagcccatgaacgccgccagcggcgccgccatgagcctggccggcgccgagaagaacggcctggtgaagatcaaggtggccgaggacgaggccgaggccgccgccgccgccaagttcaccggcctgagcaaggaggagctgctgaaggtggccggcagccccggctgggtgagaaccagatgggccctgctgctgctgttctggctgggctggctgggcatgctggccggcgccgtggtgatcatcgtgagagcccccagatgcagagagctgcccgcccagaagtggtggcacaccggcgccctgtacagaatcggcgacctgcaggccttccagggccacggcgccggcaacctggccggcctgaagggcagactggactacctgagcagcctgaaggtgaagggcctggtgctgggccccatccacaagaaccagaaggacgacgtggcccagaccgacctgctgcagatcgaccccaacttcggcagcaaggaggacttcgacagcctgctgcagagcgccaagaagaagagcatcagagtgatcctggacctgacccccaactacagaggcgagaacagctggttcagcacccaggtggacaccgtggccaccaaggtgaaggacgccctggagttctggctgcaggccggcgtggacggcttccaggtgagagacatcgagaacctgaaggacgccagcagcttcctggccgagtggcagaacatcaccaagggcttcagcgaggacagactgctgatcgccggcaccaacagcagcgacctgcagcagatcctgagcctgctggagagcaacaaggacctgctgctgaccagcagctacctgagcgacagcggcagcaccggcgagcacaccaagagcctggtgacccagtacctgaacgccaccggcaacagatggtgcagctggagcctgagccaggccagactgctgaccagcttcctgcccgcccagctgctgagactgtaccagctgatgctgttcaccctgcccggcacccccgtgttcagctacggcgacgagatcggcctggacgccgccgccctgcccggccagcccatggaggcccccgtgatgctgtgggacgagagcagcttccccgacatccccggcgccgtgagcgccaacatgaccgtgaagggccagagcgaggaccccggcagcctgctgagcctgttcagaagactgagcgaccagagaagcaaggagagaagcctgctgcacggcgacttccacgccttcagcgccggccccggcctgttcagctacatcagacactgggaccagaacgagagattcctggtggtgctgaacttcggcgacgtgggcctgagcgccggcctgcaggccagcgacctgcccgccagcgccagcctgcccgccaaggccgacctgctgctgagcacccagcccggcagagaggagggcagccccctggagctggagagactgaagctggagccccacgagggcctgctgctgagattcccctacgccgcctag

SEQ ID NO: 25184 - protein, 568 aa, Artificial Sequence
  derived and/or modified sequence
MELQPPEASIAVVSIPRQLPGSHSEAGVQGLSAGDDSGTMSQDTEVDMKEVELNELEPEKQPMNAASGAAMSLAGAEKNGLVKIKVAEDEAEAAAAAKFTGLSKEELLKVAGSPGWVRTRWALLLLFWLGWLGMLAGAVVIIVRAPRCRELPAQKWWHTGALYRIGDLQAFQGHGAGNLAGLKGRLDYLSSLKVKGLVLGPIHKNQKDDVAQTDLLQIDPNFGSKEDFDSLLQSAKKKSIRVILDLTPNYRGENSWFSTQVDTVATKVKDALEFWLQAGVDGFQVRDIENLKDASSFLAEWQNITKGFSEDRLLIAGTNSSDLQQILSLLESNKDLLLTSSYLSDSGSTGEHTKSLVTQYLNATGNRWCSWSLSQARLLTSFLPAQLLRLYQLMLFTLPGTPVFSYGDEIGLDAAALPGQPMEAPVMLWDESSFPDIPGAVSANMTVKGQSEDPGSLLSLFRRLSDQRSKERSLLHGDFHAFSAGPGLFSYIRHWDQNERFLVVLNFGDVGLSAGLQASDLPASASLPAKADLLLSTQPGREEGSPLELERLKLEPHEGLLLRFPYAA

SEQ ID NO: 25185 - DNA, 1707 bp, Artificial Sequence
  derived and/or modified sequence
atggagctccaacctcctgaggccagcatcgccgtggtctcgatccccagacagctcccgggcagtcactctgaagcaggggtgcagggtctgagcgctggggacgattccggcaccatgagccaggacacagaggttgacatgaaggaagtggaattgaacgaactggaaccagaaaagcagcccatgaatgcagccagcggcgccgccatgagcctggctggggccgagaaaaatggccttgtaaagatcaaagtcgccgaggatgaagcggaggcggcagctgccgccaaatttaccggcctgtccaaggaagagctccttaaagtggcaggcagtcctggttgggtgcgaacacggtgggcactgttactcttgttctggctaggttggttagggatgctcgctggggccgtagttatcattgtcagggcgccacggtgtcgggaacttcctgctcagaagtggtggcacacgggtgcattataccggatcggtgacttgcaggctttccaggggcacggtgcaggtaatctggctggactcaagggtcgcttggattacttgagcagcctcaaggtcaaaggcctggtgctgggacctattcataagaatcagaaagatgatgttgctcagacagacctgctgcagatcgaccctaatttcgggagtaaggaggatttcgactctcttttgcagagcgccaaaaagaaaagcatccgcgtaatcttggatctgaccccaaactacaggggcgaaaacagttggttttccacacaggttgacactgtcgccaccaaagtcaaggacgcactcgaattctggctccaggcgggcgtggatggatttcaggtgcgcgatatcgagaaccttaaagatgcctcttcgtttttggcggagtggcagaatatcacaaaggggtttagcgaggacagactactgatcgctgggaccaactcaagcgatctgcagcagatcctgagccttctggaatcaaacaaagacctgttgctgacttcctcataccttagtgactccgggtctacgggggagcacacaaaaagcctcgtcacccagtatttaaatgcgacgggaaatcgctggtgctcgtggtcattatcccaagcccgactgttgacctctttccttccagcccagctgctgcgactgtaccaactgatgctgttcaccctgccggggactccagtcttctcatatggcgatgaaattgggctggacgcagccgctttacccgggcaaccaatggaggcaccagtgatgctttgggacgagtcctcctttcctgacatcccaggcgctgtgagcgccaatatgactgtgaagggccagagcgaggaccccggtagtctcctgagcctgttccggcgtctgagcgatcagagatcaaaagagagatccttgttgcacggcgattttcacgccttttctgccggccctggcctcttcagctatatccggcattgggaccaaaatgagaggttcctagtagtgctgaattttggcgacgtgggcctgtccgctggcctgcaggcatccgaccttcctgcatccgccagcctgccagcaaaagccgacctgctgttgtctacccagcctgggagagaggaagggtcgcctcttgagctggagcgcttaaaactcgaaccacacgaaggcctgctactgcggtttccatacgcggcttag

SEQ ID NO: 25186 - DNA, 1707 bp, Artificial Sequence
  derived and/or modified sequence
atggagctgcagcccccagaggccagcattgctgtggtgtccatcccccggcagctgcccggcagccacagcgaggccggcgtgcagggcctgtctgctggagatgattctggcaccatgagccaggacacagaggtggacatgaaggaggtggagctgaatgagctggagcctgagaagcagcccatgaatgctgccagcggggccgccatgagcctggccggggctgagaagaatggcctggtgaagatcaaggtggccgaggatgaagctgaggccgctgctgctgccaagttcaccggcctgagcaaggaggagctgctgaaggtggccggcagccctggctgggtgaggacccgctgggccctgctgctgctcttctggctgggctggctgggcatgctggccggggctgtggtgatcatcgtgcgggccccccgctgccgggagctgcctgcccagaagtggtggcacactggagccctgtacagaattggagacctgcaggccttccagggccacggggccggcaacctggccggcctgaagggccgcctggactacctgagcagcctgaaggtgaagggcctggtgctgggccccatccacaagaaccagaaggatgatgtggcccagacagacctgctgcagattgaccccaactttggcagcaaggaggactttgacagcctgctgcagagcgccaagaagaagagcatccgggtcatcctggacctgacccccaactacagaggagaaaattcctggttcagcacccaggtggacacagtggccaccaaggtgaaggatgccctggagttctggctgcaggccggcgtggatggcttccaggtgcgggacatcgagaacctgaaggatgccagcagcttcctggccgagtggcagaacatcaccaagggcttcagcgaggaccggctgctgattgctggcaccaacagcagtgacctgcagcagatcctgagcctgctggagagcaacaaggacctgctgctgaccagcagctacctgagtgacagcggcagcactggagagcacaccaagagcctggtgacccagtacctgaatgccaccggcaaccgctggtgctcctggagcctgagccaggcccggctgctgaccagcttcctgcctgcccagctgctgcggctgtaccagctgatgctgttcaccctgcccggcacccctgtgttctcctatggagatgagatcggcctggatgctgctgccctgcccggccagcccatggaggcccctgtgatgctgtgggatgagagcagcttcccagacatccctggagctgtgtctgccaacatgacagtgaagggccagagcgaggaccccggcagcctgctgagcctcttccggcggctgagtgaccagaggagcaaggagaggagcctgctgcacggggacttccacgccttctctgctggccctggcctcttctcctacatccgccactgggaccagaatgaacgcttcctggtggtgctgaactttggagatgtgggcctgtctgctggcctgcaggccagtgacctgcctgccagcgccagcctgcctgccaaggctgacctgctgctgagcacccagcccggccgggaggagggcagccccctggagctggagcggctgaagctggagccccatgagggcctgctgctgcgcttcccctatgctgcctag

SEQ ID NO: 25187 - DNA, 1707 bp, Artificial Sequence
  derived and/or modified sequence
atggagctgcagccccccgaggccagcatcgccgtggtgagcatcccccgccagctgccaggatcccactcagaggcaggagtgcaaggactgagcgccggcgatgactctgggacaatgagccaggatacggaagtcgacatgaaggaagtcgagctgaacgagctggaacccgagaaacagccaatgaatgctgcaagcggtgcagccatgtcactggcaggtgcagagaagaatggattggtcaagattaaggtcgctgaagacgaggctgaagctgcggcagccgctaagtttaccggtctgtccaaggaggagctgttgaaagtcgccggctcccccggctgggtacggacacgctgggcattacttctgctgttctggcttgggtggctaggaatgctggcaggcgctgtggtgataattgtccgcgcacctaggtgcagagaactgcctgcccagaagtggtggcacacaggcgccttataccgcattggagatcttcaggctttccagggccacggcgccgggaacctggctggtttgaaaggacggttagattacttgagctctctaaaggtgaaagggctggtgctaggtccgattcacaagaaccagaaggacgatgtcgcgcagacagatctgctccagatcgaccccaactttggctctaaagaagatttcgacagtctgcttcagagcgccaagaagaagtcaatcagggtgatacttgacctaactcccaattaccggggtgaaaattcctggttctcgactcaagttgacactgtcgcgactaaggttaaggatgcccttgagttttggctacaagcaggtgtcgacggtttccaagtgcgagacattgagaatctaaaagacgctagtagtttcttggccgagtggcagaatattaccaaagggttctccgaagaccggctgctcatagccggtaccaactcatccgacctgcaacaaatactcagtctcttagaatcgaacaaagatttgctattgacctcaagttatctttcggactcaggatcaaccggggaacatacaaaaagcttggtgacacagtacttgaacgctactgggaaccggtggtgctcctggtccctgagccaagcgcgattgttaaccagcttcctcccagctcagctgttgagactgtaccaattaatgctcttcacgctgcctgggacgcctgtgttcagctacggtgatgagatagggctagatgccgcagcgttaccgggacagcccatggaagcccctgtaatgttgtgggacgagtcttctttcccagacatcccaggcgccgtatccgcaaacatgacagtaaaaggccagtcagaggatcccgggtcgcttctttctctcttccgtcggctttctgatcagcgcagcaaggaaaggagcttgttgcacggcgacttccacgctttcagtgccggtcctggcctgttctcctacattcgccactgggatcagaacgaaaggtttcttgtggtgctgaacttcggcgacgtagggctgtccgctggcctgcaagcatctgacctcccagcgtctgcatctctgcccgcgaaggctgacctgcttctgtcaacccagcctggccgcgaggagggaagcccgttggaactggagcgcctgaaactggagccacacgaagggctccttctgcggttcccctatgctgcttag

SEQ ID NO: 25188 - DNA, 1707 bp, Artificial Sequence
  derived and/or modified sequence
atggagctacagcccccagaagcgtccatagccgtagtaagcattcccaggcagcttcccggatcacactctgaggccggagtccaagggctgtcagcgggtgacgattcagggacaatgtctcaggatactgaggtcgatatgaaggaggtagagctgaacgagctggagccagaaaaacagcccatgaatgccgcaagcggggcagccatgtccctggcgggtgcggaaaagaatgggcttgtgaagattaaagtcgccgaagatgaggccgaggctgccgcagccgcaaagtttactggacttagtaaagaagagctgctcaaggtggccggatcacctggatgggtcaggacgcggtgggctctgctgctgctgttctggcttggttggctcggaatgcttgcaggcgctgtcgtgataatcgtacgagctccccgatgccgggagttgcctgcccagaagtggtggcacaccggggcactttaccgaatcggagacctgcaggcttttcaggggcatggcgctggaaacctcgcagggctgaagggaaggcttgattacctctcctctctgaaggtaaagggcctcgtgctgggcccaatccataagaaccagaaggacgatgttgcacaaactgaccttttacagattgaccctaacttcggctctaaagaagatttcgacagcctccttcaatcagccaagaaaaaatccattcgcgtaatattggatctgacccccaactaccgaggtgagaattcttggtttagtacgcaggtcgacacggtcgcgaccaaagttaaggacgcgctggagttctggttgcaagctggcgttgacggctttcaggtgcgcgatatcgaaaatcttaaggatgccagcagtttccttgctgagtggcagaacataaccaaaggtttcagtgaggacagacttctgattgctggaaccaatagctccgacctacagcagattctatcgctcctggaatccaacaaagaccttctcctcacctcgagttatctgtctgattctgggtcgacgggggagcatacaaagagcctcgtaacacagtatctgaatgctacaggcaacaggtggtgttcttggagtctgagccaggccaggctgctcacttctttccttccggctcagctgttgagactgtatcagctcatgctatttactctgcccggtacccccgtgttttcctatggggatgagatagggttggatgcagcggctttgcctggacaaccgatggaagcacccgtcatgctgtgggacgaatctagcttcccagacatccccggagctgtgtcagctaatatgactgtaaaaggacaatccgaagacccaggttctttactgtcccttttccgtcgcctatctgaccagcgctcaaaagagaggagcctgctgcacggcgattttcacgccttctctgcaggtccaggactgttctcatacatcagacactgggaccagaatgaacgctttctggtcgtgctgaacttcggggatgtgggtttgtcagctggcctccaggctagcgatctgccagccagcgcctcccttccggcaaaagctgacctcctcctgagcactcagccaggcagagaggaaggctcacccctggaactggagcggctcaaattagaacctcacgaggggctcctgctacgttttccatatgccgcttag

SEQ ID NO: 25189 - DNA, 1993 bp, Artificial Sequence
  derived and/or modified sequence
gcaggagcggtgagatcactgcctcacggcgatcctggactgacggtcacgactgcctaccctctaaccctgttctgagctgccccttgcccacacaccccaaacctgtgtgcaggatccgcctccatggagctacagcctcctgaagcctcgatcgccgtcgtgtcgattccgcgccagttgcctggctcacattcggaggctggtgtccagggtctcagcgcgggggacgactcaggcaccatgagccaggacaccgaggtggatatgaaggaggtggagctgaatgagttagagcccgagaagcagccgatgaacgcggcgtctggggcggccatgtccctggcgggagccgagaagaatggtctggtgaagatcaaggtggcggaagacgaggcggaggcggcagccgcggctaagttcacgggcctgtccaaggaggagctgctgaaggtggcaggcagccccggctgggtacgcacccgctgggcactgctgctgctcttctggctcggctggctcggcatgcttgctggtgccgtggtcataatcgtgcgagcgccgcgttgtcgcgagctaccggcgcagaagtggtggcacacgggcgccctctaccgcatcggcgaccttcaggccttccagggccacggcgcgggcaacctggcgggtctgaaggggcgtctcgattacctgagctctctgaaggtgaagggccttgtgctgggtccaattcacaagaaccagaaggatgatgtcgctcagactgacttgctgcagatcgaccccaattttggctccaaggaagattttgacagtctcttgcaatcggctaaaaaaaagagcatccgtgtcattctggaccttactcccaactaccggggtgagaactcgtggttctccactcaggttgacactgtggccaccaaggtgaaggatgctctggagttttggctgcaagctggcgtggatgggttccaggttcgggacatagagaatctgaaggatgcatcctcattcttggctgagtggcaaaatatcaccaagggcttcagtgaagacaggctcttgattgcggggactaactcctccgaccttcagcagatcctgagcctactcgaatccaacaaagacttgctgttgactagctcatacctgtctgattctggttctactggggagcatacaaaatccctagtcacacagtatttgaatgccactggcaatcgctggtgcagctggagtttgtctcaggcaaggctcctgacttccttcttgccggctcaacttctccgactctaccagctgatgctcttcaccctgccagggacccctgttttcagctacggggatgagattggcctggatgcagctgcccttcctggacagcctatggaggctccagtcatgctgtgggatgagtccagcttccctgacatcccaggggctgtaagtgccaacatgactgtgaagggccagagtgaagaccctggctccctcctttccttgttccggcggctgagtgaccagcggagtaaggagcgctccctactgcatggggacttccacgcgttctccgctgggcctggactcttctcctatatccgccactgggaccagaatgagcgttttctggtagtgcttaactttggggatgtgggcctctcggctggactgcaggcctccgacctgcctgccagcgccagcctgccagccaaggctgacctcctgctcagcacccagccaggccgtgaggagggctcccctcttgagctggaacgcctgaaactggagcctcacgaagggctgctgctccgcttcccctacgcggcctgacttcagcctgacatggacccactacccttctcctttccttcccaggccctttggcttctgatttttctcttttttaaaaacaaacaaacaaactgttgcagattatgagtgaacccccaaatagggtgttttctgccttcaaataaaagtcacccctgca

SEQ ID NO: 25190 - DNA, 589 bp, Artificial Sequence
  derived and/or modified sequence
gcaagccttggtgggggaaaaggcagaagttgtgactggctgcctctgagagtgcaagtagccatgcaaagttgggaaaaccagacggcggccggagccgtgaaccaggggcaaatggaggatggtgttggggtagtcactagcctgccggaatggaagaagaggggcgtttgggggcggcaccatgagccaggacaccgaggtggatatgaaggaggtggagctgaatgagttagagcccgagaagcagccgatgaacgcggcgtctggggcggccatgtccctggcgggagccgagaagaatggtctggtgaagatcaaggtggcggaagacgaggcggaggcggcagccgcggctaagttcacgggcctgtccaaggaggagctgctgaaggtggcaggcagccccggctgggtacgcacccgctgggcactgctgctgctcttctggctcggctggctcggcatgcttgctggtgccgtggtcataatcgtgcgagcgccgcgttgtcgcgagctaccggcgcagaagtggtggcacacgggcgccctctaccgcatcggcgaccttcaggccttccagggccac

SEQ ID NO: 25191 - DNA, 1707 bp, Artificial Sequence
  derived and/or modified sequence
atggagctgcagccccccgaggccagcatcgccgtggtgagcatccccagacagctgcccggcagccacagcgaggccggcgtgcagggcctgagcgccggcgacgacagcggcaccatgagccaggacaccgaggtggacatgaaggaggtggagctgaacgagctggagcccgagaagcagcccatgaacgccgccagcggcgccgccatgagcctggccggcgccgagaagaacggcctggtgaagatcaaggtggccgaggacgaggccgaggccgccgccgccgccaagttcaccggcctgagcaaggaggagctgctgaaggtggccggcagccccggctgggtgagaaccagatgggccctgctgctgctgttctggctgggctggctgggcatgctggccggcgccgtggtgatcatcgtgagagcccccagatgcagagagctgcccgcccagaagtggtggcacaccggcgccctgtacagaatcggcgacctgcaggccttccagggccacggcgccggcaacctggccggcctgaagggcagactggactacctgagcagcctgaaggtgaagggcctggtgctgggccccatccacaagaaccagaaggacgacgtggcccagaccgacctgctgcagatcgaccccaacttcggcagcaaggaggacttcgacagcctgctgcagagcgccaagaagaagagcatcagagtgatcctggacctgacccccaactacagaggcgagaacagctggttcagcacccaggtggacaccgtggccaccaaggtgaaggacgccctggagttctggctgcaggccggcgtggacggcttccaggtgagagacatcgagaacctgaaggacgccagcagcttcctggccgagtggcagaacatcaccaagggcttcagcgaggacagactgctgatcgccggcaccaacagcagcgacctgcagcagatcctgagcctgctggagagcaacaaggacctgctgctgaccagcagctacctgagcgacagcggcagcaccggcgagcacaccaagagcctggtgacccagtacctgaacgccaccggcaacagatggtgcagctggagcctgagccaggccagactgctgaccagcttcctgcccgcccagctgctgagactgtaccagctgatgctgttcaccctgcccggcacccccgtgttcagctacggcgacgagatcggcctggacgccgccgccctgcccggccagcccatggaggcccccgtgatgctgtgggacgagagcagcttccccgacatccccggcgccgtgagcgccaacatgaccgtgaagggccagagcgaggaccccggcagcctgctgagcctgttcagaagactgagcgaccagagaagcaaggagagaagcctgctgcacggcgacttccacgccttcagcgccggccccggcctgttcagctacatcagacactgggaccagaacgagagattcctggtggtgctgaacttcggcgacgtgggcctgagcgccggcctgcaggccagcgacctgcccgccagcgccagcctgcccgccaaggccgacctgctgctgagcacccagcccggcagagaggagggcagccccctggagctggagagactgaagctggagccccacgagggcctgctgctgagattcccctacgccgcctag

SEQ ID NO: 25192 - DNA, 408 bp, Artificial Sequence
  derived and/or modified sequence
atggtgcctgccccacccttcctgggcgtgctggagaaccctgtgccccagtgggacctgagcatcctgggcagcatccgcatccgggtgagccacacagaggtgcagggcagcggcagcagccgcagccctgaggccctgaggaaggagagcctggaggtggagtggaccctggtgctgctggccatccccccacgcatccagcccagccagcaggacggcggcccccccaagtgctgtgacctgctgcgggccgccctgctgggccgccactgccccctgtgtgtgcctgctggggaggtgttcagccagaagagggacaatgagcaggacagaagtgagttcatcggccagaccctgaagctgctggtgaagagaaatgtgtccctggagctgagctgcaggtag

SEQ ID NO: 25193 - protein, 188 aa, Artificial Sequence
  derived and/or modified sequence
MCFPKVLSDDMKKLKARMHQAIERFYDKMQNAESGRGQVMSSLAELEDDFKEGYLETVAAYYEEQHPELTPLLEKERDGLRCRGNRSPVPDVEDPATEEPGESFCDKVMRWFQAMLQRLQTWWHGVLAWVKEKVVALVHAVQALWKQFQSFCCSLSELFMSSFQSYGAPRGDKEELTPQKCSEPQSSK

SEQ ID NO: 25194 - protein, 178 aa, Artificial Sequence
  derived and/or modified sequence
MKKLKARMHQAIERFYDKMQNAESGRGQVMSSLAELEDDFKEGYLETVAAYYEEQHPELTPLLEKERDGLRCRGNRSPVPDVEDPATEEPGESFCDKVMRWFQAMLQRLQTWWHGVLAWVKEKVVALVHAVQALWKQFQSFCCSLSELFMSSFQSYGAPRGDKEELTPQKCSEPQSSK

SEQ ID NO: 25195 - DNA, 567 bp, Artificial Sequence
  derived and/or modified sequence
atgtgcttccccaaggtgctgagcgacgacatgaagaagctgaaggccagaatgcaccaggccatcgagagattctacgacaagatgcagaacgccgagagcggcagaggccaggtgatgagcagcctggccgagctggaggacgacttcaaggagggctacctggagaccgtggccgcctactacgaggagcagcaccccgagctgacccccctgctggagaaggagagagacggcctgagatgcagaggcaacagaagccccgtgcccgacgtggaggaccccgccaccgaggagcccggcgagagcttctgcgacaaggtgatgagatggttccaggccatgctgcagagactgcagacctggtggcacggcgtgctggcctgggtgaaggagaaggtggtggccctggtgcacgccgtgcaggccctgtggaagcagttccagagcttctgctgcagcctgagcgagctgttcatgagcagcttccagagctacggcgcccccagaggcgacaaggaggagctgaccccccagaagtgcagcgagccccagagcagcaagtag

SEQ ID NO: 25196 - DNA, 537 bp, Artificial Sequence
  derived and/or modified sequence
atgaagaagctgaaggccagaatgcaccaggccatcgagagattctacgacaagatgcagaacgccgagagcggcagaggccaggtgatgagcagcctggccgagctggaggacgacttcaaggagggctacctggagaccgtggccgcctactacgaggagcagcaccccgagctgacccccctgctggagaaggagagagacggcctgagatgcagaggcaacagaagccccgtgcccgacgtggaggaccccgccaccgaggagcccggcgagagcttctgcgacaaggtgatgagatggttccaggccatgctgcagagactgcagacctggtggcacggcgtgctggcctgggtgaaggagaaggtggtggccctggtgcacgccgtgcaggccctgtggaagcagttccagagcttctgctgcagcctgagcgagctgttcatgagcagcttccagagctacggcgcccccagaggcgacaaggaggagctgaccccccagaagtgcagcgagccccagagcagcaagtag

SEQ ID NO: 25197 - DNA, 567 bp, Artificial Sequence
  derived and/or modified sequence
atgtgcttcccaaaagttctttctgacgacatgaagaagctgaaggcccggatgcaccaggcgatcgagcgtttttacgacaagatgcaaaatgccgagtcggggcgtggtcaggtcatgtcgagcttagccgagctggaggacgactttaaagaagggtacctggagaccgtcgctgcctactacgaggagcagcatccagagctgaccccattactcgaaaaggagagagatggtcttcggtgtcgcggcaatcggagccctgtgcccgacgtggaggaccccgcaactgaagaacctggtgagagtttctgcgacaaggttatgcggtggtttcaggcaatgttacagcgtctccaaacttggtggcatggcgtcctggcatgggtaaaagagaaggtggtggcactggtgcatgctgtgcaggccctgtggaaacagtttcagtccttttgttgctctttgtctgagctgtttatgtcaagtttccaatcttatggggcacctagaggcgacaaggaggaactaaccccccagaagtgctctgagccacagtccagtaagtag

SEQ ID NO: 25198 - DNA, 567 bp, Artificial Sequence
  derived and/or modified sequence
atgtgttttccaaaggtcctgtccgacgatatgaagaagttgaaagctcgaatgcaccaagctatcgaaaggttctatgataaaatgcagaacgctgaatcaggtagaggtcaagtgatgtccagcttagccgagctggaggatgattttaaagagggttatctggagacagtcgccgcttactacgaggaacaacaccccgaactaactccactcttggaaaaggaaagagacggcctgaggtgtagaggtaaccggagtccagtccctgatgtggaggatcccgccactgaggaacccggcgagagtttctgtgacaaggtgatgagatggttccaggcgatgctgcagcgtcttcaaacatggtggcatggtgtcctcgcctgggttaaagagaaggttgttgcactggtacacgctgtgcaggctctgtggaaacagtttcaaagcttttgttgcagtttgagcgagctgttcatgtcgagcttccagagctatggtgcgccgcgcggggataaagaagagctaactccccaaaagtgctccgaacctcagtcatctaaatag

SEQ ID NO: 25199 - DNA, 567 bp, Artificial Sequence
  derived and/or modified sequence
atgtgttttcccaaagtactcagcgacgatatgaagaaactgaaagcacggatgcatcaggcaatcgagcggttctacgacaagatgcaaaacgcggagtccggccggggccaggtaatgagcagcctggccgaacttgaggatgactttaaggaagggtatctcgaaactgtcgctgcctactacgaggaacagcatcccgaactcacaccattgctggaaaaggagagagacggactgaggtgcaggggtaaccgctctcccgttccagacgtagaggatccagcaactgaggagccaggcgagtctttttgcgacaaagtgatgaggtggtttcaggccatgctccagagactgcagacatggtggcatggggtgttggcatgggtcaaagaaaaagtggtcgcattagttcatgccgtgcaagccctctggaagcaattccaaagcttctgctgttccttatcggaactgttcatgagcagctttcagtcttacggggctccccgtggcgacaaggaagaactgacgcctcaaaagtgtagcgagccacagtcttccaagtag

SEQ ID NO: 25200 - DNA, 567 bp, Artificial Sequence
  derived and/or modified sequence
atgtgctttcctaaagtcttgtctgatgatatgaagaagctgaaagctcgtatgcatcaggcaatagagcgcttttacgataagatgcaaaacgctgaatccggacgtggccaggttatgtcatccctagccgagttggaagatgattttaaggagggatatcttgaaacagttgctgcctattacgaggaacagcacccagagttgacccctttgctggagaaggagcgcgatggtctgcgatgccggggcaacaggagccccgtgcctgatgttgaagatcccgcaaccgaagaacctggcgaatccttttgcgacaaagttatgagatggttccaggccatgctgcagaggctacaaacctggtggcatggcgtgctcgcctgggtgaaggagaaagtggtggctctagtgcatgcagtgcaagccctatggaaacaattccaatccttttgttgctcactgagcgagctgtttatgtcttctttccagtcttatggggcccctagaggggacaaggaggagctgacaccacagaagtgtagtgagccacagagctccaaatag

SEQ ID NO: 25201 - DNA, 567 bp, Artificial Sequence
  derived and/or modified sequence
atgtgtttcccaaaagtgttaagcgacgacatgaagaagctcaaggcaaggatgcaccaagccatagagaggttctacgacaagatgcagaatgctgagagcggccggggacaggtcatgagcagtctggccgaactcgaggatgacttcaaggaggggtatctagagaccgtcgctgcctactatgaggagcagcatcctgagctcacacctcttcttgagaaggaaagagacgggctgcgctgtagaggaaaccggagtccggtacccgacgtggaggacccggcaactgaggaaccaggggaatcgttttgtgacaaggtcatgagatggtttcaagccatgttgcaacggcttcagacctggtggcatggcgtgctggcttgggtgaaagaaaaagtcgtggccctagtgcacgcagtgcaggcactgtggaagcaattccagtcattttgctgcagccttagtgagctgttcatgtccagcttccagtcctatggagcccctcggggagacaaggaagaacttaccccccaaaaatgctcggaaccacaatcgtctaagtag

SEQ ID NO: 25202 - DNA, 567 bp, Artificial Sequence
  derived and/or modified sequence
atgtgcttccccaaggtgctcagcgacgatatgaagaagttgaaagcacgaatgcaccaggcgattgagcggttctatgataagatgcagaacgcagaatcgggccgaggtcaagtaatgtcatccctggccgagctggaagacgatttcaaagagggttacttggaaaccgtggctgcctattatgaggagcagcatcctgagctgacacctctgctagagaaagagagggacggtttacggtgtcgcggcaatcgctcaccagttccggacgtggaagacccagccacggaagagccaggagaatcattctgcgacaaggttatgcgttggtttcaggctatgttgcagagattgcagacctggtggcacggcgtattagcatgggttaaggagaaggttgtggccttggtgcatgccgtgcaggcactgtggaagcagttccagtccttttgctgcagcctctcggagctctttatgtcatctttccagagctacggcgccccaagaggggacaaagaagaattaaccccacagaaatgtagtgaaccgcagagcagtaagtag

SEQ ID NO: 25203 - DNA, 567 bp, Artificial Sequence
  derived and/or modified sequence
atgtgcttcccaaaggtgctgtctgacgacatgaagaagttaaaggccaggatgcaccaggcaatcgagagattctatgacaagatgcaaaacgctgagagtgggagaggccaggtgatgtcttctttggccgagctggaagatgattttaaggagggataccttgaaacagtggccgcatactacgaggaacagcacccggagttgactcctctcttagagaaggagagggacggcttaagatgcaggggaaataggagccctgtgcctgacgtggaggatcccgctaccgaggagcctggggagtccttttgcgataaggtcatgagatggttccaggctatgctccagcgactccaaacatggtggcacggcgtgctggcatgggtcaaggaaaaggtagtggcattggtgcatgcagtgcaagccctctggaaacagttccagagcttttgctgttctctgtccgaactttttatgtcaagctttcagtcttacggtgctccacgaggcgataaagaggaactcacgccccagaagtgctccgaaccccagagctccaaatag

SEQ ID NO: 25204 - DNA, 567 bp, Artificial Sequence
  derived and/or modified sequence
atgtgctttccaaaggtgctttccgatgatatgaagaaactcaaagccaggatgcaccaggccatcgagagattttacgacaagatgcaaaacgccgaatcaggacgcggtcaggtcatgtcttctctggctgagctggaagatgactttaaagagggctatctcgaaactgttgcggcttactacgaggaacaacatcccgagctgaccccgctgctggagaaagagagagacgggctgcgatgtaggggcaatagaagccctgtgcctgatgttgaggacccagccactgaagagcccggggaatctttctgcgataaggttatgcggtggttccaggcgatgcttcagcggctgcagacctggtggcatggggtgctggcctgggtgaaagagaaggtagtggctctcgtacatgccgtacaggccctgtggaagcagttccagtccttctgttgctccttatctgagttattcatgtctagcttccagtcatacggagctcctcgcggtgataaagaggagctcacccctcagaaatgcagcgaacctcagtcctccaaatag

SEQ ID NO: 25205 - DNA, 537 bp, Artificial Sequence
  derived and/or modified sequence
atgaaaaaattgaaggctcgcatgcaccaggcgattgaacggttctatgacaaaatgcagaatgccgagagcggccgtggacaggtaatgagtagcctagctgaactcgaggatgacttcaaggagggctatctggaaaccgtcgccgcttattacgaggaacagcaccctgaactgaccccactgctggaaaaagaaagggatgggctcaggtgtaggggaaaccgcagtccagtgccagacgtggaagacccagctacagaggaacctggggagagcttctgtgacaaggtgatgcgatggtttcaggctatgctccagcgactgcaaacctggtggcacggggtcctagcctgggtgaaagaaaaagtggttgcgctggtccatgcggtacaggccctttggaaacagttccagagtttctgctgttccctgagtgagttgttcatgtcaagtttccagagctacggagcacctagaggggacaaagaagaactgacaccacagaaatgttccgagccccagagcagtaagtag

SEQ ID NO: 25206 - DNA, 567 bp, Artificial Sequence
  derived and/or modified sequence
atgtgtttccccaaggtgctgtcagacgatatgaaaaagcttaaggcccgtatgcaccaggccattgaacgcttctacgataagatgcagaacgccgaaagtgggagggggcaagtgatgtcttccctggccgaactcgaagacgacttcaaggaaggctacctggagactgtggccgcttactacgaggaacagcatccagagctgactccattgctggaaaaggaaagggatggtctcagatgtcggggcaacaggagccccgtccctgacgtagaagatccggccacagaagaaccaggagaaagtttctgcgacaaggtgatgaggtggttccaggcgatgttgcagcgtttacaaacctggtggcatggagttctggcctgggttaaagagaaagtggtggcgctggttcacgctgttcaggccctatggaaacagttccaaagcttttgttgttcactatctgagctgttcatgtcttcatttcagagctatggcgcgcctaggggcgacaaagaggaactcacccctcaaaaatgtagcgagcctcagtccagcaagtag

SEQ ID NO: 25207 - DNA, 567 bp, Artificial Sequence
  derived and/or modified sequence
atgtgtttcccaaaggtgctgtccgatgatatgaaaaagctgaaagcaaggatgcatcaagcaatcgagcggttttatgacaaaatgcaaaacgcagagagtgggagaggccaggtaatgtcctccctggcagaattggaggatgactttaaagagggatacttggaaactgtagcagcttactacgaggagcagcatcccgagctcacccctctcctagaaaaggagagggatggcctccgttgtagggggaatagatccccagtccctgatgtggaagatcccgctaccgaggagcccggggagtcattttgcgacaaggtgatgagatggtttcaggccatgctccagcgcttgcagacctggtggcacggagtgctcgcttgggtgaaggagaaggtggtagcactcgtgcatgcagttcaggccttgtggaagcagtttcaatctttctgctgctctttgtccgaactgttcatgtctagtttccagtcatacggagcaccaagaggtgataaagaagaattgaccccccagaaatgctcagagcctcaatcctctaagtag

SEQ ID NO: 25208 - DNA, 567 bp, Artificial Sequence
  derived and/or modified sequence
atgtgcttccccaaggtgctgagtgatgacatgaagaagctgaaggccaggatgcaccaggccatcgagcgcttctatgacaagatgcagaatgctgagagcggccggggccaggtgatgagcagcctggccgagctggaggatgacttcaaggagggctacctggagaccgtggccgcctactatgaggagcagcaccctgagctgacccccctgctggagaaggagagagatggcctgcgctgccggggcaacagaagccctgtgcctgatgtggaggaccctgccacagaggagcccggggagagcttctgtgacaaggtgatgcgctggttccaggccatgctgcagaggctgcagacctggtggcacggcgtgctggcctgggtgaaggagaaggtggtggccctggtgcatgctgtgcaggccctgtggaagcagttccagagcttctgctgcagcctgtctgagctgttcatgagcagcttccagagctatggagcccccaggggggacaaggaggagctgaccccccagaagtgcagcgagccccagagcagcaagtag

SEQ ID NO: 25209 - DNA, 537 bp, Artificial Sequence
  derived and/or modified sequence
atgaagaagctgaaggccaggatgcaccaggccatcgagcgcttctatgacaagatgcagaatgctgagagcggccggggccaggtgatgagcagcctggccgagctggaggatgacttcaaggagggctacctggagaccgtggccgcctactatgaggagcagcaccctgagctgacccccctgctggagaaggagagagatggcctgcgctgccggggcaacagaagccctgtgcctgatgtggaggaccctgccacagaggagcccggggagagcttctgtgacaaggtgatgcgctggttccaggccatgctgcagaggctgcagacctggtggcacggcgtgctggcctgggtgaaggagaaggtggtggccctggtgcatgctgtgcaggccctgtggaagcagttccagagcttctgctgcagcctgtctgagctgttcatgagcagcttccagagctatggagcccccaggggggacaaggaggagctgaccccccagaagtgcagcgagccccagagcagcaagtag

SEQ ID NO: 25210 - DNA, 567 bp, Artificial Sequence
  derived and/or modified sequence
atgtgcttccccaaggtgctgagcgacgacatgaagaagctgaaggccaggatgcaccaggccattgaacgcttctacgacaagatgcagaacgcggaaagcgggcgaggacaggtgatgagctccctggctgagctcgaagacgattttaaagagggctaccttgagactgtggccgcatactacgaggagcagcaccccgagttgacgcccctattagagaaggaacgagacggattacgctgcaggggtaatagatctcccgttcccgacgttgaggatccagctactgaagagccgggcgagtccttctgcgacaaggtgatgcggtggtttcaggctatgttgcaaagactccaaacctggtggcatggcgtcctggcctgggtgaaagaaaaagtggttgccctggtccatgcggtccaggccctgtggaagcagttccagtccttctgctgtagcttgtccgagctgtttatgagttcgtttcagtcgtacggggcaccaagaggagacaaagaggagctgactcctcagaagtgttccgagcctcaaagtagcaagtag

SEQ ID NO: 25211 - DNA, 567 bp, Artificial Sequence
  derived and/or modified sequence
atgtgcttccccaaggtgctgagcgacgacatgaagaagctgaaggcacggatgcatcaagcaatcgaaaggttctatgacaagatgcagaacgcagagtctgggcgaggacaggtcatgagctcccttgctgaactcgaagacgatttcaaggaaggctatctcgagaccgtcgccgcatactatgaggaacagcacccggaactgactccacttttggagaaggaaagagacggactgcgatgtagggggaacaggagcccagtccctgacgtcgaggacccggctactgaagagcctggagaatcattctgtgacaaggttatgagatggttccaggcaatgctgcagagactgcagacctggtggcacggcgtcctggcgtgggtgaaagaaaaggttgtcgccctggtgcacgccgtgcaggcgttatggaaacagtttcagagtttctgttgtagtttgtccgaactctttatgtcttcctttcaaagctacggtgctccgcgcggggataaagaagagctcacaccacaaaaatgctctgaaccgcaaagctcaaaatag

SEQ ID NO: 25212 - DNA, 567 bp, Artificial Sequence
  derived and/or modified sequence
atgtgcttccccaaggtgctgagcgacgacatgaagaagctgaaggccaggatgcaccaggccattgaaagattttatgataaaatgcaaaacgcggaatcaggccggggccaggttatgtccagtctggcggagttagaggacgattttaaggagggatatctggaaactgtagcagcttattacgaggagcagcaccctgaactaacacctctgcttgagaaggaacgagatgggctcagatgcagaggaaatagaagccctgtccccgacgtggaagacccagccaccgaggaacccggcgaatcattttgcgataaggtgatgcgttggtttcaggctatgctccaaaggctccagacgtggtggcatggcgtgctggcatgggtcaaagagaaagtagtcgcactcgttcacgccgtgcaagccctgtggaagcagttccagtccttttgctgcagcctctctgagctctttatgtcttccttccaatcatacggggcacctcggggggataaggaggagctcaccccccagaaatgcagcgagccgcaaagctccaagtag

SEQ ID NO: 25213 - DNA, 567 bp, Artificial Sequence
  derived and/or modified sequence
atgtgcttccccaaggtgctgagcgacgacatgaagaagctgaaggcccgcatgcaccaggcaatcgaaagattttatgacaaaatgcaaaatgctgagagtggccgcggccaggtaatgtctagtctggcggagttggaggacgatttcaaagagggctacctggaaactgtcgccgcttattatgaggagcagcacccagagctaacaccactgttagaaaaggaacgtgacggactgcgttgccgcggcaacagatctccagtacctgacgtcgaagaccctgctaccgaggagcccggtgaatcattctgcgataaggtgatgcgttggttccaggccatgctgcagcgtctccagacctggtggcacggagtcttagcctgggtcaaggagaaagtggtcgcccttgtgcacgccgttcaggcactctggaaacagttccaaagcttctgttgctctctatccgagctgtttatgagcagtttccagtcttacggtgcaccacgcggtgacaaggaggagctgacgcctcagaaatgttctgagcctcaatcctctaagtag

SEQ ID NO: 25214 - DNA, 567 bp, Artificial Sequence
  derived and/or modified sequence
atgtgcttccccaaggtgctgagcgacgacatgaagaagctgaaggccagaatgcaccaggctattgaaaggttctacgacaagatgcagaatgccgaatccggacgcgggcaggtcatgagcagccttgcggagctggaggatgatttcaaggaggggtacctggagacggtggcagcctattacgaggaacagcatcccgagctgacccctctactcgagaaagagagggatgggcttcggtgtcggggcaacaggagccccgtccctgacgtcgaggacccggccactgaagagcccggtgaatctttctgtgacaaagtgatgcggtggttccaggcaatgcttcaacggctgcaaacctggtggcacggtgttctcgcctgggtgaaggagaaggtggttgcgctggtgcacgcagtgcaggccctgtggaaacagttccaatctttctgttgctccctttctgagctgtttatgtcctccttccaatcatatggagctcccaggggcgacaaggaagaactcacccctcagaagtgcagtgagccccagtcttcaaagtag

SEQ ID NO: 25215 - DNA, 567 bp, Artificial Sequence
  derived and/or modified sequence
atgtgcttccccaaggtgctgagcgacgacatgaagaagctgaaggctcgcatgcatcaggccatcgagcggttctatgacaagatgcagaatgctgagagcggccggggccaagtaatgtctagtctcgccgagctggaggacgattttaaggaaggctacctggagaccgtagcagcttattacgaggaacaacaccctgagctgaccccgctcttggaaaaagagagggatggtctgagatgccgcggcaataggagcccagttccggatgtagaggaccctgcgactgaggagcccggtgaatcattctgcgacaaggtgatgcggtggttccaggctatgctgcagagactgcagacttggtggcatggagtgctcgcatgggtgaaagagaaagtggtggctctagttcacgcagtgcaggcgctgtggaagcagtttcagtcattttgctgtagtctgtctgagcttttcatgagctcttttcagagctacggcgcccctcgcggggataaagaggaactgaccccccagaagtgcagcgaaccccagagctctaaatag

SEQ ID NO: 25216 - DNA, 567 bp, Artificial Sequence
  derived and/or modified sequence
atgtgcttccccaaggtgctgagcgacgacatgaagaagctgaaggccagaatgcaccaggcgatcgaaaggttttatgacaagatgcagaatgccgaatccggacggggtcaagttatgtcttccttggctgagctggaagacgattttaaggagggctaccttgaaactgttgccgcctattacgaggaacagcatccagagttgactcctctgctggaaaaggagcgcgatggcttgcgatgccgagggaatcggagccctgtgccggatgtggaggaccccgccaccgaagagcccggggagtcattctgcgacaaggtcatgcgttggttccaggcgatgttgcagaggctccagacatggtggcacggtgtgctggcatgggtcaaagagaaggtggtcgccctggtgcacgcagttcaggctctgtggaaacagttccaatccttttgttgcagccttagcgaattattcatgagctccttccaatcttatggcgcgcccagaggcgacaaagaggagctaaccccccaaaaatgttccgaaccccagtcctccaaatag

SEQ ID NO: 25217 - DNA, 567 bp, Artificial Sequence
  derived and/or modified sequence
atgtgcttccccaaggtgctgagcgacgacatgaagaagctgaaggcgcggatgcatcaggccattgaacgattctacgataaaatgcaaaacgccgaaagcggccgcggccaggtgatgagcagccttgccgaactggaggatgactttaaggagggatatctcgagacagtggctgcttactacgaggagcagcaccccgagctgacgccattacttgagaaggagagggacgggttacgctgtcggggaaaccggagtcctgttcccgatgtggaggatccagcaaccgaggagcctggcgagtcgttctgcgacaaggtcatgagatggttccaagcaatgctgcagcgactccagacatggtggcatggagtgcttgcctgggtcaaggaaaaggtcgtggctttggttcacgccgttcaggctctgtggaaacagtttcagagcttttgctgcagtctgtcggaactgttcatgtcgtcctttcagtcatatggggcccctagaggagacaaggaagagctcacgccacagaaatgctccgaaccacagtcctccaagtag

SEQ ID NO: 25218 - DNA, 537 bp, Artificial Sequence
  derived and/or modified sequence
atgaagaagctgaaggcccggatgcaccaggccatcgagcggttctacgacaagatgcagaacgctgagtccggtcgagggcaggtgatgagctctctggctgaactggaggatgatttcaaggaaggctacctggagaccgtggccgcctattacgaggaacagcaccctgagttaacaccgctgctggagaaggagcgcgatggtttgcgttgcagagggaatagaagtccagttcccgatgtggaagacccagctactgaagaacccggggagagtttttgtgataaagtgatgcgatggtttcaggcgatgctgcaaaggcttcagacatggtggcacggcgtcctggcctgggtgaaggaaaaagtggtggctctggtgcatgccgtgcaggctctgtggaaacagttccagagcttttgttgcagtctgtcagagctgttcatgtccagctttcagagctatggcgctcctagaggtgacaaggaggagttgacaccccagaaatgcagcgagccccagagttccaaatag

SEQ ID NO: 25219 - DNA, 567 bp, Artificial Sequence
  derived and/or modified sequence
atgtgcttccccaaggtgctgagcgacgacatgaagaagctgaaggccagaatgcatcaggcgatagaacgattctacgacaagatgcagaatgctgaaagtggtagaggccaagtgatgtctagcctcgccgaactggaggatgacttcaaagaaggatacctcgagaccgtggcggcctattatgaagaacaacatccggagctaacaccccttctagagaaggaaagggatggactgaggtgcagagggaaccgcagccccgtgcccgatgtggaagacccggccaccgaggagccaggtgaatcattttgtgataaggtgatgcggtggttccaggccatgcttcaaaggcttcagacttggtggcacggcgtcctcgcatgggtgaaggagaaggtggtggctctggtccacgccgtgcaagctttgtggaagcagttccagtctttttgttgttccctttccgagttattcatgagctcctttcaaagttacggggcgcctcgaggcgacaaagaagaactgactccacagaaatgttcagaacctcagagttcaaaatag

SEQ ID NO: 25220 - DNA, 567 bp, Artificial Sequence
  derived and/or modified sequence
atgtgcttccccaaggtgctgagcgacgacatgaagaagctgaaggctaggatgcatcaggccatagagcggttttatgataaaatgcagaacgctgagtctggcagaggtcaggtgatgtcctcactcgcagagctcgaggatgattttaaagagggctatcttgagacggtcgctgcatattatgaagaacagcacccagagttaactcctctgttggagaaagaacgtgacggattaagatgccgcggtaacagatctcctgtgcccgatgtagaggacccggccacagaagaaccaggggagagcttctgcgataaagttatgcgctggttccaggccatgttgcagagactccagacctggtggcacggggtgcttgcctgggttaaggaaaaagtggttgcattggtacacgccgtgcaggcactgtggaagcagtttcagagcttctgctgtagtctgagtgagctattcatgtccagtttccagtcctacggcgcacctaggggggacaaggaagaactgactccccagaagtgcagtgaacctcagtcctcaaagtag

SEQ ID NO: 25221 - DNA, 567 bp, Artificial Sequence
  derived and/or modified sequence
atgtgctttcccaaagtcctgtccgatgatatgaagaaactcaaggctcggatgcaccaggccatcgaacggttttacgacaaaatgcagaacgcagaatcaggacggggtcaggttatgagctctctagcagaactggaggacgattttaaggaaggatatctcgaaacggttgctgcctactacgaagaacagcatcctgagctgaccccgcttctggagaaagaaagagacggactgcggtgccgcggaaaccgcagtcctgtccctgacgtcgaagatcccgcaaccgaagagcccggagaaagtttctgcgacaaagttatgaggtggttccaggccatgctgcagcgtctacaaacctggtggcacggggtgctagcctgggtgaaggagaaggttgtggccctcgtccatgccgttcaggctctgtggaaacagtttcagtctttttgttgttccctgagcgaattgttcatgtcttctttccaaagttatggggcaccacggggagacaaagaggagctgacgccccagaagtgctctgagccacagagcagcaagtag

SEQ ID NO: 25222 - DNA, 567 bp, Artificial Sequence
  derived and/or modified sequence
atgtgtttcccaaaggtgctaagcgacgatatgaaaaaactgaaggcacgcatgcaccaggccatcgagaggttttacgataaaatgcagaatgctgagtcaggtaggggccaggtgatgtcatccctagctgaactggaagatgacttcaaggaagggtacctagaaacggtcgctgcctattatgaagagcagcatcctgagctgacgcccctgttagaaaaggagcgcgatggtttgcgctgtaggggcaaccggagcccagtgccagatgtggaagatccagcaactgaagaacccggagagtctttctgcgataaggtcatgcgttggtttcaggccatgctgcagcgcctgcaaacatggtggcatggggtcctggcatgggtgaaggagaaagtcgtggcccttgtacacgccgtgcaggccctgtggaagcagttccagtctttctgttgctccctgagcgaactgtttatgtcttcatttcagagttatggcgcaccacggggtgataaagaagagctgacaccacagaagtgctctgaaccacagtcctcaaaatag

SEQ ID NO: 25223 - DNA, 567 bp, Artificial Sequence
  derived and/or modified sequence
atgtgtttcccgaaggtgctgtcagatgacatgaaaaaacttaaagctcgtatgcatcaagcaattgaacgtttttacgataagatgcagaatgctgagtctggtagggggcaggttatgagcagtctggctgagctggaggacgactttaaggagggctatttagagacagtggcagcctactacgaagagcagcatcccgaacttactcctctgctggagaaagaaagagatggccttagatgccgaggcaatcgatcacctgtccctgacgtggaggatcctgccaccgaagagcctggagagtctttctgcgacaaagtgatgcgctggtttcaagccatgttgcagcgtctgcagacttggtggcatggggtgctcgcatgggtgaaggagaaggtggtggccttagtgcatgcagtccaagcgctctggaagcaatttcaaagcttttgttgcagtctgtctgagctgttcatgtcctcttttcagtcctacggcgctccacgaggagataaagaagagcttacgccacagaaatgttccgagcctcaatcttcaaaatag

SEQ ID NO: 25224 - DNA, 567 bp, Artificial Sequence
  derived and/or modified sequence
atgtgtttccctaaggtcctgagcgatgatatgaagaagctcaaggcacgtatgcaccaggccatcgagcggttttacgataagatgcagaatgcagaatcaggtagaggacaagtgatgtcctcattagcagagttggaagacgacttcaaagagggttacctggagacggtggcggcatattatgaagaacagcacccagaacttacacctttattagagaaggagcgggacggcctgaggtgtcggggaaatcggtcgcccgtgccagacgtggaggaccctgctacagaagagccaggtgagtccttttgcgataaggttatgcggtggtttcaggctatgctccagcggctgcaaacttggtggcacggcgtcctggcgtgggtgaaagagaaggtagtagcccttgttcacgctgtccaggctctatggaagcaattccagtccttttgctgttcactgagtgagcttttcatgagtagcttccagtcgtacggagctccacggggagacaaagaggaattgacgccccagaagtgttctgagcctcagtcatccaagtag

SEQ ID NO: 25225 - DNA, 567 bp, Artificial Sequence
  derived and/or modified sequence
atgtgtttccctaaagtgctgtctgatgatatgaagaaactcaaagcacggatgcatcaggccatcgagaggttctatgacaaaatgcagaatgccgaatctggaagaggacaggtcatgagctctctcgccgagctcgaggacgactttaaggaaggctatctagaaacggtggctgcctactacgaggagcagcaccccgagctcacgccgctcttggaaaaggaacgcgacgggctccgctgcagaggcaatcgtagtcccgttcccgacgtggaggacccggcaactgaggaacccggagagtctttctgcgataaagtgatgagatggttccaggccatgctccaacggttacagacatggtggcacggggtgctcgcctgggtgaaagaaaaggtggtggcactcgtccacgccgttcaggctctttggaaacaattccagtcattttgctgttcactctctgagcttttcatgtccagctttcaatcttacggtgcccctcgaggtgataaagaagaactgactccgcagaagtgcagtgaaccacaatcatccaagtag

SEQ ID NO: 25226 - DNA, 567 bp, Artificial Sequence
  derived and/or modified sequence
atgtgcttccccaaggtcttaagcgacgacatgaagaagctgaaggctaggatgcaccaagcgatcgaacgtttttacgacaaaatgcaaaatgccgagtcagggaggggccaagtgatgagctccctggctgaactggaagacgatttcaaagagggttacttggagaccgtagccgcttattatgaagaacaacacccagaactcactccactcttagagaaagagcgcgacggccttaggtgtcggggaaaccgcagcccggttccagatgttgaagatcccgctacggaggagcctggggagagcttttgtgataaggtgatgcggtggttccaagccatgctccaacgtctccagacatggtggcacggcgtgttggcgtgggtgaaagagaaggtcgtcgccctggtccacgcggtgcaagctctgtggaagcaatttcagtcgttttgttgttctctgtcagaactcttcatgtcgagtttccagagctatggagccccacggggtgataaggaggagctgactccgcagaagtgcagcgagccccagtcctccaagtag

SEQ ID NO: 25227 - DNA, 567 bp, Artificial Sequence
  derived and/or modified sequence
atgtgcttccccaaagtgctcagtgacgacatgaagaaattgaaggccagaatgcatcaggccattgaaaggttctacgacaaaatgcagaacgccgagagcggcagaggtcaggtcatgtcctctctggcagagcttgaggatgatttcaaggagggatatcttgagacagtcgcagcctattacgaggaacagcaccccgagcttacaccactcctcgaaaaggaaagagatggtcttaggtgtcggggtaataggtctcccgtacctgacgtggaggacccagccacagaggagccaggagaaagtttctgcgataaagtgatgagatggtttcaggctatgttacaaagacttcagacatggtggcatggagtgctcgcttgggtgaaagagaaagtggtagcccttgtgcatgcagtccaggcgctgtggaaacagtttcagagcttctgttgttccctttcagaactatttatgagtagcttccagagctacggggctccgcgaggcgacaaggaagagttaactccacaaaagtgcagcgaaccacagtcatctaagtag

SEQ ID NO: 25228 - DNA, 567 bp, Artificial Sequence
  derived and/or modified sequence
atgtgcttccctaaggttttgagcgatgatatgaaaaagctcaaagcaaggatgcaccaggccattgaaaggttttacgacaagatgcagaatgccgagagtggaagggggcaagtgatgtcctcgctcgcagagttggaggacgattttaaagaggggtacctggagaccgtcgccgcatactatgaggagcagcatcctgagttgactccccttttggagaaggaacgggacggcctacggtgccggggaaatagatcgccagtccccgacgtagaggatcccgcaactgaggaaccgggtgaatctttttgcgataaggtgatgagatggttccaggccatgctgcagcgactgcagacatggtggcacggggtactagcctgggttaaagaaaaagttgtagcgctggtgcatgcagtacaggctctgtggaagcagttccagtccttctgttgctcgctcagcgaattgttcatgtcctcgtttcagagctatggggctccaaggggggacaaagaggagctgaccccccagaaatgcagtgagccacagagcagtaagtag

SEQ ID NO: 25229 - DNA, 537 bp, Artificial Sequence
  derived and/or modified sequence
atgaagaagcttaaagctcgtatgcatcaggcaattgagagattctatgataaaatgcagaatgcagaatcagggcgaggacaggtcatgagctcccttgccgaacttgaggatgatttcaaggagggatatttagaaaccgtagcggcatactatgaggagcagcacccagagctcaccccgttactggaaaaggagcgcgacggcttgaggtgccgcggtaatcgaagcccagtgcccgatgtcgaagatccagccaccgaggaacccggagaatcattttgtgataaagtcatgcgctggttccaggctatgctgcagagactccaaacttggtggcacggagtgcttgcgtgggttaaggagaaggtggtagcattggtgcacgctgttcaggctctctggaaacaattccagagcttttgttgtagcttatctgagttattcatgtccagcttccagagttatggggcacccaggggggacaaggaggagctgacaccccagaaatgtagcgagcctcagagttcaaaatag

SEQ ID NO: 25230 - DNA, 567 bp, Artificial Sequence
  derived and/or modified sequence
atgtgtttccccaaggtgctgtcagatgacatgaaaaagctaaaggcccgaatgcaccaggcaatagaaaggttctacgacaaaatgcagaatgcagaatcaggcagagggcaggttatgtctagtctggcagagcttgaggatgattttaaggaaggctatttggagaccgtcgccgcatattatgaggagcagcacccagagcttacgcctctgcttgagaaggagcgagatggcctcagatgtcgaggaaatcgctcacctgtgcctgatgtcgaggaccccgcaaccgaggagcctggcgaatccttttgtgataaggttatgcggtggttccaggctatgttgcagcgactgcagacttggtggcacggggtgctggcctgggtgaaagagaaggtggtggccctggttcatgccgtgcaggccctttggaagcagttccaaagtttctgctgtagcctgtcagaattgtttatgtcctcctttcagagctacggggcaccacgaggggataaggaagaactgactccccagaagtgctccgaacctcagtcatctaagtag

SEQ ID NO: 25231 - DNA, 567 bp, Artificial Sequence
  derived and/or modified sequence
atgtgtttccctaaggttctgtctgatgatatgaaaaagctcaaagcgagaatgcaccaggccatagaacggttctacgacaagatgcagaacgctgagagcgggagggggcaggtaatgtcttccctggcagagctcgaggacgacttcaaagagggctacctagagaccgtggcggcatactacgaggagcagcatccggagctgactcccctccttgagaaagaaagggacggattgagatgcaggggaaacagaagtcccgtgcccgacgtggaggacccagccacagaagagcctggagagtcgttttgcgataaagttatgagatggttccaggccatgcttcagcgcctgcagacttggtggcacggcgtcttagcatgggtcaaagaaaaagtggtcgctttagtgcacgcagtgcaggccctttggaagcagttccagtccttttgttgctccctgagcgaactctttatgagtagtttccagtcctatggagctcctcgcggagacaaggaagagctcacgccccagaaatgtagcgaaccacaaagctcaaaatag

SEQ ID NO: 25232 - DNA, 1105 bp, Artificial Sequence
  derived and/or modified sequence
gtactcagggagtttccccagccagctgtcccgagtctggactttccctctgcccctccccactctcaggctggtggggtggggaaagcagcccattcctgggctcagagactcccaccccagctcagagggagcaggggcccagccagggacggaccctcattcctcccagggaccccagacctctgtctctctcgggccttggctccttgaacttttggccgccatgtgcttcccgaaggtcctctctgatgacatgaagaagctgaaggcccgaatgcaccaggccatagaaagattttatgataaaatgcaaaatgcagaatcaggacgtggacaggtgatgtcgagcctggcagagctggaggacgacttcaaagagggctacctggagacagtggcggcttattatgaggagcagcacccagagctcactcctctacttgaaaaagaaagagatggattacggtgccgaggcaacagatcccctgtcccggatgttgaggatcccgcaaccgaggagcctggggagagcttttgtgacaaggtcatgagatggttccaggccatgctgcagcggctgcagacctggtggcacggggttctggcctgggtgaaggagaaggtggtggccctggtccatgcagtgcaggccctctggaaacagttccagagtttctgctgctctctgtcagagctcttcatgtcctctttccagtcctacggagccccacggggggacaaggaggagctgacaccccagaagtgctctgaaccccaatcctcaaaatgaagatactgacaccacctttgccctccccgtcaccgcgcacccaccctgacccctccctcagctgtcctgtgccccgccctctcccgcacactcagtccccctgcctggcgttcctgccgcagctctgacctggtgctgtcgccctggcatcttaataaaacctgcttatacttccctggcaggggagataccatgatcgcggaggtgggtttcccagggcaaggctgatctgttgccgtattagtccgttttcacacagctataaagaatgcctgagactgggtgatgtataaagaaaagaagtttaactga

SEQ ID NO: 25233 - DNA, 920 bp, Artificial Sequence
  derived and/or modified sequence
ggtggggtggggaaagcagcccattcctgggctcagagactcccaccccagctcagagggagcaggggcccagccagggacggaccctcattcctcccagggaccccagacctctgtctctctcggcaggccttggctccttgaacttttggccgccatgtgcttcccgaaggtcctctctgatgacatgaagaagctgaaggcccgaatgcaccaggccatagaaagattttatgataaaatgcaaaatgcagaatcaggacgtggacaggtgatgtcgagcctggcagagctggaggacgacttcaaagagggctacctggagacagtggcggcttattatgaggagcagcacccagagctcactcctctacttgaaaaagaaagagatggattacggtgccgaggcaacagatcccctgtcccggatgttgaggatcccgcaaccgaggagcctggggagagcttttgtgacaaggtcatgagatggttccaggccatgctgcagcggctgcagacctggtggcacggggttctggcctgggtgaaggagaaggtggtggccctggtccatgcagtgcaggccctctggaaacagttccagagtttctgctgctctctgtcagagctcttcatgtcctctttccagtcctacggagccccacggggggacaaggaggagctgacaccccagaagtgctctgaaccccaatcctcaaaatgaagatactgacaccacctttgccctccccgtcaccgcgcacccaccctgacccctccctcagctgtcctgtgccccgccctctcccgcacactcagtccccctgcctggcgttcctgccgcagctctgacctggtgctgtcgccctggcatcttaataaaacctgcttatacttccctggcaggggagataccatga

SEQ ID NO: 25234 - DNA, 892 bp, Artificial Sequence
  derived and/or modified sequence
cataaaaccagctgagtatttgtgccaggaagactgcgtgcagaaggtgactgtctcagtggagctgggtcatctcaggtggggagttggggtccccgaaggccttggctccttgaacttttggccgccatgtgcttcccgaaggtcctctctgatgacatgaagaagctgaaggcccgaatgcaccaggccatagaaagattttatgataaaatgcaaaatgcagaatcaggacgtggacaggtgatgtcgagcctggcagagctggaggacgacttcaaagagggctacctggagacagtggcggcttattatgaggagcagcacccagagctcactcctctacttgaaaaagaaagagatggattacggtgccgaggcaacagatcccctgtcccggatgttgaggatcccgcaaccgaggagcctggggagagcttttgtgacaaggtcatgagatggttccaggccatgctgcagcggctgcagacctggtggcacggggttctggcctgggtgaaggagaaggtggtggccctggtccatgcagtgcaggccctctggaaacagttccagagtttctgctgctctctgtcagagctcttcatgtcctctttccagtcctacggagccccacggggggacaaggaggagctgacaccccagaagtgctctgaaccccaatcctcaaaatgaagatactgacaccacctttgccctccccgtcaccgcgcacccaccctgacccctccctcagctgtcctgtgccccgccctctcccgcacactcagtccccctgcctggcgttcctgccgcagctctgacctggtgctgtcgccctggcatcttaataaaacctgcttatacttccctggcaggggagataccatga

SEQ ID NO: 25235 - DNA, 1272 bp, Artificial Sequence
  derived and/or modified sequence
gcagcccattcctgggctcagagactcccaccccagctcagagggagcaggggcccagccagggacggaccctcattcctcccagggaccccagacctctgtctctctcgggtaagtctccatctctgtctgtctctgtctctgtctctgtctctgtctgtttttcacgcactcagcaaggcctcctgccctgagagaggctccgcccactaccccccactttccccataaaaccagctgagtatttgtgccaggaagactgcgtgcagaaggtgactgtctcagtggagctgggtcatctcaggccttggctccttgaacttttggccgccatgtgcttcccgaaggtcctctctgatgacatgaagaagctgaaggcccgaatgcaccaggccatagaaagattttatgataaaatgcaaaatgcagaatcaggacgtggacaggtgatgtcgagcctggcagagctggaggacgacttcaaagagggctacctggagacagtggcggcttattatgaggagcagcacccagagctcactcctctacttgaaaaagaaagagatggattacggtgccgaggcaacagatcccctgtcccggatgttgaggatcccgcaaccgaggagcctggggagagcttttgtgacaaggtcatgagatggttccaggccatgctgcagcggctgcagacctggtggcacggggttctggcctgggtgaaggagaaggtggtggccctggtccatgcagtgcaggccctctggaaacagttccagagtttctgctgctctctgtcagagctcttcatgtcctctttccagtcctacggagccccacggggggacaaggaggagctgacaccccagaagtgctctgaaccccaatcctcaaaatgaagatactgacaccacctttgccctccccgtcaccgcgcacccaccctgacccctccctcagctgtcctgtgccccgccctctcccgcacactcagtccccctgcctggcgttcctgccgcagctctgacctggtgctgtcgccctggcatcttaataaaacctgcttatacttccctggcaggggagataccatgatcgcggaggtgggtttcccagggcaaggctgatctgttgccgtattagtccgttttcacacagctataaagaatgcctgagactgggtgatgtataaagaaaagaagtttaactgactcacagttccacatggctggggaagcctgaggaagcttacaatcatgggggaaggcggaa

SEQ ID NO: 25236 - DNA, 1198 bp, Artificial Sequence
  derived and/or modified sequence
ggtggggtggggaaagcagcccattcctgggctcagagactcccaccccagctcagagggagcaggggcccagccagggacggaccctcattcctcccagggaccccagacctctgtctctctcgggtaagtctccatctctgtctgtctctgtctctgtctctgtctctgtctgtttttcacgcactcagcaaggcctcctgccctgagagaggctccgcccactaccccccactttccccataaaaccagctgagtatttgtgccaggaagactgcgtgcagaaggtgactgtctcagtggagctgggtcatctcaggtggggagttggggtccccgaaggtgaggaccctctggggaggagggtgcttctctgagacactttcttttcctcacacctgttcctcgccagcaggccttggctccttgaacttttggccgccatgtgcttcccgaaggtcctctctgatgacatgaagaagctgaaggcccgaatgcaccaggccatagaaagattttatgataaaatgcaaaatgcagaatcaggacgtggacaggtgatgtcgagcctggcagagctggaggacgacttcaaagagggctacctggagacagtggcggcttattatgaggagcagcacccagagctcactcctctacttgaaaaagaaagagatggattacggtgccgaggcaacagatcccctgtcccggatgttgaggatcccgcaaccgaggagcctggggagagcttttgtgacaaggtcatgagatggttccaggccatgctgcagcggctgcagacctggtggcacggggttctggcctgggtgaaggagaaggtggtggccctggtccatgcagtgcaggccctctggaaacagttccagagtttctgctgctctctgtcagagctcttcatgtcctctttccagtcctacggagccccacggggggacaaggaggagctgacaccccagaagtgctctgaaccccaatcctcaaaatgaagatactgacaccacctttgccctccccgtcaccgcgcacccaccctgacccctccctcagctgtcctgtgccccgccctctcccgcacactcagtccccctgcctggcgttcctgccgcagctctgacctggtgctgtcgccctggcatcttaataaaacctgcttatacttccctggcaggggaga

SEQ ID NO: 25237 - DNA, 950 bp, Artificial Sequence
  derived and/or modified sequence
gagactcccaccccagctcagagggagcaggggcccagccagggacggaccctcattcctcccagggaccccagacctctgtctctctcggctgagtatttgtgccaggaagactgcgtgcagaaggtgactgtctcagtggagctgggtcatctcaggccttggctccttgaacttttggccgccatgtgcttcccgaaggtcctctctgatgacatgaagaagctgaaggcccgaatgcaccaggccatagaaagattttatgataaaatgcaaaatgcagaatcaggacgtggacaggtgatgtcgagcctggcagagctggaggacgacttcaaagagggctacctggagacagtggcggcttattatgaggagcagcacccagagctcactcctctacttgaaaaagaaagagatggattacggtgccgaggcaacagatcccctgtcccggatgttgaggatcccgcaaccgaggagcctggggagagcttttgtgacaaggtcatgagatggttccaggccatgctgcagcggctgcagacctggtggcacggggttctggcctgggtgaaggagaaggtggtggccctggtccatgcagtgcaggccctctggaaacagttccagagtttctgctgctctctgtcagagctcttcatgtcctctttccagtcctacggagccccacggggggacaaggaggagctgacaccccagaagtgctctgaaccccaatcctcaaaatgaagatactgacaccacctttgccctccccgtcaccgcgcacccaccctgacccctccctcagctgtcctgtgccccgccctctcccgcacactcagtccccctgcctggcgttcctgccgcagctctgacctggtgctgtcgccctggcatcttaataaaacctgcttatacttccctggcaggggagataccatgat

SEQ ID NO: 25238 - DNA, 772 bp, Artificial Sequence
  derived and/or modified sequence
ggggaaagcagcccattcctgggctcagagactcccaccccagctcagagggagcaggggcccagccagggacggaccctcattcctcccagggaccccagacctctgtctctctcggactgcgtgcagaaggtgactgtctcagtggagctgggtcatctcaggccttggctccttgaacttttggccgccatgtgcttcccgaaggtcctctctgatgacatgaagaagctgaaggcccgaatgcaccaggccatagaaagattttatgataaaatgcaaaatgcagaatcaggacgtggacaggtgatgtcgagcctggcagagctggaggacgacttcaaagagggctacctggagacagtggcggcttattatgaggagcagcacccagagctcactcctctacttgaaaaagaaagagatggattacggtgccgaggcaacagatcccctgtcccggatgttgaggatcccgcaaccgaggagcctggggagagcttttgtgacaaggtcatgagatggttccaggccatgctgcagcggctgcagacctggtggcacggggttctggcctgggtgaaggagaaggtggtggccctggtccatgcagtgcaggccctctggaaacagttccagagtttctgctgctctctgtcagagctcttcatgtcctctttccagtcctacggagccccacggggggacaaggaggagctgacaccccagaagtgctctgaaccccaatcctcaaaatgaagatactgacacc

SEQ ID NO: 25239 - DNA, 674 bp, Artificial Sequence
  derived and/or modified sequence
aaggtgactgtctcagtggagctgggtcatctcagcaggccttggctccttgaacttttggccgccatgtgcttcccgaaggtcctctctgatgacatgaagaagctgaaggcccgaatgcaccaggccatagaaagattttatgataaaatgcaaaatgcagaatcaggacgtggacaggtgatgtcgagcctggcagagctggaggacgacttcaaagagggctacctggagacagtggcggcttattatgaggagcagcacccagagctcactcctctacttgaaaaagaaagagatggattacggtgccgaggcaacagatcccctgtcccggatgttgaggatcccgcaaccgaggagcctggggagagcttttgtgacaaggtcatgagatggttccaggccatgctgcagcggctgcagacctggtggcacggggttctggcctgggtgaaggagaaggtggtggccctggtccatgcagtgcaggccctctggaaacagttccagagtttctgctgctctctgtcagagctcttcatgtcctctttccagtcctacggagccccacggggggacaaggaggagctgacaccccagaagtgctctgaaccccaatcctcaaaatgaagatactgacaccacctttgccctccccgtcaccgcgcacc

SEQ ID NO: 25240 - DNA, 746 bp, Artificial Sequence
  derived and/or modified sequence
ctgtcccgagtctggactttccctctgcccctccccactctcaggctggtggggtggggaaagcagcccattcctgggctcagagactcccaccccagctcagagggagcaggggcccagccagggacggaccctcattcctcccagggaccccagacctctgtctctctcgggtcctctctgatgacatgaagaagctgaaggcccgaatgcaccaggccatagaaagattttatgataaaatgcaaaatgcagaatcaggacgtggacaggtgatgtcgagcctggcagagctggaggacgacttcaaagagggctacctggagacagtggcggcttattatgaggagcagcacccagagctcactcctctacttgaaaaagaaagagatggattacggtgccgaggcaacagatcccctgtcccggatgttgaggatcccgcaaccgaggagcctggggagagcttttgtgacaaggtcatgagatggttccaggccatgctgcagcggctgcagacctggtggcacggggttctggcctgggtgaaggagaaggtggtggccctggtccatgcagtgcaggccctctggaaacagttccagagtttctgctgctctctgtcagagctcttcatgtcctctttccagtcctacggagccccacggggggacaaggaggagctgacaccccagaagtgctctgaaccccaatcctcaaaatgaagatactgacaccacctttgc

SEQ ID NO: 25241 - DNA, 814 bp, Artificial Sequence
  derived and/or modified sequence
aaaccagctgagtatttgtgccaggaagactgcgtgcagaaggccttggctccttgaacttttggccgccatgtgcttcccgaaggtcctctctgatgacatgaagaagctgaaggcccgaatgcaccaggccatagaaagattttatgataaaatgcaaaatgcagaatcaggacgtggacaggtgatgtcgagcctggcagagctggaggacgacttcaaagagggctacctggagacagtggcggcttattatgaggagcagcacccagagctcactcctctacttgaaaaagaaagagatggattacggtgccgaggcaacagatcccctgtcccggatgttgaggatcccgcaaccgaggagcctggggagagcttttgtgacaaggtcatgagatggttccaggccatgctgcagcggctgcagacctggtggcacggggttctggcctgggtgaaggagaaggtggtggccctggtccatgcagtgcaggccctctggaaacagttccagagtttctgctgctctctgtcagagctcttcatgtcctctttccagtcctacggagccccacggggggacaaggaggagctgacaccccagaagtgctctgaaccccaatcctcaaaatgaagatactgacaccacctttgccctccccgtcaccgcgcacccaccctgacccctccctcagctgtcctgtgccccgccctctcccgcacactcagtccccctgcctggcgttcctgccgcagctctgacctggtgctgtcgccctggcatcttaataaaacctgcttatacttccct

SEQ ID NO: 25242 - DNA, 731 bp, Artificial Sequence
  derived and/or modified sequence
tctcagtggagctgggtcatctcaggtggggagttggggtccccgaagcaggccttggctccttgaacttttggccgccatgtgcttcccgaaggtcctctctgatgacatgaagaagctgaaggcccgaatgcaccaggccatagaaagattttatgataaaatgcaaaatgcagaatcaggacgtggacaggtgatgtcgagcctggcagagctggaggacgacttcaaagagggctacctggagacagtggcggcttattatgaggagcagcacccagagctcactcctctacttgaaaaagaaagagatggattacggtgccgaggcaacagatcccctgtcccggatgttgaggatcccgcaaccgaggagcctggggagagcttttgtgacaaggtcatgagatggttccaggccatgctgcagcggctgcagacctggtggcacggggttctggcctgggtgaaggagaaggtggtggccctggtccatgcagtgcaggccctctggaaacagttccagagtttctgctgctctctgtcagagctcttcatgtcctctttccagtcctacggagccccacggggggacaaggaggagctgacaccccagaagtgctctgaaccccaatcctcaaaatgaagatactgacaccacctttgccctccccgtcaccgcgcacccaccctgacccctccctcagctgtcctgtgccccgccctctccc

SEQ ID NO: 25243 - protein, 120 aa, Artificial Sequence
  derived and/or modified sequence
MAETSALPTGFGELEVLAVGMVLLVEDPGAADSLPPTGAELGSCGQWDQPECPRCSHIQPSPCLPQALALRLGRLPGSRLPGLCDSVGQHLQQCSHRMGALSPLLHPPKCCHRSHHFEWR

SEQ ID NO: 25244 - protein, 253 aa, Artificial Sequence
  derived and/or modified sequence
MAETSALPTGFGELEVLAVGMVLLVEALSGLSLNTLTIFSFCKTPELRTPCHLLVLSLALADSGISLNALVAATSSLLRRWPYGSDGCQAHGFQGFVTALASICSSAAIAWGRYHHYCTRSQLAWNSAVSLVLFVWLSSAFWAALPLLGWGHYDYEPLGTCCTLDYSKGDRNFTSFLFTMSFFNFAMPLFITITSYSLMEQKLGKSGHLQVPALIAKMVPTINAINYALGNEMVCRGIWQCLSPQKREKDRTK

SEQ ID NO: 25245 - DNA, 762 bp, Artificial Sequence
  derived and/or modified sequence
atggcagagaccagcgccttgcccaccgggttcggcgaactagaggttctggcagtggggatggtcctcttagttgaagccctgagcgggctctctttaaacactctgacaatattttccttttgtaagacaccggagcttcgaacaccttgccacctgctcgtcctgtccctcgccttggccgatagcggtatatcactgaacgccttggtagccgccacttctagtctgctacggaggtggccctacgggagcgatggatgtcaggcacacggtttccagggctttgttacagctctggcatccatttgttctagtgcagccattgcatggggaaggtaccaccactattgcactaggtcccagttggcttggaacagtgccgtgtcacttgtattgttcgtgtggctgtcctctgcattttgggccgctctccccctcctcggctggggacattacgactacgaaccattggggacttgttgcaccctggattacagtaaaggtgatagaaactttacctctttccttttcactatgagtttctttaacttcgcaatgccactttttatcaccattaccagctactcattgatggagcaaaaactgggaaagtctgggcaccttcaagtgcccgcacttattgccaagatggtccccacaataaatgctattaattacgccctgggcaacgagatggtgtgtcggggcatatggcagtgtctgtcacctcagaaacgagagaaggacaggacaaaatag

SEQ ID NO: 25246 - DNA, 762 bp, Artificial Sequence
  derived and/or modified sequence
atggccgagaccagcgccctgcccactggatttggagagctggaggtgctggccgtgggcatggtgctgctggtggaggccctgagcggcctgagcctgaacaccctgaccatcttctccttctgcaagaccccagagctgcggaccccctgccacctgctggtgctgagcctggccctggccgacagcggcatcagcctgaatgccctggtggccgccaccagcagcctgctgcggcgctggccctacggcagtgatggctgccaggcccacggcttccagggctttgtgacagccctggccagcatctgcagcagcgctgccatcgcctggggccgctaccaccactactgcaccaggagccagctggcctggaacagcgctgtgtccctggtgctgtttgtgtggctgagcagcgccttctgggccgccctgcccctgctgggctggggccactatgactatgagcccctgggcacctgctgcaccctggactacagcaagggggacaggaacttcaccagcttcctgttcaccatgtccttcttcaactttgccatgcccctcttcatcaccatcaccagctacagcctgatggagcagaagctgggcaagagcggccacctgcaggtgcctgccctgattgccaagatggtgcccaccatcaatgccatcaactatgccctgggcaatgagatggtgtgccggggcatctggcagtgcctgagcccccagaagcgggagaaggacaggaccaagtag

SEQ ID NO: 25247 - DNA, 363 bp, Artificial Sequence
  derived and/or modified sequence
atggccgagaccagcgccctgcccactggatttggagagctggaggtgctggccgtgggcatggtgctgctggtggaggaccccggggctgctgacagcctgcccccaactggagctgagctgggcagctgtggccagtgggaccagccagaatgtccccgctgcagccacatccagcccagcccctgcctgccccaggccctggccctgcggctgggccgcctgcccggcagccggctgcccggcctgtgtgacagcgtgggccagcacctgcagcagtgcagccacaggatgggcgccctgagccccctgctgcacccccccaagtgctgccacaggagccaccactttgagtggaggtag

SEQ ID NO: 25248 - DNA, 762 bp, Artificial Sequence
  derived and/or modified sequence
atggccgagaccagcgccctgcccaccggcttcggcgagctggaggttctggcagtgggcatggttctgttagtggaggcactgagcgggctgagtttgaacacactcactatcttttctttctgtaaaacccccgagttacgcacaccctgtcatctgttggtgctgagtcttgccttggcagattctgggatcagccttaatgcactggtcgccgcaacttccagccttctgaggcgttggccctacgggtcagacggctgccaggctcacggctttcagggctttgtaaccgctttggcctctatttgctcctcagccgctatcgcatggggccgctaccatcattactgtacgagatcccagctcgcatggaactctgcagtaagcctggtgctgttcgtgtggctcagctcagcattttgggccgccttgcccctattggggtggggccactacgactacgagcctctcggaacctgctgtacactagattactcaaaaggtgataggaactttaccagctttctgtttacaatgagcttcttcaatttcgccatgcccctgtttattaccattaccagctactctctgatggagcagaaactggggaaatctggacacctgcaggtccccgccctcattgctaaaatggtgcctaccatcaatgccattaactacgctctgggaaatgaaatggtctgcaggggtatatggcaatgcttgtctccacagaagcgtgagaaggaccgcactaagtag

SEQ ID NO: 25249 - DNA, 762 bp, Artificial Sequence
  derived and/or modified sequence
atggcagagacatccgccctgccaacaggattcggcgagctcgaggtgctggccgttggcatggtcttgctcgtggaggctctctcaggactgtccttgaatacactgacaattttctctttctgtaagacacccgaattgaggacaccctgccatctcttggtgctgagtctcgctctggcagacagcgggatttcgctgaacgcacttgtagcagcgaccagctcccttcttaggcgctggccctacggctcggatggatgccaggcccatgggtttcaaggatttgtcacagccctggccagtatctgtagtagtgcagccattgcctggggcagatatcatcactattgcacgcgcagtcagctcgcttggaattctgctgtgtcattagtgctttttgtctggttaagtagtgccttttgggccgcactgcccctgctggggtggggccactacgactacgagccactcggtacatgctgtaccctggactatagcaaaggtgaccgcaatttcaccagtttcttattcactatgtctttctttaacttcgccatgcctcttttcatcacaatcacctcatatagccttatggagcagaagttgggaaagtctggtcatctacaggtgcccgcattaattgcgaaaatggtgcctaccatcaacgccataaactacgctttgggtaacgaaatggtctgtcgaggcatctggcaatgtctctcaccacagaagagggaaaaggatcgcacaaaatag

SEQ ID NO: 25250 - DNA, 2094 bp, Artificial Sequence
  derived and/or modified sequence
gggagagtgaggatggcagagaccagtgccctgcccactggcttcggggagctcgaggtgctggctgtggggatggtgctactggtggaagctctctccggtctcagcctcaataccctgaccatcttctctttctgcaagaccccggagctgcggactccctgccacctactggtgctgagcttggctcttgcggacagtgggatcagcctgaatgccctcgttgcagccacatccagccttctccggcgctggccctacggctcggacggctgccaggctcacggcttccagggctttgtgacagcgttggccagcatctgcagcagtgcagccatcgcatgggggcgttatcaccactactgcacccgtagccagctggcctggaactcagccgtctctctggtgctcttcgtgtggctgtcttctgccttctgggcagctctgccccttctgggttggggtcactacgactatgagccactggggacatgctgcaccctggactactccaagggggacagaaacttcaccagcttcctcttcaccatgtccttcttcaacttcgccatgcccctcttcatcacgatcacttcctacagtctcatggagcagaaactggggaagagtggccatctccaggtgcccgccctcattgccaaaatggtgcccacgatcaatgccatcaactatgccctgggcaatgagatggtctgcaggggaatctggcagtgcctctcaccgcagaagagggagaaggaccgaaccaagtgagcctgccaccctggagtgagccccaggccaggaggctgttccaggagtcctgcccagcagcctcagtggccaagcccagacactcacccaccttccccagtggccccgtggatcctggtcctaggctggacacaggattcagaaagacaccaggctgcacagaaagagccagatggacctgagtgtcggtcacagccccctacactcaaggctgagaggcctcaggaaagtcattcctttttaaaaataataataaatgtaagggggtacagtgcagttttgttacatggatagattgcctagtggtgaagtctgggcttttagtgtaaccatcaccctaataatatacgttgtacccattaagttatttctcatccctcaccccctcccaccttgtcacccttctgagtctccaatgtctattattccacactccatgtccacgtgtacacattatttagctcccacttacaagtgagaacatgtggtatttgactttctgtttttgagttatttcacttaaaataatgacctccagtttcatccatgttgctgcaaaagacatgatctcgttcttttttatggcagtgtagtattccattccatatacatatataaacgttatatatatgtaacgttttctttatccaatcatctgttgatggatagattccatatctttgctactgtaaacagctgtgataagcatacaagtgcaggtttctttttgatatactgatttcttttcctttgggtagataccagtagtaggactgctggatcaaatggtagctctatttttaagacagtatggagaaatcaccatactgttttccataggggttgtactaatttacagtcccaccaacagtgtataggtgttcccttttctctgcatccttaccaatatctgtaattttttgactttttaataatagccattctcacttgtgtgagataaggtctcattgtggttttaatttccatttctctgatgacttttgatgttaagcattttttcatatgcttcttagccacgtgtatgtattctttttgaaaaaatgtttattcatgtcttttgcccactttttaatggcattatttggattttttttgttgagttatttgagtttcttatatattctggataatagtctggataatatattctggataatatataatagtcttatatattctggatatattctggatacatggtttgcaaatattttctccggttctgcacgttgttcattctgttgatggtttattttgctgtgcagaaacttttttagtttaattaagtcccatttgtct

SEQ ID NO: 25251 - DNA, 762 bp, Artificial Sequence
  derived and/or modified sequence
atggccgagaccagcgccctgcccaccggcttcggcgagctggaggtgctggccgtgggcatggtgctgctggtggaggccctgagcggcctgagcctgaacaccctgaccatcttcagcttctgcaagacccccgagctgagaaccccctgccacctgctggtgctgagcctggccctggccgacagcggcatcagcctgaacgccctggtggccgccaccagcagcctgctgagaagatggccctacggcagcgacggctgccaggcccacggcttccagggcttcgtgaccgccctggccagcatctgcagcagcgccgccatcgcctggggcagataccaccactactgcaccagaagccagctggcctggaacagcgccgtgagcctggtgctgttcgtgtggctgagcagcgccttctgggccgccctgcccctgctgggctggggccactacgactacgagcccctgggcacctgctgcaccctggactacagcaagggcgacagaaacttcaccagcttcctgttcaccatgagcttcttcaacttcgccatgcccctgttcatcaccatcaccagctacagcctgatggagcagaagctgggcaagagcggccacctgcaggtgcccgccctgatcgccaagatggtgcccaccatcaacgccatcaactacgccctgggcaacgagatggtgtgcagaggcatctggcagtgcctgagcccccagaagagagagaaggacagaaccaagtag

SEQ ID NO: 25252 - DNA, 363 bp, Artificial Sequence
  derived and/or modified sequence
atggccgagaccagcgccctgcccaccggcttcggcgagctggaggtgctggccgtgggcatggtgctgctggtggaggaccccggcgccgccgacagcctgccccccaccggcgccgagctgggcagctgcggccagtgggaccagcccgagtgccccagatgcagccacatccagcccagcccctgcctgccccaggccctggccctgagactgggcagactgcccggcagcagactgcccggcctgtgcgacagcgtgggccagcacctgcagcagtgcagccacagaatgggcgccctgagccccctgctgcacccccccaagtgctgccacagaagccaccacttcgagtggagatag

SEQ ID NO: 25253 - protein, 246 aa, Artificial Sequence
  derived and/or modified sequence
MELWPCLAAALLLLLLLVQLSRAAEFYAKVALYCALCFTVSAVASLVCLLRHGGRTVENMSIIGWFVRSFKYFYGLRFEVRDPRRLQEARPCVIVSNHQSILDMMGLMEVLPERCVQIAKRELLFLGPVGLIMYLGGVFFINRQRSSTAMTVMADLGERMVRENVPIVPVVYSSFSSFYNTKKKFFTSGTVTVQVLEAIPTSGLTAADVPALVDTCHRAMRTTFLHISKTPQENGATAGSGVQPAQ

SEQ ID NO: 25254 - DNA, 741 bp, Artificial Sequence
  derived and/or modified sequence
atggaattgtggccttgtctggctgcagcccttcttctgttgctcttgctcgtgcagttaagccgggccgctgagttttatgcgaaagtcgcactctactgtgccctctgcttcacagtctctgctgttgcctcactggtatgtttactcagacatggcggaagaactgtcgaaaacatgagcatcatcgggtggtttgtgcgctcttttaagtacttttacggcttgaggtttgaagttcgggatcctaggcgactgcaggaagcccgtccctgcgtgattgtgagtaaccaccagagtattctcgacatgatgggactgatggaggtgctgccagagcgatgtgttcagattgctaagcgggagctgctgttccttggccccgtcggacttataatgtacctaggcggtgtgtttttcatcaatagacagcggtcgtctaccgccatgacggttatggccgatctgggcgagcggatggtgagggagaacgtgccaatagttccggtcgtctactctagtttttcaagcttctataacacaaagaaaaagtttttcacttctggtaccgttactgtacaggtactcgaagccattcctaccagcgggttaaccgccgccgatgtcccggccctggtcgatacctgccacagggcaatgaggaccacttttctgcacatctccaaaacgcctcaggagaacggggcaaccgccggcagtggcgtgcagccagcacaatag

SEQ ID NO: 25255 - DNA, 741 bp, Artificial Sequence
  derived and/or modified sequence
atggagctgtggccctgcctggccgccgccctgctgctgctgctgctgctggtgcagctgagcagagctgctgagttctacgccaaggtggccctgtactgtgccctgtgcttcaccgtgtctgctgtggccagcctggtgtgcctgctgcggcacggcggccgcacagtggagaacatgagcatcatcggctggtttgtgcgctccttcaagtacttctacggcctgcgctttgaggtgcgggacccccggcggctgcaggaggcccggccctgcgtcatcgtgagcaaccaccagagcatcctggacatgatgggcctgatggaggtgctgcctgagcgctgtgtgcagatcgccaagcgggagctgctcttcctgggccctgtgggcctcatcatgtacctgggcggcgtcttcttcatcaaccggcagaggagcagcacagccatgacagtgatggctgacctgggggagaggatggtgagagaaaatgtgcccatcgtgcctgtggtgtacagcagcttcagcagcttctacaacaccaagaagaagttcttcaccagcggcaccgtgacagtgcaggtgctggaggccatccccaccagcggcctgacagctgctgatgtgcctgccctggtggacacctgccaccgggccatgaggaccaccttcctgcacatcagcaagaccccccaggagaatggagccacagctggcagcggcgtgcagcctgcccagtag

SEQ ID NO: 25256 - DNA, 741 bp, Artificial Sequence
  derived and/or modified sequence
atggagctgtggccctgcctggccgccgccctgctgctgctgctgctgttggtgcagttgagcagggctgccgagttctacgctaaagtggccctctactgcgcactctgtttcactgtttcagcagtggccagcttagtatgcctcctgcggcacggggggcgaaccgtggaaaatatgagcatcatagggtggtttgttcggtcctttaagtacttttacgggctgcgctttgaagtgagagatcccaggaggctgcaggaagcccgaccttgcgtgatagtctctaaccaccagtctatcctcgacatgatgggcttaatggaggtgctccccgagcggtgtgtgcagatcgcaaaacgcgaacttttattcctgggccctgtcggcctcattatgtaccttggaggcgtttttttcatcaacagacaacggtccagtactgctatgactgtaatggccgatctcggggaacggatggtaagagagaacgtgcctatcgttcccgtagtctactccagcttcagtagcttctacaacacgaaaaagaagttctttaccagtggtaccgtgacagtgcaggtcttagaagccattcccacctccgggctgactgccgctgacgtgcctgcactggttgatacatgccatagggccatgcgtactacgtttctgcatatctcaaaaacgccgcaggaaaatggagcaacagccggctcgggcgttcagcccgcccagtag

SEQ ID NO: 25257 - DNA, 741 bp, Artificial Sequence
  derived and/or modified sequence
atggagctgtggccgtgtctcgccgcagccctgctgttactcttgctcctcgttcagctctcacgtgctgcagaattttatgccaaagttgccctttattgcgcgttatgctttacagtttccgccgtagcatcactggtatgcttgttgaggcacggtggcaggacggttgagaatatgagcatcatcggatggttcgttagatcttttaagtacttctatggtctacgcttcgaagtgcgggacccacgacgactgcaggaagctagaccatgtgttatcgtttctaatcaccaatctatattggacatgatgggcttgatggaggtattgccagaacgctgcgtccagattgccaagcgggaacttctcttcctaggacccgtgggtctcattatgtatttgggcggtgtcttctttatcaataggcagcggtcttcaaccgccatgacagtcatggctgatctaggggaacggatggtgcgtgaaaacgtgccaatcgtgcctgtcgtttatagttcctttagctccttctacaataccaagaaaaagttttttacatccggtaccgtcacagtgcaagtgctggaggcaatacctacttcaggactgaccgctgccgacgtacccgctctggtggatacctgtcatagggccatgcgcacaacgttcctccatatcagtaaaactccccaagaaaatggcgctaccgctggtagcggagtgcagccggctcaatag

SEQ ID NO: 25258 - DNA, 1391 bp, Artificial Sequence
  derived and/or modified sequence
cgggagcgagctggcggcgccgtcgggcgccgggccgggccatggagctgtggccgtgtctggccgcggcgctgctgttgctgctgctgctggtgcagctgagccgcgcggccgagttctacgccaaggtcgccctgtactgcgcgctgtgcttcacggtgtccgccgtggcctcgctcgtctgcctgctgcgccacggcggccggacggtggagaacatgagcatcatcggctggttcgtgcgaagcttcaagtacttttacgggctccgcttcgaggtgcgggacccgcgcaggctgcaggaggcccgtccctgtgtcatcgtctccaaccaccagagcatcctggacatgatgggcctcatggaggtccttccggagcgctgcgtgcagatcgccaagcgggagctgctcttcctggggcccgtgggcctcatcatgtacctcgggggcgtcttcttcatcaaccggcagcgctctagcactgccatgacagtgatggccgacctgggcgagcgcatggtcagggagaacgtgcccatcgtccccgtggtgtactcttccttctcctccttctacaacaccaagaagaagttcttcacttcaggaacagtcacagtgcaggtgctggaagccatccccaccagcggcctcactgcggcggacgtccctgcgctcgtggacacctgccaccgggccatgaggaccaccttcctccacatctccaagaccccccaggagaacggggccactgcggggtctggcgtgcagccggcccagtagcccagaccacggcagggcatgacctggggagggcaggtggaagccgatggctggaggatgggcagaggggactcctcccggcttccaaataccactctgtccggctcccccagctctcactcagcccgggaagcaggaagccccttctgtcactggcctcagacacaggcccctggtgtcccctgcagggggctcagctggaccctccccgggctcgagggcagggactcgcgcccacggcacctctgggagctgggatgataaagatgaggcttgcggctgtggcccgctggtgggctgagccacaaggcccccgatggcccaggagcagatgggaggaccccgaggccagacgcacactgtccgagccctctgctcagccgcctgggacccaccagggtgcagctgggctccagggtccagcccacaagctgcatcaggctctctgggagaggaggggcctggagggccaggagtcccagactcacgcaccctgggccacagggagccgggaatcggggcctgctgctcctgctggcctggaagactctgtggggtcagcactgtactccgttgctgtttttttataaacacactcttggaagtggc

SEQ ID NO: 25259 - DNA, 741 bp, Artificial Sequence
  derived and/or modified sequence
atggagctgtggccctgcctggccgccgccctgctgctgctgctgctgctggtgcagctgagcagagccgccgagttctacgccaaggtggccctgtactgcgccctgtgcttcaccgtgagcgccgtggccagcctggtgtgcctgctgagacacggcggcagaaccgtggagaacatgagcatcatcggctggttcgtgagaagcttcaagtacttctacggcctgagattcgaggtgagagaccccagaagactgcaggaggccagaccctgcgtgatcgtgagcaaccaccagagcatcctggacatgatgggcctgatggaggtgctgcccgagagatgcgtgcagatcgccaagagagagctgctgttcctgggccccgtgggcctgatcatgtacctgggcggcgtgttcttcatcaacagacagagaagcagcaccgccatgaccgtgatggccgacctgggcgagagaatggtgagagagaacgtgcccatcgtgcccgtggtgtacagcagcttcagcagcttctacaacaccaagaagaagttcttcaccagcggcaccgtgaccgtgcaggtgctggaggccatccccaccagcggcctgaccgccgccgacgtgcccgccctggtggacacctgccacagagccatgagaaccaccttcctgcacatcagcaagaccccccaggagaacggcgccaccgccggcagcggcgtgcagcccgcccagtag

SEQ ID NO: 25260 - protein, 189 aa, Artificial Sequence
  derived and/or modified sequence
MVGGGQPCGPNMSEVSCKKRDDYLEWPEYFMAVAFLSAQRSKDPNSQVGACIVNSENKIVGIGYNGMPNGCSDDVLPWRRTAENKLDTKYPYVCHAELNAIMNKNSTDVKGCSMYVALFPCNECAKLIIQAGIKEVIFMSDKYHDSDEATAARLLFNMAGVTFRKFIPKCSKIVIDFDSINSRPSQKLQ

SEQ ID NO: 25261 - protein, 23 aa, Artificial Sequence
  derived and/or modified sequence
MSEVSCKKRDDYLEWPEYFMAVA

SEQ ID NO: 25262 - DNA, 570 bp, Artificial Sequence
  derived and/or modified sequence
atggtgggaggcgggcagccttgtggcccaaatatgtctgaagtcagctgcaaaaaaagagacgactacttagaatggccagaatatttcatggccgtggccttcttgtccgcgcagcgctctaaggacccaaattcccaagtcggggcctgcattgtaaattctgagaacaagatcgtcgggatcggatacaacgggatgcctaacgggtgctccgatgatgtcctcccctggaggcgaaccgccgaaaacaagctcgataccaagtatccatatgtctgccatgcagagttgaatgccatcatgaacaaaaattccactgatgttaagggatgtagtatgtatgtggctctgtttccatgtaatgaatgtgcaaaactcatcatccaggccggaataaaggaggtaatctttatgtcagataagtatcatgacagcgacgaggcaacagccgcgaggcttctcttcaacatggctggagtcacttttcggaagttcatccctaagtgttctaaaatcgtgattgattttgactccatcaacagccgccccagccagaaattgcaatag

SEQ ID NO: 25263 - DNA, 570 bp, Artificial Sequence
  derived and/or modified sequence
atggtgggcggcggccagccctgtggccccaacatgtctgaggtgtcctgcaagaagagagatgactacctggagtggccagagtacttcatggctgtggccttcctgagcgcccagaggagcaaggaccccaacagccaggtgggcgcctgcatcgtgaacagcgagaacaagatcgtgggcatcggctacaacggcatgcccaacggctgcagtgatgatgtgctgccctggaggagaacagctgagaacaagctggacaccaagtacccctacgtgtgccacgccgagctgaatgccatcatgaacaagaacagcacagatgtgaagggctgcagcatgtatgtggccctcttcccctgcaatgaatgtgccaagctgatcatccaggccggcatcaaggaggtgatcttcatgtctgacaagtaccatgacagtgatgaggccacagctgcccggctgctcttcaacatggccggcgtgaccttcaggaagttcatccccaagtgcagcaagatcgtgattgactttgacagcatcaacagccggcccagccagaagctgcagtag

SEQ ID NO: 25264 - DNA, 570 bp, Artificial Sequence
  derived and/or modified sequence
atggtgggcggcggccagccctgcggccccaacatgagcgaggtgagctgtaaaaaacgcgacgattatttagaatggcctgaatactttatggccgtcgctttcctgtccgcgcaacggagtaaagaccccaactcccaagttggagcatgtatagtcaactcagagaacaagatcgtgggcataggctacaatgggatgccaaacggctgcagcgacgatgtgctaccctggagacgcaccgcggaaaacaagctcgataccaagtatccatatgtctgtcatgctgagctgaatgcgattatgaataaaaacagcacagatgtcaagggatgctcgatgtacgtggccctcttcccatgcaacgagtgcgcaaaactgattatccaagccggcattaaggaggtgatcttcatgagcgataagtatcatgatagtgatgaggccacagctgctaggctcctcttcaacatggccggcgtcacatttcggaagttcatcccgaagtgcagtaaaatagttatagattttgacagcattaatagccgcccctcccagaagctgcagtag

SEQ ID NO: 25265 - DNA, 570 bp, Artificial Sequence
  derived and/or modified sequence
atggtgggtggcggacagccttgcggacctaacatgagtgaagtgagctgtaaaaagagggatgattatctcgaatggcccgagtactttatggcggtcgcattcctctcagcacagcggtctaaagacccgaattcccaggtaggtgcctgcatcgtcaattcggagaacaagatcgtagggatcggctacaatggcatgccaaatggctgtagcgacgacgttctgccctggaggaggactgcggaaaacaaattggacaccaagtacccatatgtctgtcacgccgagctgaatgccattatgaacaaaaattccaccgatgtcaaggggtgcagcatgtatgtagcgctgttcccatgcaatgaatgtgcaaaactgattatccaggccggaatcaaagaagtgattttcatgtcagacaaatatcacgatagcgacgaagccaccgctgcacgcctgctttttaacatggccggagtcactttccgaaagttcatcccgaagtgttcaaaaatcgtaatcgactttgatagtatcaattctcggccttcacagaagctgcagtag

SEQ ID NO: 25266 - DNA, 1931 bp, Artificial Sequence
  derived and/or modified sequence
gacttccttccctgagcacggcggcggcggggacgagcaccggcctgcgcgcggagccggcaccggatggtgggcgggggccagccgtgcggacccaacatgagtgaagtttcctgcaagaaacgggacgactatttggaatggccagagtattttatggctgtggccttcttatcagcacagagaagcaaagatccaaattcccaggtcggcgcctgcatcgtgaattcagaaaacaagattgtcgggattgggtacaatgggatgccaaatgggtgcagtgatgacgtgttgccttggagaaggacagcagagaataagctggacaccaaatacccgtacgtgtgccatgcggagctgaatgccatcatgaacaaaaattcgaccgatgtgaaaggctgtagtatgtatgttgccttgttcccttgtaatgaatgcgctaagctcatcatccaggcaggtataaaagaagtgattttcatgtctgataaataccatgatagtgacgaggcaactgctgcgaggctcctgtttaatatggccggggtgacattccggaaattcataccgaagtgcagcaagattgtcattgactttgattcaattaacagcagaccgagtcaaaagcttcagtgagttacatctcattcaatctccagaagattgggattatcgtcttctaagaggttgctaatgcctttcatcttgaagttacacataacttcttactagccagtatggcaaaagtaggcatctaaagaatataaagcctcaaatcttccttactgtctctcttgtcacatggaatctacatgtgtttgaactattgctttagggtttaaaataggggagcctgtggtggcctggtgcacagggctagaacgagagtgcctccccttcttgtgtcctggctggctgggatgctggtggctcttcagaggagcatcagctgtctgtcatctgctgcgatccggcagcctctcttcactgctacatgtgctggaaggacaaataaataattgtggttgtgttcttaatggggacgagcagacacactgatctgaacatctggcccaagtgaagcatggcatatagtgcccttggaagaaaattaggcctcaaatgacagtagcattgaagtgtttgctgcagagttgagggaaacccccagccaccctcccggaatccgagatagggtggcacatctgtcctgacagacgaggagtgtaactgaaccaggaatatttcctccattcctgctctcccactgcacacagggtggtggcacattatccctctggggggtggggacgcctgttgttttggctcaatttgggtttgttggtcacatggagctcttccatttcgtttagctgaataatgagttgttcctagaggagacagcctgtctctccttgttgcccccaaagcccatgccctgccgtggtggcagctggggctgtggatgggaggggtccccaacatggatgtgttgcccctcctccgcatgccaacgcagttcatgtacaaggcccctctgcaactggagagaaaattaattcctatcccgtgagtggattgtgagaaattccacccacgtggagacagcttactgcagcactgttggtgttcggagctcttctgtgccctggctccatgctttcacctacacaagcatcaccttcctaatcaccgcggggcggggagcgtgtggctgtgccccttctctttaatctcatttaatttttattaaacatgctcagtacctgtgttgagaaaaggctttctttatcctaaagattattacctttttaaagtgctcttatattttcatgagtttttattttgtctctgagattttgtattccacattctagggtattctgtaatttggctccttaccaatattattaaaatcttattaaaatcta

SEQ ID NO: 25267 - DNA, 570 bp, Artificial Sequence
  derived and/or modified sequence
atggtgggcggcggccagccctgcggccccaacatgagcgaggtgagctgcaagaagagagacgactacctggagtggcccgagtacttcatggccgtggccttcctgagcgcccagagaagcaaggaccccaacagccaggtgggcgcctgcatcgtgaacagcgagaacaagatcgtgggcatcggctacaacggcatgcccaacggctgcagcgacgacgtgctgccctggagaagaaccgccgagaacaagctggacaccaagtacccctacgtgtgccacgccgagctgaacgccatcatgaacaagaacagcaccgacgtgaagggctgcagcatgtacgtggccctgttcccctgcaacgagtgcgccaagctgatcatccaggccggcatcaaggaggtgatcttcatgagcgacaagtaccacgacagcgacgaggccaccgccgccagactgctgttcaacatggccggcgtgaccttcagaaagttcatccccaagtgcagcaagatcgtgatcgacttcgacagcatcaacagcagacccagccagaagctgcagtag

SEQ ID NO: 25268 - protein, 482 aa, Artificial Sequence
  derived and/or modified sequence
MAELQMLLEEEIPSGKRALIESYQNLTRVADYCENNYIQATDKRKALEETKAYTTQSLASVAYQINALANNVLQLLDIQASQLRRMESSINHISQTVDIHKEKVARREIGILTTNKNTSRTHKIIAPANMERPVRYIRKPIDYTVLDDVGHGVKKWHKIIHGNNQPARTGTLSRTNPPTQKPPSPPMSGRGTLGRNTPYKTLEPVKPPTVPNDYMTSPARLGSQHSPGRTASLNQRPRTHSGSSGGSGSRENSGSSSIGIPIAVPTPSPPTIGPAAPGSAPGSQYGTMTRQISRHNSTTSSTSSGGYRRTPSVTAQFSAQPHVNGGPLYSQNSISIAPPPPPMPQLTPQIPLTGFVARVQENIADSPTPPPPPPPDDIPMFDDSPPPPPPPPVDYEDEEAAVVQYNDPYADGDPAWAPKNYIEKVVAIYDYTKDKDDELSFMEGAIIYVIKKNDDGWYEGVCNRVTGLFPGNYVESIMHYTD

SEQ ID NO: 25269 - protein, 481 aa, Artificial Sequence
  derived and/or modified sequence
MAELQMLLEEEIPSGKRALIESYQNLTRVADYCENNYIQATDKRKALEETKAYTTQSLASVAYQINALANNVLQLLDIQASQLRRMESSINHISQTVDIHKEKVARREIGILTTNKNTSRTHKIIAPANMERPVRYIRKPIDYTVLDDVGHGVKWLKAKHGNNQPARTGTLSRTNPPTQKPPSPPMSGRGTLGRNTPYKTLEPVKPPTVPNDYMTSPARLGSQHSPGRTASLNQRPRTHSGSSGGSGSRENSGSSSIGIPIAVPTPSPPTIGPAAPGSAPGSQYGTMTRQISRHNSTTSSTSSGGYRRTPSVTAQFSAQPHVNGGPLYSQNSISIAPPPPPMPQLTPQIPLTGFVARVQENIADSPTPPPPPPPDDIPMFDDSPPPPPPPPVDYEDEEAAVVQYNDPYADGDPAWAPKNYIEKVVAIYDYTKDKDDELSFMEGAIIYVIKKNDDGWYEGVCNRVTGLFPGNYVESIMHYTD

SEQ ID NO: 25270 - DNA, 1449 bp, Artificial Sequence
  derived and/or modified sequence
atggccgagctgcagatgcttcttgaggaagagattccttccggcaagagggcactgatcgaatcgtaccagaacctaaccagggtggcagactattgcgaaaacaactatattcaggcaacggacaagaggaaagcacttgaggaaactaaggcatacactacgcaatcactggcgtcagtcgcctatcagattaacgcccttgctaataacgtgctgcaactcctggacatccaagctagtcaactgcggcggatggagtcaagtattaaccacatcagtcagaccgtggatatccacaaagagaaggtggcgagaagggaaattggtattctcaccaccaataaaaatactagccgaacgcacaagataattgcccctgctaatatggagcgtcccgttcggtacataaggaagcctatagactacacagtattagacgacgtgggacacggtgtgaagaagtggcataaaattattcacggcaacaatcagccagctcgaactggaaccctatctaggacgaatccccctacacagaagcctccctctcctcccatgtccggacgtgggaccctgggccgcaataccccttataaaactttagaaccagttaagccccctaccgtccctaacgactatatgacttcccccgcccggctgggatcccagcactctcccggccgaacggctagcctgaatcaacggccccgaactcactctggatcttcggggggatccggcagcagggaaaacagcggatctagttccataggtatccctatcgcagtccctaccccaagtccccccaccataggaccagccgcccctggctctgcacccggttcccaatatgggaccatgaccaggcaaattagtcgccataattcaaccacctcctctacaagtagtggaggttacaggcgcaccccaagcgtgactgcccaattctccgcccagccgcacgtgaatggcgggcccctgtattcccagaacagcatatcgatcgcaccaccccctcctccaatgcctcagcttaccccacagatcccattgaccgggttcgttgctagagtgcaagaaaacattgccgattccccaacgccaccccctccgccaccgcctgatgacatacctatgtttgatgactcgcccccacctcctccccccccgcccgttgactatgaggacgaggaggccgctgtggtgcagtacaatgatccatatgccgacggagaccccgcatgggcgcccaagaactatattgaaaaagtcgtcgccatttatgactacactaaagacaaagacgacgaactgagctttatggaaggggcgatcatttacgttatcaagaagaacgatgatggatggtacgaaggggtgtgcaacagggtgactggactctttcctggaaattacgttgagagtattatgcactatacagattag

SEQ ID NO: 25271 - DNA, 1446 bp, Artificial Sequence
  derived and/or modified sequence
atggcagagcttcagatgctgctcgaggaggagatccctagtggaaagcgggcactgatcgagtcttaccaaaatctcaccagggtggcggattattgcgagaacaactatatccaggccacggacaagagaaaggcccttgaggagacaaaagcatacacaacacagagcctggcgagtgtagcgtaccaaataaacgccctggctaacaacgtactacagctcctcgacatccaggcctcccagttgagaagaatggaatcttccatcaaccacattagccagacagtagacatacacaaagagaaagtggctagaagggaaataggcatactcacaacaaataagaatacctcaagaacgcataagataatcgcacccgctaacatggagagacctgtgagatacataagaaagcctatagattatactgtgctggacgacgtggggcacggggtgaaatggctgaaagctaagcatgggaacaatcaaccggcaaggaccggcaccttgagtagaaccaaccctcctacgcagaaaccaccgtctccccctatgtcggggcgcggtactctgggacggaacacaccctacaagacgctggaacctgtcaaaccaccaaccgtgccaaatgattacatgacatctcctgcaaggctgggctcacagcattctccaggacggacagcctccctgaatcaacggccgcgtacccactctggtagctcaggcggctccggatctagggaaaacagcggcagcagcagtattggcatacccatagctgttcccactccatctccaccgactattggtcccgccgctccaggtagcgcaccagggtcacagtacggcactatgactagacagatctccagacacaactccactacgagcagcacttcaagcgggggttaccgccggacccctagtgtgacggcccagtttagcgcacagccccatgttaatggaggacctttatacagtcagaatagcatctctattgccccaccgcccccgccgatgccccagctgacacctcagattccgctgacagggttcgtcgccagagttcaggagaatattgcggattcccctacccccccccctccgccgccgcccgacgacatccccatgttcgatgattctccaccacctccaccccctccaccagtggattacgaggatgaagaggctgcggtcgttcagtacaacgacccttatgcagatggagatcccgcttgggcccccaagaactatatcgaaaaagttgtcgcaatttatgactacactaaggataaagacgatgaactgtctttcatggagggtgctattatctacgtcattaaaaagaacgatgatggttggtacgagggcgtgtgcaatcgcgtcaccggtctgttccccggaaattacgtagaaagcatcatgcattacaccgattag

SEQ ID NO: 25272 - DNA, 1449 bp, Artificial Sequence
  derived and/or modified sequence
atggccgagctgcagatgctgctggaggaggagatccccagcggcaagagggccctgattgagagctaccagaacctgaccagggtggccgactactgtgagaacaactacatccaggccacagacaagaggaaggccctggaggagaccaaggcctacaccacccagagcctggcctctgtggcctaccagatcaatgccctggccaacaacgtgctgcagctgctggacatccaggccagccagctgcggaggatggagagcagcatcaaccacatcagccagacagtggacatccacaaggagaaggtggcccggcgggagatcggcatcctgaccaccaacaagaacaccagcaggacccacaagatcatcgccccagccaacatggagaggcctgtgcgctacatcaggaagcccatcgactacacagtgctggatgatgtgggccatggagtgaagaagtggcacaagatcatccacggcaacaaccagcctgccaggacaggcaccctgagcaggaccaacccccccacccagaagccacccagcccccccatgagcggccggggcaccctgggcaggaacaccccctacaagaccctggagcctgtgaagcccccaacagtgcccaatgactacatgaccagccctgcccggctgggcagccagcacagccctggccgcacagccagcctgaaccagaggcccaggacccacagcggcagcagcggcggcagcggcagcagagaaaattctggcagcagcagcatcggcatccccatcgctgtgcccacccccagcccccccaccatcggccctgctgcccctggcagcgcccctggcagccagtatggcaccatgacccggcagatcagccgccacaacagcaccaccagcagcaccagcagcggcggctacagaaggacccccagcgtgacagcccagttcagcgcccagccccacgtgaatggaggccccctgtacagccagaacagcatcagcatcgcccctcctcctccacccatgccccagctgaccccccagatccccctgactggatttgtggcccgggtgcaggagaacattgctgacagccccaccccacctcctcctcctcctccagatgacatccccatgtttgatgacagccccccacctcctcctcctcctcctgtggactatgaagatgaggaggccgctgtggtgcagtacaatgacccctatgcagatggagaccctgcctgggcccccaagaactacatcgagaaggtggtggccatctatgactacaccaaggacaaggatgatgagctgtccttcatggagggcgccatcatctacgtgatcaagaagaatgatgatggctggtatgagggcgtgtgcaacagagtgacaggcctcttccctggcaactacgtggagagcatcatgcactacacagactag

SEQ ID NO: 25273 - DNA, 1446 bp, Artificial Sequence
  derived and/or modified sequence
atggccgagctgcagatgctgctggaggaggagatccccagcggcaagagggccctgattgagagctaccagaacctgaccagggtggccgactactgtgagaacaactacatccaggccacagacaagaggaaggccctggaggagaccaaggcctacaccacccagagcctggcctctgtggcctaccagatcaatgccctggccaacaacgtgctgcagctgctggacatccaggccagccagctgcggaggatggagagcagcatcaaccacatcagccagacagtggacatccacaaggagaaggtggcccggcgggagatcggcatcctgaccaccaacaagaacaccagcaggacccacaagatcatcgccccagccaacatggagaggcctgtgcgctacatcaggaagcccatcgactacacagtgctggatgatgtgggccatggagtgaagtggctgaaggccaagcacggcaacaaccagcctgccaggacaggcaccctgagcaggaccaacccccccacccagaagccacccagcccccccatgagcggccggggcaccctgggcaggaacaccccctacaagaccctggagcctgtgaagccacccaccgtgcccaatgactacatgaccagccctgcccggctgggcagccagcacagccctggccgcacagccagcctgaaccagaggcccaggacccacagcggcagcagcggcggcagcggcagccgggagaacagcggcagcagcagcatcggcatccccatcgctgtgcccacccccagcccccccaccatcggccctgctgcccctggcagcgcccctggcagccagtatggcaccatgacccggcagatcagccgccacaacagcaccaccagcagcaccagcagcggcggctacagaaggaccccatctgtgacagcccagttcagcgcccagccccacgtgaatggaggccccctgtacagccagaacagcatcagcatcgcccctcctcctccacccatgccccagctgaccccccagatccccctgaccggctttgtggcccgggtgcaggagaacattgctgacagccccaccccacctcctcctcctcctccagatgacatccccatgtttgatgacagccccccacctcctcctcctcctcctgtggactatgaagatgaggaggccgctgtggtgcagtacaatgacccctatgcagatggagaccctgcctgggcccccaagaactacatcgagaaggtggtggccatctatgactacaccaaggacaaggatgatgagctgtccttcatggagggcgccatcatctacgtgatcaagaagaatgatgatggctggtatgaaggagtgtgcaacagagtgacaggcctcttccctggcaactacgtggagagcatcatgcactacacagactag

SEQ ID NO: 25274 - DNA, 1449 bp, Artificial Sequence
  derived and/or modified sequence
atggccgagctgcagatgctgctggaggaggagatccccagcggcaaaagagcactcatcgagagctaccaaaatttgacaagagtggctgactattgcgaaaacaactacattcaggctaccgataaacgaaaggctctggaagaaaccaaggcttacacaacccaatccttggcatctgttgcttaccagattaatgcgctcgccaacaacgttttacagttgttagatattcaggcaagtcagctgaggagaatggaaagctcaatcaaccatattagtcaaacagtggatattcacaaggaaaaggtggcccgccgagagattggcatcctcaccaccaataagaatacatcaagaacccacaaaatcattgctcccgcaaatatggagcgaccagttcgctatattagaaaacccatagactacaccgtgctcgacgatgtgggacacggcgtgaaaaaatggcataagattattcatggtaataatcagcccgcccgaaccgggacgctgtcccggactaaccctcccactcagaaaccaccatccccccccatgagtggcaggggcacactgggtcgtaacacgccatataagaccctggagccggtaaagcctcccaccgttcccaatgactacatgacttctcctgctcgattgggctcccagcatagtcccggcagaaccgcaagcttaaaccagcggccacgaacacattcaggcagcagcggcggtagcggcagccgtgaaaattcaggcagcagttccataggcataccaattgctgtgcccacaccctctccacccacaatcggaccagcggctccgggttcagcacctggatcccagtatggtactatgaccaggcagatttcacgtcacaactccactacctcatctacctcatccggaggctatcgaaggaccccctctgtcaccgcccaattttcggctcagcctcatgttaatgggggacctctttatagccagaattccatttctatcgcgccccccccgccgcccatgccacagctcacaccccagattccattaactgggttcgttgcaagggtgcaggaaaacattgccgatagccccactcctcctccccccccacctcccgacgacattcccatgttcgatgactcccccccaccccctccccccccacccgttgactatgaggacgaagaagctgccgtggtacaatacaatgacccctatgccgatggagaccctgcctgggctcccaagaactatatcgagaaagtcgtggccatttatgattacacaaaagacaaagacgacgagctgagctttatggagggcgccatcatctacgtgatcaagaaaaacgatgatggctggtatgagggtgtctgcaatagggtaacagggctatttcccggaaactacgtcgaaagcatcatgcactataccgactag

SEQ ID NO: 25275 - DNA, 1446 bp, Artificial Sequence
  derived and/or modified sequence
atggccgagctgcagatgctgctggaggaggagatccccagcggcaagagggcactaatagaatcatatcagaatttgactcgcgtagccgactactgtgagaataactacattcaagcgacagacaagcggaaagctctggaggagaccaaagcatatactacacagtccctggcgtcagtcgcctaccaaattaacgcacttgccaataacgttctgcagctccttgacattcaggcaagtcaactgcgaaggatggaatcttcgattaaccatatctcccaaactgtcgacattcacaaggaaaaagtcgcccgaagagaaatcggcattctgactaccaataaaaacacctcaagaacacataaaatcattgcccctgctaatatggagcggccagtgcgatacatcaggaaacccatagactacaccgtcttggatgacgtgggacacggggttaagtggcttaaagccaagcacggcaacaatcaaccggcacggaccggcacacttagccgcaccaatccgccaacccagaagcctcctagtcctccaatgtctggccgcggtaccctcggtcgtaacactccctataagacgctggaaccagttaagccacctacggtgcccaacgattacatgaccagtcccgcacgattgggctcacagcattcacccggtcgaacagctagcctgaaccaaaggccacggacccatagtggctcatctggaggctctggaagtagagagaacagcgggtctagcagtatcggtattccaatcgccgtgcccacgccatctccaccaacaatagggcctgccgcccctggatcagcccccggcagccagtatggtacaatgacgcggcaaatttcccgacacaattctaccacttcctctacgagcagcgggggctatagacgcacaccctcagtgacagcccagttctctgcgcagccgcacgttaatggcggccctttgtattcacagaacagtatttcaattgctcctccgccccctccaatgcctcagttgacgccacagatccccctcaccggctttgtggcacgtgtacaggaaaatatcgcagacagccccactcctcctccacctccgccccccgatgatatccccatgttcgacgatagcccccctccacctcccccacctcctgttgactatgaagacgaggaagccgccgtggtgcagtacaatgatccctatgccgatggagacccggcttgggccccgaagaattatatcgagaaggtggttgctatttatgactatacaaaagacaaagatgatgaactcagctttatggagggggctatcatatacgttatcaagaaaaacgacgacgggtggtacgagggagtgtgcaaccgcgtgactggcctctttccaggcaattacgtcgagagtataatgcattatactgactag

SEQ ID NO: 25276 - DNA, 1449 bp, Artificial Sequence
  derived and/or modified sequence
atggctgagctacagatgttgctggaggaagaaattcctagcggtaaaagagctctgatcgagtcatatcaaaatctcacgagggtggcggattattgtgagaacaactatatccaggctactgacaaacggaaagctctagaagaaacaaaggcatataccacccagagcctggcatcagtggcctaccagatcaatgctctcgcaaacaatgttcttcagctactagatattcaagcctcacagctccgccgaatggaatcttccattaaccacatctctcagacagtcgacattcataaggagaaagtggccagaagggagatcggcatcctgacgacgaataagaatacgtcacggacacataaaatcatcgccccagccaatatggaacgcccagtacgctacataaggaaacccattgactataccgtactggatgatgtaggccacggcgtcaagaaatggcacaagattatccatggcaataatcagcccgcacgtacaggaactctgtcacggacaaacccaccaacccagaaaccgccatccccccctatgagcggcagaggtactctcggacggaatactccgtacaagactctcgagcctgtaaaacccccaaccgtgccgaatgactacatgacaagccccgctcgactgggatctcagcattcgccaggaagaacagcttccctcaaccagagacctaggacacactctggatcatctgggggatctggctcgcgggagaattccgggtcatctagtatcggcattcccattgccgtcccaaccccgagccccccaacaattggcccagccgcaccgggaagtgcaccaggcagtcagtatggtaccatgacacgccaaataagtcggcacaactctacgacttcatccacaagttctgggggttataggcgaactcccagcgtgacagcccaattctccgcacaacctcatgtgaacggtggtccgctatactctcaaaactctatctcgattgcgcctccccctccacccatgcctcagctcaccccccagatccccctaacaggcttcgtggccagagtacaggaaaacattgccgacagccctacaccaccccctccaccccctccggacgatatccctatgttcgacgactccccccctccgcctccaccaccaccagtcgattacgaagacgaagaggctgcagttgtgcagtataatgatccatacgccgacggagaccctgcctgggccccaaagaactatattgagaaggtggtggcgatttatgactacacaaaggacaaagatgatgagctttcatttatggagggcgcaattatttatgtgattaaaaaaaacgacgatggatggtatgagggggtctgtaatcgggtcaccggactgtttccaggcaattatgtcgaaagcatcatgcactatacagactag

SEQ ID NO: 25277 - DNA, 1446 bp, Artificial Sequence
  derived and/or modified sequence
atggccgaactccagatgttgctcgaggaggagataccttctggaaaacgggcacttattgaatcctatcagaaccttacgcgggtggcagattactgtgaaaacaactacattcaggccaccgacaaacgaaaggccctggaagagacaaaggcctatacgacacagagcctggccagtgttgcataccaaatcaacgccttggctaacaacgtgctccagctcctcgacatccaggcgagccagttgaggcgcatggagtccagcatcaaccatatcagtcaaactgttgacattcataaagaaaaggtggctcgacgcgagatcggtatacttacaacaaataaaaatacatcaagaacccacaagattattgctcccgcaaacatggaacgtcccgtaaggtatatccgcaagcccattgattataccgtcctggatgatgtaggtcatggggtgaaatggctaaaggcaaaacacggtaataatcaacccgcaaggactggaacgctgtcacggactaacccccctactcagaaacccccatcacctccaatgtccgggagagggactctcggaaggaatactccctacaaaacgctggagcctgttaagcctcccaccgtacccaatgattatatgaccagtcccgctcgccttggcagccaacattcaccagggcgaaccgcaagccttaaccaaaggcccagaacccacagcggctccagcggcggaagtggcagtcgcgaaaattccggctccagctcaattgggattcctattgcggtgccaacgccttctcccccaacaattggcccagctgcccctggaagtgcgcctggtagtcagtacgggacaatgactcgccagatctcccggcataactcaactacgagcagtacgtcctcaggcggttataggcgaaccccctctgtcaccgctcaattcagtgcccagccccacgtgaatggtgggccactgtacagccagaactctatttctatagctcccccaccgcctccaatgccccagctaaccccccagatcccactgactggctttgttgctcgagttcaggagaacatagcagattctccgacacccccaccccctcctccgccagacgatattcccatgtttgatgacagccccccaccccctccaccgcctccggtcgattatgaagatgaggaggcggctgttgttcagtataacgacccttatgctgatggggaccctgcttgggcccctaaaaattacattgaaaaggttgttgctatttacgactacaccaaagacaaagacgacgaactgagcttcatggaaggggcaatcatttacgtaattaagaagaacgatgatgggtggtacgaaggggtgtgcaacagagtgacggggctgtttccgggaaactatgtagaatccatcatgcactatactgactag

SEQ ID NO: 25278 - DNA, 3647 bp, Artificial Sequence
  derived and/or modified sequence
gagaaataaacgctcgcgagagaacgaggttcaggcggctgcacgaagggggtggaggggggctggagagagtgaggaggaaggggaggaggtgccgtcccacaataccaggcgggagggcgggtaggcggtttgtatccgggctgtgaggtgctcggagcctcggcggaccttgctgcctctgtctctttaacgcgagaggaagcgatgcagaggggtggaaaatggcagagctgcagatgttactagaggaggagatcccgtctggcaagagggcgctgatcgagagttaccagaacctgactcgggtggcagactactgtgaaaacaactacatacaggctacagacaagagaaaagctttagaggagaccaaagcctatacaacccaatctctagctagtgttgcttatcaaataaatgcattggccaacaatgtactccagttgctggatatccaagcctctcagcttcggagaatggagtcttccatcaatcatatctcacagactgtggatattcataaggagaaagtggcacgaagagagattggtattttgacaacaaataagaatacatcaagaactcacaaaataatagcacctgcgaatatggagcgccctgtaaggtatattcggaaacctatcgattacacagttctggatgatgtgggccatggtgtcaagaaatggcataaaataatacatggaaataaccagcctgcaagaactggcacactgtcgagaacaaatcctcctactcagaaaccgccaagtcctcccatgtcaggccggggaacactgggacggaatactccttataaaaccctggaacctgttaaacccccaacagttcctaatgactatatgaccagtcctgctaggcttggaagtcagcatagtccaggcaggacagcatctttaaatcagagaccaaggacacacagtggaagtagtggaggaagtggaagtcgagaaaacagtggtagcagtagtattggcattcccattgctgtgcctacaccttcgccacccactattggaccagcagccccgggctcagctcctggttcccagtatggcacaatgaccaggcagatatctcgacacaactctactacttcttcgacatcttctggtggatacagacgaactccctctgtgactgctcaattttctgctcagcctcatgttaatggaggtccactttattctcaaaattcaatttctattgctccaccccctccccctatgcctcagttgactccacagatacctctcacaggcttcgtggccagggtgcaggaaaacattgctgatagtccaactccaccgccaccacctccaccagatgacattcccatgtttgatgactctccacctcccccaccaccaccaccagtggattatgaagatgaggaggctgcagtagttcagtataatgatccatatgcagatggggatcctgcttgggcccccaagaattatattgagaaagttgttgcaatatatgattatacaaaagacaaggatgatgagctgtcatttatggagggtgcaatcatttatgttataaagaagaatgatgatggctggtatgaaggagtctgcaatcgagtgactggtctgttccctgggaactatgttgaatcaatcatgcactatactgattaatttttttttttcttttgaagtagattcttattactcagtcatactgtgggactattatggttaacagaactgtcttaatatgttttaaaatgtgcccatattttcagaacatgctgttttattggtaaattgaatgtctacctgtaagcataaatctttgaggcagtttatgtattgctgaatagcaatttatacaagaagctgtccataactgattatgcttatgtacttacttacacatttttaactttatgaccagcctaaatattctgggggaagtggggtataatatttaacgaatcatgattcagattgtaccattacatgtttcagtgcagcatggttactaacgctatgtcagactaatattaaaatcagaaaatttaaatgctggtgctggtcagactttttttgttagattctctcatttaaaaaaaatactgtttgtttaaagcatgcataaaaatttatgtattgaaatatacttaaaaattcaagatgcttcccatttgtgtaatatttacctggaggactcgtacttaggtgtcttaacgtgaattgagtctccaaggtctccatgtgaaacaagcaaaaagagaattatctgtaatgttgtaatttgtacctaagttttttaatgagtgaaatttgcattataaactttttccattcataaatacataagtgaaccaaaggtttttgtcctttccttcactgatttgctttaaaaaaaataaaagataatgatttattgcagaattatgattctattttctcaatatgttaacttggaaaaaaattttagccttatcttaatctgtcccaacagcaatgtgacggatttttgcagattcaaaatctgcaatggttatttacaagtcaatctactgaattccttttttaaataatcttttgaaactaagaaaatgtgtcaaattgtgtgcattcattctgtaggtaaaattcttaaggattgccatgtcagtccttcagttgtacagtgaactgttgtacactggttcaatgaaaggaagttaaaagtaccttttacatattgtaaaagtggatacagttgatttgtgagtaggcactctttaatccattacctggcactagcaacattagaattttaaaataaaataattgggaaagaaggtgggtcatgtattaatcagtgaacagagatttacctaaccaacagacttggattgtcttttgacataatcaaaatgcaacacatgcactttgtgtgtctcctcttaattgaagggagggctgagggatgttttctcttcttgtcttgtgtataattctctattgcttaggatattaaagtagagcactcaagtgtgggtttctgtgttattgaggatttgtttggaattcaaattacagttatgtactggatgctacagacttataacagcatagtgaatggtaagactagtgcaaaacagttatttctgaaaattaaagaccattattgctaccaaatcaatgtgactatttcatatgcattttgcctttgttaattttaaacaaacaaagtatcattagtgatcagctagctaccttctactttccatttttcaagtggattgttctcttaatttgtatataacctgttgtctaaattttatgtacagtcttttataataaaccattctcctatatgaaattttggatactgttaaaatataactcatgtggacttcaatgcagacttcacatttttctgacctttactcctacggtaaatcaagacaaaccatttgaattttaacattggttatttatttgtgtaatggccttacatgtggatattaacagtgtaaacaataccacatataaccatcaagataccttgattataatttataggactagaatgacagattcaggtggtttattaattacatttaaaaagttttctgaaaaaacttttgcaataaaaaaaaataaattgcccatcaa

SEQ ID NO: 25279 - DNA, 1446 bp, Artificial Sequence
  derived and/or modified sequence
atggcagagctgcagatgttactagaggaggagatcccgtctggcaagagggcgctgatcgagagttaccagaacctgactcgggtggcagactactgtgaaaacaactacatacaggctacagacaagagaaaagctttagaggagaccaaagcctatacaacccaatctctagctagtgttgcttatcaaataaatgcattggccaacaatgtactccagttgctggatatccaagcctctcagcttcggagaatggagtcttccatcaatcatatctcacagactgtggatattcataaggagaaagtggcacgaagagagattggtattttgacaacaaataagaatacatcaagaactcacaaaataatagcacctgcgaatatggagcgccctgtaaggtatattcggaaacctatcgattacacagttctggatgatgtgggccatggtgtcaagtggctaaaagccaagcatggaaataaccagcctgcaagaactggcacactgtcgagaacaaatcctcctactcagaaaccgccaagtcctcccatgtcaggccggggaacactgggacggaatactccttataaaaccctggaacctgttaaacccccaacagttcctaatgactatatgaccagtcctgctaggcttggaagtcagcatagtccaggcaggacagcatctttaaatcagagaccaaggacacacagtggaagtagtggaggaagtggaagtcgagaaaacagtggtagcagtagtattggcattcccattgctgtgcctacaccttcgccacccactattggaccagcagccccgggctcagctcctggttcccagtatggcacaatgaccaggcagatatctcgacacaactctactacttcttcgacatcttctggtggatacagacgaactccctctgtgactgctcaattttctgctcagcctcatgttaatggaggtccactttattctcaaaattcaatttctattgctccaccccctccccctatgcctcagttgactccacagatacctctcacaggcttcgtggccagggtgcaggaaaacattgctgatagtccaactccaccgccaccacctccaccagatgacattcccatgtttgatgactctccacctcccccaccaccaccaccagtggattatgaagatgaggaggctgcagtagttcagtataatgatccatatgcagatggggatcctgcttgggcccccaagaattatattgagaaagttgttgcaatatatgattatacaaaagacaaggatgatgagctgtcatttatggagggtgcaatcatttatgttataaagaagaatgatgatggctggtatgaaggagtctgcaatcgagtgactggtctgttccctgggaactatgttgaatcaatcatgcactatactgattaa

SEQ ID NO: 25280 - DNA, 1449 bp, Artificial Sequence
  derived and/or modified sequence
atggccgagctgcagatgctgctggaggaggagatccccagcggcaagagagccctgatcgagagctaccagaacctgaccagagtggccgactactgcgagaacaactacatccaggccaccgacaagagaaaggccctggaggagaccaaggcctacaccacccagagcctggccagcgtggcctaccagatcaacgccctggccaacaacgtgctgcagctgctggacatccaggccagccagctgagaagaatggagagcagcatcaaccacatcagccagaccgtggacatccacaaggagaaggtggccagaagagagatcggcatcctgaccaccaacaagaacaccagcagaacccacaagatcatcgcccccgccaacatggagagacccgtgagatacatcagaaagcccatcgactacaccgtgctggacgacgtgggccacggcgtgaagaagtggcacaagatcatccacggcaacaaccagcccgccagaaccggcaccctgagcagaaccaacccccccacccagaagccccccagcccccccatgagcggcagaggcaccctgggcagaaacaccccctacaagaccctggagcccgtgaagccccccaccgtgcccaacgactacatgaccagccccgccagactgggcagccagcacagccccggcagaaccgccagcctgaaccagagacccagaacccacagcggcagcagcggcggcagcggcagcagagagaacagcggcagcagcagcatcggcatccccatcgccgtgcccacccccagcccccccaccatcggccccgccgcccccggcagcgcccccggcagccagtacggcaccatgaccagacagatcagcagacacaacagcaccaccagcagcaccagcagcggcggctacagaagaacccccagcgtgaccgcccagttcagcgcccagccccacgtgaacggcggccccctgtacagccagaacagcatcagcatcgcccccccccccccccccatgccccagctgaccccccagatccccctgaccggcttcgtggccagagtgcaggagaacatcgccgacagccccacccccccccccccccccccccccgacgacatccccatgttcgacgacagcccccccccccccccccccccccccgtggactacgaggacgaggaggccgccgtggtgcagtacaacgacccctacgccgacggcgaccccgcctgggcccccaagaactacatcgagaaggtggtggccatctacgactacaccaaggacaaggacgacgagctgagcttcatggagggcgccatcatctacgtgatcaagaagaacgacgacggctggtacgagggcgtgtgcaacagagtgaccggcctgttccccggcaactacgtggagagcatcatgcactacaccgactag

SEQ ID NO: 25281 - DNA, 1446 bp, Artificial Sequence
  derived and/or modified sequence
atggccgagctgcagatgctgctggaggaggagatccccagcggcaagagagccctgatcgagagctaccagaacctgaccagagtggccgactactgcgagaacaactacatccaggccaccgacaagagaaaggccctggaggagaccaaggcctacaccacccagagcctggccagcgtggcctaccagatcaacgccctggccaacaacgtgctgcagctgctggacatccaggccagccagctgagaagaatggagagcagcatcaaccacatcagccagaccgtggacatccacaaggagaaggtggccagaagagagatcggcatcctgaccaccaacaagaacaccagcagaacccacaagatcatcgcccccgccaacatggagagacccgtgagatacatcagaaagcccatcgactacaccgtgctggacgacgtgggccacggcgtgaagtggctgaaggccaagcacggcaacaaccagcccgccagaaccggcaccctgagcagaaccaacccccccacccagaagccccccagcccccccatgagcggcagaggcaccctgggcagaaacaccccctacaagaccctggagcccgtgaagccccccaccgtgcccaacgactacatgaccagccccgccagactgggcagccagcacagccccggcagaaccgccagcctgaaccagagacccagaacccacagcggcagcagcggcggcagcggcagcagagagaacagcggcagcagcagcatcggcatccccatcgccgtgcccacccccagcccccccaccatcggccccgccgcccccggcagcgcccccggcagccagtacggcaccatgaccagacagatcagcagacacaacagcaccaccagcagcaccagcagcggcggctacagaagaacccccagcgtgaccgcccagttcagcgcccagccccacgtgaacggcggccccctgtacagccagaacagcatcagcatcgcccccccccccccccccatgccccagctgaccccccagatccccctgaccggcttcgtggccagagtgcaggagaacatcgccgacagccccacccccccccccccccccccccccgacgacatccccatgttcgacgacagcccccccccccccccccccccccccgtggactacgaggacgaggaggccgccgtggtgcagtacaacgacccctacgccgacggcgaccccgcctgggcccccaagaactacatcgagaaggtggtggccatctacgactacaccaaggacaaggacgacgagctgagcttcatggagggcgccatcatctacgtgatcaagaagaacgacgacggctggtacgagggcgtgtgcaacagagtgaccggcctgttccccggcaactacgtggagagcatcatgcactacaccgactag

SEQ ID NO: 25282 - protein, 452 aa, Artificial Sequence
  derived and/or modified sequence
MAELQMLLEEEIPSGKRALIESYQNLTRVADYCENNYIQATDKRKALEETKAYTTQSLASVAYQINALANNVLQLLDIQASQLRRMESSINHISQTVDIHKEKVARREIGILTTNKNTSRTHKIIAPANMERPVRYIRKPIDYTVLDDVGHGVKWLKAKHGNNQPARTGTLSRTNPPTQKPPSPPMSGRGTLGRNTPYKTLEPVKPPTVPNDYMTSPARLGSQHSPGRTASLNQRPRTHSGSSGGSGSRENSGSSSIGIPIAVPTPSPPTIGPAAPGSAPGSQYGTMTRQISRHNSTTSSTSSGGYRRTPSVTAQFSAQPHVNGGPLYSQNSIADSPTPPPPPPPDDIPMFDDSPPPPPPPPVDYEDEEAAVVQYNDPYADGDPAWAPKNYIEKVVAIYDYTKDKDDELSFMEGAIIYVIKKNDDGWYEGVCNRVTGLFPGNYVESIMHYTD

SEQ ID NO: 25283 - DNA, 1359 bp, Artificial Sequence
  derived and/or modified sequence
atggctgagctgcagatgctcctggaggaggagattccgtcaggaaagcgggcgctaatcgagtcctatcagaatctgactagggtggccgactactgtgagaataattacatccaggctactgacaagcgcaaggccttggaagaaacaaaggcatacaccacacaaagcctcgcctcagtcgcttatcagatcaacgctctggccaacaacgtcctgcagttgctagatatccaagctagtcagctgcggcgaatggagagcagcatcaaccatatatcccagaccgtggatattcataaggagaaggtagcacgccgcgagattggcatattgacaactaataaaaatacgagcagaacacataagatcatagcccccgccaatatggaacgtcctgtcaggtatatacggaaaccaatcgattacaccgtcctcgacgacgttggtcacggggtgaagtggctgaaggcgaaacatgggaacaatcagcctgctcggactggtaccctttcacgcacaaaccctccaactcagaaacccccatcccctcccatgagcggacggggtaccctgggccgtaacaccccctacaaaactctggagcccgtcaagccaccaacagtgccaaacgattacatgacgtcaccggcacgattggggtcccagcattcacctgggagaacagctagccttaatcagagaccccgtacccatagtggctcatctggggggtccggcagtagagaaaactcaggaagtagttccattggcatcccaattgcagtccccacccctagccctcccacaatcggccctgctgctcccggtagcgcccctggctcccagtacggtactatgacccggcagatcagcaggcataacagtacaacttcctccactagttccggaggttacaggcggaccccttctgtgaccgctcagttctcagcccaaccacacgtgaacggtgggcctctgtactcacaaaatagcattgctgactccccaaccccgccacccccccctcccccggacgacatcccaatgttcgacgactcacctcccccacccccccctccaccagtggactatgaggatgaagaggcagccgtggttcagtataatgatccatatgccgatggcgatccggcttgggccccaaagaattacattgaaaaggtggtagcgatctacgattatacaaaagataaggacgacgaactcagcttcatggagggcgccattatatatgtcatcaagaagaacgacgacggctggtacgaaggcgtgtgtaaccgagttaccggcctgttccccggcaactacgtagaatccatcatgcattatacagattag

SEQ ID NO: 25284 - DNA, 1359 bp, Artificial Sequence
  derived and/or modified sequence
atggccgagctgcagatgctgctggaggaggagatccccagcggcaagagggccctgattgagagctaccagaacctgaccagggtggccgactactgtgagaacaactacatccaggccacagacaagaggaaggccctggaggagaccaaggcctacaccacccagagcctggcctctgtggcctaccagatcaatgccctggccaacaacgtgctgcagctgctggacatccaggccagccagctgcggaggatggagagcagcatcaaccacatcagccagacagtggacatccacaaggagaaggtggcccggcgggagatcggcatcctgaccaccaacaagaacaccagcaggacccacaagatcatcgccccagccaacatggagaggcctgtgcgctacatcaggaagcccatcgactacacagtgctggatgatgtgggccatggagtgaagtggctgaaggccaagcacggcaacaaccagcctgccaggacaggcaccctgagcaggaccaacccccccacccagaagccacccagcccccccatgagcggccggggcaccctgggcaggaacaccccctacaagaccctggagcctgtgaagccacccaccgtgcccaatgactacatgaccagccctgcccggctgggcagccagcacagccctggccgcacagccagcctgaaccagaggcccaggacccacagcggcagcagcggcggcagcggcagccgggagaacagcggcagcagcagcatcggcatccccatcgctgtgcccacccccagcccccccaccatcggccctgctgcccctggcagcgcccctggcagccagtatggcaccatgacccggcagatcagccgccacaacagcaccaccagcagcaccagcagcggcggctacagaaggaccccatctgtgacagcccagttcagcgcccagccccacgtgaatggaggccccctgtacagccagaacagcattgctgacagccccaccccacctcctcctcctcctccagatgacatccccatgtttgatgacagccccccacctcctcctcctcctcctgtggactatgaagatgaggaggccgctgtggtgcagtacaatgacccctatgcagatggagaccctgcctgggcccccaagaactacatcgagaaggtggtggccatctatgactacaccaaggacaaggatgatgagctgtccttcatggagggcgccatcatctacgtgatcaagaagaatgatgatggctggtatgagggcgtgtgcaacagagtgacaggcctcttccctggcaactacgtggagagcatcatgcactacacagactag

SEQ ID NO: 25285 - DNA, 1359 bp, Artificial Sequence
  derived and/or modified sequence
atggccgagctgcagatgctgctggaggaggagatccccagcggcaaacgtgccctgattgaatcctaccagaatttaacaagagtagccgactactgcgaaaataattacatccaggccacggacaaaagaaaggccctggaggaaaccaaggcctacacaacacagtctctggccagtgtggcttaccagatcaacgccctggctaacaacgtccttcaattattggacatccaggcttcccaattgcggaggatggagagctccataaaccacatctctcagaccgtggacatccacaaggagaaagtggccagacgtgagataggcatcctcacgaccaataagaataccagcagaacacacaagattattgcccccgccaatatggagcggcctgtgagatatatccggaagccgatcgattacacagttctagacgatgttggccacggcgtgaagtggctcaaggcgaagcacggaaataaccagcctgctcgaacgggaactttgtcccgaaccaacccccccacacagaagcctccctccccacccatgtctggtcggggaaccctgggccgcaataccccttataagacactagaacccgttaaaccgccaaccgtcccaaacgattatatgaccagtcccgctagactaggttcacagcattctccgggacggaccgcatctctcaaccagcgccccagaacccactctggatcctccggagggtccggatctcgggaaaattccggctcctcaagcatcggaatccccatagccgttccaactccgtctccaccgactatcgggcccgctgcgcccggcagtgcgcccggctctcagtatggcacaatgaccaggcagatttcacgacacaactctacgaccagttcgacaagctctggtggttaccgtagaacgccctccgtgaccgcccagttcagcgcccagcctcacgtgaatggcgggccactctatagccagaattccattgctgactcccccacccctcctcccccacctccacccgacgacatcccaatgtttgatgattccccgcccccacctcctcctcctcctgtggactacgaggacgaggaagccgccgtggtgcagtacaacgatccatacgctgatggggacccagcgtgggctccgaagaattacatcgagaaggtggtggctatctacgattataccaaggacaaggacgatgaactgtcctttatggagggagccataatttatgtgatcaaaaagaatgacgatggatggtatgaaggggtctgcaacagagtgactggtctattcccgggcaactacgtggagtctattatgcattacacggactag

SEQ ID NO: 25286 - DNA, 1359 bp, Artificial Sequence
  derived and/or modified sequence
atggccgaactccaaatgctgctggaagaagagataccttccgggaagagggcccttattgagtcctaccagaatctaacccgagtcgctgactactgcgaaaacaactatatccaagctaccgacaagcggaaggccttggaagagaccaaagcttacacgacccaaagcctcgcgagtgtcgcttaccagatcaacgcgctggcaaataatgttctgcaattgcttgatatccaggcctcccaactccgacggatggagagttccattaatcatattagtcagacagtggacatacataaggagaaagtcgcgcgacgagaaatcggcatactcacaaccaataagaatacatcacgtacgcacaagatcatagctcccgcaaacatggagcgcccagtgcgatacatccggaaaccgatcgattataccgtccttgacgacgtggggcacggggttaagtggctgaaagccaagcacggcaacaaccaacccgctcggacaggcaccctcagcagaaccaatcccccaacccaaaaaccgccttctccaccaatgtctggaaggggcactctggggagaaacacaccatataagacgttggaaccggtgaagccccctaccgtgcccaacgactatatgacatctcccgcacgcctggggtctcaacacagtcccggtcgtaccgccagcctgaaccagcgccctagaactcactccgggagttccggcggttcgggatcgcgagagaacagcggatcaagctctattggcatccctatagccgttccaaccccttcacccccaacgattggtcccgcagcacctggcagcgctccaggttcccaatacgggactatgacacgccagatatccagacacaattcaacgacgagtagcacctcctccggaggctatcgtcgcaccccgtcagtgaccgcacagttcagtgctcagccccatgtgaacggcggaccactgtactcccagaactccatagccgattcccccacgccgcctcccccacctccccctgacgacatccccatgtttgacgattcaccaccaccgcctccgccaccgcctgtagactacgaagacgaagaagcagccgttgtccagtataacgacccgtatgccgacggcgaccccgcttgggcccctaagaactatattgaaaaggtggtagctatctatgactacacaaaagacaaggatgacgaactgtctttcatggagggtgcaatcatatacgtcatcaaaaagaatgacgacggatggtatgaaggtgtgtgcaatcgagttacaggactcttccccggtaattacgtcgaaagtattatgcactacactgactag

SEQ ID NO: 25287 - DNA, 3503 bp, Artificial Sequence
  derived and/or modified sequence
gggggctggagagagtgaggaggaaggggaggaggtgccgtcccacaataccaggcgggagggcgggtaggcggtttgtatccgggctgtgaggtgctcggagcctcggcggaccttgctgcctctgtctctttaacgcgagaggaagcgatgcagaggggtggaaaatggcagagctgcagatgttactagaggaggagatcccgtctggcaagagggcgctgatcgagagttaccagaacctgactcgggtggcagactactgtgaaaacaactacatacaggctacagacaagagaaaagctttagaggagaccaaagcctatacaacccaatctctagctagtgttgcttatcaaataaatgcattggccaacaatgtactccagttgctggatatccaagcctctcagcttcggagaatggagtcttccatcaatcatatctcacagactgtggatattcataaggagaaagtggcacgaagagagattggtattttgacaacaaataagaatacatcaagaactcacaaaataatagcacctgcgaatatggagcgccctgtaaggtatattcggaaacctatcgattacacagttctggatgatgtgggccatggtgtcaagtggctaaaagccaagcatggaaataaccagcctgcaagaactggcacactgtcgagaacaaatcctcctactcagaaaccgccaagtcctcccatgtcaggccggggaacactgggacggaatactccttataaaaccctggaacctgttaaacccccaacagttcctaatgactatatgaccagtcctgctaggcttggaagtcagcatagtccaggcaggacagcatctttaaatcagagaccaaggacacacagtggaagtagtggaggaagtggaagtcgagaaaacagtggtagcagtagtattggcattcccattgctgtgcctacaccttcgccacccactattggaccagcagccccgggctcagctcctggttcccagtatggcacaatgaccaggcagatatctcgacacaactctactacttcttcgacatcttctggtggatacagacgaactccctctgtgactgctcaattttctgctcagcctcatgttaatggaggtccactttattctcaaaattcaattgctgatagtccaactccaccgccaccacctccaccagatgacattcccatgtttgatgactctccacctcccccaccaccaccaccagtggattatgaagatgaggaggctgcagtagttcagtataatgatccatatgcagatggggatcctgcttgggcccccaagaattatattgagaaagttgttgcaatatatgattatacaaaagacaaggatgatgagctgtcatttatggagggtgcaatcatttatgttataaagaagaatgatgatggctggtatgaaggagtctgcaatcgagtgactggtctgttccctgggaactatgttgaatcaatcatgcactatactgattaatttttttttttcttttgaagtagattcttattactcagtcatactgtgggactattatggttaacagaactgtcttaatatgttttaaaatgtgcccatattttcagaacatgctgttttattggtaaattgaatgtctacctgtaagcataaatctttgaggcagtttatgtattgctgaatagcaatttatacaagaagctgtccataactgattatgcttatgtacttacttacacatttttaactttatgaccagcctaaatattctgggggaagtggggtataatatttaacgaatcatgattcagattgtaccattacatgtttcagtgcagcatggttactaacgctatgtcagactaatattaaaatcagaaaatttaaatgctggtgctggtcagactttttttgttagattctctcatttaaaaaaaatactgtttgtttaaagcatgcataaaaatttatgtattgaaatatacttaaaaattcaagatgcttcccatttgtgtaatatttacctggaggactcgtacttaggtgtcttaacgtgaattgagtctccaaggtctccatgtgaaacaagcaaaaagagaattatctgtaatgttgtaatttgtacctaagttttttaatgagtgaaatttgcattataaactttttccattcataaatacataagtgaaccaaaggtttttgtcctttccttcactgatttgctttaaaaaaaataaaagataatgatttattgcagaattatgattctattttctcaatatgttaacttggaaaaaaattttagccttatcttaatctgtcccaacagcaatgtgacggatttttgcagattcaaaatctgcaatggttatttacaagtcaatctactgaattccttttttaaataatcttttgaaactaagaaaatgtgtcaaattgtgtgcattcattctgtaggtaaaattcttaaggattgccatgtcagtccttcagttgtacagtgaactgttgtacactggttcaatgaaaggaagttaaaagtaccttttacatattgtaaaagtggatacagttgatttgtgagtaggcactctttaatccattacctggcactagcaacattagaattttaaaataaaataattgggaaagaaggtgggtcatgtattaatcagtgaacagagatttacctaaccaacagacttggattgtcttttgacataatcaaaatgcaacacatgcactttgtgtgtctcctcttaattgaagggagggctgagggatgttttctcttcttgtcttgtgtataattctctattgcttaggatattaaagtagagcactcaagtgtgggtttctgtgttattgaggatttgtttggaattcaaattacagttatgtactggatgctacagacttataacagcatagtgaatggtaagactagtgcaaaacagttatttctgaaaattaaagaccattattgctaccaaatcaatgtgactatttcatatgcattttgcctttgttaattttaaacaaacaaagtatcattagtgatcagctagctaccttctactttccatttttcaagtggattgttctcttaatttgtatataacctgttgtctaaattttatgtacagtcttttataataaaccattctcctatatgaaattttggatactgttaaaatataactcatgtggacttcaatgcagacttcacatttttctgacctttactcctacggtaaatcaagacaaaccatttgaattttaacattggttatttatttgtgtaatggccttacatgtggatattaacagtgtaaacaataccacatataaccatcaagataccttgattataatttataggactagaatgacagattcaggtggtttattaattacatttaaaaagttttctgaaaaaacttttgcaataaaaaaaaataaattgcccatcaataa

SEQ ID NO: 25288 - DNA, 1359 bp, Artificial Sequence
  derived and/or modified sequence
atggccgagctgcagatgctgctggaggaggagatccccagcggcaagagagccctgatcgagagctaccagaacctgaccagagtggccgactactgcgagaacaactacatccaggccaccgacaagagaaaggccctggaggagaccaaggcctacaccacccagagcctggccagcgtggcctaccagatcaacgccctggccaacaacgtgctgcagctgctggacatccaggccagccagctgagaagaatggagagcagcatcaaccacatcagccagaccgtggacatccacaaggagaaggtggccagaagagagatcggcatcctgaccaccaacaagaacaccagcagaacccacaagatcatcgcccccgccaacatggagagacccgtgagatacatcagaaagcccatcgactacaccgtgctggacgacgtgggccacggcgtgaagtggctgaaggccaagcacggcaacaaccagcccgccagaaccggcaccctgagcagaaccaacccccccacccagaagccccccagcccccccatgagcggcagaggcaccctgggcagaaacaccccctacaagaccctggagcccgtgaagccccccaccgtgcccaacgactacatgaccagccccgccagactgggcagccagcacagccccggcagaaccgccagcctgaaccagagacccagaacccacagcggcagcagcggcggcagcggcagcagagagaacagcggcagcagcagcatcggcatccccatcgccgtgcccacccccagcccccccaccatcggccccgccgcccccggcagcgcccccggcagccagtacggcaccatgaccagacagatcagcagacacaacagcaccaccagcagcaccagcagcggcggctacagaagaacccccagcgtgaccgcccagttcagcgcccagccccacgtgaacggcggccccctgtacagccagaacagcatcgccgacagccccacccccccccccccccccccccccgacgacatccccatgttcgacgacagcccccccccccccccccccccccccgtggactacgaggacgaggaggccgccgtggtgcagtacaacgacccctacgccgacggcgaccccgcctgggcccccaagaactacatcgagaaggtggtggccatctacgactacaccaaggacaaggacgacgagctgagcttcatggagggcgccatcatctacgtgatcaagaagaacgacgacggctggtacgagggcgtgtgcaacagagtgaccggcctgttccccggcaactacgtggagagcatcatgcactacaccgactag

SEQ ID NO: 25289 - protein, 476 aa, Artificial Sequence
  derived and/or modified sequence
MAELQMLLEEEIPSGKRALIESYQNLTRVADYCENNYIQATDKRKALEETKAYTTQSLASVAYQINALANNVLQLLDIQASQLRRMESSINHISQTVDIHKEKVARREIGILTTNKNTSRTHKIIAPANMERPVRYIRKPIDYTVLDDVGHGVKHGNNQPARTGTLSRTNPPTQKPPSPPMSGRGTLGRNTPYKTLEPVKPPTVPNDYMTSPARLGSQHSPGRTASLNQRPRTHSGSSGGSGSRENSGSSSIGIPIAVPTPSPPTIGPAAPGSAPGSQYGTMTRQISRHNSTTSSTSSGGYRRTPSVTAQFSAQPHVNGGPLYSQNSISIAPPPPPMPQLTPQIPLTGFVARVQENIADSPTPPPPPPPDDIPMFDDSPPPPPPPPVDYEDEEAAVVQYNDPYADGDPAWAPKNYIEKVVAIYDYTKDKDDELSFMEGAIIYVIKKNDDGWYEGVCNRVTGLFPGNYVESIMHYTD

SEQ ID NO: 25290 - DNA, 1431 bp, Artificial Sequence
  derived and/or modified sequence
atggctgagttgcaaatgttgctggaggaggaaatacccagtggcaagcgggcactcatcgagtcttatcagaacctgacacgggtggccgattactgcgagaataactacatccaggctacagataagaggaaagccctggaggaaactaaagcatataccacgcagagcttagctagtgttgcctaccagataaacgccctggcaaacaacgtgttacagctattggatatccaggccagccagctgcgacgaatggagagttcaataaatcatatatcacagacagttgacattcacaaagagaaagtggcaaggagagaaattggcatcttgacaacaaataaaaacacctcaagaacccacaagataattgcacctgctaacatggagagacctgtgcgctacattcggaaacctatagattacaccgtgctggacgatgtgggtcacggagttaaacacggaaacaaccagcccgccaggacgggtactctttcccggacgaacccacccacacagaaacccccatcacccccaatgagtgggcggggcactctcgggcgtaataccccatacaagacccttgagccagtgaagcctcccaccgtgcctaatgattatatgacgtctccagcaagactcgggtctcagcactcacccggaagaaccgcttctctgaaccaaaggcctcgtactcactccgggtcaagtggcgggtctggttcaagggagaactctggttctagttcaatcgggatccccattgcagtgcctactccttccccacccacaattgggccagctgcgccaggtagcgctcctggctcccagtacggcacgatgactcgtcagatttccaggcataatagcacgacctcctctacatcctccggaggatatagaagaactccaagtgtcacggcacaattctctgctcagccccacgtgaatggagggccgttgtattcacaaaattctatcagtatagcacctcctccaccccccatgccgcaacttacccctcagatccccctcacaggattcgtagcaagagttcaagaaaacattgccgacagtccgaccccccccccaccaccgccccccgatgatatccctatgttcgatgacagcccaccgccccctccccccccgccggtggactatgaggatgaagaggcggcggtcgttcagtataacgacccgtatgccgatggggatccagcctgggccccaaagaattacatcgaaaaagtcgtcgctatctatgactacacgaaggacaaggatgacgagctatcatttatggaaggagccatcatctacgtgattaaaaaaaacgacgacggttggtatgagggggtttgtaacagagttacaggactgtttcctgggaactatgtggagtcaattatgcattatacagactag

SEQ ID NO: 25291 - DNA, 1431 bp, Artificial Sequence
  derived and/or modified sequence
atggccgagctgcagatgctgctggaggaggagatccccagcggcaagagggccctgattgagagctaccagaacctgaccagggtggccgactactgtgagaacaactacatccaggccacagacaagaggaaggccctggaggagaccaaggcctacaccacccagagcctggcctctgtggcctaccagatcaatgccctggccaacaacgtgctgcagctgctggacatccaggccagccagctgcggaggatggagagcagcatcaaccacatcagccagacagtggacatccacaaggagaaggtggcccggcgggagatcggcatcctgaccaccaacaagaacaccagcaggacccacaagatcatcgccccagccaacatggagaggcctgtgcgctacatcaggaagcccatcgactacacagtgctggatgatgtgggccatggagtgaagcacggcaacaaccagcctgccaggacaggcaccctgagcaggaccaacccccccacccagaagccacccagcccccccatgagcggccggggcaccctgggcaggaacaccccctacaagaccctggagcctgtgaagcccccaacagtgcccaatgactacatgaccagccctgcccggctgggcagccagcacagccctggccgcacagccagcctgaaccagaggcccaggacccacagcggcagcagcggcggcagcggcagcagagaaaattctggcagcagcagcatcggcatccccatcgctgtgcccacccccagcccccccaccatcggccctgctgcccctggcagcgcccctggcagccagtatggcaccatgacccggcagatcagccgccacaacagcaccaccagcagcaccagcagcggcggctacagaaggacccccagcgtgacagcccagttcagcgcccagccccacgtgaatggaggccccctgtacagccagaacagcatcagcatcgcccctcctcctccacccatgccccagctgaccccccagatccccctgactggatttgtggcccgggtgcaggagaacattgctgacagccccaccccacctcctcctcctcctccagatgacatccccatgtttgatgacagccccccacctcctcctcctcctcctgtggactatgaagatgaggaggccgctgtggtgcagtacaatgacccctatgcagatggagaccctgcctgggcccccaagaactacatcgagaaggtggtggccatctatgactacaccaaggacaaggatgatgagctgtccttcatggagggcgccatcatctacgtgatcaagaagaatgatgatggctggtatgagggcgtgtgcaacagagtgacaggcctcttccctggcaactacgtggagagcatcatgcactacacagactag

SEQ ID NO: 25292 - DNA, 1431 bp, Artificial Sequence
  derived and/or modified sequence
atggccgagctgcagatgctgctggaggaggagatccccagcggcaaacgcgccctgatcgagagctaccagaatctaacccgcgttgccgactactgcgagaataattacatccaggcaacagacaagcgaaaggccctggaggagaccaaggcctacaccacccaatcactggcaagtgtggcttaccagattaatgctcttgctaacaatgtactccagctattggacatacaagcttcccagctgaggcgaatggagtcctccatcaaccacatctcccaaaccgttgacattcacaaggaaaaggtcgcacgccgtgaaatcgggatcttaaccaccaataaaaatacatcacggacccacaaaattatcgcacccgccaacatggagaggcctgtgagatacatcagaaagccaattgactataccgtgttggacgacgttggccacggcgttaagcacggcaataaccagcctgcacgtaccggcacactctctcggactaatccccctactcaaaaacctcccagtcctcctatgagcggccggggtactctgggcaggaacaccccatacaagacacttgagccggttaagccacccaccgtgcctaatgactatatgacctccccggctaggctgggctcacagcatagtcctggtcgtactgcatcactaaaccaacgccccagaacgcactccggctcgtccggaggctctgggtcaagagagaatagcggatcctcctctatcggtatccctattgcggtgcctaccccatcaccgcccacgatagggccggctgccccagggtctgctcctggatcacaatatgggacaatgaccaggcaaattagcaggcataactccaccacatcaagcacgtctagtggcggatacagaaggacccccagcgtcaccgcccagttctctgcccaaccgcacgtcaatgggggacctctttattcacagaattccatctccatcgctccacctccccctcccatgccacaactaacacctcaaattcccctgaccggttttgtggctagagtccaagagaacatcgctgattcaccaactcccccaccgcctccccctcctgacgatattcccatgttcgacgattcacctccacctccacctccgccccctgtggactacgaggacgaggaagctgcggtcgtgcagtacaatgacccatatgctgacggcgaccccgcctgggcacccaaaaattacatcgaaaaagtcgtggcaatctacgattacaccaaggacaaggatgacgagctgtcatttatggaaggagcaattatctacgttataaaaaagaatgacgacggttggtatgagggggtctgcaatagggtgacaggtctgttcccagggaactacgtggagtcaataatgcactatactgattag

SEQ ID NO: 25293 - DNA, 1431 bp, Artificial Sequence
  derived and/or modified sequence
atggccgagctgcagatgctgttggaagaggagatcccctctggcaagagggcattgatagagagctaccagaatctcacccgtgtcgcggattactgcgaaaacaattatatacaggcaaccgataagcgcaaagcactagaggagacgaaagcctataccacccagtctctcgcatcagtggcctaccagattaatgcccttgccaacaacgtactgcagttgctggacatacaggctagccagctgaggagaatggaatccagtattaaccacatttcccagacagtcgacatacacaaggaaaaagtggcacgcagggaaatcggtatcctgactactaataagaacacgagcaggacccacaagatcatcgcacccgctaacatggaacgtcctgtgaggtatatacggaagcccatcgattacactgtgttggacgacgtgggtcatggggtgaaacacggaaacaatcaacctgctcggacaggaacactgtccaggaccaatccacccactcagaagccaccctcgccccctatgtctggtagagggaccctcggtcgtaataccccttataaaaccctcgagcctgtgaaaccgccaacggttcccaacgactacatgacttcacccgctagactcggctcgcagcacagccccggaagaacggcttcattgaaccagcggccaaggactcactccgggagtagcggcggttctggtagccgggaaaacagtggatccagctctattggtatcccgatcgcggtacccactccatcacccccaactattggcccagccgctcctggctcagcaccaggatcacagtacggaacgatgacacggcaaatatcaaggcacaattctacgacatctagtaccagttccggcggatacagacgaactccaagcgtgaccgcccagtttagtgctcaacctcacgtgaacgggggaccgttatacagccaaaattctatcagtattgcaccacctccacctcccatgccccagttgacgcctcagatccccctgactgggtttgtcgccagagtgcaggaaaacattgccgacagtccgacccctcctcccccaccccctcctgatgacatccccatgttcgacgatagccctcccccaccacctcctcctcccgtggattatgaggacgaggaagccgctgtcgtgcaatacaacgacccttacgccgatggagatccagcatgggcccctaaaaactacatcgagaaagtcgtggctatctacgattacaccaaagataaggatgacgaattgtcattcatggagggggcaataatttacgtgatcaaaaaaaatgatgatggttggtatgagggtgtctgtaacagggtcacaggcctgtttcctggtaattacgtggagagtattatgcactatactgactag

SEQ ID NO: 25294 - DNA, 3516 bp, Artificial Sequence
  derived and/or modified sequence
agggcgggtaggcggtttgtatccgggctgtgaggtgctcggagcctcggcggaccttgctgcctctgtctctttaacgcgagaggaagcgatgcagaggggtggaaaatggcagagctgcagatgttactagaggaggagatcccgtctggcaagagggcgctgatcgagagttaccagaacctgactcgggtggcagactactgtgaaaacaactacatacaggctacagacaagagaaaagctttagaggagaccaaagcctatacaacccaatctctagctagtgttgcttatcaaataaatgcattggccaacaatgtactccagttgctggatatccaagcctctcagcttcggagaatggagtcttccatcaatcatatctcacagactgtggatattcataaggagaaagtggcacgaagagagattggtattttgacaacaaataagaatacatcaagaactcacaaaataatagcacctgcgaatatggagcgccctgtaaggtatattcggaaacctatcgattacacagttctggatgatgtgggccatggtgtcaagcatggaaataaccagcctgcaagaactggcacactgtcgagaacaaatcctcctactcagaaaccgccaagtcctcccatgtcaggccggggaacactgggacggaatactccttataaaaccctggaacctgttaaacccccaacagttcctaatgactatatgaccagtcctgctaggcttggaagtcagcatagtccaggcaggacagcatctttaaatcagagaccaaggacacacagtggaagtagtggaggaagtggaagtcgagaaaacagtggtagcagtagtattggcattcccattgctgtgcctacaccttcgccacccactattggaccagcagccccgggctcagctcctggttcccagtatggcacaatgaccaggcagatatctcgacacaactctactacttcttcgacatcttctggtggatacagacgaactccctctgtgactgctcaattttctgctcagcctcatgttaatggaggtccactttattctcaaaattcaatttctattgctccaccccctccccctatgcctcagttgactccacagatacctctcacaggcttcgtggccagggtgcaggaaaacattgctgatagtccaactccaccgccaccacctccaccagatgacattcccatgtttgatgactctccacctcccccaccaccaccaccagtggattatgaagatgaggaggctgcagtagttcagtataatgatccatatgcagatggggatcctgcttgggcccccaagaattatattgagaaagttgttgcaatatatgattatacaaaagacaaggatgatgagctgtcatttatggagggtgcaatcatttatgttataaagaagaatgatgatggctggtatgaaggagtctgcaatcgagtgactggtctgttccctgggaactatgttgaatcaatcatgcactatactgattaatttttttttttcttttgaagtagattcttattactcagtcatactgtgggactattatggttaacagaactgtcttaatatgttttaaaatgtgcccatattttcagaacatgctgttttattggtaaattgaatgtctacctgtaagcataaatctttgaggcagtttatgtattgctgaatagcaatttatacaagaagctgtccataactgattatgcttatgtacttacttacacatttttaactttatgaccagcctaaatattctgggggaagtggggtataatatttaacgaatcatgattcagattgtaccattacatgtttcagtgcagcatggttactaacgctatgtcagactaatattaaaatcagaaaatttaaatgctggtgctggtcagactttttttgttagattctctcatttaaaaaaaatactgtttgtttaaagcatgcataaaaatttatgtattgaaatatacttaaaaattcaagatgcttcccatttgtgtaatatttacctggaggactcgtacttaggtgtcttaacgtgaattgagtctccaaggtctccatgtgaaacaagcaaaaagagaattatctgtaatgttgtaatttgtacctaagttttttaatgagtgaaatttgcattataaactttttccattcataaatacataagtgaaccaaaggtttttgtcctttccttcactgatttgctttaaaaaaaataaaagataatgatttattgcagaattatgattctattttctcaatatgttaacttggaaaaaaattttagccttatcttaatctgtcccaacagcaatgtgacggatttttgcagattcaaaatctgcaatggttatttacaagtcaatctactgaattccttttttaaataatcttttgaaactaagaaaatgtgtcaaattgtgtgcattcattctgtaggtaaaattcttaaggattgccatgtcagtccttcagttgtacagtgaactgttgtacactggttcaatgaaaggaagttaaaagtaccttttacatattgtaaaagtggatacagttgatttgtgagtaggcactctttaatccattacctggcactagcaacattagaattttaaaataaaataattgggaaagaaggtgggtcatgtattaatcagtgaacagagatttacctaaccaacagacttggattgtcttttgacataatcaaaatgcaacacatgcactttgtgtgtctcctcttaattgaagggagggctgagggatgttttctcttcttgtcttgtgtataattctctattgcttaggatattaaagtagagcactcaagtgtgggtttctgtgttattgaggatttgtttggaattcaaattacagttatgtactggatgctacagacttataacagcatagtgaatggtaagactagtgcaaaacagttatttctgaaaattaaagaccattattgctaccaaatcaatgtgactatttcatatgcattttgcctttgttaattttaaacaaacaaagtatcattagtgatcagctagctaccttctactttccatttttcaagtggattgttctcttaatttgtatataacctgttgtctaaattttatgtacagtcttttataataaaccattctcctatatgaaattttggatactgttaaaatataactcatgtggacttcaatgcagacttcacatttttctgacctttactcctacggtaaatcaagacaaaccatttgaattttaacattggttatttatttgtgtaatggccttacatgtggatattaacagtgtaaacaataccacatataaccatcaagataccttgattataatttataggactagaatgacagattcaggtggtttattaattacatttaaaaagttttctgaaaaaacttttgcaataaaaaaaaataaattgcccatcaataa

SEQ ID NO: 25295 - DNA, 1431 bp, Artificial Sequence
  derived and/or modified sequence
atggccgagctgcagatgctgctggaggaggagatccccagcggcaagagagccctgatcgagagctaccagaacctgaccagagtggccgactactgcgagaacaactacatccaggccaccgacaagagaaaggccctggaggagaccaaggcctacaccacccagagcctggccagcgtggcctaccagatcaacgccctggccaacaacgtgctgcagctgctggacatccaggccagccagctgagaagaatggagagcagcatcaaccacatcagccagaccgtggacatccacaaggagaaggtggccagaagagagatcggcatcctgaccaccaacaagaacaccagcagaacccacaagatcatcgcccccgccaacatggagagacccgtgagatacatcagaaagcccatcgactacaccgtgctggacgacgtgggccacggcgtgaagcacggcaacaaccagcccgccagaaccggcaccctgagcagaaccaacccccccacccagaagccccccagcccccccatgagcggcagaggcaccctgggcagaaacaccccctacaagaccctggagcccgtgaagccccccaccgtgcccaacgactacatgaccagccccgccagactgggcagccagcacagccccggcagaaccgccagcctgaaccagagacccagaacccacagcggcagcagcggcggcagcggcagcagagagaacagcggcagcagcagcatcggcatccccatcgccgtgcccacccccagcccccccaccatcggccccgccgcccccggcagcgcccccggcagccagtacggcaccatgaccagacagatcagcagacacaacagcaccaccagcagcaccagcagcggcggctacagaagaacccccagcgtgaccgcccagttcagcgcccagccccacgtgaacggcggccccctgtacagccagaacagcatcagcatcgcccccccccccccccccatgccccagctgaccccccagatccccctgaccggcttcgtggccagagtgcaggagaacatcgccgacagccccacccccccccccccccccccccccgacgacatccccatgttcgacgacagcccccccccccccccccccccccccgtggactacgaggacgaggaggccgccgtggtgcagtacaacgacccctacgccgacggcgaccccgcctgggcccccaagaactacatcgagaaggtggtggccatctacgactacaccaaggacaaggacgacgagctgagcttcatggagggcgccatcatctacgtgatcaagaagaacgacgacggctggtacgagggcgtgtgcaacagagtgaccggcctgttccccggcaactacgtggagagcatcatgcactacaccgactag

SEQ ID NO: 25296 - protein, 397 aa, Artificial Sequence
  derived and/or modified sequence
MMFQDPVACEDVAVNFTQEEWALLDISQRKLYREVMLETFRNLTSIGKKWKDQNIEYEYQNPRRNFRSLIEGNVNEIKEDSHCGETFTQVPDDRLNFQEKKASPEAKSCDNFVCGEVGIGNSSFNMNIRGDIGHKAYEYQDYAPKPYKCQQPKKAFRYHPSFRTQERNHTGEKPYACKECGKTFISHSGIRRRMVMHSGDGPYKCKFCGKAVHCLRLYLIHERTHTGEKPYECKQCVKSFSYSATHRIHERTHTGEKPYECQQCGKAFHSSSSFQAHKRTHTGGKPYECKQCGKSFSWCHSFQIHERTHTGEKPCECSKCNKAFRSYRSYLRHKRSHTGEKPYQCKECRKAFTYPSSLRRHERTHSAKKPYECKQCGKALSYKFSNTPKNALWRKTL

SEQ ID NO: 25297 - protein, 394 aa, Artificial Sequence
  derived and/or modified sequence
MDPVACEDVAVNFTQEEWALLDISQRKLYREVMLETFRNLTSIGKKWKDQNIEYEYQNPRRNFRSLIEGNVNEIKEDSHCGETFTQVPDDRLNFQEKKASPEAKSCDNFVCGEVGIGNSSFNMNIRGDIGHKAYEYQDYAPKPYKCQQPKKAFRYHPSFRTQERNHTGEKPYACKECGKTFISHSGIRRRMVMHSGDGPYKCKFCGKAVHCLRLYLIHERTHTGEKPYECKQCVKSFSYSATHRIHERTHTGEKPYECQQCGKAFHSSSSFQAHKRTHTGGKPYECKQCGKSFSWCHSFQIHERTHTGEKPCECSKCNKAFRSYRSYLRHKRSHTGEKPYQCKECRKAFTYPSSLRRHERTHSAKKPYECKQCGKALSYKFSNTPKNALWRKTL

SEQ ID NO: 25298 - protein, 414 aa, Artificial Sequence
  derived and/or modified sequence
MPCCSHRSCREDPGTSESREMDPVACEDVAVNFTQEEWALLDISQRKLYREVMLETFRNLTSIGKKWKDQNIEYEYQNPRRNFRSLIEGNVNEIKEDSHCGETFTQVPDDRLNFQEKKASPEAKSCDNFVCGEVGIGNSSFNMNIRGDIGHKAYEYQDYAPKPYKCQQPKKAFRYHPSFRTQERNHTGEKPYACKECGKTFISHSGIRRRMVMHSGDGPYKCKFCGKAVHCLRLYLIHERTHTGEKPYECKQCVKSFSYSATHRIHERTHTGEKPYECQQCGKAFHSSSSFQAHKRTHTGGKPYECKQCGKSFSWCHSFQIHERTHTGEKPCECSKCNKAFRSYRSYLRHKRSHTGEKPYQCKECRKAFTYPSSLRRHERTHSAKKPYECKQCGKALSYKFSNTPKNALWRKTL

SEQ ID NO: 25299 - protein, 272 aa, Artificial Sequence
  derived and/or modified sequence
MNIRGDIGHKAYEYQDYAPKPYKCQQPKKAFRYHPSFRTQERNHTGEKPYACKECGKTFISHSGIRRRMVMHSGDGPYKCKFCGKAVHCLRLYLIHERTHTGEKPYECKQCVKSFSYSATHRIHERTHTGEKPYECQQCGKAFHSSSSFQAHKRTHTGGKPYECKQCGKSFSWCHSFQIHERTHTGEKPCECSKCNKAFRSYRSYLRHKRSHTGEKPYQCKECRKAFTYPSSLRRHERTHSAKKPYECKQCGKALSYKFSNTPKNALWRKTL

SEQ ID NO: 25300 - DNA, 1194 bp, Artificial Sequence
  derived and/or modified sequence
atgatgttccaggaccccgtggcctgcgaggacgtggccgtgaacttcacccaggaggagtgggccctgctggacatcagccagagaaagctgtacagagaggtgatgctggagaccttcagaaacctgaccagcatcggcaagaagtggaaggaccagaacatcgagtacgagtaccagaaccccagaagaaacttcagaagcctgatcgagggcaacgtgaacgagatcaaggaggacagccactgcggcgagaccttcacccaggtgcccgacgacagactgaacttccaggagaagaaggccagccccgaggccaagagctgcgacaacttcgtgtgcggcgaggtgggcatcggcaacagcagcttcaacatgaacatcagaggcgacatcggccacaaggcctacgagtaccaggactacgcccccaagccctacaagtgccagcagcccaagaaggccttcagataccaccccagcttcagaacccaggagagaaaccacaccggcgagaagccctacgcctgcaaggagtgcggcaagaccttcatcagccacagcggcatcagaagaagaatggtgatgcacagcggcgacggcccctacaagtgcaagttctgcggcaaggccgtgcactgcctgagactgtacctgatccacgagagaacccacaccggcgagaagccctacgagtgcaagcagtgcgtgaagagcttcagctacagcgccacccacagaatccacgagagaacccacaccggcgagaagccctacgagtgccagcagtgcggcaaggccttccacagcagcagcagcttccaggcccacaagagaacccacaccggcggcaagccctacgagtgcaagcagtgcggcaagagcttcagctggtgccacagcttccagatccacgagagaacccacaccggcgagaagccctgcgagtgcagcaagtgcaacaaggccttcagaagctacagaagctacctgagacacaagagaagccacaccggcgagaagccctaccagtgcaaggagtgcagaaaggccttcacctaccccagcagcctgagaagacacgagagaacccacagcgccaagaagccctacgagtgcaagcagtgcggcaaggccctgagctacaagttcagcaacacccccaagaacgccctgtggagaaagaccctgtag

SEQ ID NO: 25301 - DNA, 1185 bp, Artificial Sequence
  derived and/or modified sequence
atggaccccgtggcctgcgaggacgtggccgtgaacttcacccaggaggagtgggccctgctggacatcagccagagaaagctgtacagagaggtgatgctggagaccttcagaaacctgaccagcatcggcaagaagtggaaggaccagaacatcgagtacgagtaccagaaccccagaagaaacttcagaagcctgatcgagggcaacgtgaacgagatcaaggaggacagccactgcggcgagaccttcacccaggtgcccgacgacagactgaacttccaggagaagaaggccagccccgaggccaagagctgcgacaacttcgtgtgcggcgaggtgggcatcggcaacagcagcttcaacatgaacatcagaggcgacatcggccacaaggcctacgagtaccaggactacgcccccaagccctacaagtgccagcagcccaagaaggccttcagataccaccccagcttcagaacccaggagagaaaccacaccggcgagaagccctacgcctgcaaggagtgcggcaagaccttcatcagccacagcggcatcagaagaagaatggtgatgcacagcggcgacggcccctacaagtgcaagttctgcggcaaggccgtgcactgcctgagactgtacctgatccacgagagaacccacaccggcgagaagccctacgagtgcaagcagtgcgtgaagagcttcagctacagcgccacccacagaatccacgagagaacccacaccggcgagaagccctacgagtgccagcagtgcggcaaggccttccacagcagcagcagcttccaggcccacaagagaacccacaccggcggcaagccctacgagtgcaagcagtgcggcaagagcttcagctggtgccacagcttccagatccacgagagaacccacaccggcgagaagccctgcgagtgcagcaagtgcaacaaggccttcagaagctacagaagctacctgagacacaagagaagccacaccggcgagaagccctaccagtgcaaggagtgcagaaaggccttcacctaccccagcagcctgagaagacacgagagaacccacagcgccaagaagccctacgagtgcaagcagtgcggcaaggccctgagctacaagttcagcaacacccccaagaacgccctgtggagaaagaccctgtag

SEQ ID NO: 25302 - DNA, 1245 bp, Artificial Sequence
  derived and/or modified sequence
atgccctgctgcagccacagaagctgcagagaggaccccggcaccagcgagagcagagagatggaccccgtggcctgcgaggacgtggccgtgaacttcacccaggaggagtgggccctgctggacatcagccagagaaagctgtacagagaggtgatgctggagaccttcagaaacctgaccagcatcggcaagaagtggaaggaccagaacatcgagtacgagtaccagaaccccagaagaaacttcagaagcctgatcgagggcaacgtgaacgagatcaaggaggacagccactgcggcgagaccttcacccaggtgcccgacgacagactgaacttccaggagaagaaggccagccccgaggccaagagctgcgacaacttcgtgtgcggcgaggtgggcatcggcaacagcagcttcaacatgaacatcagaggcgacatcggccacaaggcctacgagtaccaggactacgcccccaagccctacaagtgccagcagcccaagaaggccttcagataccaccccagcttcagaacccaggagagaaaccacaccggcgagaagccctacgcctgcaaggagtgcggcaagaccttcatcagccacagcggcatcagaagaagaatggtgatgcacagcggcgacggcccctacaagtgcaagttctgcggcaaggccgtgcactgcctgagactgtacctgatccacgagagaacccacaccggcgagaagccctacgagtgcaagcagtgcgtgaagagcttcagctacagcgccacccacagaatccacgagagaacccacaccggcgagaagccctacgagtgccagcagtgcggcaaggccttccacagcagcagcagcttccaggcccacaagagaacccacaccggcggcaagccctacgagtgcaagcagtgcggcaagagcttcagctggtgccacagcttccagatccacgagagaacccacaccggcgagaagccctgcgagtgcagcaagtgcaacaaggccttcagaagctacagaagctacctgagacacaagagaagccacaccggcgagaagccctaccagtgcaaggagtgcagaaaggccttcacctaccccagcagcctgagaagacacgagagaacccacagcgccaagaagccctacgagtgcaagcagtgcggcaaggccctgagctacaagttcagcaacacccccaagaacgccctgtggagaaagaccctgtag

SEQ ID NO: 25303 - DNA, 819 bp, Artificial Sequence
  derived and/or modified sequence
atgaacatcagaggcgacatcggccacaaggcctacgagtaccaggactacgcccccaagccctacaagtgccagcagcccaagaaggccttcagataccaccccagcttcagaacccaggagagaaaccacaccggcgagaagccctacgcctgcaaggagtgcggcaagaccttcatcagccacagcggcatcagaagaagaatggtgatgcacagcggcgacggcccctacaagtgcaagttctgcggcaaggccgtgcactgcctgagactgtacctgatccacgagagaacccacaccggcgagaagccctacgagtgcaagcagtgcgtgaagagcttcagctacagcgccacccacagaatccacgagagaacccacaccggcgagaagccctacgagtgccagcagtgcggcaaggccttccacagcagcagcagcttccaggcccacaagagaacccacaccggcggcaagccctacgagtgcaagcagtgcggcaagagcttcagctggtgccacagcttccagatccacgagagaacccacaccggcgagaagccctgcgagtgcagcaagtgcaacaaggccttcagaagctacagaagctacctgagacacaagagaagccacaccggcgagaagccctaccagtgcaaggagtgcagaaaggccttcacctaccccagcagcctgagaagacacgagagaacccacagcgccaagaagccctacgagtgcaagcagtgcggcaaggccctgagctacaagttcagcaacacccccaagaacgccctgtggagaaagaccctgtag

SEQ ID NO: 25304 - DNA, 1194 bp, Artificial Sequence
  derived and/or modified sequence
atgatgttccaggaccctgtggcctgcgaagatgtggctgtgaacttcacccaagaagaatgggctctgctggacatttcccaacgaaagctgtatagggaggtgatgttggagacttttagaaatctgacttcaatcgggaagaagtggaaggaccaaaatatcgaatacgaataccagaaccccagacggaattttcgcagtctcatcgagggaaatgtgaacgagattaaagaggatagtcactgtggcgagacttttacccaggtgcccgatgaccggcttaactttcaggaaaaaaaagcgtcccctgaagctaaaagttgtgacaattttgtttgtggagaagtaggaataggaaactcatccttcaacatgaatattcggggagatattgggcacaaagcctacgagtaccaggattacgctcccaagccttataagtgtcaacagccaaaaaaggccttccgctatcacccttcctttagaacccaggagcgtaatcatacaggcgagaaaccctatgcttgcaaggagtgcgggaagacatttatcagccactccgggatccggagacgaatggtgatgcattcgggcgacgggccatacaaatgcaagttctgcggaaaagctgtccattgtctcagactgtatttgatccatgaacgaacacacacgggcgaaaagccatatgaatgtaaacagtgcgtcaagagcttcagctatagcgctactcatcgtatccatgaacgtacccacactggcgaaaagccctatgaatgtcagcagtgcggaaaggccttccactccagcagttcctttcaggcacataagaggactcacacgggtgggaagccctacgaatgcaagcagtgtggcaaatccttttcatggtgtcactccttccaaatccatgaaagaacacataccggcgagaagccttgcgagtgttccaaatgcaacaaagctttcagaagctatcgttcctacctgcgccacaagaggtcccacacaggcgagaaaccatatcagtgtaaagagtgccggaaggcgtttacatatccaagtagcctgcgcaggcacgagcgcacccatagcgctaaaaaaccatacgagtgtaaacagtgcggtaaggcgctctcatataagttcagcaataccccaaagaatgccctgtggcgcaagaccttgtag

SEQ ID NO: 25305 - DNA, 1185 bp, Artificial Sequence
  derived and/or modified sequence
atggaccctgtagcctgcgaagacgttgcagtgaactttactcaggaagagtgggcactgttggacatctcccagcgaaaactctaccgcgaggtcatgctggagacgttcagaaaccttacaagcatcggaaagaagtggaaagatcagaatattgaatatgagtaccagaatccccgccgaaatttccggtcactcattgagggaaacgtcaacgaaatcaaggaggactcccactgcggcgaaacttttacgcaggtgccggacgaccgactaaacttccaggagaaaaaagcttccccagaggcgaaatcctgcgacaacttcgtttgtggggaagtcggcataggcaacagctcttttaacatgaatattcggggagacattggtcataaggcctatgagtatcaggattatgcacccaagccctataagtgccagcaaccaaagaaggcgtttagataccatccttctttccggacccaggaaaggaatcatactggcgaaaaaccctacgcctgcaaagagtgtgggaaaaccttcatcagtcattcaggtatcaggcgccgaatggtgatgcactctggggatggaccttacaaatgcaaattctgtggcaaagccgtacactgcctgaggctgtacttgatacacgaacgcacccataccggcgaaaaaccttacgagtgcaaacaatgcgtgaaaagtttttcctactctgctacccataggattcacgagcggacccacaccggcgagaagccctacgaatgtcaacagtgtggcaaagcgtttcactcatccagcagctttcaggcgcacaagaggacgcacaccggggggaagccatacgagtgtaaacaatgcggaaagtcctttagctggtgtcacagctttcagatacacgagagaacacataccggtgagaaaccctgtgagtgcagtaagtgcaacaaagcttttcgttcctaccggtcatacttacgtcataaaagatcccacaccggggagaaaccctatcagtgtaaggaatgtaggaaagcgtttacttatccatctagcctccgcagacatgaacgcacacactccgccaagaagccctatgagtgcaagcaatgtggcaaagccttaagttataaatttagcaataccccaaaaaatgcattgtggcggaaaactctgtag

SEQ ID NO: 25306 - DNA, 1245 bp, Artificial Sequence
  derived and/or modified sequence
atgccatgctgttcccatcggagttgcagggaggaccccggaaccagtgagtcccgcgagatggatcctgttgcctgtgaggatgtcgctgtaaattttactcaagaggagtgggctctcctggacataagccaacgaaagttatacagagaagtgatgctagagacattcaggaatttgactagtatcggaaaaaagtggaaggaccagaatatagagtacgagtatcagaatccacgtagaaactttcgatcgctgattgaaggtaacgtcaacgagattaaagaagattctcattgcggcgaaaccttcactcaagtgcctgacgataggctgaattttcaggaaaaaaaagcctctccagaggccaaaagctgcgacaacttcgtttgcggcgaggtggggattggcaatagttccttcaacatgaacattcgaggagatataggccacaaagcctacgaatatcaggactacgccccaaagccatacaaatgccagcagcccaagaaggcttttaggtatcacccttcttttcgaacgcaagaaagaaatcacaccggcgagaaaccctacgcttgtaaggagtgcggcaaaacatttattagtcattctggcatacggcgcaggatggtgatgcatagtggggatgggccatacaagtgcaagttttgtgggaaagctgtgcattgccttagactatacttaattcatgagagaactcataccggcgaaaaaccatatgagtgtaaacagtgtgtaaaaagcttttcctattccgccacccatcgtatccacgagcgcacacataccggggagaaaccctacgagtgccaacagtgcgggaaagcatttcatagttcaagttcgtttcaggcccataagcgcacgcacaccggcggcaagccttacgagtgcaagcagtgtggaaagagtttttcgtggtgccacagtttccagattcacgaaaggacccacacaggcgagaagccctgcgaatgtagtaagtgcaacaaggcgttcagatcttacaggtcttatttgcgccacaaacggtctcacactggagagaagccgtatcagtgcaaagagtgtcggaaggcatttacgtacccatcatcactgcgtagacacgagaggacccattccgcaaaaaagccatacgaatgcaagcagtgcggtaaggccctgagctacaagttttccaacacgccgaaaaatgcactgtggagaaaaacactttag

SEQ ID NO: 25307 - DNA, 819 bp, Artificial Sequence
  derived and/or modified sequence
atgaacatcagaggagacatcggacacaaagcatatgagtaccaggactatgcccccaagccttataaatgccagcagcctaaaaaagcctttaggtaccacccttccttccgaacacaagaacggaaccacaccggtgagaagccctacgcatgtaaggagtgcggcaagacttttatctctcatagtggcattaggcgccggatggtcatgcatagtggtgatgggccttataagtgcaaattctgtggcaaagctgtccattgtctcaggctctatcttattcacgagagaacacacactggcgagaagccttatgagtgcaaacaatgtgttaagagtttcagttacagcgccacacatcggattcatgaacggacacataccggagaaaaaccttatgagtgtcagcagtgcggtaaagccttccatagtagctctagtttccaggcccataaaagaactcataccggtgggaagccctacgaatgtaaacagtgtggcaaatctttttcgtggtgtcattccttccagatccatgagaggacccatactggcgaaaaaccatgtgagtgttctaaatgcaacaaagcttttcgatcatacaggagctaccttcgccacaagaggtcgcacacgggggagaagccctatcagtgcaaggagtgccgaaaggctttcacatacccaagctcgctgaggaggcacgagcggacacactctgcaaagaaaccatatgagtgtaagcagtgcggcaaagcacttagctataagtttagcaacacccccaagaacgctctttggaggaaaaccctgtag

SEQ ID NO: 25308 - DNA, 1194 bp, Artificial Sequence
  derived and/or modified sequence
atgatgttccaggaccctgtggcctgtgaagatgtggccgtgaacttcacccaggaggagtgggccctgctggacatcagccagaggaagctgtaccgggaggtgatgctggagaccttcaggaacctgaccagcatcggcaagaagtggaaggaccagaacattgaatatgagtaccagaaccccaggaggaacttccgcagcctcatcgagggcaatgtgaatgagatcaaggaggacagccactgtggggagaccttcacccaggtgcctgatgaccggctgaacttccaggagaagaaggccagccctgaggccaagagctgtgacaactttgtgtgtggggaggtgggcatcggcaacagcagcttcaacatgaacatccggggggacatcggccacaaggcctatgagtaccaggactatgcccccaagccctacaagtgccagcagcccaagaaggccttccgctaccaccccagcttccgcacccaggagaggaaccacactggagagaagccctatgcctgcaaggaatgtgggaagaccttcatcagccacagcggcatcagaagaaggatggtgatgcacagcggagatggcccctacaagtgcaagttctgtgggaaggctgtgcactgcctgcggctgtacctgattcatgagaggacccacactggagagaagccctatgagtgcaagcagtgtgtgaagagcttctcctacagcgccacccaccgcatccacgagaggacccacactggagagaagccctatgagtgccagcagtgtgggaaggccttccacagcagcagcagcttccaggcccacaagaggacccacactggaggcaagccctatgagtgcaagcagtgtgggaagagcttctcctggtgccacagcttccagatccacgagaggacccacactggagagaagccctgtgagtgcagcaagtgcaacaaggccttccgcagctaccgcagctacctgcggcacaagaggagccacactggagagaagccctaccagtgcaaggaatgtaggaaggccttcacctaccccagcagcctgcggagacatgagaggacccacagcgccaagaagccctatgagtgcaagcagtgtgggaaggccctgagctacaagttcagcaacacccccaagaatgccctgtggaggaagaccctgtag

SEQ ID NO: 25309 - DNA, 1185 bp, Artificial Sequence
  derived and/or modified sequence
atggaccctgtggcctgtgaagatgtggccgtgaacttcacccaggaggagtgggccctgctggacatcagccagaggaagctgtaccgggaggtgatgctggagaccttcaggaacctgaccagcatcggcaagaagtggaaggaccagaacatcgagtatgagtaccagaaccccaggaggaacttccgcagcctgattgagggcaatgtgaatgagatcaaggaggacagccactgtggggagaccttcacccaggtgcctgatgaccggctgaacttccaggagaagaaggccagccctgaggccaagagctgtgacaactttgtgtgtggggaggtgggcatcggcaacagcagcttcaacatgaacatccggggggacatcggccacaaggcctatgagtaccaggactatgcccccaagccctacaagtgccagcagcccaagaaggccttccgctaccaccccagcttccgcacccaggagaggaaccacactggagagaagccctatgcctgcaaggaatgtgggaagaccttcatcagccacagcggcatcagaagaaggatggtgatgcacagcggagatggcccctacaagtgcaagttctgtgggaaggctgtgcactgcctgcggctgtacctgatccacgagaggacccacactggagagaagccctatgagtgcaagcagtgtgtgaagagcttctcctacagcgccacccaccgcatccacgagaggacccacactggagagaagccctatgagtgccagcagtgtgggaaggccttccacagcagcagcagcttccaggcccacaagaggacccacactggaggcaagccctatgagtgcaagcagtgtgggaagagcttctcctggtgccacagcttccagatccacgagaggacccacactggagagaagccctgtgaatgttccaagtgcaacaaggccttccgcagctaccgcagctacctgcggcacaagaggagccacactggagagaagccctaccagtgcaaggagtgcaggaaggccttcacctaccccagcagcctgcggagacatgagaggacccacagcgccaagaagccctatgagtgcaagcagtgtgggaaggccctgagctacaagttcagcaacacccccaagaatgccctgtggaggaagaccctgtag

SEQ ID NO: 25310 - DNA, 1245 bp, Artificial Sequence
  derived and/or modified sequence
atgccctgctgcagccacaggagctgcagagaagatcctggcaccagcgagagccgggagatggaccctgtggcctgtgaagatgtggccgtgaacttcacccaggaggagtgggccctgctggacatcagccagaggaagctgtaccgggaggtgatgctggagaccttcaggaacctgaccagcatcggcaagaagtggaaggaccagaacatcgagtatgagtaccagaaccccaggaggaacttccgcagcctgattgagggcaatgtgaatgagatcaaggaggacagccactgtggggagaccttcacccaggtgcctgatgaccggctgaacttccaggagaagaaggccagccctgaggccaagagctgtgacaactttgtgtgtggggaggtgggcatcggcaacagcagcttcaacatgaacatccggggggacatcggccacaaggcctatgagtaccaggactatgcccccaagccctacaagtgccagcagcccaagaaggccttccgctaccaccccagcttccgcacccaggagaggaaccacactggagagaagccctatgcctgcaaggaatgtgggaagaccttcatcagccacagcggcatcagaagaaggatggtgatgcacagcggagatggcccctacaagtgcaagttctgtgggaaggctgtgcactgcctgcggctgtacctgatccacgagaggacccacactggagagaagccctatgagtgcaagcagtgtgtgaagagcttctcctacagcgccacccaccgcatccacgagaggacccacactggagagaagccctatgagtgccagcagtgtgggaaggccttccacagcagcagcagcttccaggcccacaagaggacccacactggaggcaagccctatgagtgcaagcagtgtgggaagagcttctcctggtgccacagcttccagatccacgagaggacccacactggagagaagccctgtgaatgttccaagtgcaacaaggccttccgcagctaccgcagctacctgcggcacaagaggagccacactggagagaagccctaccagtgcaaggagtgcaggaaggccttcacctaccccagcagcctgcggagacatgagaggacccacagcgccaagaagccctatgagtgcaagcagtgtgggaaggccctgagctacaagttcagcaacacccccaagaatgccctgtggaggaagaccctgtag

SEQ ID NO: 25311 - DNA, 819 bp, Artificial Sequence
  derived and/or modified sequence
atgaacatccggggggacatcggccacaaggcctatgagtaccaggactatgcccccaagccctacaagtgccagcagcccaagaaggccttccgctaccaccccagcttccgcacccaggagaggaaccacactggagagaagccctatgcctgcaaggaatgtgggaagaccttcatcagccacagcggcatcagaagaaggatggtgatgcacagcggagatggcccctacaagtgcaagttctgtgggaaggctgtgcactgcctgcggctgtacctgatccacgagaggacccacactggagagaagccctatgagtgcaagcagtgtgtgaagagcttctcctacagcgccacccaccgcatccacgagaggacccacactggagagaagccctatgagtgccagcagtgtgggaaggccttccacagcagcagcagcttccaggcccacaagaggacccacactggaggcaagccctatgagtgcaagcagtgtgggaagagcttctcctggtgccacagcttccagatccacgagaggacccacactggagagaagccctgtgaatgttccaagtgcaacaaggccttccgcagctaccgcagctacctgcggcacaagaggagccacactggagagaagccctaccagtgcaaggagtgcaggaaggccttcacctaccccagcagcctgcggagacatgagaggacccacagcgccaagaagccctatgagtgcaagcagtgtgggaaggccctgagctacaagttcagcaacacccccaagaatgccctgtggaggaagaccctgtag

SEQ ID NO: 25312 - DNA, 1194 bp, Artificial Sequence
  derived and/or modified sequence
atgatgttccaggaccccgtggcctgcgaggacgtggccgtgaactttacacaggaggagtgggccttgttggacatctcacaaagaaaactttatcgcgaggtgatgcttgagacgtttaggaacctgacgtcgatcgggaaaaagtggaaagaccagaacatcgagtacgagtaccagaatcctagacgcaacttccggagcctgatcgagggaaacgttaatgagatcaaggaggactctcattgtggagagacttttacccaagtgccggatgatagactcaactttcaggagaagaaagcctcccccgaggccaagtcatgcgacaactttgtttgcggtgaagttgggatcggtaactccagctttaacatgaatatccgcggtgatattgggcacaaagcctacgaatatcaggactatgcacctaaaccttataagtgtcagcagcctaagaaggcttttcgataccacccctcatttcggactcaggaacggaatcataccggagaaaaaccgtatgcttgcaaggaatgtggtaaaacattcattagtcatagcggaatccgcagacgcatggtgatgcactcgggggacgggccatacaaatgtaaattctgtggcaaagcggtgcactgccttaggctatacctcattcatgagcgcacacacaccggcgagaagccatacgagtgcaagcagtgcgttaagtccttctcctactctgccacccaccgaatccatgaacggacgcatactggcgaaaaaccttatgaatgccagcagtgtggaaaggctttccacagtagcagcagtttccaggcccataagaggactcacaccggaggtaaaccctacgagtgtaagcaatgtggcaaaagttttagctggtgccacagcttccaaatccatgaaaggacccataccggggaaaagccctgtgagtgtagcaagtgcaacaaggctttccgctcttatagatcttacctcagacataaacggagccatactggcgagaaaccataccaatgtaaggaatgtagaaaagccttcacgtacccgagttccctgaggcggcacgaacgcacccacagcgctaaaaaaccttatgagtgtaaacaatgcgggaaggctctaagttataaattctctaatacaccgaagaacgcactctggcgcaaaactctgtag

SEQ ID NO: 25313 - DNA, 1185 bp, Artificial Sequence
  derived and/or modified sequence
atggaccccgtggcctgcgaggacgtggccgtgaacttcacccaggaagaatgggcactattggatattagtcagcgaaaactgtatcgagaagtgatgttggagacgttccggaatcttacttctattggcaaaaagtggaaagaccagaatatcgagtacgaatatcaaaacccccgacgcaattttagatctctcatcgaggggaatgtgaacgaaatcaaagaagacagccactgtggtgaaacctttacccaggtacctgatgatcggttgaacttccaagaaaagaaggcttcaccagaggccaagtcttgcgataactttgtctgcggcgaagtgggcatcggcaattcttcattcaatatgaacattagaggcgatattggccataaggcttacgaatatcaggattatgcccccaagccctacaagtgccagcagcccaagaaagcttttcgataccatcctagtttccgtacacaggagaggaatcacacgggcgagaagccttatgcatgtaaggagtgtggcaagacattcatttcacactcgggaatacggagacgcatggtaatgcacagcggagacggcccatataaatgtaaattctgcgggaaggctgtccactgtttgcgactatatctcattcatgaacggacccatacaggcgaaaaaccctatgaatgtaagcagtgtgtgaaaagcttctcttattctgccacccaccgcattcacgagagaacccacaccggcgagaagccctatgagtgccagcaatgcgggaaagcattccatagctcctcaagtttccaggctcacaagcggactcacactggggggaagccctatgagtgcaagcagtgtgggaaatcattctcttggtgccactcctttcaaatccatgaacgcacccacacaggggagaaaccatgtgagtgctcaaagtgcaataaagcctttagaagttaccggagttacctgaggcataagaggagtcacactggagagaaaccgtaccagtgtaaggaatgtaggaaggcttttacctatccttctagtttaagaagacacgaaagaacccactcagcaaagaagccctacgagtgtaagcagtgcggaaaagcacttagctataagttcagtaatacccctaaaaacgccctgtggcgcaaaactctgtag

SEQ ID NO: 25314 - DNA, 1245 bp, Artificial Sequence
  derived and/or modified sequence
atgccctgctgcagccaccggagctgccgggaggaccccggcaccagtgaatcacgggaaatggatccagtggcttgtgaagacgtggccgtgaactttactcaggaggaatgggctctactggacatctcccagaggaagctgtaccgtgaagtgatgttggagacctttagaaacctgacgtcaatcgggaagaaatggaaggaccagaatatcgagtacgagtaccaaaacccaaggagaaactttcggtcactgattgagggtaacgtcaacgagataaaagaggatagccactgcggtgaaacctttactcaggtgcctgatgatagactcaacttccaggagaagaaggctagcccggaggccaaatcctgtgataactttgtttgtggggaggtaggaattggcaactcgagcttcaacatgaacatcagaggggatattgggcataaggcctacgaataccaggactacgcgccaaagccttataagtgccagcaacccaagaaggcgtttcgctatcatcctagcttcaggacacaggagagaaatcacactggggagaagccctatgcctgcaaggagtgtgggaaaactttcatcagtcactctggtatccgacgtcgaatggtgatgcactccggagatggcccctataaatgtaagttttgcggtaaggccgtccattgtcttcggctttacctgattcatgaaagaacccataccggggagaaaccctacgagtgcaagcaatgcgtgaaaagcttctcatactccgccacacatcgcatccatgagcggacccacaccggggagaagccttatgagtgtcagcaatgtggtaaggctttccatagctcctcaagcttccaagcacataagcgtactcatacaggtggtaaaccttatgaatgtaaacagtgcggcaagtccttctcgtggtgccactcgttccagattcacgaaagaacccacacaggcgagaagccctgtgaatgctccaaatgtaacaaggctttccgctcttacagatcatatctcagacacaagcgctcacataccggtgagaagccataccagtgtaaggaatgtcgcaaagcttttacgtatccatccagccttcgcagacatgagaggacacattcagctaagaagccctatgagtgcaagcagtgcggcaaagcgctatcatataaatttagcaacacacccaagaacgctctgtggcggaagaccctctag

SEQ ID NO: 25315 - DNA, 819 bp, Artificial Sequence
  derived and/or modified sequence
atgaacatccggggcgacatcggccacaaggcctacgagtaccaggactatgctcccaaaccatataagtgccagcaacccaagaaagcttttcgctaccatccatctttcaggacgcaagagcgaaatcacaccggcgaaaagccctatgcctgtaaggagtgtggcaaaacatttatatcacattctggtattaggcgtcgaatggtcatgcactccggagatggtccttataagtgtaaattctgtggtaaggcagtacattgcttacgtctgtacctgatacatgagagaacccacacaggcgagaaaccctatgaatgcaagcagtgtgtgaaatccttttcctatagtgctacacaccgcatccacgaacgcacccacaccggtgaaaaaccttatgaatgtcagcaatgcggtaaagctttccatagctcctcttcattccaagcccataaacgtacccataccggcggaaaaccatatgaatgcaagcaatgcggcaagtcgttctcctggtgtcatagttttcagatccacgaaagaactcatactggcgaaaagccttgcgagtgctctaaatgtaataaagctttcaggtcatatagatcatacttgcgccataaaaggtcccacacaggcgagaagccatatcagtgcaaggagtgtagaaaggcctttacctatcctagctcactccgaaggcatgagagaacacatagtgccaagaagccctacgagtgcaaacagtgtgggaaagcactgtcttacaagttcagcaatacaccaaaaaatgcactgtggcgaaagactctgtag

SEQ ID NO: 25316 - DNA, 1194 bp, Artificial Sequence
  derived and/or modified sequence
atgatgttccaggaccccgtcgcttgtgaagacgtggcggtaaactttacacaggaggaatgggctctcctcgatatcagtcagcggaaactgtatcgcgaagtcatgctagaaacatttagaaacctcacatccataggaaaaaagtggaaggatcagaacattgagtacgagtaccagaaccctaggaggaattttcggtctctcattgaaggcaacgtgaacgaaatcaaggaagattcccattgtggagagacattcacccaggtgccagacgaccggctgaactttcaagaaaagaaggcctcccctgaagctaagtcctgcgacaacttcgtctgtggcgaggttgggatcgggaactcaagcttcaatatgaacattcgtggagacattggacacaaagcgtacgaataccaggactacgctcctaagccctacaagtgccagcaaccgaaaaaggcttttcgctatcaccctagtttcaggacacaggagcggaatcatactggggaaaaaccatacgcctgcaaggaatgtgggaaaacctttatctcgcacagtggtattcgcagacggatggttatgcactcaggagatggcccatacaagtgtaagttttgcggcaaggcagtgcattgtctgagactgtacctcatccatgagaggacacacacaggggaaaagccttacgagtgcaaacagtgtgtgaaaagcttctcctactctgcaacacaccgtatacatgaacgtacacacactggggaaaaaccctacgagtgccagcagtgtggaaaagcctttcactccagctcctcctttcaagctcataagcggacccacaccgggggaaagccctacgagtgtaaacagtgtggaaaatcgttctcatggtgtcatagctttcagatccatgaaagaactcacacaggagagaagccttgcgaatgttccaaatgtaacaaagcctttaggtcttaccgctcctatcttcggcacaaacggtcccacactggagagaaaccctaccagtgcaaggagtgtcggaaagccttcacctatccttcatccctcaggaggcatgagcggacccactccgctaaaaaaccctacgaatgcaagcagtgtggtaaagcgctaagttataaattcagcaatactccaaagaatgcactgtggagaaaaacactatag

SEQ ID NO: 25317 - DNA, 1185 bp, Artificial Sequence
  derived and/or modified sequence
atggatcccgtcgcttgtgaagatgtggcagtgaatttcacccaggaggagtgggcgctgttggacatcagccagcgcaagctttatagagaggtaatgctcgagacgtttagaaatctgacatccattggaaaaaaatggaaggaccagaacatcgagtacgaatatcagaacccgaggcgcaactttcgttcactgatcgaggggaacgtgaatgagatcaaggaggacagccattgcggcgagaccttcactcaagtccccgatgatcggctcaatttccaggagaagaaggcttcgccagaggccaaatcttgtgataatttcgtgtgtggcgaggtgggaatcggcaactcatccttcaacatgaatatccgtggtgacattgggcataaggcttacgagtaccaagactacgccccaaagccctacaagtgtcagcagccgaagaaggcatttaggtaccatccatctttcaggacccaggagagaaaccacactggagagaaaccttatgcctgcaaggaatgcgggaagacattcatcagccacagtggcatcagaagacgcatggtgatgcattcaggtgacggaccatacaagtgtaagttttgcggcaaggcggtgcactgtcttaggttgtatctcatccatgaaagaactcacacgggtgagaaaccttacgaatgtaaacaatgcgtgaagtctttctcatactcagcaactcaccgcatccacgagcgcacccatacaggggaaaaaccttacgagtgtcaacagtgtgggaaggcgttccattcttcctctagcttccaggcacacaaacggacacataccggcggtaaaccgtacgaatgtaaacaatgtggaaagtcgttctcctggtgccactcatttcagattcatgaacgtacccacacaggggaaaagccttgtgaatgttctaaatgtaacaaagccttccgaagctaccggagctacctccgccacaagcgtagccacaccggtgaaaaaccctaccaatgcaaggaatgtagaaaggcgtttacataccctagctcgctgcgacgtcatgaacgaacacacagtgccaagaagccctacgaatgcaaacaatgcggaaaggccttgtcctacaaattcagtaatacgcccaaaaatgctctttggaggaaaacactgtag

SEQ ID NO: 25318 - DNA, 1245 bp, Artificial Sequence
  derived and/or modified sequence
atgccttgctgcagccatcggagttgtcgcgaagaccccggaacctctgagagtcgggagatggaccccgtcgcctgcgaggacgtggcagtgaacttcacccaggaagagtgggctctgttggatataagccaacgcaagctctaccgcgaggtgatgttagaaacttttcgcaacttaacctccattggcaagaagtggaaagaccagaacatcgagtatgaataccaaaaccccaggagaaatttcagatccttaatcgaagggaacgtgaacgagatcaaagaagattcccattgcggcgagaccttcactcaggtcccagatgataggctcaacttccaggagaaaaaggccagtccagaagccaaatcctgtgataacttcgtgtgtggggaggttggaattgggaacagctcgtttaacatgaacatccgcggtgatataggacacaaggcctatgagtaccaggactacgctccaaaaccctacaagtgtcagcagcctaagaaggcgtttcgatatcatccaagtttccgtacccaggaaagaaatcacactggtgaaaagccctacgcttgcaaggagtgcggaaagacattcatatcccactccgggatccgcaggcgtatggtcatgcatagcggtgacggaccgtacaaatgtaagttctgcggcaaggcagtgcactgtctgagactgtatctgatccacgaaagaactcatacaggggagaagccgtacgagtgcaagcagtgcgtgaaatccttttcatatagcgctacccatagaattcatgaacggacgcataccggtgagaagccctacgagtgtcagcagtgtggtaaagctttccactcaagcagcagctttcaggcgcataagcgaacccatacggggggtaagccctacgaatgcaaacagtgcgggaaatcattctcctggtgccacagcttccaaatccacgagaggacacataccggtgagaagccttgcgagtgcagtaagtgtaataaggcctttagaagttaccgttcgtatctgcggcacaaacgtagtcacacgggggaaaagccatatcagtgtaaagagtgtagaaaggcttttacctacccaagcagcctgaggcggcacgagcgaacccactctgctaaaaaaccatatgaatgcaaacagtgtggcaaagctctttcctacaagtttagtaatacccctaagaacgcactgtggagaaagacactatag

SEQ ID NO: 25319 - DNA, 819 bp, Artificial Sequence
  derived and/or modified sequence
atgaacattcgcggagacattgggcacaaggcatacgaataccaggattacgcgcctaaaccctataaatgccaacagcccaagaaagccttcaggtaccatcccagtttccggacccaggagagaaatcacaccggagaaaaaccctacgcctgcaaggagtgtggaaagacattcatctcacatagcggcattaggcgtaggatggttatgcacagtggagacggcccttacaagtgcaagttttgtggaaaagccgttcattgcctgagactctatctcatacacgagagaactcacactggagagaaaccttacgaatgcaaacaatgcgtcaagtctttcagttattccgccacacatagaattcacgaacgcacgcacactggtgagaagccctacgagtgccagcaatgtggtaaagcctttcactcaagtagtagctttcaagcacacaagaggacacacaccggcggtaaaccctatgagtgcaaacagtgtggaaagtccttcagttggtgccattccttccagatccacgagaggacccatacaggcgagaagccatgtgaatgttcaaagtgtaataaggcatttagatcttatcgcagctacctgcgccacaagagatctcacaccggtgagaagccctatcagtgcaaagaatgccgtaaagcctttacctaccctagctcactgagacgtcacgagcgcacccacagcgcaaagaagccttatgagtgcaaacagtgcggaaaggccctaagctataagttcagtaatacacccaagaatgcattgtggagaaagactctgtag

SEQ ID NO: 25320 - DNA, 1815 bp, Artificial Sequence
  derived and/or modified sequence
gtccttgcgcagccggtggttgatatccgctgtatccatccccgagagggacctggtacctctacccaggtttctatcgctctgtctcctgcgctgtgcccttctgtagtcacaggagctgtagagaggaccccaggacatctgaaagccaggaaatgatgtttcaggaccctgtggcctgtgaggatgttgctgtgaacttcacccaggaggagtgggctttgctggatatttcgcagaggaaactctacagggaagtgatgctggaaactttcaggaacctgacctctatagggaaaaagtggaaagaccagaacattgaatatgagtaccaaaaccccaggagaaacttcaggagtctcatagaagggaatgtcaatgaaattaaagaagacagtcattgtggagaaacttttacccaggttccagatgacaggctgaacttccaggagaagaaagcttctcctgaagcaaaatcatgtgataactttgtatgtggagaagttggcataggtaactcatcttttaatatgaacatcagaggtgacattgggcacaaggcatacgagtatcaggactatgcaccaaagccatataagtgtcaacaacctaagaaagccttcagatatcacccctcctttagaacacaagaaaggaatcacaccggagagaaaccctatgcttgtaaagaatgtggaaaaacctttatttcccattcaggcattcgaagacgcatggtaatgcacagtggggatggaccttataaatgtaagttttgtgggaaagctgtccattgtctcagattatatcttatccatgaaagaactcacactggagagaaaccgtatgaatgtaaacaatgtgttaaatcctttagttattctgctacccatcgaatacatgaaagaactcacactggagaaaagccttatgaatgtcagcaatgtgggaaagcattccatagttccagttcttttcaagcacataaaagaacccacactgggggaaagccatatgaatgtaaacaatgtggcaaatccttcagttggtgtcattcctttcaaatacatgaaagaactcacactggggagaagccctgtgaatgtagcaaatgtaataaagcattccgtagttacagatcctatcttagacataaaaggagtcacacgggagagaagccttatcaatgtaaggaatgtagaaaagcattcacgtatcccagttcccttcgtagacatgaaaggacccactctgcgaaaaaaccttatgaatgtaagcagtgtgggaaagcattatcttataagttttcaaacacacctaagaatgcgctctggagaaagaccttataaatgttagatatgtgggaaaggcctttattctgccaagtcatttcgaagacatgaaaaaactcacactggagagaaaccctataaatgcatgccatgtggtaaagccttcaatctttccagttcctttcagtatcatgaaaggactcacactggagagaaaccctatgagtgtaagcaatgtgggaaagccttcagatgtgccccacaccttcgaaggcatggtaggactcactggagagaaaccctatgagtgtaaggaatgtgggaaagccttcagatctgcctcacaccttcaaattcatgaaaggacacaaacacacataagaatacactctggagaaagaccttataaatgtaagacatgtgggaaaggcttttattctcccacgtcatttcaaagacatgaaaaaactcacactgcagagaaaccctatgaatgcaagcaatgtggtaaagccttcagtag

SEQ ID NO: 25321 - DNA, 1518 bp, Artificial Sequence
  derived and/or modified sequence
gctgtatccatccccgagagggacctggtacctctacccaggtttctatcgctctgtctcctgcgctgtgcccttctgtagtcacaggagctgtagagaggaccccaggacatctgaaagccaggaaatggaccctgtggcctgtgaggatgttgctgtgaacttcacccaggaggagtgggctttgctggatatttcgcagaggaaactctacagggaagtgatgctggaaactttcaggaacctgacctctatagggaaaaagtggaaagaccagaacattgaatatgagtaccaaaaccccaggagaaacttcaggagtctcatagaagggaatgtcaatgaaattaaagaagacagtcattgtggagaaacttttacccaggttccagatgacaggctgaacttccaggagaagaaagcttctcctgaagcaaaatcatgtgataactttgtatgtggagaagttggcataggtaactcatcttttaatatgaacatcagaggtgacattgggcacaaggcatacgagtatcaggactatgcaccaaagccatataagtgtcaacaacctaagaaagccttcagatatcacccctcctttagaacacaagaaaggaatcacaccggagagaaaccctatgcttgtaaagaatgtggaaaaacctttatttcccattcaggcattcgaagacgcatggtaatgcacagtggggatggaccttataaatgtaagttttgtgggaaagctgtccattgtctcagattatatcttatccatgaaagaactcacactggagagaaaccgtatgaatgtaaacaatgtgttaaatcctttagttattctgctacccatcgaatacatgaaagaactcacactggagaaaagccttatgaatgtcagcaatgtgggaaagcattccatagttccagttcttttcaagcacataaaagaacccacactgggggaaagccatatgaatgtaaacaatgtggcaaatccttcagttggtgtcattcctttcaaatacatgaaagaactcacactggggagaagccctgtgaatgtagcaaatgtaataaagcattccgtagttacagatcctatcttagacataaaaggagtcacacgggagagaagccttatcaatgtaaggaatgtagaaaagcattcacgtatcccagttcccttcgtagacatgaaaggacccactctgcgaaaaaaccttatgaatgtaagcagtgtgggaaagcattatcttataagttttcaaacacacctaagaatgcgctctggagaaagaccttataaatgttagatatgtgggaaaggcctttattctgccaagtcatttcgaagacatgaaaaaactcacactggagagaaaccctataaatgcatgccatgtggtaaagccttcaatctttccagttcctttcagtatcatgaaaggactcacactggagagaaaccctatgagtgtaagcaatgtgggaaagccttcagatgtgccccac

SEQ ID NO: 25322 - DNA, 1562 bp, Artificial Sequence
  derived and/or modified sequence
acagttcatccggaaatggagggggtcgctttcctcaccttcctcgctgcgcgggcggcggttggtaaccggtcagaccagcccgagagggacctggtgcctgtacccaggcttctgtcgctctgtcgcctgcgctatgccctgctgtagtcacaggagctgtagagaggaccccggtacatctgaaagccgggaaatggaccctgtggcctgtgaggatgttgctgtgaacttcacccaggaggagtgggctttgctggatatttcgcagaggaaactctacagggaagtgatgctggaaactttcaggaacctgacctctatagggaaaaagtggaaagaccagaacattgaatatgagtaccaaaaccccaggagaaacttcaggagtctcatagaagggaatgtcaatgaaattaaagaagacagtcattgtggagaaacttttacccaggttccagatgacaggctgaacttccaggagaagaaagcttctcctgaagcaaaatcatgtgataactttgtatgtggagaagttggcataggtaactcatcttttaatatgaacatcagaggtgacattgggcacaaggcatacgagtatcaggactatgcaccaaagccatataagtgtcaacaacctaagaaagccttcagatatcacccctcctttagaacacaagaaaggaatcacaccggagagaaaccctatgcttgtaaagaatgtggaaaaacctttatttcccattcaggcattcgaagacgcatggtaatgcacagtggggatggaccttataaatgtaagttttgtgggaaagctgtccattgtctcagattatatcttatccatgaaagaactcacactggagagaaaccgtatgaatgtaaacaatgtgttaaatcctttagttattctgctacccatcgaatacatgaaagaactcacactggagaaaagccttatgaatgtcagcaatgtgggaaagcattccatagttccagttcttttcaagcacataaaagaacccacactgggggaaagccatatgaatgtaaacaatgtggcaaatccttcagttggtgtcattcctttcaaatacatgaaagaactcacactggggagaagccctgtgaatgtagcaaatgtaataaagcattccgtagttacagatcctatcttagacataaaaggagtcacacgggagagaagccttatcaatgtaaggaatgtagaaaagcattcacgtatcccagttcccttcgtagacatgaaaggacccactctgcgaaaaaaccttatgaatgtaagcagtgtgggaaagcattatcttataagttttcaaacacacctaagaatgcgctctggagaaagaccttataaatgttagatatgtgggaaaggcctttattctgccaagtcatttcgaagacatgaaaaaactcacactggagagaaaccctataaatgcatgccatgtggtaaagccttcaatctttccagttcctttcagtatcatgaaaggactcacactggagagaaaccctatgagtgtaagcaatgt

SEQ ID NO: 25323 - DNA, 1523 bp, Artificial Sequence
  derived and/or modified sequence
gtccttgcgcagccggtggttgatatccgctgtatccatccccgagagggacctggtacctctacccaggtttctatcgctctgtctcctgcgctgtgcccttctgtagtcacaggagctgtagagaggaccccaggacatctgaaagccaggaaatggagtctcatagaagggaatgtcaatgaaattaaagaagacagtcattgtggagaaacttttacccaggttccagatgacaggctgaacttccaggagaagaaagcttctcctgaagcaaaatcatgtgataactttgtatgtggagaagttggcataggtaactcatcttttaatatgaacatcagaggtgacattgggcacaaggcatacgagtatcaggactatgcaccaaagccatataagtgtcaacaacctaagaaagccttcagatatcacccctcctttagaacacaagaaaggaatcacaccggagagaaaccctatgcttgtaaagaatgtggaaaaacctttatttcccattcaggcattcgaagacgcatggtaatgcacagtggggatggaccttataaatgtaagttttgtgggaaagctgtccattgtctcagattatatcttatccatgaaagaactcacactggagagaaaccgtatgaatgtaaacaatgtgttaaatcctttagttattctgctacccatcgaatacatgaaagaactcacactggagaaaagccttatgaatgtcagcaatgtgggaaagcattccatagttccagttcttttcaagcacataaaagaacccacactgggggaaagccatatgaatgtaaacaatgtggcaaatccttcagttggtgtcattcctttcaaatacatgaaagaactcacactggggagaagccctgtgaatgtagcaaatgtaataaagcattccgtagttacagatcctatcttagacataaaaggagtcacacgggagagaagccttatcaatgtaaggaatgtagaaaagcattcacgtatcccagttcccttcgtagacatgaaaggacccactctgcgaaaaaaccttatgaatgtaagcagtgtgggaaagcattatcttataagttttcaaacacacctaagaatgcgctctggagaaagaccttataaatgttagatatgtgggaaaggcctttattctgccaagtcatttcgaagacatgaaaaaactcacactggagagaaaccctataaatgcatgccatgtggtaaagccttcaatctttccagttcctttcagtatcatgaaaggactcacactggagagaaaccctatgagtgtaagcaatgtgggaaagccttcagatgtgccccacaccttcgaaggcatggtaggactcactggagagaaaccctatgagtgtaaggaatgtgggaaagccttcagatctgcctcacaccttcaaattcatgaaaggacacaaacacacataagaatacactctggagaaagaccttataaatgtaagacatgtgggaaa

SEQ ID NO: 25324 - protein, 347 aa, Artificial Sequence
  derived and/or modified sequence
MARFWVCVAGAGFFLAFLVLHSRFCGSPVLRNFTFAVSWRTEKILYRLDVGWPKHPEYFTGTTFCVAVDSLNGLVYIGQRGDNIPKILVFTEDGYFLRAWNYTVDTPHGIFAASTLYEQSVWITDVGSGFFGHTVKKYSSFGDLVQVLGTPGKKGTSLNPLQFDNPAELYVEDTGDIYIVDGDGGLNNRLIKLSQDFMILWLHGENGTGPAKFNIPHSVTLDSAGRVWVADRGNKRIQVFDKDTGEWLGAWNNCFTEEGPSSVRFTPDGKYLIVAQLNLSRLSVVAAPPVGSIGECSVISTIQLADQVLPHLLEVDRKTGAVYVAEIGAKQVQKYVPLNSYVPSFGS

SEQ ID NO: 25325 - DNA, 1044 bp, Artificial Sequence
  derived and/or modified sequence
atggctcggttctgggtgtgcgtggcaggagctgggttcttcttagcttttctggttctgcacagtagattctgtggaagtccagtgctgcggaacttcacattcgctgtcagttggcgaacggaaaagatactttatcgacttgacgttgggtggcccaaacatcctgagtatttcacgggcaccactttctgcgtagctgtggattcactgaacggcctggtgtacataggccaacggggagacaacattcccaagattctggtatttactgaggatggatacttcttaagggcctggaattatacagtagacacccctcacgggatcttcgcagctagcaccctctacgagcagtccgtgtggatcaccgatgtgggatccggattcttcggccacactgtaaagaagtactcttccttcggcgatcttgtgcaggtcctggggactcctggaaagaaaggtacctccttgaatcctctgcaattcgacaatcctgccgagctgtacgtggaggacactggcgacatctacatcgtggatggcgacgggggtctgaataatcgcttaattaagctctctcaggattttatgattctttggcttcacggagagaatggcacaggcccagcgaagtttaacattccccactctgtgaccctggactccgcagggcgagtctgggtggctgatagaggaaataaaagaatccaagtcttcgataaggataccggcgagtggctgggcgcatggaataattgtttcaccgaagaagggcctagtagtgtgcgcttcacacctgacgggaaatacctgattgtcgctcaactgaatctttccagactgtctgtggtggccgcacctccagttggctcaatcggcgagtgctcggtgatttccactatccagctcgctgaccaggtgttgccccacttactggaagttgataggaagaccggggctgtttacgtggccgagatcggtgccaagcaagtacagaaatacgtcccgctaaattcgtatgtgccttcattcggatcgtag

SEQ ID NO: 25326 - DNA, 1044 bp, Artificial Sequence
  derived and/or modified sequence
atggcccgtttttgggtttgtgtcgctggtgctggtttttttctcgcctttctggttttgcatagcagattctgtggttctcctgtcttgcgcaattttaccttcgccgtgtcctggcgcactgagaaaattctctacaggctagacgtcggatggcctaagcaccccgaatactttaccggaaccactttctgcgttgctgtggactcactcaacggtctggtgtatataggtcaacgcggggataacattcctaaaattctggtgtttaccgaggacggatacttcctaagagcttggaactacacagttgacacaccgcacggcattttcgcggcttccactttgtatgaacagtccgtctggattaccgacgtgggtagcggctttttcggacacacggttaaaaagtatagctccttcggggatctggtccaggtgctggggacaccagggaaaaaaggaaccagtctgaatcctttacagttcgacaatcctgccgaactgtatgtggaggacacaggggatatatacatagtggacggtgatgggggcctgaataataggctaattaaattgtctcaagatttcatgattctttggttgcatggcgaaaacgggacgggaccagccaagtttaacatacctcacagtgtgacacttgattccgccggccgtgtatgggtcgctgaccggggtaataagaggatccaggtgtttgataaagatacaggagagtggctcggtgcttggaacaactgtttcacagaagaaggaccctctagcgtgcggttcacaccagacggaaaatatttaatcgttgcgcagcttaatctctccagacttagcgtggtggcagcacctcctgtcggtagcattggcgagtgctcagtgattagtaccatacagttagcagaccaggtgctcccacatctgctcgaagtcgatcgcaagaccggcgccgtttacgttgccgagatcggcgccaaacaggtgcaaaaatatgtgccactgaactcatatgtgccaagctttggtagctag

SEQ ID NO: 25327 - DNA, 1044 bp, Artificial Sequence
  derived and/or modified sequence
atggcccgtttttgggtttgtgtcgctggtgctggtttttttctcgcctttctggttttgcatagcagattctgtggttctcctgtcttgcgcaattttaccttcgccgtgtcctggcgcactgagaaaattctctacaggctagacgtcggatggcctaagcaccccgaatactttaccggaaccactttctgcgttgctgtggactcactcaacggtctggtgtatataggtcaacgcggggataacattcctaaaattctggtgtttaccgaggacggatacttcctaagagcttggaactatacggtggatacaccgcacggaatattcgctgcctccacattgtatgagcagtctgtgtggattaccgatgtaggctctggtttctttgggcataccgtcaagaagtatagtagttttggggatctagtgcaggtgctgggaactccgggaaagaagggcacaagtttgaacccacttcaattcgacaacccagcagagctctatgttgaagatacaggggatatctatattgttgacggagatggcggcctgaacaatagactgattaaactttcacaggactttatgatactgtggttgcatggcgaaaacgggacgggaccagccaagtttaacatacctcacagtgtgacacttgattccgccggccgtgtatgggtcgctgaccggggtaataagaggatccaggtgtttgataaagatacaggagagtggctcggtgcttggaacaactgtttcacagaagaaggaccctctagcgtgcggttcacaccagacggaaaatatttaatcgttgcgcagcttaatctctccagacttagcgtggtggcagcacctcctgtcggtagcattggcgagtgctcagtgattagtacaatccaactggctgaccaagtgctcccacatctcctggaggtggataggaagacaggtgctgtgtatgtcgcggaaatcggggcaaagcaagttcagaagtacgttccactcaattcttatgttcccagctttggatcatag

SEQ ID NO: 25328 - DNA, 1044 bp, Artificial Sequence
  derived and/or modified sequence
atggccagattctgggtgtgcgtggccggcgccggcttcttcctggccttcctggtgctgcacagcagattctgcggcagccccgtgctgagaaacttcaccttcgccgtgagctggagaaccgagaagatcctgtacagactggacgtgggctggcccaagcaccccgagtacttcaccggcaccaccttctgcgtggccgtggacagcctgaacggcctggtgtacatcggccagagaggcgacaacatccccaagatcctggtgttcaccgaggacggctacttcctgagagcctggaactacaccgtggacaccccccacggcatcttcgccgccagcaccctgtacgagcagagcgtgtggatcaccgacgtgggcagcggcttcttcggccacaccgtgaagaagtacagcagcttcggcgacctggtgcaggtgctgggcacccccggcaagaagggcaccagcctgaaccccctgcagttcgacaaccccgccgagctgtacgtggaggacaccggcgacatctacatcgtggacggcgacggcggcctgaacaacagactgatcaagctgagccaggacttcatgatcctgtggctgcacggcgagaacggcaccggccccgccaagttcaacatcccccacagcgtgaccctggacagcgccggcagagtgtgggtggccgacagaggcaacaagagaatccaggtgttcgacaaggacaccggcgagtggctgggcgcctggaacaactgcttcaccgaggagggccccagcagcgtgagattcacccccgacggcaagtacctgatcgtggcccagctgaacctgagcagactgagcgtggtggccgccccccccgtgggcagcatcggcgagtgcagcgtgatcagcaccatccagctggccgaccaggtgctgccccacctgctggaggtggacagaaagaccggcgccgtgtacgtggccgagatcggcgccaagcaggtgcagaagtacgtgcccctgaacagctacgtgcccagcttcggcagctag

SEQ ID NO: 25329 - DNA, 1044 bp, Artificial Sequence
  derived and/or modified sequence
atggccagattttgggtctgtgtcgccggcgcgggcttttttctggcctttctggtgctgcactcccgcttctgcgggagccccgtgctgagaaacttcacgttcgctgtgagctggcggaccgaaaaaattctttaccggttagacgtggggtggccaaagcaccccgaatatttcactggcaccaccttttgcgtcgctgtggactcactgaatggactagtctatattggccagagaggagataatatcccaaagatcctggtgttcacagaagatgggtacttcttgcgggcttggaactacaccgtcgatacacctcacgggatcttcgctgcgtctaccctctacgaacagagcgtttggatcaccgatgtgggctccggcttctttggacatactgtaaagaaatactcttccttcggcgacctcgtgcaggtccttggcacccctggcaaaaaaggaacatctctaaacccactgcagttcgacaaccccgcagaactgtacgtggaagacacaggtgacatctacatagtcgatggtgatggtggcttaaataaccggctgattaagctcagtcaggattttatgattttatggctgcacggtgagaatggcacgggccctgcaaaattcaatattccccattccgtcacactggactccgccggtcgcgtatgggttgcagaccgtggaaataagcgaattcaagtattcgataaggacaccggagagtggctgggagcctggaacaactgctttactgaagaaggccccagcagcgtgcgattcacacctgatgggaagtaccttatcgtcgctcagcttaaccttagtcgtctgagcgtggtcgcagcaccacccgtcgggtctattggggaatgtagcgtcatctctactattcaactggctgatcaggtcctcccccacctcttagaagtcgacaggaaaaccggagcggtgtatgtggccgagatcggcgccaagcaagtccagaaatacgtcccactcaatagctacgtgccctcctttggaagctag

SEQ ID NO: 25330 - DNA, 1044 bp, Artificial Sequence
  derived and/or modified sequence
atggcccgcttctgggtgtgtgtggccggggccggcttcttcctggccttcctggtgctgcacagccgcttctgtggcagccctgtgctgaggaacttcacctttgctgtgtcctggaggacagagaagatcctgtaccgcctggatgtgggctggcccaagcaccctgagtacttcaccggcaccaccttctgtgtggccgtggacagcctgaatggcctggtgtacatcggccagagaggagacaacatccccaagatcctggtgttcacagaagatggctacttcctgcgggcctggaactacacagtggacaccccccacggcatctttgctgccagcaccctgtatgagcagagcgtgtggatcacagatgtgggcagcggcttcttcggccacacagtgaagaagtacagcagctttggagacctggtgcaggtgctgggcaccccaggcaagaagggcaccagcctgaaccccctgcagtttgacaacccagctgagctgtatgtggaggacaccggggacatctacatcgtggatggagatggcggcctgaacaacagactcatcaagctgagccaggacttcatgatcctgtggctgcatggagaaaatggcaccggccctgccaagttcaacatcccccacagcgtgaccctggacagcgctggccgggtgtgggtggccgaccggggcaacaagaggatccaggtgtttgacaaggacaccggggagtggctgggcgcctggaacaactgcttcacagaggagggccccagctctgtgcgcttcaccccagatggcaagtacctgattgtggcccagctgaacctgagccggctgtctgtggtggccgcccctcctgtgggcagcattggagaatgttctgtcatcagcaccatccagctggccgaccaggtgctgccccacctgctggaggtggacaggaagacaggagctgtgtatgtggccgagattggagccaagcaggtgcagaagtatgtgcccctgaacagctatgtgcccagctttggcagctag

SEQ ID NO: 25331 - DNA, 3549 bp, Artificial Sequence
  derived and/or modified sequence
ggtggccactgaaagtcagcggcgcggactgccctgagggcgggaaagggtggtcactgggtcagcccgaagcacctgacatgagggcggggaccccgaaatgcacacgaagtccggaactggtcttctgtgattttcattcgccctggtctctgttccctttcgtactcaaagctcgtgcatccagggaggggaaaccggagatagggtcttcgggccccgggcagaccctctgtgccgctgcaaaccgttgcagcctgaggctgtcaggtcctcccccagacacctgcggaccctccctctcctggcttcccgtctggtcatggcgagattctgggtctgcgtagccggtgctggcttctttcttgcatttttggttttgcattcgcgtttttgtggctctccagttttgaggaactttacttttgcagtttcctggagaactgagaaaattctttaccggctggatgtgggttggcctaagcacccagaatattttaccggaacaacattttgtgttgcagttgactccctcaatggattggtttacataggtcaaagaggggataacatcccaaagatattagtgttcacagaggatggatatttcctacgagcctggaattatacagttgacacacctcatggtatatttgcagccagtactctatatgaacaatccgtctggatcacggatgtaggaagtggattctttggtcatactgttaaaaaatacagttcttttggtgatcttgttcaagtcttgggtactccaggcaaaaaaggcactagtttgaatcctttgcagtttgataacccagcagaattatatgtagaggacacaggagatatttacattgtggatggagatggaggattgaataacagattgatcaaactgtcccaagatttcatgatcctttggctgcatggagaaaatgggacagggcctgctaagttcaacatacctcacagtgttacacttgattcagctggtcgggtgtgggttgctgaccgaggaaataaaagaatccaagtatttgataaagacactggggagtggttaggagcatggaataattgtttcacagaagagggaccttcttcagtcaggtttactcctgatgggaagtacttgattgtggcccagctgaatcttagcaggctctcagtcgtagcagcacccccagtgggaagcattggggagtgttctgtgatcagcacaatccaactagcagatcaagttttgccacatctcctagaagtcgacagaaagactggagcagtctatgtagcagaaattggagcaaaacaagtacaaaaatatgtccctttgaatagctatgttccttcatttggttcataatgtttctttcctgggaatatttcaagtggcagttcagattctcaattcactaagtgcttaaaaatgatgttcaagcacaagaatttatttttctagtataaaagatctagtatcagaaagatttgtttttgtatcattaagaatcttatattttgttgccctcttgggacttagttttatttgtaagtgcataaggatattttaatgaaaggaaagtaactaaaaaatggggttgggaagagggactaaggtggtaacctcattatttgccctggtagactgattctccctgggtaaaaaaaatgggaataaaaatgagcttgcatgataatttattaaatttcatgtgaagaactccagacctccagattgtgcaactaacataaaatgagctgcttgagagattgtaaataagatgaactattgattaatttgagtacccacagagtgctgtgtcttgacgacttaaaaatgaaaaagcaggattgccttttgagtagcttgcagtctagtggggagacaagcaggcaaacagtcacaacacagcaaaagcgaccttggagcatagtgggacttttggagtaggagtgctgcatttgactgagggaatcatggatacttcgcaggagaagtgaatttgagctcagacttgaaaactgaggaggagcttaccaagggacaaggaggagaaaacaataatttccaagtaaagaaggtataaaaagttagaagtgtactgtaaactttgataggcttttaggccttttttaaagcccaacttggcttctgtccattacctataagatatttaatgtcagtcagcctttaaatgtaggaataaaatggctggcatctaagcactttagtaaaagaggtttttacaaataactaaggattgtagagcttccttctctttttttttctttttctttcttttgttttacatgaactcaacttattcctaacatttgtctacctcaaagaaatttcaagattatttagataacatggatatgtgccaaatcctttgagctgttaagatgataatttcctgctttcctcctacatcttctcctcccactccctcctttggtgtgaatattggcttcccaattaagacctttttttttttttttccagtttgttttagcttattataggttttggaggaactttgccattttgtaatctttcaaatcattcttcacccttcctcacatcagcttcctgcttttcccagtgttttactgtaaattgtgtagcatatgacaaatcttgagctgactttcctcttcacctgttatggctggagtattttccagacctgaagggactcacacttgttttgatacttggatcacatctccgtgaggttaggaaggtaaatctaccaacaggaagccctgtactctgtattccaaggccattggtaaatgtgttggtgccactgatcggactgtatgaccttaaacaagtcaccttagttttcagtgaaatgggaatatcattgtctcctctttcatgaatgctgtgagaatcagatgtgcaacaggtacagacttgccctttgaaatctatacctctggatacattagaggcattttattaacaaaggcccttctaaatgtgctatttatttgacaataactatcagatttgccttaattttgtgtttatagcatttatcaaaacgtatcctcatagactttatgcagattaatatggtcaattgatttggataaaagaaagtaatttcagggtttgtttttaagccaggacaagaagtgcaaatgcctctttgaagcaatttaggctaaactgattttgaaatttcaaaatgttttattttactttgttttattaagccaggacaagaagtgcaaatgcctctttgaagcaattcaggctaggtaaaccgattttgccatttcaaaacgttttattttactttgttttatatcagagtcttataaaacctgctgcaaatatttctgaatgtctttgtaaaagtgtttgttagtgtacctgtgattatagtacttcacttttttcctttggattaattggttaaatgaatgagaaatgtgttatgttttttactaaaaagtataaattaaaattttggaaagaaaaggcaatattatctggctccccaattaaagtttgattttattgtcacaaaa

SEQ ID NO: 25332 - DNA, 1044 bp, Artificial Sequence
  derived and/or modified sequence
atggcccggttctgggtgtgcgtggccggcgccggcttcttcctggccttcctggtactccatagccgcttctgtggatcccctgtgctgcggaacttcacattcgctgtctcctggagaaccgaaaaaatcctttacaggttggacgtcggctggcctaaacacccagaatacttcactggcactaccttctgtgtggcagtggactcgctgaatgggttggtatatatcggacagagaggggacaacatacccaagatccttgtgtttacagaagacggctattttcttcgagcgtggaactatacagttgatacgccccacgggatctttgcagcgagcaccttatacgagcagtccgtgtggatcaccgatgtggggtccggattcttcgggcatacagtgaagaagtattccagcttcggggatctcgtgcaagtgctcggtacaccgggcaaaaagggtaccagcctaaatccgcttcaattcgataacccagctgaactgtatgttgaggacactggagacatctatattgtagatggtgacggagggctgaacaatcgcctgatcaagctgtctcaagactttatgatactgtggctgcacggcgagaatggcacgggtccggccaaattcaacattcctcactcagttacgttggactcagccggcagagtgtgggtggcagaccgcggcaacaagcggatacaggtctttgacaaggacacaggagaatggctcggggcgtggaacaactgttttacagaagaaggcccttcctctgtgcgttttactcccgacggtaagtatctgattgtagcacagctgaatctctccagattgagtgtggtcgcagcccctcccgttggctctatcggagagtgtagtgtgatttctacaattcagctggctgatcaagtgctgccacacctcctggaggtcgatcggaagaccggagccgtctacgtggcagaaattggtgcgaagcaggtacaaaagtacgtgccgctgaactcctatgtcccgagctttggctcttag

SEQ ID NO: 25333 - RNA, 1044 nt, Artificial Sequence
  derived and/or modified sequence
auggcccguuuuuggguuugugucgcuggugcugguuuuuuucucgccuuucugguuuugcauagcagauucugugguucuccugucuugcgcaauuuuaccuucgccguguccuggcgcacugagaaaauucucuacaggcuagacgucggauggccuaagcaccccgaauacuuuaccggaaccacuuucugcguugcuguggacucacucaacggucugguguauauaggucaacgcggggauaacauuccuaaaauucugguguuuaccgaggacggauacuuccuaagagcuuggaacuacacaguugacacaccgcacggcauuuucgcggcuuccacuuuguaugaacaguccgucuggauuaccgacguggguagcggcuuuuucggacacacgguuaaaaaguauagcuccuucggggaucugguccaggugcuggggacaccagggaaaaaaggaaccagucugaauccuuuacaguucgacaauccugccgaacuguauguggaggacacaggggauauauacauaguggacggugaugggggccugaauaauaggcuaauuaaauugucucaagauuucaugauucuuugguugcauggcgaaaacgggacgggaccagccaaguuuaacauaccucacagugugacacuugauuccgccggccguguaugggucgcugaccgggguaauaagaggauccagguguuugauaaagauacaggagaguggcucggugcuuggaacaacuguuucacagaagaaggacccucuagcgugcgguucacaccagacggaaaauauuuaaucguugcgcagcuuaaucucuccagacuuagcgugguggcagcaccuccugucgguagcauuggcgagugcucagugauuaguaccauacaguuagcagaccaggugcucccacaucugcucgaagucgaucgcaagaccggcgccguuuacguugccgagaucggcgccaaacaggugcaaaaauaugugccacugaacucauaugugccaagcuuugguagcuag

SEQ ID NO: 25334 - RNA, 1044 nt, Artificial Sequence
  derived and/or modified sequence
auggcccguuuuuggguuugugucgcuggugcugguuuuuuucucgccuuucugguuuugcauagcagauucugugguucuccugucuugcgcaauuuuaccuucgccguguccuggcgcacugagaaaauucucuacaggcuagacgucggauggccuaagcaccccgaauacuuuaccggaaccacuuucugcguugcuguggacucacucaacggucugguguauauaggucaacgcggggauaacauuccuaaaauucugguguuuaccgaggacggauacuuccuaagagcuuggaacuauacgguggauacaccgcacggaauauucgcugccuccacauuguaugagcagucuguguggauuaccgauguaggcucugguuucuuugggcauaccgucaagaaguauaguaguuuuggggaucuagugcaggugcugggaacuccgggaaagaagggcacaaguuugaacccacuucaauucgacaacccagcagagcucuauguugaagauacaggggauaucuauauuguugacggagauggcggccugaacaauagacugauuaaacuuucacaggacuuuaugauacugugguugcauggcgaaaacgggacgggaccagccaaguuuaacauaccucacagugugacacuugauuccgccggccguguaugggucgcugaccgggguaauaagaggauccagguguuugauaaagauacaggagaguggcucggugcuuggaacaacuguuucacagaagaaggacccucuagcgugcgguucacaccagacggaaaauauuuaaucguugcgcagcuuaaucucuccagacuuagcgugguggcagcaccuccugucgguagcauuggcgagugcucagugauuaguacaauccaacuggcugaccaagugcucccacaucuccuggagguggauaggaagacaggugcuguguaugucgcggaaaucggggcaaagcaaguucagaaguacguuccacucaauucuuauguucccagcuuuggaucauag

SEQ ID NO: 25335 - protein, 412 aa, Artificial Sequence
  derived and/or modified sequence
MIGMLESLQHESDLLQHDQIHTGEKPYECNECRKTFSLKQNLVEHKKMHTGEKSHECTECGKVCSRVSSLTLHLRSHTGKKAYKCNKCGKAFSQKENFLSHQKHHTGEKPYECEKVSIQMPTIIRHQKNHTGTKPYACKECGKAFNGKAYLTEHEKIHTGEKPFECNQCGRAFSQKQYLIKHQNIHTGKKPFKCSECGKAFSQKENLIIHQRIHTGEKPYECKGCGKAFIQKSSLIRHQRSHTGEKPYTCKECGKAFSGKSNLTEHEKIHIGEKPYKCNECGTIFRQKQYLIKHHNIHTGEKPYECNKCGKAFSRITSLIVHVRIHTGDKPYECKVCGKAFCQSSSLTVHMRSHTGEKPYGCNECGKAFSQFSTLALHMRIHTGEKPYQCSECGKAFSQKSHHIRHQRIHTH

SEQ ID NO: 25336 - DNA, 1239 bp, Artificial Sequence
  derived and/or modified sequence
atgatcggcatgctggagagcctgcagcacgagagcgacctgctgcagcacgaccagatccacaccggcgagaagccctacgagtgcaacgagtgcagaaagaccttcagcctgaagcagaacctggtggagcacaagaagatgcacaccggcgagaagagccacgagtgcaccgagtgcggcaaggtgtgcagcagagtgagcagcctgaccctgcacctgagaagccacaccggcaagaaggcctacaagtgcaacaagtgcggcaaggccttcagccagaaggagaacttcctgagccaccagaagcaccacaccggcgagaagccctacgagtgcgagaaggtgagcatccagatgcccaccatcatcagacaccagaagaaccacaccggcaccaagccctacgcctgcaaggagtgcggcaaggccttcaacggcaaggcctacctgaccgagcacgagaagatccacaccggcgagaagcccttcgagtgcaaccagtgcggcagagccttcagccagaagcagtacctgatcaagcaccagaacatccacaccggcaagaagcccttcaagtgcagcgagtgcggcaaggccttcagccagaaggagaacctgatcatccaccagagaatccacaccggcgagaagccctacgagtgcaagggctgcggcaaggccttcatccagaagagcagcctgatcagacaccagagaagccacaccggcgagaagccctacacctgcaaggagtgcggcaaggccttcagcggcaagagcaacctgaccgagcacgagaagatccacatcggcgagaagccctacaagtgcaacgagtgcggcaccatcttcagacagaagcagtacctgatcaagcaccacaacatccacaccggcgagaagccctacgagtgcaacaagtgcggcaaggccttcagcagaatcaccagcctgatcgtgcacgtgagaatccacaccggcgacaagccctacgagtgcaaggtgtgcggcaaggccttctgccagagcagcagcctgaccgtgcacatgagaagccacaccggcgagaagccctacggctgcaacgagtgcggcaaggccttcagccagttcagcaccctggccctgcacatgagaatccacaccggcgagaagccctaccagtgcagcgagtgcggcaaggccttcagccagaagagccaccacatcagacaccagagaatccacacccactag

SEQ ID NO: 25337 - DNA, 1239 bp, Artificial Sequence
  derived and/or modified sequence
atgatcgggatgctggagtccctgcagcatgaatcagatctcctccagcatgatcagatccacactggcgagaagccttacgaatgtaatgagtgccgcaaaactttttccctgaaacaaaatctagtcgaacacaaaaaaatgcacacaggtgaaaagagccatgaatgtactgaatgcggcaaggtgtgtagtcgtgttagctccttgaccttacatctgcgttcccatactgggaaaaaggcttataaatgtaataaatgcggtaaagcattctcgcagaaggagaattttcttagccaccagaagcaccacactggtgagaaaccatacgagtgtgagaaggtatcgatccagatgcccacaatcatcagacaccaaaaaaatcacactggcacaaagccctatgcctgtaaggaatgtggaaaagcctttaatgggaaggcttacttaaccgagcatgagaaaattcataccggcgagaaaccgtttgagtgcaaccagtgcgggcgggctttttcccagaagcaatatctgattaagcaccagaacatccacaccggaaaaaaaccttttaagtgctcagagtgtggtaaagcctttagccagaaagaaaacctcatcatacaccaacggatccacacgggcgaaaagccctacgaatgtaagggctgtggtaaggctttcatccagaaatcctctttgattcggcaccagagaagccacacaggtgaaaaaccttacacctgcaaagagtgcggcaaagcattttccgggaagagtaatctcacagagcacgagaagatccacattggggagaaaccttacaaatgcaacgagtgtgggacaatcttccggcagaaacagtacttaattaagcatcacaacattcacacaggggagaagccttatgaatgtaataagtgcggcaaagctttttctcgaattaccagcctcattgtgcacgtccgcattcacacaggggataaaccctacgaatgtaaagtgtgcgggaaggctttttgtcagtctagctccttgaccgtccatatgcgatcccacacaggagaaaagccctacgggtgcaatgagtgcgggaaagcatttagccagttcagtactcttgcgctccatatgcgcatccacacaggtgagaagccctaccagtgttctgaatgcggtaaagcgttttcacagaagagccaccacatccggcaccagcggatccatacacactag

SEQ ID NO: 25338 - DNA, 1239 bp, Artificial Sequence
  derived and/or modified sequence
atgataggcatgctggagagcctgcagcatgagtccgatctgcttcaacacgaccagattcacaccggtgaaaagccctatgagtgcaacgaatgtcggaagacatttagtttgaagcagaacttagtggagcataagaagatgcatactggagaaaagagtcatgaatgcaccgagtgtggaaaggtttgttcgagagtgagcagcctgaccctgcacttacgatcacacactggcaaaaaagcgtataagtgtaacaagtgtggcaaggcgtttagtcaaaaagagaacttcctgtcccaccagaaacatcacacaggggaaaagccatacgagtgtgagaaggtctctatccagatgccaaccattatccgccatcagaaaaatcacaccgggaccaagccctacgcttgcaaagagtgtggcaaggcttttaatgggaaggcctacttgacagaacatgaaaagatccataccggcgaaaagccctttgagtgcaaccagtgcggcagagctttctcccagaaacaatacctcattaaacaccagaacattcacacgggcaaaaaaccctttaagtgctctgagtgcggcaaggccttcagccagaaggagaacttaattatacatcagcgtatccatacgggggagaagccctatgagtgtaaggggtgcggaaaggccttcatacagaaaagcagcttgattagacatcagagaagccatacaggcgagaagccctacacttgcaaggaatgcggaaaggccttcagtgggaaatcaaacctgacagagcatgagaagatccatataggtgagaagccttataagtgcaacgagtgcggtaccatattcaggcagaagcagtaccttattaagcaccataacatccacactggcgaaaaaccttacgagtgtaacaagtgcgggaaagccttctctcgcattacatcgttaattgtgcatgtgcggattcataccggggacaagccttatgaatgcaaagtatgtggcaaagccttctgccaatcctcttccctgacggtgcacatgcggtctcataccggtgaaaaaccttatgggtgtaatgagtgcggtaaggctttctctcagttttcaacgctggcactgcatatgagaatccacactggagaaaaaccttaccaatgcagcgaatgtggtaaggcctttagccaaaagtcgcaccacattcggcaccagcgcatccatacacactag

SEQ ID NO: 25339 - DNA, 1239 bp, Artificial Sequence
  derived and/or modified sequence
atgattggcatgctggagagcctgcagcacgagagtgacctgctgcagcacgaccagatccacactggagagaagccctatgagtgcaatgaatgtaggaagaccttcagcctgaagcagaacctggtggagcacaagaagatgcacactggagagaagagccatgagtgcacagaatgtgggaaggtgtgcagccgggtgagcagcctgaccctgcacctgcggagccacacaggcaagaaggcctacaagtgcaacaagtgtgggaaggccttcagccagaaggagaacttcctgagccaccagaagcaccacactggagagaagccctatgaatgtgagaaggtgtccatccagatgcccaccatcatccgccaccagaagaaccacacaggcaccaagccctatgcctgcaaggaatgtgggaaggccttcaacgggaaggcctacctgacagagcacgagaagatccacactggagagaagccctttgagtgcaaccagtgtggccgggccttcagccagaagcagtacctgatcaagcaccagaacatccacacaggcaagaagcccttcaagtgcagtgaatgtgggaaggccttcagccagaaggaaaatctcatcatccaccagaggatccacactggagagaagccctatgaatgtaaaggctgcggcaaggccttcatccagaagagcagcctcatccgccaccagaggagccacactggagagaagccctacacctgcaaggaatgtgggaaggccttcagcggcaagagcaacctgacagagcacgagaagatccacatcggggagaagccctacaagtgcaatgaatgtggcaccatcttccggcagaagcagtacctgatcaagcaccacaacatccacactggagagaagccctatgagtgcaacaagtgtgggaaggccttcagccgcatcaccagcctcatcgtgcacgtgcgcatccacactggagacaagccctatgagtgcaaggtgtgtgggaaggccttctgccagagcagcagcctgactgtgcacatgaggagccacactggagagaagccctacggctgcaatgaatgtgggaaggccttcagccagttcagcaccctggccctgcacatgaggatccacactggagagaagccctaccagtgcagtgaatgtgggaaggccttcagccagaagagccaccacatccgccaccagaggatccacacccactag

SEQ ID NO: 25340 - DNA, 1239 bp, Artificial Sequence
  derived and/or modified sequence
atgatcggcatgctggagagcctgcagcacgagagcgacctgctgcagcacgaccaaattcataccggggaaaagccatacgaatgtaacgagtgtaggaagaccttttcgctaaagcagaatcttgtggagcacaaaaagatgcataccggggagaaatcccacgagtgcacggaatgtggcaaggtgtgcagtagagtctcctcgttgaccctccatctgagatctcacactggcaagaaagcgtataagtgcaataaatgcggaaaagctttcagccagaaggaaaacttcctttctcatcagaagcaccataccggagagaagccctatgaatgcgagaaggtgtccatccagatgcccaccatcattcgtcaccagaaaaaccatacgggaacaaagccctatgcctgtaaagagtgcggtaaggccttcaatggaaaagcatacctgaccgagcacgaaaaaatccacacgggagagaagcctttcgaatgcaatcaatgcgggcgggccttttctcaaaaacagtaccttattaaacaccagaatattcatacaggcaagaagccctttaagtgtagtgaatgcggaaaggctttttcgcaaaaggagaacctaataatccatcaaagaatacacaccggggaaaagccgtacgaatgtaaaggttgcggcaaggcctttatccagaagtctagtctaatcaggcatcagcgctcccatacaggggagaagccctacacctgtaaggagtgcggcaaggcattttcaggaaaaagtaacctcaccgagcacgagaagattcacattggcgagaaaccatataagtgtaacgaatgcggcactatttttagacagaagcaatatcttatcaaacatcataatatccacacgggtgagaaaccctacgaatgtaacaaatgtggcaaagctttctctagaatcacaagcttgattgtgcatgtgaggatccacacaggagacaagccctacgagtgcaaagtatgtgggaaggccttttgtcagtcaagcagtctcaccgtgcatatgagaagtcatacaggagaaaaaccttatggttgcaatgagtgtggtaaggcatttagccagttttccacgctggcccttcacatgcgtattcacaccggcgagaaaccatatcagtgctcagagtgtgggaaggcctttagtcaaaaaagccatcacatcaggcaccaaagaatccacacgcactag

SEQ ID NO: 25341 - DNA, 1239 bp, Artificial Sequence
  derived and/or modified sequence
atgatcggcatgctggagagcctgcagcacgagagcgacctgctgcagcatgatcagattcataccggggaaaaaccctatgagtgcaacgagtgtcggaagacctttagcttgaagcagaacctcgtggagcacaagaagatgcacacaggggaaaaaagtcacgagtgcaccgagtgcggcaaggtctgcagtcgagtgtcttccctgactctgcaccttcggtctcacacaggaaaaaaagcctacaagtgcaataagtgcggaaaggcgttttcccagaaggagaatttcctcagccaccaaaagcatcatacgggcgaaaagccctatgagtgcgagaaggtttcaatacagatgccgacaatcattcggcatcagaaaaatcatacgggaacgaagccatacgcttgtaaagagtgtggcaaggcattcaatggaaaggcgtatctgacagaacatgaaaaaattcatactggggaaaagcccttcgagtgtaatcagtgcggccgtgccttcagccagaagcagtacctcatcaagcaccaaaatatccatactggcaagaagccatttaaatgctcagagtgcggaaaagcgttttcgcagaaggaaaacttgatcattcatcagaggatacacacaggagaaaagccctacgaatgtaagggttgtggaaaggcctttatccaaaagagtagtttgataaggcaccagcggtctcacactggcgagaagccttatacctgcaaggagtgcggtaaggccttctccggaaaaagcaacctcacagagcatgaaaagattcacattggggaaaagccttacaagtgtaacgagtgcggaacaatatttcgtcaaaagcagtacctgatcaagcatcataatatccacacaggagaaaaaccgtacgaatgtaacaagtgtggaaaggcgttctctaggattacctctctgatagtgcacgtgcgcatccatacaggggacaaaccatacgaatgcaaggtgtgtgggaaggccttctgccagtctagtagccttaccgtgcacatgcggagccataccggtgagaagccctacggatgcaatgaatgcggtaaggcattctcacaattctccactttggcgctgcacatgcgaattcatactggggagaagccctaccagtgctctgagtgtggaaaggccttttctcagaagtcacatcacatcaggcaccagcgaatccacacccactag

SEQ ID NO: 25342 - DNA, 1239 bp, Artificial Sequence
  derived and/or modified sequence
atgattggcatgttggaatctttgcagcacgagtccgatctgctccagcatgaccagattcacactggggaaaaaccttacgagtgcaatgaatgccgcaagaccttcagcctgaagcagaatctcgtggaacataagaagatgcatacaggggagaagagccatgagtgcacagaatgcggaaaagtgtgctcccgcgtgtcatccctcactctgcatttgagaagccacactggaaaaaaggcgtacaagtgcaacaagtgtggcaaagccttctcacagaaggaaaattttcttagccaccagaaacaccacactggagagaagccctatgagtgtgagaaggtgagtattcaaatgccaaccatcatccggcatcagaagaatcacactggaacaaagccctatgcatgcaaggagtgcgggaaagcctttaacggaaaggcctacctgaccgaacacgaaaagattcacacaggggaaaaaccttttgagtgcaaccagtgtgggcgtgccttctcccagaagcaatacttgatcaaacatcagaatatccatactgggaagaaaccattcaagtgcagtgaatgcggaaaggcctttagtcagaaggagaacttaattattcaccagcgcatccacacaggcgagaagccctacgagtgtaaagggtgcggcaaggcttttatccagaaatccagcctaatcaggcaccagcggtctcatacaggggagaaaccctatacatgtaaggagtgcggcaaagccttctctggaaaatccaacttaacagaacacgagaagattcacatcggcgaaaaaccctataagtgcaatgagtgtgggactatttttcgacagaaacaatatctaattaagcaccataatatacataccggggaaaagccgtacgaatgtaataagtgcgggaaagccttctctagaattacatcactcatcgtgcacgtccggatacatacaggcgacaagccatacgagtgcaaggtttgcggtaaggcattctgccagagcagttccctgaccgtgcatatgcggagtcataccggggagaagccatacgggtgcaatgagtgcgggaaggcgttttcacagttttcaaccctggccctacatatgagaatacatactggagaaaagccatatcagtgcagcgagtgcggtaaagccttcagtcagaagagccaccatatcaggcaccagcgaatccacacgcactag

SEQ ID NO: 25343 - DNA, 1239 bp, Artificial Sequence
  derived and/or modified sequence
atgatagggatgttggaatcccttcagcatgagtccgatctgcttcaacacgaccaaatccatactggagaaaaaccctatgaatgcaacgaatgcaggaagaccttttcgttaaagcagaacctggttgagcacaagaagatgcacaccggggaaaagtcacacgaatgtaccgagtgtggcaaggtgtgttctcgggtctcttccctgaccttgcacctgaggtcacatacaggaaaaaaggcctacaagtgcaacaaatgcggcaaagccttctctcagaaagaaaacttcttaagccatcagaagcatcacacaggagaaaaaccctatgagtgcgaaaaagtaagcatccagatgcctacaattatacggcaccaaaagaatcacaccggcacaaagccttacgcatgtaaagaatgcgggaaggccttcaacggaaaagcctatctcactgagcacgagaagattcacacaggggaaaaaccatttgagtgcaaccagtgtggtcgggctttctcacagaaacagtacctgataaagcaccagaatattcatactggcaagaagccctttaagtgttctgagtgtggtaaagccttttcacagaaagagaatctgattattcatcaaagaattcacacaggcgaaaagccctatgagtgtaaaggctgcggtaaggctttcatccagaagtcctctctgatcaggcatcagcggagtcacactggcgagaagccctacacctgtaaagaatgcggtaaggccttctctggcaaaagcaatctcaccgaacatgaaaagatccatatcggagagaagccctacaagtgtaacgaatgtggtacaatttttaggcaaaaacaatatctaataaagcaccataacatccataccggtgaaaagccgtatgaatgtaacaagtgtgggaaagctttctctaggatcacctccttgattgtgcacgtgcgtatccatacaggtgacaagccttatgaatgcaaggtctgcggcaaggctttctgccagtcatccagtctcacagtccacatgcgatcacacaccggtgaaaaaccatacgggtgcaacgaatgcggaaaagctttttcacagttttctactctggccctgcacatgcgaattcataccggtgagaagccgtaccagtgttccgagtgcgggaaggccttctcccagaaatcccaccacatacgccaccagcgcatccacacccactag

SEQ ID NO: 25344 - DNA, 5666 bp, Artificial Sequence
  derived and/or modified sequence
ccggcttgagcccagccaaagggattaccctcattcccgaaccgtgtctgagagtctcctggggttcctggcttagtatcgcaccgtggctgttacataaagtcagcacagcgtgtttaagctgatgttacaccactacccaatcccagggatagagtaaactaagactaaggccttacacccctgccccggccagggagacagtcccacaagctctggcggaggaaaagttcgcgcgaaaagctgactcaaaccgctgaaccttctgggaaatgtagtctaccctcaaaagagtggcacggaggacgggccaagatctctcgattccgtccggttctgagtcggggcctggcccagcccaggagacctctgggagcgctgcccgcggaaggagtgcgcaggcgcggaatctccgacttgccatggtcgtctttgtctgccggcctgcttccttgtatatccacaggagctgcaaaacctcttagagttctaagggcgctccctgaattttgggatgctgctttgttccccaaccataacatccaagtccagtgtcatttttctgctcacaagtttaaagtcagcacttaaaagaacagcaacagatgattgagaaagaaatgtaaagaaggttctctttgtgtgagtaagcaagaacctgaagaagcctgggaagtttataaacagataaagacgcaacatgaaagacttgtaagttaagtctcatctttctctgtgaaaagacagactgagggaaaatttaggaaacaaagtatttcctctgaacagtcattgattcttcaagactacccttctgtgtatggaactcagtttaaaagaatttgaaacctaatttatatacaatctatacctaaatatgggagaagctatataagaaccattaagaatataaagagaatgttacattttatccctttttgtaatcatctcatctcagggtaatcaatgtgagaaaagtcttccatcataaatttaacttcattagatacctgagaattaatattgaaaatacaccatatgaatttagtgaatgtgggaaagctttcatccttattacatcttatttgatactagggaaatctcctgattaaattcacatgcatgataggcatgttggaaagtcttcagcatgaatcagatctccttcagcatgatcaaattcatactggagagaaaccttatgaatgtaatgaatgtagaaaaacttttagcctgaagcaaaaccttgtagagcataagaaaatgcatactggagagaaatctcatgaatgcactgaatgtggtaaagtgtgctctcgagtctcatctcttactctacaccttagaagtcacacaggaaagaaggcatataaatgtaataaatgtggaaaagccttcagccagaaggaaaacttcctttctcatcagaaacatcacactggagagaaaccttatgaatgtgaaaaagtttctattcagatgccaaccatcatcagacaccagaaaaatcatacaggaaccaaaccctatgcatgtaaggaatgtggcaaagcctttaacggcaaagcatatctcactgagcatgagaaaattcatactggagaaaaaccatttgaatgtaatcagtgtggaagagccttcagccagaagcaatacctcattaaacatcagaacatccatactggaaagaagccctttaaatgtagtgagtgtggaaaagcttttagccagaaggaaaacctcattatacatcagagaatccatactggagagaaaccttatgaatgtaaagggtgtgggaaagctttcattcagaagtcaagcctcattagacaccagagaagtcacacaggagagaaaccttatacgtgtaaggaatgtgggaaagccttcagtggcaagtcaaatctcacagagcatgagaaaattcatattggagagaaaccctacaaatgtaatgaatgtggaacaatcttcaggcagaagcaatacctcattaaacatcacaatattcatacaggagagaaaccctatgaatgtaataaatgtggaaaagccttctctcgaatcacatcacttattgtacatgtgagaattcatacaggtgataagccttatgagtgtaaggtctgtgggaaagccttctgtcaaagctcatctcttactgtgcatatgagaagccatacaggtgagaaaccctatggttgtaatgaatgtgggaaagccttttctcagttctcaacccttgctctgcacatgagaatccatactggtgaaaaaccttatcagtgtagtgaatgtgggaaagctttcagccaaaagtcacatcacattagacaccagagaattcatactcattaaagttctctatgaatgccttggatttagcaaaacgttcagcagattttacacttaatagtgtattggaaaattcattttacattaaagtgacatgaatgtgggaagtccttcagcagcaattcaaaacttaaatactatgatgtttaataagtattatagtgtaaagaaaacccgtacccccaaaactcccacaacaagcattatcaatgctgtacttctaggagtatactcattaaagttaggatctagtcatggacactacttaatgtgttcctggaaggcctacagatgcattaagaaatagatatgagatgtatgaggatttgaaattaagagacaaaattatcatttttgtgatgttttgctacatatatgaattgtaaaactagaatcatcaaaattatttgttgttgaagcagtcataaaactgagactgagacagaatattgaattcagaaatgtgtgcatgaatatatggggaattggtaattgatagaggcggtatcccagattggtggggaaatcatggattacttaaaaattaattgactcttcatatggaaaaataatatctcccatcataatataaaatatttttcttatgaattcttaaagtactaaagactaaaatgcaaaaagcaatacttaataatataacagttttataagaagatgtttttaaaaccttagggcaggaaagaacttctaaaacattccagaatacccggtagttccactcttgagtatggtagtcccctattttctgcaagagatggactctaagacccccagtggatacctaaaacccagataggaccaaactctatgtctatgtttttttcttatatatacatacctatgataaaatttagtttacagattagacacagcaagagatttaaaacaataataaacataatatggaacaattataacaatatactgtaatcataaaagttatgtgaatatgatctttctctcagaataccttattgtactgttctcaactatttatgaactgtggtgactacaggtaactgaaaccatggaaagcaaagctgtggataagggggaactactatatatatgcatctacccaagaaacatgaacacagggagtcatgtactggtctatagctgtatagttcattgcaccatgagttatagtagccagaagttgggaaacaaatgctgtctcttgtgaaatagatgaataaaatgtgatagtaacatagtagagtactctctagcagttaagtgacaaattaagtctatatattaacagaaatatttttaaaaaattagagtgaagaaaaatgatgaacatattgtaatgatgcttctgtgaatttgaataaaatcaacactaaccagccctagtactaagaattggttatggataaattatgtaaaactaaagaatggattgaaaggatatgtatatactcagttcccaaaagtggagtggttacctctaggaagaaaggaggtggaagggaaatgttaccaagcatggtagttaaaggatacttcaattttgtatctatttcttattaaaaagaaacattctaagtaaacataacgaaatattaattctgggtggtggtaatatttgtgttcattctatcattcgtgctatttatttccttaaacttctgaaagttaaaaagtccagataggagtgaggaagctgtacatgaaacataatggacttacattcctagtcagatactaatattctgtagaagatatttctaaaatcttatctttaaaatatgaaataatttttaattggggtggcaacttaaattcaattaaaataactcatgtgtcacaagagtaaattttacataatctgtacgtagttctaatctgtatatagtcttggaggttatgatttgccacagattggttggatcacatacatttaaggatcatattattaaataatatatgcacagacatggagagaattagtttttactaaaacatttatcagaaattttaatactctgcataaccagtattagcattagaaattagccacttttaaaatgagaaaactgtgtcactcttcaatttttttataagccattgaggaaaacattaactcctggatttcagcttcacttttaacctgcagactaaatttctttctcaattatgtcagacacacccaagtcaatcccaacccccttgttaccttgggaagaccgtgctgaaaaaggagatcttccacctaaacagtgttctcttatttgaagcaaatctttttgagaatttgtttacttgatttctttccacaataaactgacagagaacgctactaatgatttttttttttttttgagacggagttttgttcttgttgcccaggctgcagtgcaatggcacaatcttggctcactgcaacctctgcctcacaggttcaagtggttctcctgcctcagcctcttgagtagctgggattacaggcatgcgccaccatgcccggctaattttgtatttttagtagagacggagttgcaccatgttggccaggctggtcttgaattcctgacctcaggtgatccacctgcttcggcctcccaaagtgctaggattacaggtgtgagccaccacgcctggctaattttgtatttttagtagagatggggtttctccaaaggctggtcttgaactcccgacctcaggtgatccgcccaccttggcctcccgaagtgctgggattacaggcgtgagccaccgtgcccggcctgatgtttttgaatgattatgaaaatgggtatacagcattaaaaccttagactgattttaaatatattaatttcttttaaactcaatataatgttaatattactgtagcacttactagcatttctgaaggttggtcttgagataagattgaaaatgacagttgttgattttctgaggtaatatacccaaataaaatatatgtatgtgtacatgaatctaaactgtcttcttctgttcctcattttgctttacttaaataatctttcatattttttaagtgttttgcccatgtgcttgggtagccttgaagtcaccagaataactaggactcaaattcagaccaaaccaggactagctttttgtgccatgagttagccatggtcctggacccagcaaaaagaatgattatgatggtcagagtaagatgagcaattgcaacataatattctctaatattgtatactgtaaatttattcagctgccctcgtttactcacagtttgcttatttgccaccataagaaatggtacaataaaaattcatgtaatc

SEQ ID NO: 25345 - DNA, 5055 bp, Artificial Sequence
  derived and/or modified sequence
agtgcgcaggcgcggaatctccgacttgccatggtcgtctttgtctgccggcctgcttccttgtatatccacaggagctgcaaaacctcttagagttctaagggcgctccctgaattttgggatgctgctttgttccccaaccataacatccaagtccagtgtcatttttctgctcacaagtttaaagtcagcacttaaaagaacagcaacagatgattgagaaagaaatgtaaagaaggttctctttgtgtgagtaagcaagaacctgaaaataattcttccgggccgggtgcggtggctcatggctgtattcccagcactttgggaggccaaggcgggtggatcatgaggtcaggagttcaagaccagcctggccaacatgaagaagcctgggaagtttataaacagataaagacgcaacatgaaagacttgtaagttaagtctcatctttctctgtgaaaagacagactgagggaaaatttaggaaacaaagtatttcctctgaacagtcattgattcttcaagactacccttctgtgtatggaactcagtttaaaagaatttgaaacctaatttatatacaatctatacctaaatatgggagaagctatataagaaccattaagaatataaagagaatgttacattttatccctttttgtaatcatctcatctcagggtaatcaatgtgagaaaagtcttccatcataaatttaacttcattagatacctgagaattaatattgaaaatacaccatatgaatttagtgaatgtgggaaagctttcatccttattacatcttatttgatactagggaaatctcctgattaaattcacatgcatgataggcatgttggaaagtcttcagcatgaatcagatctccttcagcatgatcaaattcatactggagagaaaccttatgaatgtaatgaatgtagaaaaacttttagcctgaagcaaaaccttgtagagcataagaaaatgcatactggagagaaatctcatgaatgcactgaatgtggtaaagtgtgctctcgagtctcatctcttactctacaccttagaagtcacacaggaaagaaggcatataaatgtaataaatgtggaaaagccttcagccagaaggaaaacttcctttctcatcagaaacatcacactggagagaaaccttatgaatgtgaaaaagtttctattcagatgccaaccatcatcagacaccagaaaaatcatacaggaaccaaaccctatgcatgtaaggaatgtggcaaagcctttaacggcaaagcatatctcactgagcatgagaaaattcatactggagaaaaaccatttgaatgtaatcagtgtggaagagccttcagccagaagcaatacctcattaaacatcagaacatccatactggaaagaagccctttaaatgtagtgagtgtggaaaagcttttagccagaaggaaaacctcattatacatcagagaatccatactggagagaaaccttatgaatgtaaagggtgtgggaaagctttcattcagaagtcaagcctcattagacaccagagaagtcacacaggagagaaaccttatacgtgtaaggaatgtgggaaagccttcagtggcaagtcaaatctcacagagcatgagaaaattcatattggagagaaaccctacaaatgtaatgaatgtggaacaatcttcaggcagaagcaatacctcattaaacatcacaatattcatacaggagagaaaccctatgaatgtaataaatgtggaaaagccttctctcgaatcacatcacttattgtacatgtgagaattcatacaggtgataagccttatgagtgtaaggtctgtgggaaagccttctgtcaaagctcatctcttactgtgcatatgagaagccatacaggtgagaaaccctatggttgtaatgaatgtgggaaagccttttctcagttctcaacccttgctctgcacatgagaatccatactggtgaaaaaccttatcagtgtagtgaatgtgggaaagctttcagccaaaagtcacatcacattagacaccagagaattcatactcattaaagttctctatgaatgccttggatttagcaaaacgttcagcagattttacacttaatagtgtattggaaaattcattttacattaaagtgacatgaatgtgggaagtccttcagcagcaattcaaaacttaaatactatgatgtttaataagtattatagtgtaaagaaaacccgtacccccaaaactcccacaacaagcattatcaatgctgtacttctaggagtatactcattaaagttaggatctagtcatggacactacttaatgtgttcctggaaggcctacagatgcattaagaaatagatatgagatgtatgaggatttgaaattaagagacaaaattatcatttttgtgatgttttgctacatatatgaattgtaaaactagaatcatcaaaattatttgttgttgaagcagtcataaaactgagactgagacagaatattgaattcagaaatgtgtgcatgaatatatggggaattggtaattgatagaggcggtatcccagattggtggggaaatcatggattacttaaaaattaattgactcttcatatggaaaaataatatctcccatcataatataaaatatttttcttatgaattcttaaagtactaaagactaaaatgcaaaaagcaatacttaataatataacagttttataagaagatgtttttaaaaccttagggcaggaaagaacttctaaaacattccagaatacccggtagttccactcttgagtatggtagtcccctattttctgcaagagatggactctaagacccccagtggatacctaaaacccagataggaccaaactctatgtctatgtttttttcttatatatacatacctatgataaaatttagtttacagattagacacagcaagagatttaaaacaataataaacataatatggaacaattataacaatatactgtaatcataaaagttatgtgaatatgatctttctctcagaataccttattgtactgttctcaactatttatgaactgtggtgactacaggtaactgaaaccatggaaagcaaagctgtggataagggggaactactatatatatgcatctacccaagaaacatgaacacagggagtcatgtactggtctatagctgtatagttcattgcaccatgagttatagtagccagaagttgggaaacaaatgctgtctcttgtgaaatagatgaataaaatgtgatagtaacatagtagagtactctctagcagttaagtgacaaattaagtctatatattaacagaaatatttttaaaaaattagagtgaagaaaaatgatgaacatattgtaatgatgcttctgtgaatttgaataaaatcaacactaaccagccctagtactaagaattggttatggataaattatgtaaaactaaagaatggattgaaaggatatgtatatactcagttcccaaaagtggagtggttacctctaggaagaaaggaggtggaagggaaatgttaccaagcatggtagttaaaggatacttcaattttgtatctatttcttattaaaaagaaacattctaagtaaacataacgaaatattaattctgggtggtggtaatatttgtgttcattctatcattcgtgctatttatttccttaaacttctgaaagttaaaaagtccagataggagtgaggaagctgtacatgaaacataatggacttacattcctagtcagatactaatattctgtagaagatatttctaaaatcttatctttaaaatatgaaataatttttaattggggtggcaacttaaattcaattaaaataactcatgtgtcacaagagtaaattttacataatctgtacgtagttctaatctgtatatagtcttggaggttatgatttgccacagattggttggatcacatacatttaaggatcatattattaaataatatatgcacagacatggagagaattagtttttactaaaacatttatcagaaattttaatactctgcataaccagtattagcattagaaattagccacttttaaaatgagaaaactgtgtcactcttcaatttttttataagccattgaggaaaacattaactcctggatttcagcttcacttttaacctgcagactaaatttctttctcaattatgtcagacacacccaagtcaatcccaacccccttgttaccttgggaagaccgtgctgaaaaaggagatcttccacctaaacagtgttctcttatttgaagcaaatctttttgagaatttgtttacttgatttctttccacaataaactgacagagaacgctactaatgatttttttttttttttgagacggagttttgttcttgttgcccaggctgcagtgcaatggcacaatcttggctcactgcaacctctgcctcacaggttcaagtggttctcctgcctcagcctcttgagtagctgggattacaggcatgcgccaccatgcccggctaattttgtatttttagtagagacggagttgcaccatgttggccaggctggtcttgaattcctgacctcaggtgatccacctgcttcggcctcccaaagtgctaggattacaggtgtgagccaccacgcctggctaattttgtatttttagtagagatggggtttctccaaaggctggtcttgaactcccgacctcaggtgatccgcccaccttggcctcccgaagtgctgggattacaggcgtgagccaccgtgcccggcctgatgtttttgaatgattatgaaaatgggtatacagcattaaaaccttagactgattttaaatatattaatttcttttaaactcaatataatgttaatattactgtagcacttactagcatttctgaaggttggtcttgagataagattgaaaatgacagttgttgattttctgaggtaatatacccaaataaaatatatgtatgtgtacatgaa

SEQ ID NO: 25346 - protein, 478 aa, Artificial Sequence
  derived and/or modified sequence
MIRKKRKRSAPPGPCRSHGPRPATAPAPPPSPEPTRPAWTGMGLRAAPSSAAAAAAEVEQRRSPGLCPPPLELLLLLLFSLGLLHAGDCQQPAQCRIQKCTTDFVSLTSHLNSAVDGFDSEFCKALRAYAGCTQRTSKACRGNLVYHSAVLGISDLMSQRNCSKDGPTSSTNPEVTHDPCNYHSHAGAREHRRGDQNPPSYLFCGLFGDPHLRTFKDNFQTCKVEGAWPLIDNNYLSVQVTNVPVVPGSSATATNKITIIFKAHHECTDQKVYQAVTDDLPAAFVDGTTSGGDSDAKSLRIVERESGHYVEMHARYIGTTVFVRQVGRYLTLAIRMPEDLAMSYEESQDLQLCVNGCPLSERIDDGQGQVSAILGHSLPRTSLVQAWPGYTLETANTQCHEKMPVKDIYFQSCVFDLLTTGDANFTAAAHSALEDVEALHPRKERWHIFPSSGNGTPRGGSDLSVSLGLTCLILIVFL

SEQ ID NO: 25347 - protein, 437 aa, Artificial Sequence
  derived and/or modified sequence
MGLRAAPSSAAAAAAEVEQRRSPGLCPPPLELLLLLLFSLGLLHAGDCQQPAQCRIQKCTTDFVSLTSHLNSAVDGFDSEFCKALRAYAGCTQRTSKACRGNLVYHSAVLGISDLMSQRNCSKDGPTSSTNPEVTHDPCNYHSHAGAREHRRGDQNPPSYLFCGLFGDPHLRTFKDNFQTCKVEGAWPLIDNNYLSVQVTNVPVVPGSSATATNKITIIFKAHHECTDQKVYQAVTDDLPAAFVDGTTSGGDSDAKSLRIVERESGHYVEMHARYIGTTVFVRQVGRYLTLAIRMPEDLAMSYEESQDLQLCVNGCPLSERIDDGQGQVSAILGHSLPRTSLVQAWPGYTLETANTQCHEKMPVKDIYFQSCVFDLLTTGDANFTAAAHSALEDVEALHPRKERWHIFPSSGNGTPRGGSDLSVSLGLTCLILIVFL

SEQ ID NO: 25348 - DNA, 1437 bp, Artificial Sequence
  derived and/or modified sequence
atgataagaaaaaagcgtaagagatcagcccctccaggtccctgccgaagccacggtccaaggcctgctaccgcacctgcccctccaccctcacccgaacccacccgcccagcttggacgggcatgggcctccgagctgccccttcctctgcggcagctgcggccgccgaggtggagcagaggcgtagccctggactatgccctcccccgttggagctgttactgctcctgctattctcccttgggctcctgcatgctggtgattgccagcagccagcgcagtgccgaatccagaagtgcacaacggattttgttagtttgacatctcatttaaatagtgccgtggacggattcgactccgaattctgtaaagccctgcgcgcctacgcaggttgcacgcaacgcacaagtaaagcatgccgtgggaacctggtctaccacagcgctgtgctagggataagcgacctaatgtcacagagaaactgctccaaggatggccctacgagctccactaacccagaggtaactcatgatccatgcaattatcactctcacgctggtgccagagaacaccggcgcggcgatcagaaccctccaagttaccttttttgtgggctgttcggcgatccccacctccgcacatttaaagataatttccagacttgcaaggtggagggtgcttggcccttgattgacaacaactatttgagcgttcaagtcaccaatgtacccgtggttccaggcagttccgcaacggccactaacaagatcactataatcttcaaggcacaccatgaatgcactgatcagaaagtctaccaggcagttactgatgacctgcccgccgcttttgtcgatggaacaactagcggaggcgacagtgatgcaaagagcctgcggatagtggagcgcgagtcagggcactacgtagaaatgcacgccagatacattggcactacagtgttcgttcgacaggtcggtcgctatctgacactcgcaattaggatgccggaggacttggcaatgtcatacgaggagagccaggacttgcagctctgcgtcaatggttgccctctgtctgagaggatcgacgatgggcaggggcaggtttctgccatactaggtcactcactgccaaggacttccttggtgcaggcgtggcccggttacacactcgagacagcgaacacacagtgtcatgagaagatgcctgtgaaggatatctatttccagtcatgcgtgtttgatttgctgaccacaggtgatgctaactttacggccgccgcacacagtgccttggaggacgtagaggccctccatccacgaaaggagcgctggcacatttttccaagttccggaaacggcacacccagaggcggcagtgacctgtcagtctccttgggacttacctgcctgattctgatcgtatttctgtag

SEQ ID NO: 25349 - DNA, 1437 bp, Artificial Sequence
  derived and/or modified sequence
atgatcaggaagaagaggaagaggtctgcccctcctggcccctgccgcagccacggccccaggcctgccacagccccagcccccccacccagccctgagcccaccaggcctgcctggacaggcatgggcctgcgggccgcccccagcagcgctgctgctgctgctgctgaggtggagcagaggaggagccctggcctgtgccccccacccctggagctgctgctgctgctgctcttcagcctgggcctgctgcacgccggggactgccagcagcctgcccagtgccgcatccagaagtgcaccacagactttgtgtccctgaccagccacctgaacagcgctgtggatggctttgacagcgagttctgcaaggccctgcgggcctatgccggctgcacccagaggaccagcaaggcctgccggggcaacctggtgtaccacagcgctgtgctgggcatcagtgacctgatgagccagaggaactgcagcaaggatggccccaccagcagcaccaaccctgaggtgacccatgacccctgcaactaccacagccacgccggggcccgggagcaccggcggggggaccagaacccccccagctacctgttctgtggcctgtttggagacccccacctgcggaccttcaaggacaacttccagacctgcaaggtggagggcgcctggcccctgattgacaacaactacctgtctgtgcaggtgaccaacgtgcctgtggtgcccggcagcagcgccacagccaccaacaagatcaccatcatcttcaaggcccaccacgagtgcacagaccagaaggtgtaccaggccgtgacagatgacctgcctgctgcctttgtggatggcaccaccagcggcggggacagtgatgccaagagcctgagaattgtggagcgggagagcggccactacgtggagatgcacgcccgctacatcggcaccaccgtgtttgtgcggcaggtgggccgctacctgaccctggccatccgcatgcctgaggacctggccatgtcctatgaggagagccaggacctgcagctgtgtgtgaatggctgccccctgtctgaaagaattgatgatggccagggccaggtgtctgccatcctgggccacagcctgcccaggaccagcctggtgcaggcctggccaggctacaccctggagacagccaacacccagtgccacgagaagatgcctgtgaaggacatctacttccagagctgtgtgtttgacctgctgaccactggagatgccaacttcaccgctgctgcccacagcgccctggaggatgtggaggccctgcaccccaggaaggagcgctggcacatcttccccagcagtggaaatggcaccccccggggcggcagtgacctgtctgtgtccctgggcctgacctgcctgatcctgattgtgttcctgtag

SEQ ID NO: 25350 - DNA, 1437 bp, Artificial Sequence
  derived and/or modified sequence
atgatccggaagaagcggaagcggagcgccccccccggcccctgccggagccatgggcctcgccccgcaaccgctccggcacctccacctagcccagaacctacgaggcctgcctggacaggaatgggcctgagggcagcccctagtagcgccgcagcagccgccgcagaggtggaacagcgtaggtctccgggcttgtgtcctccacccctcgaactcctcctgctcctgctgttcagcttgggtcttctgcacgctggagattgccagcaaccagcccagtgtcggatacagaaatgtactacagacttcgtcagcctaaccagccacctcaactctgcggtagacggctttgacagcgaattttgtaaggctttacgggcctatgcaggctgtacccagcgcacgagcaaagcatgtagaggcaacctagtgtaccacagcgctgtgctggggattagcgatctgatgagtcagcgcaattgttcaaaggacggacctacatcctcaaccaatccagaggtaacccacgatccctgcaactatcacagccatgccggtgcacgcgaacatcggcgtggagaccagaacccaccgtcttaccttttctgtggcctcttcggtgacccacacctgcgcacctttaaggacaactttcaaacctgtaaggtggagggcgcttggccactgattgataacaactacctttcggttcaggtcacgaatgtgcccgtggtccccgggagctcagcaacagccacgaataaaattaccatcatattcaaggctcaccacgagtgcaccgatcagaaagtgtaccaggcagttacagatgatctacctgcggcattcgtggacggcacgacttcaggtggagacagcgatgcaaagtccttgaggatcgtggagcgagagagcgggcactacgtcgagatgcatgctaggtacatcggtactaccgtgtttgtaaggcaggtcggacggtacctaactctggcaattcggatgcccgaagacctcgccatgagctacgaggagagccaggatctgcagctgtgtgtgaatgggtgtccattaagtgagcgaattgatgatggtcaaggtcaggtatccgctatccttggccactccctgccaagaacgtcattggtgcaggcctggcctggctacaccctggagactgcaaacactcagtgccatgaaaaaatgccggtgaaggacatctattttcagagctgtgtgtttgacttgctgacaacgggcgatgcgaatttcacagcagccgcgcattctgcgctggaggatgtcgaagctctccacccaaggaaggagcgatggcacattttccccagctccggcaacggaacaccccgtggcggctctgatctgtctgtgagtctcgggttgacgtgcttgattctgatcgtttttctctag

SEQ ID NO: 25351 - DNA, 1437 bp, Artificial Sequence
  derived and/or modified sequence
atgatccgcaaaaagcggaaacgctccgccccaccaggaccttgtagatctcatgggcctcggccagccacagctccagccccacctccttctcccgagccaactcgacctgcgtggactggcatgggactaagggctgccccttcaagtgccgctgcggctgccgcagaagtggagcagaggagaagccctgggttatgtccaccaccactcgaactgctgctactattacttttctctctgggactgctgcatgcaggggactgccagcaaccggcacagtgtcgcatccaaaagtgtacgactgatttcgtgtccctaacttcacacctgaattccgccgtcgatgggtttgattcggagttctgtaaagcattgcgcgcttatgctgggtgcacccaacggacatctaaggcttgcaggggtaatctcgtgtaccactcagctgtgctgggcattagcgacttgatgtcgcagcggaattgctctaaggacggtcctacgtcaagtactaatcccgaagttacccacgacccatgtaattaccacagccatgccggagctcgagaacatagacgtggtgaccagaaccctccctcatatctcttttgcggcctgttcggagacccccatctacggaccttcaaagataatttccaaacctgcaaagtcgaaggagcatggccattaatagataacaattacctgagcgtccaggtgaccaacgtacccgtggttcccggttccagtgctactgccacgaataagatcaccattatcttcaaggcccaccacgaatgcacggatcagaaagtttatcaagcagtgactgatgaccttcctgccgctttcgtcgatgggactacgtcagggggagactctgacgcaaagtcgctacgcatcgtagagcgagagtctggtcattacgttgagatgcacgccagatacataggcaccaccgtgttcgtgcgccaggtggggcgatatcttacactagcaatcagaatgcccgaggatctggccatgtcatatgaagaatcacaggaccttcagctgtgtgtgaatggctgtcccttatctgagcgaattgacgatggccagggccaagtgagcgccatcttggggcattccttaccgagaacaagtctggtccaggcgtggccaggatatacattggagactgctaatactcagtgccacgaaaagatgcctgtgaaagacatctacttccagagctgcgtctttgacctcctgacgacgggtgacgcaaactttactgccgcagcacatagcgcccttgaggatgtggaagcactccacccacggaaggagcgttggcatatcttccccagttctggaaatggcacaccgcgaggtggctccgacctctccgtttcgctgggtctgacctgcctgatcctgatcgtgttcctctag

SEQ ID NO: 25352 - DNA, 4580 bp, Artificial Sequence
  derived and/or modified sequence
atttgaggctgactggggagaaagctgcctggaggaagctgctggggtgcggggggctgagggatttggctccccgccctctcccctagatggcggagaaatcgggctagctggaagggcgcagctcctctcccagagctcattctggagtcggagaactgggagagcggcccccgaggcggagcctccctcccgccccgagtcgcgctgccccccacctgggggagaggggcgggcgccgcgctgccttccctccgcgcctcggccgcgtggcttgcggcttattttcccagctggcaagcgtcgcgctgcagacaagggaatgcctgtggtcctgcgtgttccgaagttcaggggccccctgatcccgctgagccccctccaggagcgaaagggttaagaatgataaggaagaagaggaagcgaagcgcgccccccggcccatgccgcagccacgggcccagacccgccacggcgcccgcgccgccgccctcgccggagcccacgagacctgcatggacgggcatgggcttgagagcagcaccttccagcgccgccgctgccgccgccgaggttgagcagcgccgcagccccgggctctgccccccgccgctggagctgctgctgctgctgctgttcagcctcgggctgctccacgcaggtgactgccaacagccagcccaatgtcgaatccagaaatgcaccacggacttcgtgtccctgacttctcacctgaactctgccgttgacggctttgactctgagttttgcaaggccttgcgtgcctatgctggctgcacccagcgaacttcaaaagcctgccgtggcaacctggtataccattctgccgtgttgggtatcagtgacctcatgagccagaggaattgttccaaggatggacccacatcctctaccaaccccgaagtgacccatgatccttgcaactatcacagccacgctggagccagggaacacaggagaggggaccagaaccctcccagttaccttttttgtggcttgtttggagatcctcacctcagaactttcaaggataacttccaaacatgcaaagtagaaggggcctggccactcatagataataattatctttcagttcaagtgacaaacgtacctgtggtccctggatccagtgctactgctacaaataagatcactattatcttcaaagcccaccatgagtgtacagatcagaaagtctaccaagctgtgacagatgacctgccggccgcctttgtggatggcaccaccagtggtggggacagcgatgccaagagcctgcgtatcgtggaaagggagagtggccactatgtggagatgcacgcccgctatatagggaccacagtgtttgtgcggcaggtgggtcgctacctgacccttgccatccgtatgcctgaagacctggccatgtcctacgaggagagccaggacctgcagctgtgcgtgaacggctgccccctgagtgaacgcatcgatgacgggcagggccaggtgtctgccatcctgggacacagcctgcctcgcacctccttggtgcaggcctggcctggctacacactggagactgccaacactcaatgccatgagaagatgccagtgaaggacatctatttccagtcctgtgtcttcgacctgctcaccactggtgatgccaactttactgccgcagcccacagtgccttggaggatgtggaggccctgcacccaaggaaggaacgctggcacattttccccagcagtggcaatgggactccccgtggaggcagtgatttgtctgtcagtctaggactcacctgcttgatccttatcgtgtttttgtaggggttgtcttttgttttggttttttattttttgtctataacaaaattttaaaatatatattgtcataatatattgagtaaaagagtatatatgtatataccatgtatatgacaggatgtttgtcctgggacacccaccagattgtacatactgtgtttggctgttttcacatatgttggatgtagtgttctttgattgtatcaattttgttttgcagttctgtgaaatgttttataatgtccctgcccagggacctgttagaaagcactttattttttatatattaaatatttatgtgtgtgcttggttgatatgtatagtacatatacacagacatccatatgcagcgtttcctttgaaggtgaccagttgtttgtagctattcttggctgtaccttcctgccctttcccattgctactgatttgccacggtgtgcagcttttactcgccaccttccggtggagctgcctcgttcctttgaactatgccctcacccttctgccctcacttgatttgaaagggtcgttaactctcccttacaggtgctttgactcttaaacgctgatcttaagaagctctcttcatctaagagctgttactttttcagaagggggggtattattggtattctgattactctcaattctaattgttatatatttgagcccatacagtgtattaggttgaaccatagaaactgctattctcgtaggtcaaaagggtctagtgatggaagttttgtagataagtaccaggcatctcagtaactcctagactttttctcatcccatgccccgttttaaattgtcagttttccctctgactcttctgtgttaaaacatgaaactataaatttagtaattatcatgccttgctctttttaatctatatgactgatgcaagcccctcttcttaaccgtttcttggctttgagcccagaaacacagctctccctgtctccaactccagtaagccctcctcagcctcaccttacgaatccaaagaactggggtttgttaggttctttctctaatgtagaggcccagatcccatcacaaagtttttcattcttccttgtccaccatgatcttcatcacagtctttgatatgtctgcatgcaaagtggaacagagttgggcggcaatgacagaagagcttccttggcctgactcggtgtgcggccacttcggcactgcttaatccagatattcttgttaactaagcattgtgcttcccaggtggtctgaagtcaggtactctctctctcaacacctgtagttgaatatgatttggtcagttgctcgttgtaacttggagaaattcctataaagtaagatctccttgcctcttccatccattgttggcacccccttgcaaaaggaaaagaacagcaaaagtcaggagcagtaatctgagaaagttaactccaggataggtaggtttctattgttatagctagatgtaaatctttagttccaagaagtgatagagtttctgctttaataatttgttgataagtttacataaacagaaataaaagatactatctttaccgtagtagttcaggccaagattatgcttagttttagttctccaggtagttacttttgccatgtcctattgatcagtgacactgccagaggcccataccggcaagaggaagaggacgtcattttgtaaagtttaacttcttagcgaactgatgtgccacccagtcacagagtggagttgtgaattcatgtagaggtggcaaacctctaccttgtgttgatgagagaataatcttgggcagtctgggaaaataaggaaggcatctccttcttactcatggagattcaactatagagagttgaaacctaaacccgccttccttttatagaagctggactagagacggactgaccatcagctctgaactgtggctttttttgttcacctatgatgccatgtaccaaattcagaagctatcgttaataatttgttttataattgagtagtacaagcgaggaaaaaatacggaggataaccactatttttgtgcaaataatatgaaagtgaagtaaaagcaatagaagaaatttctataggatctgggtttagagtgtgtatcattaataaatatacctttgctcttttcagggaaaataacaaccacccttactgatagttgggaaaagaagattgggttattttgccatatcatttagctggaagtgacatttaaaagcaccctgcatcactagtaatagtgtattttgctattctgcccttgtaatcggtgtccctgtaaaacaatccccacagattactttcagaaatagatgtatttctctacgtaagggccaggtttattttctccttttttgagatttctagaaaaaatgctgcttgcacatgttggttcttgaaaccttagctagaagaatttcaggtcataccaacatgtggataggctatagctgttcagaggtctcctgggggagcttaaaacgggggaaacactggttttcacagatgctccacatggctgtctttaaaagactcaaaacttttttttgtcctctttgttatgcttggaagctcccccccccccaacagtgtgtcgagtctttgcaaagaaacctttagatgtggttcatagatatatgaatacgtatctgtgtaaaacagtgagtgtgcagtgtgtaaatactttaaattattatgctagaaaaataaagttacataccttgctgtggaa

SEQ ID NO: 25353 - DNA, 1437 bp, Artificial Sequence
  derived and/or modified sequence
atgatcagaaagaagagaaagagaagcgccccccccggcccctgcagaagccacggccccagacccgccaccgcccccgcccccccccccagccccgagcccaccagacccgcctggaccggcatgggcctgagagccgcccccagcagcgccgccgccgccgccgccgaggtggagcagagaagaagccccggcctgtgccccccccccctggagctgctgctgctgctgctgttcagcctgggcctgctgcacgccggcgactgccagcagcccgcccagtgcagaatccagaagtgcaccaccgacttcgtgagcctgaccagccacctgaacagcgccgtggacggcttcgacagcgagttctgcaaggccctgagagcctacgccggctgcacccagagaaccagcaaggcctgcagaggcaacctggtgtaccacagcgccgtgctgggcatcagcgacctgatgagccagagaaactgcagcaaggacggccccaccagcagcaccaaccccgaggtgacccacgacccctgcaactaccacagccacgccggcgccagagagcacagaagaggcgaccagaacccccccagctacctgttctgcggcctgttcggcgacccccacctgagaaccttcaaggacaacttccagacctgcaaggtggagggcgcctggcccctgatcgacaacaactacctgagcgtgcaggtgaccaacgtgcccgtggtgcccggcagcagcgccaccgccaccaacaagatcaccatcatcttcaaggcccaccacgagtgcaccgaccagaaggtgtaccaggccgtgaccgacgacctgcccgccgccttcgtggacggcaccaccagcggcggcgacagcgacgccaagagcctgagaatcgtggagagagagagcggccactacgtggagatgcacgccagatacatcggcaccaccgtgttcgtgagacaggtgggcagatacctgaccctggccatcagaatgcccgaggacctggccatgagctacgaggagagccaggacctgcagctgtgcgtgaacggctgccccctgagcgagagaatcgacgacggccagggccaggtgagcgccatcctgggccacagcctgcccagaaccagcctggtgcaggcctggcccggctacaccctggagaccgccaacacccagtgccacgagaagatgcccgtgaaggacatctacttccagagctgcgtgttcgacctgctgaccaccggcgacgccaacttcaccgccgccgcccacagcgccctggaggacgtggaggccctgcaccccagaaaggagagatggcacatcttccccagcagcggcaacggcacccccagaggcggcagcgacctgagcgtgagcctgggcctgacctgcctgatcctgatcgtgttcctgtag

SEQ ID NO: 25354 - protein, 249 aa, Artificial Sequence
  derived and/or modified sequence
MANSASPEQNQNHCSAINNSIPLMQGNLPTLTLSGKIRVTVTFFLFLLSATFNASFLLKLQKWTQKKEKGKKLSRMKLLLKHLTLANLLETLIVMPLDGMWNITVQWYAGELLCKVLSYLKLFSMYAPAFMMVVISLDRSLAITRPLALKSNSKVGQSMVGLAWILSSVFAGPQLPLHHPSFHHADLQCKNHLHPDTGPSSGPPRTTTESVQEQYTKSTAEDSKNDGCICHFIYCLLDSLLCPRNLVLV

SEQ ID NO: 25355 - DNA, 750 bp, Artificial Sequence
  derived and/or modified sequence
atggccaactccgcttcccccgaacagaatcagaaccactgcagcgcaataaacaattcaatccctctcatgcaaggcaaccttccaactctgacactgtcagggaagatccgagtgacagtcacgttttttctgttcctgctgtcagctactttcaacgccagtttcctcctcaaactccagaagtggactcagaaaaaggaaaaaggaaagaagctcagccgcatgaaactgctgctcaaacatcttaccctcgcaaatttactggaaaccctcattgtgatgccactggatggcatgtggaatattacggttcagtggtatgcgggagagctcctgtgcaaggtgctctcctatcttaaactgttctctatgtacgcgcccgccttcatgatggtggtgattagtctagatcgtagcttggctatcacccgtccattagcgttgaaatctaatagtaaggtggggcagtccatggtcggcctggcatggatactgagctccgtgtttgcaggccctcagctgccattgcaccatccttcgtttcatcatgcagacctgcagtgtaaaaaccatttgcacccagatacaggacccagcagcggaccaccaaggactaccacggagagtgtccaggagcagtacacaaaatcgacagccgaggatagtaaaaacgatggatgcatttgccactttatttattgcctgctggactctctcctgtgtccacggaatctggtactcgtctag

SEQ ID NO: 25356 - DNA, 859 bp, Artificial Sequence
  derived and/or modified sequence
atggcaaacagtgcctctcctgaacagaatcaaaatcactgttcagccatcaacaacagcatcccactgatgcagggcaacctccccactctgaccttgtctggaaagatccgagtgacggttactttcttcctttttctgctctctgcgacctttaatgcttctttcttgttgaaacttcagaagtggacacagaagaaagagaaagggaaaaagctctcaagaatgaagctgctcttaaaacatctgaccttagccaacctgttggagactctgattgtcatgccactggatgggatgtggaacattacagtccaatggtatgctggagagttactctgcaaagttctcagttatctaaagcttttctccatgtatgccccagccttcatgatggtggtgatcagcctggaccgctccctggctatcacgaggcccctagctttgaaaagcaacagcaaagtcggacagtccatggttggcctggcctggatcctcagtagtgtctttgcaggaccacagctgcctcttcatcatccctcttttcatcatgctgatctgcaatgcaaaaatcatcttcaccctgacacgggtccttcatcaggacccccacgaactacaactgaatcagtccaagaacaatataccaagagcacggctgaagactctaaaaatgacggttgcatttgccacttcatttactgtctgctggactccctactatgtcctaggaatttggtattggtttgatcctgaaatgttaaacaggttgtcagacccagtaaatcacttcttctttctctttgcctttttaaacccatgctttgatccacttatctatggatatttttctctgtga

SEQ ID NO: 25357 - DNA, 750 bp, Artificial Sequence
  derived and/or modified sequence
atggccaacagcgccagccctgagcagaaccagaaccactgcagcgccatcaacaacagcatccccctgatgcagggcaacctgcccaccctgaccctgagcggcaagatccgggtgacagtgaccttcttcctgttcctgctgagcgccaccttcaatgccagcttcctgctgaagctgcagaagtggacccagaagaaggagaagggcaagaagctgagcaggatgaagctgctgctgaagcacctgaccctggccaacctgctggagaccctgattgtgatgcccctggatggcatgtggaacatcaccgtgcagtggtacgccggggagctgctgtgcaaggtgctgagctacctgaagctgttctccatgtatgccccagccttcatgatggtggtgatcagcctggacaggagcctggccatcacccggcccctggccctgaagagcaacagcaaggtgggccagagcatggtgggcctggcctggatcctgagctctgtgtttgctggcccccagctgcccctgcaccaccccagcttccaccacgccgacctgcagtgcaagaaccacctgcacccagacaccggccccagcagcggcccccccaggaccaccacagagagcgtgcaggagcagtacaccaagagcacagctgaggacagcaagaatgatggctgcatctgccacttcatctactgcctgctggacagcctgctgtgccccaggaacctggtgctggtgtag

SEQ ID NO: 25358 - DNA, 750 bp, Artificial Sequence
  derived and/or modified sequence
atggccaacagcgccagccccgagcagaaccagaaccactgcagcgccatcaacaacagcatccccctgatgcagggtaatcttccaacattgaccctcagtggaaagatcagagtgaccgtcacattctttttgttcctcctgtcagctactttcaatgctagctttctgctcaagctccaaaaatggacacagaaaaaagaaaagggcaagaaactgtcacgaatgaagcttttgctgaaacatttgaccctagccaatttgctggagacactgattgtgatgcctctcgacggcatgtggaatattacggtgcagtggtacgccggcgaattactctgtaaggtactgagttatctaaagcttttctcaatgtatgcccccgcatttatgatggtagtgattagcctcgacagatctcttgccatcacaaggccgctggcgctgaagagtaactcaaaggtggggcagtctatggtcggcttagcatggatcctaagcagtgtgtttgctggcccccaactgccgctgcaccacccttctttccaccacgctgacctgcagtgtaaaaatcaccttcatcctgacaccgggccaagcagtggccccccaaggacgacaactgagtccgtgcaagaacagtataccaagtccacagccgaggactccaagaatgacggatgtatctgccattttatctattgcctgctggactctcttctttgcccgcgtaatttagtgttagtgtag

SEQ ID NO: 25359 - DNA, 750 bp, Artificial Sequence
  derived and/or modified sequence
atggccaacagcgcctcacccgaacaaaaccagaaccattgctcagccatcaacaatagcattcccctgatgcagggtaatctccccacacttacactaagtggtaaaatccgagttactgtgactttttttctgtttctcctatcagccacgtttaatgcaagctttctcctgaaactgcaaaagtggacccagaagaaagaaaaaggcaagaagctgtctaggatgaagctgctgcttaaacatttaacactggctaatctgctggagaccttgatcgtcatgccactagacggaatgtggaatatcacagtccaatggtacgctggcgaactcctgtgtaaagtgttgtcctacttaaagttgttctcaatgtacgcccctgccttcatgatggtggttatcagtctcgacaggtctcttgctattaccagaccactagcactcaagtcaaactccaaggtgggtcagtcgatggttggtctcgcctggatccttagtagcgtttttgcgggtccacagttacctctacaccatccgagcttccaccatgccgatctccagtgcaagaatcatctgcaccctgatacaggccctagttcgggcccaccacggacaacgacagaatccgtccaggagcaatatactaagagcacagccgaggacagcaaaaatgacggttgtatctgccacttcatttattgcttgctggattctctgttgtgtccgagaaacctggttctcgtctag

SEQ ID NO: 25360 - DNA, 750 bp, Artificial Sequence
  derived and/or modified sequence
atggccaacagcgccagccccgagcagaaccagaaccactgcagcgccatcaacaacagcatccccctgatgcagggcaacctgcccaccctgaccctgagcggcaagatcagagtgaccgtgaccttcttcctgttcctgctgagcgccaccttcaacgccagcttcctgctgaagctgcagaagtggacccagaagaaggagaagggcaagaagctgagcagaatgaagctgctgctgaagcacctgaccctggccaacctgctggagaccctgatcgtgatgcccctggacggcatgtggaacatcaccgtgcagtggtacgccggcgagctgctgtgcaaggtgctgagctacctgaagctgttcagcatgtacgcccccgccttcatgatggtggtgatcagcctggacagaagcctggccatcaccagacccctggccctgaagagcaacagcaaggtgggccagagcatggtgggcctggcctggatcctgagcagcgtgttcgccggcccccagctgcccctgcaccaccccagcttccaccacgccgacctgcagtgcaagaaccacctgcaccccgacaccggccccagcagcggcccccccagaaccaccaccgagagcgtgcaggagcagtacaccaagagcaccgccgaggacagcaagaacgacggctgcatctgccacttcatctactgcctgctggacagcctgctgtgccccagaaacctggtgctggtgtag

SEQ ID NO: 25361 - protein, 547 aa, Artificial Sequence
  derived and/or modified sequence
MPGGGPQGAPAAAGGGGVSHRAGSRDCLPPAACFRRRRLARRPGYMRSSTGPGIGFLSPAVGTLFRFPGGVSGEESHHSESRARQCGLDSRGLLVRSPVSKSAAAPTVTSVRGTSAHFGIQLRGGTRLPDRLSWPCGPGSAGWQQEFAAMDSSETLDASWEAACSDGARRVRAAGSLPSAELSSNSCSPGCGPEVPPTPPGSHSAFTSSFSFIRLSLGSAGERGEAEGCPPSREAESHCQSPQEMGAKAASLDGPHEDPRCLSRPFSLLATRVSADLAQAARNSSRPERDMHSLPDMDPGSSSSLDPSLAGCGGDGSSGSGDAHSWDTLLRKWEPVLRDCLLRNRRQMEVISLRLKLQKLQEDAVENDDYDKAETLQQRLEDLEQEKISLHFQLPSRQPALSSFLGHLAAQVQAALRRGATQQASGDDTHTPLRMEPRLLEPTAQDSLHVSITRRDWLLQEKQQLQKEIEALQARMFVLEAKDQQLRREIEEQEQQLQWQGCDLTPLVGQLSLGQLQEVSKALQDTLASAGQIPFHAEPPETIRRCV

SEQ ID NO: 25362 - protein, 832 aa, Artificial Sequence
  derived and/or modified sequence
MPGGGPQGAPAAAGGGGVSHRAGSRDCLPPAACFRRRRLARRPGYMRSSTGPGIGFLSPAVGTLFRFPGGVSGEESHHSESRARQCGLDSRGLLVRSPVSKSAAAPTVTSVRGTSAHFGIQLRGGTRLPDRLSWPCGPGSAGWQQEFAAMDSSETLDASWEAACSDGARRVRAAGSLPSAELSSNSCSPGCGPEVPPTPPGSHSAFTSSFSFIRLSLGSAGERGEAEGCPPSREAESHCQSPQEMGAKAASLDGPHEDPRCLSRPFSLLATRVSADLAQAARNSSRPERDMHSLPDMDPGSSSSLDPSLAGCGGDGSSGSGDAHSWDTLLRKWEPVLRDCLLRNRRQMEVISLRLKLQKLQEDAVENDDYDKAETLQQRLEDLEQEKISLHFQLPSRQPALSSFLGHLAAQVQAALRRGATQQASGDDTHTPLRMEPRLLEPTAQDSLHVSITRRDWLLQEKQQLQKEIEALQARMFVLEAKDQQLRREIEEQEQQLQWQGCDLTPLVGQLSLGQLQEVSKALQDTLASAGQIPFHAEPPETIRSLQERIKSLNLSLKEITTKVCMSEKFCSTLRKKVNDIETQLPALLEAKMHAISGNHFWTAKDLTEEIRSLTSEREGLEGLLSKLLVLSSRNVKKLGSVKEDYNRLRREVEHQETAYETSVKENTMKYMETLKNKLCSCKCPLLGKVWEADLEACRLLIQSLQLQEARGSLSVEDERQMDDLEGAAPPIPPRLHSEDKRKTPLKESYILSAELGEKCEDIGKKLLYLEDQLHTAIHSHDEDLIHSLRRELQMVKETLQAMILQLQPAKEAGEREAAASCMTAGVHEAQA

SEQ ID NO: 25363 - protein, 609 aa, Artificial Sequence
  derived and/or modified sequence
MPGGGPQGAPAAAGGGGVSHRAGSRDCLPPAACFRRRRLARRPGYMRSSTGPGIGFLSPAVGTLFRFPGGVSGEESHHSESRARQCGLDSRGLLVRSPVSKSAAAPTVTSVRGTSAHFGIQLRGGTRLPDRLSWPCGPGSAGWQQEFAAMDSSETLDASWEAACSDGARRVRAAGSLPSAELSSNSCSPGCGPEVPPTPPGSHSAFTSSFSFIRLSLGSAGERGEAEGCPPSREAESHCQSPQEMGAKAASLDGPHEDPRCLSRPFSLLATRVSADLAQAARNSSRPERDMHSLPDMDPGSSSSLDPSLAGCGGDGSSGSGDAHSWDTLLRKWEPVLRDCLLRNRRQMEVISLRLKLQKLQEDAVENDDYDKAETLQQRLEDLEQEKISLHFQLPSRQPALSSFLGHLAAQVQAALRRGATQQASGDDTHTPLRMEPRLLEPTAQDSLHVSITRRDWLLQEKQQLQKEIEALQARMFVLEAKDQQLRREIEEQEQQLQWQGCDLTPLVGQLSLGQLQEVSKALQDTLASAGQIPFHAEPPETIRREVRHQTAPCRNHQLEKPVINIWAFHLRRKICLFQADGLQHGSAEVKHLKETSVEPAGSTASRKE

SEQ ID NO: 25364 - DNA, 2499 bp, Artificial Sequence
  derived and/or modified sequence
atgcccggggggggtcctcaaggagcgcctgccgccgcaggtggggggggtgtcagccatagggccggctccagggattgtctgccccctgccgcttgttttcggagacggcgcctcgccaggaggcccggatacatgcggtcaagcacagggccaggtattggtttcctgagtcccgcagtggggacattatttcggttcccaggtggggtgtcaggcgaggagtcacatcacagtgaatccagggcacgacagtgtggattggacagtagagggttgctcgtgcgcagtccagtgagtaagtctgccgctgcgcccacagtcacatccgtgcgggggacaagcgcccattttggtatccagttgcgggggggtacgaggttacctgacaggttatcgtggccatgcggccctggatcagccggctggcagcaagagtttgcagctatggatagtagtgagaccctggacgcctcctgggaagcagcatgcagtgatggagcacgcagggtccgcgcagccggcagtctcccgtcagccgaacttagctccaattcttgcagccctggatgcggacccgaagtcccaccaacgcctcccggttcacatagtgccttcacctcttcattttctttcatcaggctgtctctgggaagtgccggcgaaaggggagaggccgaggggtgcccccctagtagagaggccgaaagtcactgtcagtcgccacaggaaatgggcgcaaaagccgccagccttgatgggcctcatgaggaccccaggtgtctgtctcggccatttagtctgcttgccaccagagtgtccgccgacctggctcaggccgcacggaatagctctcgtcctgaacgggacatgcactccctaccagatatggatccggggtcgagctcatcgctggatcctagcttggctggatgcggaggcgatggctctagtggtagcggtgacgctcactcttgggataccttgcttcggaaatgggagcctgtcctaagagattgcctactcaggaatcgcagacagatggaagttataagcttgcggctaaaactgcagaaacttcaggaagacgccgtcgagaacgatgattacgacaaagcagagacattgcaacagcgcttggaggacctcgagcaggaaaagatttcactacacttccaactcccctcacggcagccagcactgtctagcttcctgggacacctggccgcccaggtgcaggccgcactgcggcgcggcgcaacacagcaggctagtggagacgacactcataccccactgaggatggaacctcggttactcgaacctacagctcaggattctctccatgtttccataaccagacgggactggctattgcaggagaagcaacagcttcagaaagagatcgaagcactccaggcccgtatgtttgtgttggaggctaaagaccagcagctgaggcgtgaaatagaggagcaggagcaacagctgcaatggcagggctgcgatttaactccactggtagggcagctgagtttggggcagttgcaagaggtgtcgaaggcccttcaggatactctcgcctctgccggccaaatccctttccacgccgagccacctgaaaccatacgtagcctgcaggaaaggattaagtccctgaacctgtccctcaaagagatcaccacgaaggtatgtatgtcagagaaattctgctccacactccggaaaaaagtgaatgatattgaaacccagctgcccgctctgctggaggcaaagatgcatgcaattagtggcaaccacttctggaccgcgaaggatcttacagaggagatccgctctctgacttcagagcgggaaggtctcgagggtttgcttagcaaactactggtgctgtcaagtaggaacgtgaagaagctaggttcagttaaggaagactataaccgtttacgccgcgaagttgaacaccaggaaactgcctatgagacctccgtcaaggagaacactatgaaatacatggagacattgaaaaacaaactgtgcagttgcaagtgccctctcctgggaaaggtgtgggaggctgatctggaagcctgccggctgctcatccagagcctgcagctgcaggaggcccgtggcagcctttctgtggaagatgagcggcagatggacgacctggaaggcgcagctccacccattccacctagacttcattccgaggataagaggaaaacccccctgaaagaatcgtacatcctgtctgcagaacttggggagaagtgcgaggatataggtaagaagctgctgtaccttgaggaccaactgcataccgccatacattcacatgatgaagacctaattcactctctgcgaagggagctgcagatggtaaaggagacactgcaagccatgatcttgcaactccaaccggctaaggaagcaggggagagggaagctgctgcatcatgtatgactgcaggggtgcacgaggcccaagcctag

SEQ ID NO: 25365 - DNA, 2499 bp, Artificial Sequence
  derived and/or modified sequence
atgcctgggggcggcccccagggcgccccagctgctgctgggggcggcggcgtgagccaccgggccggcagccgggactgcctgcccccagctgcctgcttcagaagaagaaggctggcccggcggcccggctacatgaggagcagcacaggccctggcatcggcttcctgagccctgctgtgggcaccctcttccgcttccctgggggcgtgtctggagaggagagccaccacagcgagagccgggcccggcagtgtggcctggacagccggggcctgctggtgcgcagccctgtgtccaagtctgctgctgcccccaccgtgacctctgtgcggggcaccagcgcccacttcggcatccagctgcggggcggcacccggctgcctgaccggctgtcctggccctgtggccctggcagcgctggctggcagcaggagtttgctgccatggacagcagcgagaccctggatgcctcctgggaggccgcctgcagtgatggagccaggagagtgcgggccgccggcagcctgcccagcgctgagctgagcagcaacagctgcagccctggctgcggccctgaggtgccccccaccccacctggcagccacagcgccttcaccagcagcttctccttcatccggctgagcctgggcagcgctggggagcggggggaggccgagggctgcccccccagccgggaggccgagagccactgccagagcccccaggagatgggcgccaaggccgccagcctggatggcccccatgaggacccccgctgcctgagccggcccttcagcctgctggccaccagggtgtctgctgacctggcccaggccgccaggaacagcagcaggcctgagcgggacatgcacagcctgcctgacatggaccccggcagcagcagcagcctggaccccagcctggccggctgtggaggagatggcagcagcggcagcggagatgcccacagctgggacaccctgctgaggaagtgggagcctgtgctgcgggactgcctgctgaggaacagacggcagatggaggtgatcagcctgcggctgaagctgcagaagctgcaggaggatgctgtggagaatgatgattatgacaaggccgagaccctgcagcagaggctggaggacctggagcaggagaagatcagcctgcacttccagctgcccagccggcagcctgccctgagcagcttcctgggccacctggccgcccaggtgcaggccgccctgcggcggggggccacccagcaggccagcggagatgacacccacacccccctgaggatggagccccggctgctggagcccacagcccaggacagcctgcacgtgtccatcacccggcgggactggctgctgcaggagaagcagcagctgcagaaggagattgaggccctgcaggccaggatgtttgtgctggaggccaaggaccagcagctgcggcgggagattgaggagcaggagcagcagctgcagtggcagggctgtgacctgacccccctggtgggccagctgagcctgggccagctgcaggaggtgtccaaggccctgcaggacaccctggccagcgctggccagatccccttccacgccgagcccccagagaccatccgcagcctgcaggagcgcatcaagagcctgaacctgagcctgaaggagatcaccaccaaggtgtgcatgtctgagaagttctgcagcaccctgaggaagaaggtgaatgacatcgagacccagctgcctgccctgctggaggccaagatgcacgccatcagcggcaaccacttctggacagccaaggacctgacagaggagatccgcagcctgaccagcgagcgggagggcctggagggcctgctgagcaagctgctggtgctgagcagcagaaatgtgaagaagctgggctctgtgaaggaggactacaaccggctgcggcgggaggtggagcaccaggagacagcctatgagacctctgtgaaggagaacaccatgaagtacatggagaccctgaagaacaagctgtgcagctgcaagtgccccctgctgggcaaggtgtgggaggccgacctggaggcctgccgcctgctgatccagagcctgcagctgcaggaggcccggggcagcctgtctgtggaggatgagcggcagatggatgacctggagggcgccgccccacccatccccccccggctgcacagcgaggacaagaggaagacccccctgaaggagagctacatcctgtctgctgagctgggggagaagtgtgaagatattggcaagaagctgctgtacctggaggaccagctgcacacagccatccacagccatgatgaagatctcatccacagcctgcggcgggagctgcagatggtgaaggagaccctgcaggccatgatcctgcagctgcagcctgccaaggaggccggggagcgggaggccgccgccagctgcatgacagctggggtgcatgaggcccaggcctag

SEQ ID NO: 25366 - DNA, 2499 bp, Artificial Sequence
  derived and/or modified sequence
atgcccggcggcggcccccagggcgcccccgccgccgccggcggcggcggtgtgtctcaccgcgccggttcccgcgactgtttgccacctgccgcatgtttcaggagaagacgcctcgcccgcaggcctgggtatatgcgatcctctacaggacccggaataggctttctctcaccagccgtgggcacattattccggttccctggcggggtttctggcgaagagtcccaccattccgaaagccgagctcggcagtgcggacttgattcacgtggactgctggtacgcagtccagtctctaaatccgcagccgccccaacagtgacttccgtgaggggcactagcgcccatttcggcatccaactgaggggcggcacgcggctgcctgatcgcctgtcgtggccttgcggccccgggtcagctgggtggcagcaggagtttgccgctatggattcctccgagacgctggacgcgtcttgggaagcagcctgctctgatggagcacggagagtgagggccgctggaagtcttcccagcgccgaactttccagcaactcttgctctcctggctgcggcccagaggttccacccacgcctcccggatcgcattccgccttcaccagctcattcagcttcattagattgtccctgggctcagctggagagcggggcgaagcagaaggctgcccaccctccagagaggctgagtctcactgtcaatcaccccaggagatgggcgcgaaagcagccagtctggacggcccccacgaggatccacggtgcctttctcgccccttctccctgctggcaacacgggttagtgcggacctggcacaggcagcgaggaattcatcaagacccgagagagatatgcactcacttcctgatatggatcccggatcatctagctcactggacccttccctggccggctgtggtggagacggttccagtggaagtggggacgcgcattcctgggacacactgctccgtaagtgggagcctgtgctacgcgactgtctgctgagaaacagacgccaaatggaggtcatctcgttacggctgaagttgcaaaaactgcaggaagacgccgtggagaacgatgactatgataaagccgaaacattacaacagagattggaagatctggagcaggagaagatttccctgcatttccagctcccaagtagacaacctgctctcagctcatttctgggacatttggccgctcaagtgcaggccgcgctccgtcgtggggccacccagcaagcctcaggtgacgatactcatacgccactgaggatggaacccaggctactcgagccaactgcacaggacagcctgcacgtcagtatcactcggagggactggctgctgcaggaaaagcagcaattgcagaaggagatcgaagccttacaagctcgaatgttcgtgcttgaggcaaaagatcagcagctccgcagggagatcgaggagcaggagcagcaactgcaatggcagggctgtgatctcacaccactggttggccagctgagtctgggccagctgcaagaagtgtccaaagctctgcaggatacccttgcatcagctggacaaatcccttttcatgccgagcccccggaaacgatccggtccctgcaggaacgaataaaatcgctcaatctctctctcaaggaaatcactactaaagtctgcatgtctgagaaattttgcagtactctgaggaaaaaagtgaacgacatcgagacacagcttcccgcactgcttgaagctaagatgcatgcaatttccggtaaccacttttggacagctaaggatcttactgaggagatcaggtcgctcaccagcgagcgagagggattagaggggctgctttcgaagctgctggtgctctcatctcgaaacgttaagaaactggggtctgtcaaagaagattacaatcgcttacgaagggaagtcgagcaccaggaaacagcttacgaaacatcagtgaaagagaacaccatgaaatacatggagactctgaagaacaaactgtgtagctgtaaatgtcccttgctgggtaaggtctgggaagccgacctggaagcttgccgcctgctcatacagagcctgcagctgcaggaggcccgtggctcacttagcgttgaggatgagcgtcaaatggacgaccttgaaggtgcggcaccaccaatcccacccaggctgcacagcgaagacaagagaaaaacaccattgaaggagtcctacatcctgtcggcagagctcggtgagaaatgcgaggacattgggaaaaagctgttgtatttagaagaccagctccacactgctatacattcgcatgatgaagacctgatccactctctgaggagagagctccagatggtgaaggaaacccttcaggcaatgattctgcagcttcagcctgcaaaggaagcaggcgagcgtgaggccgccgcgtcgtgcatgaccgccggcgtacatgaagctcaggcatag

SEQ ID NO: 25367 - DNA, 2499 bp, Artificial Sequence
  derived and/or modified sequence
atgcctggcggaggcccacagggggcacctgctgctgctggcggaggtggcgtttcccaccgagcaggttctagagactgtctgcccccagccgcttgttttagacggcgaagactcgctcgacgtccaggctatatgcgttctagcaccggccctggtatcggctttctctcccccgcagtaggaacactgtttagattcccgggtggagtgtctggcgaagaaagccatcacagtgagtccagggcccgacaatgcggcttggactcaaggggcctgctggtaaggtctcctgtgtctaaatctgccgctgccccaaccgtgacttccgtgcgagggacgtcggcacactttggaatacagctccggggagggactcggctccccgaccggttgtcttggccatgcggccctggatccgcaggatggcaacaggaatttgccgcaatggattctagcgagacgctagacgcttcctgggaagctgcgtgttctgatggcgctaggagggttcgggctgccggatccctgcctagcgcagaactgagcagtaactcatgtagccccggatgcggaccggaggtcccaccgaccccacccggatcacacagcgctttcactagtagcttcagtttcataagattatctctcggatcagcaggcgagaggggtgaagcagaaggctgtccgcctagtagggaggcagagtcgcattgtcagagccctcaggaaatgggagcgaaggcagctagcctggacggaccacatgaggaccccagatgtctgtcacgccctttttcactcctggcaactcgcgtctcagcagacctggcccaggccgctcgcaattcttctcggcctgaacgagatatgcactctctaccggatatggacccaggaagtagctccagccttgacccctccctggcgggatgcgggggtgacgggtcctctggtagcggtgatgcccatagttgggatacattgctcagaaaatgggaacccgttctgagggattgtctgctgaggaatcggaggcagatggaagtcataagcctgcggctgaagctccaaaaattgcaggaggacgcggtagagaatgacgattacgacaaggctgaaactctgcagcaaaggttagaagacctagaacaggagaagatcagcctccacttccaactgccatcccgccagccagctctctcatcttttttaggacacctggcagcacaagtgcaagccgcacttcgacgtggagcaacgcaacaggcctctggtgacgacacacataccccactccgcatggagcctaggctgctcgaacccactgcccaagatagtctgcatgtgtctataacaaggcgggattggttattacaggagaagcaacagctccaaaaggaaattgaggcgctccaggctcggatgttcgtactcgaggcaaaggaccagcagctgaggagagagatcgaagaacaagaacaacagttacagtggcagggctgtgacctaactccccttgtgggacagctttccctgggtcagctgcaggaagtgtcaaaagccctgcaggatactcttgcatccgccggtcagatcccctttcacgcagagccacctgaaaccatccgatctctgcaggaacggattaaatccctgaacctgtctctgaaggagatcaccacgaaggtctgcatgtccgaaaagttctgttcaaccctgaggaaaaaggtaaatgatatagaaacacagctgccagccctgcttgaagccaaaatgcacgcaatctctggtaaccatttttggacagcaaaagaccttaccgaagagattcgcagcctgactagcgagcgcgaggggttggaaggtcttctgtctaagctgctggtcctgagctcccggaatgtgaagaagctggggtccgtgaaggaggattacaatcggcttcggagagaggtcgaacaccaggagacagcttatgagaccagcgttaaggagaacaccatgaaatacatggagactctgaagaataaactctgctcctgcaaatgccctctcctcggaaaggtgtgggaagctgacctggaggcgtgtcgcctgctaatccagtccctgcagctccaggaagcccgtggaagcctgtcagtggaagatgagcgtcagatggatgaccttgaaggcgctgcgcctccaatccccccaaggttacactcagaggataaacgcaagacaccactgaaggaatcatatatcctttccgctgaactaggcgaaaaatgcgaggatatcgggaagaagcttctgtatcttgaggaccaactgcacacagcaatacacagccatgacgaggacttgattcactcactgcgcagagagttacagatggtgaaggagacactgcaggcaatgatccttcaactgcagccagccaaagaagctggggagagggaggccgctgccagctgcatgaccgccggagtgcacgaagcgcaggcttag

SEQ ID NO: 25368 - DNA, 2499 bp, Artificial Sequence
  derived and/or modified sequence
atgcccggcggcggcccccagggcgcccccgccgccgccggcggcggcggcgtgagccacagagccggcagcagagactgcctgccccccgccgcctgcttcagaagaagaagactggccagaagacccggctacatgagaagcagcaccggccccggcatcggcttcctgagccccgccgtgggcaccctgttcagattccccggcggcgtgagcggcgaggagagccaccacagcgagagcagagccagacagtgcggcctggacagcagaggcctgctggtgagaagccccgtgagcaagagcgccgccgcccccaccgtgaccagcgtgagaggcaccagcgcccacttcggcatccagctgagaggcggcaccagactgcccgacagactgagctggccctgcggccccggcagcgccggctggcagcaggagttcgccgccatggacagcagcgagaccctggacgccagctgggaggccgcctgcagcgacggcgccagaagagtgagagccgccggcagcctgcccagcgccgagctgagcagcaacagctgcagccccggctgcggccccgaggtgccccccaccccccccggcagccacagcgccttcaccagcagcttcagcttcatcagactgagcctgggcagcgccggcgagagaggcgaggccgagggctgcccccccagcagagaggccgagagccactgccagagcccccaggagatgggcgccaaggccgccagcctggacggcccccacgaggaccccagatgcctgagcagacccttcagcctgctggccaccagagtgagcgccgacctggcccaggccgccagaaacagcagcagacccgagagagacatgcacagcctgcccgacatggaccccggcagcagcagcagcctggaccccagcctggccggctgcggcggcgacggcagcagcggcagcggcgacgcccacagctgggacaccctgctgagaaagtgggagcccgtgctgagagactgcctgctgagaaacagaagacagatggaggtgatcagcctgagactgaagctgcagaagctgcaggaggacgccgtggagaacgacgactacgacaaggccgagaccctgcagcagagactggaggacctggagcaggagaagatcagcctgcacttccagctgcccagcagacagcccgccctgagcagcttcctgggccacctggccgcccaggtgcaggccgccctgagaagaggcgccacccagcaggccagcggcgacgacacccacacccccctgagaatggagcccagactgctggagcccaccgcccaggacagcctgcacgtgagcatcaccagaagagactggctgctgcaggagaagcagcagctgcagaaggagatcgaggccctgcaggccagaatgttcgtgctggaggccaaggaccagcagctgagaagagagatcgaggagcaggagcagcagctgcagtggcagggctgcgacctgacccccctggtgggccagctgagcctgggccagctgcaggaggtgagcaaggccctgcaggacaccctggccagcgccggccagatccccttccacgccgagccccccgagaccatcagaagcctgcaggagagaatcaagagcctgaacctgagcctgaaggagatcaccaccaaggtgtgcatgagcgagaagttctgcagcaccctgagaaagaaggtgaacgacatcgagacccagctgcccgccctgctggaggccaagatgcacgccatcagcggcaaccacttctggaccgccaaggacctgaccgaggagatcagaagcctgaccagcgagagagagggcctggagggcctgctgagcaagctgctggtgctgagcagcagaaacgtgaagaagctgggcagcgtgaaggaggactacaacagactgagaagagaggtggagcaccaggagaccgcctacgagaccagcgtgaaggagaacaccatgaagtacatggagaccctgaagaacaagctgtgcagctgcaagtgccccctgctgggcaaggtgtgggaggccgacctggaggcctgcagactgctgatccagagcctgcagctgcaggaggccagaggcagcctgagcgtggaggacgagagacagatggacgacctggagggcgccgccccccccatcccccccagactgcacagcgaggacaagagaaagacccccctgaaggagagctacatcctgagcgccgagctgggcgagaagtgcgaggacatcggcaagaagctgctgtacctggaggaccagctgcacaccgccatccacagccacgacgaggacctgatccacagcctgagaagagagctgcagatggtgaaggagaccctgcaggccatgatcctgcagctgcagcccgccaaggaggccggcgagagagaggccgccgccagctgcatgaccgccggcgtgcacgaggcccaggcctag

SEQ ID NO: 25369 - DNA, 6848 bp, Artificial Sequence
  derived and/or modified sequence
ggaaggagcaggaggcagcccaggcggagcgggaggagctggcagcggggcgcatgccaggcgggggtcctcagggcgccccagccgccgccggcggcggcggcgtgagccaccgcgcaggcagccgggattgcttaccacctgcagcgtgctttcggaggcggcggctggcacggaggccgggctacatgagaagctcgacagggcctgggatcgggttcctttccccagcagtgggcacactgttccggttcccaggaggggtgtctggcgaggagtcccaccactcggagtccagggccagacagtgtggccttgactcgagaggcctcttggtccggagccctgtttccaagagtgcagcagcccctactgtgacctctgtgagaggaacctcggcgcactttgggattcagctcagaggtggcaccagattgcctgacaggcttagctggccgtgtggccctgggagtgctgggtggcagcaagagtttgcagccatggatagttctgagaccctggacgccagctgggaggcagcctgcagcgatggagcaaggcgtgtccgggcagcaggctctctgccatcagcagagttgagtagcaacagctgcagccctggctgtggccctgaggtccccccaacccctcctggctctcacagtgcctttacctcaagctttagctttattcggctctcgcttggctctgccggggaacgtggagaagcagaaggctgcccaccatccagagaggctgagtcccattgccagagcccccaggagatgggagccaaagctgccagcttggacgggcctcacgaggacccgcgatgtctctctcggcccttcagtctcttggctacacgggtctctgcagacttggcccaggccgcaaggaacagctccaggccagagcgtgacatgcattctttaccagacatggaccctggctcctccagttctctggatccctcactggctggctgtggtggtgatgggagcagcggctcaggggatgcccactcttgggacaccctgctcaggaaatgggagccagtgctgcgggactgcctgctgagaaaccggaggcagatggaggtaatatccttaagattaaaacttcagaaacttcaggaagatgcagttgagaatgatgattatgataaagctgagacgttacaacaaagattagaagacctggaacaagagaaaatcagcctgcactttcaacttccttcaaggcagccagctcttagcagtttcctgggtcacctggcagcacaagtccaggctgccttgcgccgtggggccactcagcaggccagcggagatgacacccacaccccactgagaatggagccgaggctgttggaacccactgctcaggacagcttgcacgtgtccatcacgagacgagactggcttcttcaggaaaagcagcagctacagaaagaaatcgaagctctccaagcaaggatgtttgtgctggaagccaaagatcaacagctgagaagggaaatagaggagcaagagcagcaactccagtggcagggctgcgacctgaccccactggtgggccagctgtccctgggtcagctgcaggaggtcagcaaggccttgcaggacaccctggcctcagccggtcagattcccttccatgcagagccaccggaaaccataaggagcctccaggaaagaataaaatccctcaacttgtcacttaaagaaatcactactaaggtgtgtatgagtgagaaattctgcagcaccctgaggaagaaagttaacgatattgaaacccaactaccagccttgcttgaagccaaaatgcatgccatatcaggaaaccatttctggacggctaaagacctcaccgaggagattagatcattaacatcagagagagaagggctggagggactcctcagcaagctgttggtgttgagttccaggaatgtcaaaaagctgggaagtgttaaagaagattacaacagactgagaagagaagtggagcaccaggagactgcctatgaaacaagtgtgaaggaaaatactatgaagtacatggaaacacttaagaataaactgtgcagctgcaagtgtccactgcttgggaaagtgtgggaagctgacttggaagcttgtcgattgcttatccagagcctacagctccaggaagccaggggaagcctgtctgtagaagatgagaggcagatggatgacttagagggagctgctcctcctattccccccaggctccactccgaggataaaaggaagacccctttgaaggaatcttacatcctttctgcagaacttggagaaaagtgtgaagacataggcaagaagctattgtacttggaagatcaacttcacacagcaatccacagtcatgatgaagatctcattcattctctcaggagggagctccagatggtgaaggaaactctgcaggccatgatcctgcagctccagccagcaaaggaggcgggagaaagagaagctgcagcttcctgcatgacagctggtgtccacgaagcacaagcctgaggagtgacgggatgggggagggaggtgggccaccatgtttggacccggggggctgctcttccctcccccgccatagctaagatgcctgaatcaattacggagatacagagccttgaggtctttcagtggaaaggtggttcatgttcattctcatcagtgtgaaactgaggagtctgcaatttggaatatggagagagagactgatttgctgaatttccttctaaatgtcactcaaaaatttcttttccatgtcattcttgggaatgtcttccacaggatttgagaatagtttcatctcagcccccattagagagaagttggggtgaattctggaaaaatgtctctttttcctgtgccatttgccttctgctgcaacgaaaatatttcctgattcaagattctataaaaaggaaaccaagcataagactctgtcatcatacctgttacacgttcctacaggtgcacaatctaagagagctaattaacctcagagtctggagttaacagcttttcaccttacttctcctgtgatctaatattatcttagaaaaattaatatgcaatttccaaaagatattttggtaagacaacaacctcccagtgatatgccacctttcaattttccttttgtggcaatgattgcatctgaagaaaggatccctgagagtctctgtttcatcaggacattctgaaatttacccacagtgaggctgtggatggatcaggggacctgtataaaatgtttgagcctgttccattttcccgtggaacctgtttcactcaatgccaggcagtgcagcatttaggaaagcagtgcagtactcagtaaggcagtgcagtactcagtaacacaatacagtactcaggcagtgcagtactcagtaagacagtgcagtgctcagtaaggcagtgcaatactcagtaacagtgtagtactcagtaacagtgaagtactcagtaatacagtacagtattcagtaaggcagtgaagtactcagtaatacaatacagtactcagttaggcagtgcagtactcaggaatgcagcacagtactcaggcagtgcaatactcagtgcggtactcagtaacacagtgcagtactcagtaacagtgcagtactcagtaacagtgcagtactcagtaaggcagtgcagtactcagtaacacagtgcagtactcagtaatacagtacagtactcagtaaggcagtatggtactcagtaaagcaatgcaatgctcagtaacacagtgcagtgctcaataaggcagtgcagtgctcagtaaggcagtgaattgcttagtaacacagtgtagtgctcagtaggacagcatagtactcagtaacacagggcagctagtactcagtactataagtactgagtacttatataggcaatgtagtactcagtaaatcagtgcagtactcagtaatgcaagggcatttcaggctcctgctgggctgcttctttggcccagctgggactcctattgagacagctgcaaaacaggctgatttcaattaggcagcacttcccaaagtgcactgaggaaggtggccccaagagaagctctctaaacaaaggagtaccctctctggtcaagtacctttggtaaatacaccataccataatatctgcttggagaaccacaatgcacattagcatattagtctgagagagaacttatagtaaggaaactcacttgattttatctaacctcaaactttccaagtttaatggatcgtgaatttttttcatgtaactcctattcatatcccatagatctagtattgtacagcactgcattctctgaggaagtcccagtccaaactctgatttacatcactttagaaaccacactcacacttttgcagagtgttgagcttaataactacctgccacagattggtaaatttaatccagtggttgttctgtttgtgcttctgttctcatttatgtgtttagggatagtgaggttcctgccttcactaggatccacggatatgagaccatttttgtcatttcctgaagtcacactggcgtttccagaaggcatctggtgctttgctcagccttccatgctgtgcagcacttctgtcctcagtcaaggagatggccatgcttaagccagcaattggctggggtccaggaaacaaagcaaaagcacaatatgtgaatgtgctgattgtgttccctatggctttatctcgagcaaaatacactctacatattttaataataagtataattagcttgttcctggacttcattttcaatgatgaaccaaattcctgaattatttataattgtgtctaaagaaaattatgaactggtcacatggcacttggaatccttgagttaattccagtgaagcaaaacttgggaagagtcaggattggccacattgccaataacaaattcctacttcgacatatgtcttttcaaaaagcctcccagacacaagacatcttaaccgtcactagcccaagtgttttgtattactcagacaccatcatgaaataattctgtgaggtcatgatgtatttgaaaattctgcaagttaataactgccttgaattgtttgaacccgaaataagggttctttggtacctctagtagatagtgtgttcatttccctgctgcaaattttgaagtatttgggcaggtgagtcatgttttaaccacaagccataactcatctgttgtctttgcttggtcttagagtatcattcagaaagtccgctaagggccagcgtgcttcttctggctacacaaccttctcaggacaagcccactgtcttaagccactttgaccctgggagacacaggactgtgtatcctcaatcatactatacagcagtttttgtcaggggaacataaaaatatccaagagaggttagggcttagatttaaaagcatcaaaacaacaacaatggaaatttatgttggcgatagccaagaccacaagcaaaagcacatactggaaatgatgagttagaatctgatttgactgggatgttttatgagaatgtaagtgtgatattatactgtctgccttgctggaatgctggctttcaaatggtcacccatttttctttcactggcctgagttaggacatgctatcagtaatagtcccagttccatccaactttctgaaatttcatttttttttttgagatggagtctctctctgtcacccaagttggagtgcagtggccccgcaatctcggctcactgcaacctctacctcccaggttcaagctattctactgcctcagcctcccaagtagctggggttacaggcatttgccaccgggccctgatgatttttgtatttttagtagagacagggcttcaccatgttggctaggagggtctcaaactcctgacctcaggcgatccacccccacctcggcttcccaaagtgctgagattacaggtgtgagccaccgcacccggccaactttctgaaatttcaaaactgaattgatccttctccaaattagtatatactattggaaacttgtctttccctgcagtaaggctggtttccccaccccagaaacatgtaacggttggtaccatgctaagcccttgccatgctaagccctttacagtcatatcctataatccccatatcaaccttataaggaaggtgtttgtagatgatgcaactgagccttaagaggactaattccctttttctaaggcacagagctggtaaaatgtgaagtaatagtgaacctaacagtcagagacaggcagcatgctcttaactagtgctcttcctaaagttcctttaatgtccttttgagattttgagccatggaacttacttgttcacctggctaagaactcatggccactgtggaaatcttggttagggagtcaaagaaactgagcctggggcaaacgaggcttcccacactgccaggggagcctcactgtgaagtctaggctcagacaggcatcaacaaacctattcaccccaccatcatcctgatctaaccattccccagtcatcccaggaaaaccactcacagcctgacactgggctgactttcttgaagatcctcatccaattggtgtttttcagaagtgttccaatattatgaattctgtgttgtggagaaaagcaaccatgcatttactggtcaatgccttcttgtatatgtaattcaatacttttacttttaatatcctcaccttatctaatctttgaattttgtcatgtaatttattgcttcattaaggttactttttgttatacaaaataaaagctgatatccaaggca

SEQ ID NO: 25370 - protein, 369 aa, Artificial Sequence
  derived and/or modified sequence
MPGGGPQGAPAAAGGGGVSHRAGSRDCLPPAACFRRRRLARRPGYMRSSTGPGIGFLSPAVGTLFRFPGGVSGEESHHSESRARQCGLDSRGLLVRSPVSKSAAAPTVTSVRGTSAHFGIQLRGGTRLPDRLSWPCGPGSAGWQQEFAAMDSSETLDASWEAACSDGARRVRAAGSLPSAELSSNSCSPGCGPEVPPTPPGSHSAFTSSFSFIRLSLGSAGERGEAEGCPPSREAESHCQSPQEMGAKAASLDGPHEDPRCLSRPFSLLATRVSADLAQAARNSSRPERDMHSLPDMDPGSSSSLDPSLAGCGGDGSSGSGDAHSWDTLLRKWEPVLRDCLLRNRRQMELEPIALDPPWKPRHPEPNSY

SEQ ID NO: 25371 - DNA, 1110 bp, Artificial Sequence
  derived and/or modified sequence
atgcccggcggcggcccccagggggcgcctgcggcagccggcggcggtggggtgtcccaccgggccggctcccgggattgtctcccccctgccgcgtgtttcagaaggcgtaggctggcgagacggcccggctacatgagaagctccaccgggcccggaataggtttcctgtcacctgcggtaggcacgctgttccgcttcccaggcggagtttcgggcgaggaaagtcatcactctgaatcgagggccaggcaatgtggactcgattcacgaggactcctggtgcggtcccccgtttccaagtccgctgcagcacctacagtgacctctgtgaggggtacatcagcacacttcggcattcaacttagaggtgggaccaggctgccagatcgcctgtcatggccttgcggcccaggctctgccggatggcagcaagaatttgctgccatggatagcagtgagactctcgatgccagttgggaggccgcgtgctcggacggcgcgagacgcgttagggcagccgggtctctgccttctgcggaattgtcatccaactcctgctctcctggttgtgggcctgaagtcccccctactccccctggctcacacagcgccttcacctcaagctttagcttcattcgactctcccttggctccgccggggagagaggcgaggcggagggctgtccacccagccgcgaagctgaaagccactgccaaagcccacaggaaatgggtgcaaaagcagcaagtttggacggcccgcacgaagaccctcgttgtttgagtcgtcccttttctctgctcgctacccgggtgtccgccgaccttgcgcaggccgccaggaactcctcacgccctgaaagggacatgcactcattgcccgacatggatccaggttcgtcttcatcacttgacccttctctggccggctgtggcggggatggttccagcggaagcggcgatgctcatagctgggataccttactgcggaaatgggaacctgtgctacgagactgtctgctgaggaacagacggcagatggaactggagccgatagctctggaccccccgtggaagcctagacatcccgaacccaattcttactag

SEQ ID NO: 25372 - DNA, 1110 bp, Artificial Sequence
  derived and/or modified sequence
atgcctgggggcggcccccagggcgccccagctgctgctgggggcggcggcgtgagccaccgggccggcagccgggactgcctgcccccagctgcctgcttcagaagaagaaggctggcccggcggcccggctacatgaggagcagcacaggccctggcatcggcttcctgagccctgctgtgggcaccctcttccgcttccctgggggcgtgtctggagaggagagccaccacagcgagagccgggcccggcagtgtggcctggacagccggggcctgctggtgcgcagccctgtgtccaagtctgctgctgcccccaccgtgacctctgtgcggggcaccagcgcccacttcggcatccagctgcggggcggcacccggctgcctgaccggctgtcctggccctgtggccctggcagcgctggctggcagcaggagtttgctgccatggacagcagcgagaccctggatgcctcctgggaggccgcctgcagtgatggagccaggagagtgcgggccgccggcagcctgcccagcgctgagctgagcagcaacagctgcagccctggctgcggccctgaggtgccccccaccccacctggcagccacagcgccttcaccagcagcttctccttcatccggctgagcctgggcagcgctggggagcggggggaggccgagggctgcccccccagccgggaggccgagagccactgccagagcccccaggagatgggcgccaaggccgccagcctggatggcccccatgaggacccccgctgcctgagccggcccttcagcctgctggccaccagggtgtctgctgacctggcccaggccgccaggaacagcagcaggcctgagcgggacatgcacagcctgcctgacatggaccccggcagcagcagcagcctggaccccagcctggccggctgtggaggagatggcagcagcggcagcggagatgcccacagctgggacaccctgctgaggaagtgggagcctgtgctgcgggactgcctgctgaggaacagacggcagatggagctggagcccatcgccctggaccccccctggaagcccaggcaccctgagcccaacagctactag

SEQ ID NO: 25373 - DNA, 1110 bp, Artificial Sequence
  derived and/or modified sequence
atgcccggcggcggcccccagggcgcccccgccgccgccggcggcggtggcgtctcgcaccgtgcaggatctagggactgcctccccccggccgcctgtttcaggcggagacggctagccaggcgtcccgggtacatgcggtctagcaccggccccggtatcgggttcttatctccagctgtggggactttgttccggttcccaggaggagtgtcaggggaggagagccatcactctgagtcaagagccagacaatgcgggctggatagtcggggcttgctcgtccggagcccagtcagcaaaagcgccgctgctcctactgtcacaagcgtgagagggacctcggcacactttggcatccagctccgcggcggaacgcgactgcctgatcgtctgagctggccctgcggtccaggctccgctggctggcagcaggaattcgccgccatggattccagtgagacacttgatgcctcatgggaggccgcctgcagtgacggcgctcggagggtccgggcggctggatctttaccctctgccgagctgtcatctaactcctgcagccctggctgcggcccggaagtaccccccacacctcctggatcccattcagcattcacctcctcatttagtttcatccgcttgagcctcgggtctgctggagaaaggggagaggcagaggggtgtccaccaagtagagaagccgagtctcactgtcagagcccccaggaaatgggagctaaggcggccagcctcgatggccctcacgaagacccccgttgcctatcgcgccccttttccctgctggccactcgcgtgtccgcagatctggctcaggctgctcgaaactctagcagacctgagcgcgatatgcacagcctccctgacatggaccccggaagttcaagttctttggatccttcactcgccgggtgtggcggggacgggagctctggtagtggtgacgcacactcatgggacaccctgcttcgcaagtgggagcccgtgctccgggattgccttctgcgtaataggagacagatggagcttgagcccatagctctggacccaccgtggaagcctagacacccagagccaaactcctattag

SEQ ID NO: 25374 - DNA, 1110 bp, Artificial Sequence
  derived and/or modified sequence
atgccaggaggcggaccccagggcgcaccagccgctgcgggaggcggaggggtatcacacagagcaggtagtcgggactgcttgcccccagccgcttgtttcaggcggcgaaggctggctaggagaccagggtatatgcgatccagtactgggccagggattggtttcctgtctcctgccgttggcaccttgtttcggtttcctggtggagtgtccggcgaggagagtcaccactctgaatccagagcccgacagtgtggactggactcccgcggacttctggttcgaagtcctgtttctaagtccgctgctgcaccaacagtgacgtccgtccgcggaactagtgcccattttggaatccagcttcggggaggaactcgccttcccgataggctcagctggccctgcggtcccggttctgccggatggcagcaagagttcgccgcaatggacagcagtgagacactggatgcgtcctgggaagccgcatgcagcgacggtgcaagacgcgtacgggcagccggtagtctgccttcggcggaactgtcgtcaaactcatgctcaccaggatgtggccctgaagtgcccccaacgcctcccggtagccactcagcatttacgtcgagtttctccttcattcggctgagcttaggttccgctggcgagagaggggaagctgaaggatgtccacctagccgcgaagcggaaagccattgtcagtccccccaggagatgggggcaaaggcggcaagcctggacggaccccacgaggacccccgatgcttatctaggcctttttctttgttagcaacccgagtttcagcggacctcgctcaagccgctcgcaattcatccagacccgaaagagatatgcacagtttgcctgatatggaccctggctcaagctcgagtctggacccttcgctggctggctgcgggggagatggttcctcaggctctggggacgctcacagttgggacacgctgctgcggaagtgggaaccagtgctacgcgattgcctcctgagaaacagacgacagatggagctggagccaatcgccctcgatcccccttggaaacctagacaccccgaacctaatagctactag

SEQ ID NO: 25375 - DNA, 1110 bp, Artificial Sequence
  derived and/or modified sequence
atgcccggcggcggcccccagggcgcccccgccgccgccggcggcggcggcgtgagccacagagccggcagcagagactgcctgccccccgccgcctgcttcagaagaagaagactggccagaagacccggctacatgagaagcagcaccggccccggcatcggcttcctgagccccgccgtgggcaccctgttcagattccccggcggcgtgagcggcgaggagagccaccacagcgagagcagagccagacagtgcggcctggacagcagaggcctgctggtgagaagccccgtgagcaagagcgccgccgcccccaccgtgaccagcgtgagaggcaccagcgcccacttcggcatccagctgagaggcggcaccagactgcccgacagactgagctggccctgcggccccggcagcgccggctggcagcaggagttcgccgccatggacagcagcgagaccctggacgccagctgggaggccgcctgcagcgacggcgccagaagagtgagagccgccggcagcctgcccagcgccgagctgagcagcaacagctgcagccccggctgcggccccgaggtgccccccaccccccccggcagccacagcgccttcaccagcagcttcagcttcatcagactgagcctgggcagcgccggcgagagaggcgaggccgagggctgcccccccagcagagaggccgagagccactgccagagcccccaggagatgggcgccaaggccgccagcctggacggcccccacgaggaccccagatgcctgagcagacccttcagcctgctggccaccagagtgagcgccgacctggcccaggccgccagaaacagcagcagacccgagagagacatgcacagcctgcccgacatggaccccggcagcagcagcagcctggaccccagcctggccggctgcggcggcgacggcagcagcggcagcggcgacgcccacagctgggacaccctgctgagaaagtgggagcccgtgctgagagactgcctgctgagaaacagaagacagatggagctggagcccatcgccctggaccccccctggaagcccagacaccccgagcccaacagctactag

SEQ ID NO: 25376 - DNA, 2636 bp, Artificial Sequence
  derived and/or modified sequence
ggaaggagcaggaggcagcccaggcggagcgggaggagctggcagcggggcgcatgccaggcgggggtcctcagggcgccccagccgccgccggcggcggcggcgtgagccaccgcgcaggcagccgggattgcttaccacctgcagcgtgctttcggaggcggcggctggcacggaggccgggctacatgagaagctcgacagggcctgggatcgggttcctttccccagcagtgggcacactgttccggttcccaggaggggtgtctggcgaggagtcccaccactcggagtccagggccagacagtgtggccttgactcgagaggcctcttggtccggagccctgtttccaagagtgcagcagcccctactgtgacctctgtgagaggaacctcggcgcactttgggattcagctcagaggtggcaccagattgcctgacaggcttagctggccgtgtggccctgggagtgctgggtggcagcaagagtttgcagccatggatagttctgagaccctggacgccagctgggaggcagcctgcagcgatggagcaaggcgtgtccgggcagcaggctctctgccatcagcagagttgagtagcaacagctgcagccctggctgtggccctgaggtccccccaacccctcctggctctcacagtgcctttacctcaagctttagctttattcggctctcgcttggctctgccggggaacgtggagaagcagaaggctgcccaccatccagagaggctgagtcccattgccagagcccccaggagatgggagccaaagctgccagcttggacgggcctcacgaggacccgcgatgtctctctcggcccttcagtctcttggctacacgggtctctgcagacttggcccaggccgcaaggaacagctccaggccagagcgtgacatgcattctttaccagacatggaccctggctcctccagttctctggatccctcactggctggctgtggtggtgatgggagcagcggctcaggggatgcccactcttgggacaccctgctcaggaaatgggagccagtgctgcgggactgcctgctgagaaaccggaggcagatggagctggaaccaattgctttggatccaccatggaagcctcgacatcctgaaccaaactcctattaatgaaacttcccaaatttaaacaaagcaagacaaatagatatccacacagcgtagatcatgacttctttagacatcatgaaaagaaaaagaggacccacgtggaagaatacgctcatttatgatcagggtagcatcatattcctctcccttttaacattatttcaggatagcagctgtctggatgctggccatgggcttgaaaaaaaccaggtgggcatttctgcccactgtaccgtttctcccatgcgtttcccagtcccctgtcatggcatgaaaaaaccgctattgttctgtgttgggacaattagatttttgtaggggggagaaaccacccaaaagcaaatggaaaaatatgctatgattaatgtcagttacgggaattaaacttcggaggcctttaggacaattatgaaggaatcattttccccttggtggcaatatgtactacagttgtcccttgatatccatgggggattaattccaggacgcctgtggatacagaaatccacgtgtactcaagtcttgttttcagtggatatgaaaagtcggccctccatatctgcaggttttacacttggcgaatgctgtatttttgattcatgttggattaaggatctggaacccctgatacagactgtatttattgaaaaaaaagtctgcctatgagtagactcacatgttaaaacccgtgttgttcaagggtcaaccataactgcaggcagaacatctgggcaggaagctcctgcaggaagacctgtaaactcaggtctgtggaacggcgatgatcttcttcccttgcttccagaattattgctgtgagatcaggtgcactggctacgaccttactctttgtgcagaacttatttctggtctggtttaagtgaacgttattctttctgtgcagtcctgtggttacatcaaaggttaaatttcatatagcatgtctgttatatcagacttctctgatggcctgtccagagcaaacattttaaaatattggtcctattctgtcttataacagtctgctctggtgatttttgtctcatcaattggattatgacactgtcagccactgttagtgttattctcaaattcagtcttccattcatctctccttcccttccctggcagacagacttctgcagccactgggactgttggggtgaggaaaggcaagaaccgatgtttcattctctccctcccttcttcctccctcttttttgttggttgtggggtgggctacatcttcttacccaaacaaccaggagcatttgttggcaagtttattgtgcccagtgccgatgtctggacaattaattccctaggtcagtggctttcacagtttgtgatggtgactccaggaaggaaactcaccatgaccctgtatatacatagaacaaaaatgcagcccactctgatattgtatttgttctattctagttcattaaaagtgaatgttggtcttcatccttt

SEQ ID NO: 25377 - protein, 678 aa, Artificial Sequence
  derived and/or modified sequence
MPGGGPQGAPAAAGGGGVSHRAGSRDCLPPAACFRRRRLARRPGYMRSSTGPGIGFLSPAVGTLFRFPGGVSGEESHHSESRARQCGLDSRGLLVRSPVSKSAAAPTVTSVRGTSAHFGIQLRGGTRLPDRLSWPCGPGSAGWQQEFAAMDSSETLDASWEAACSDGARRVRAAGSLPSAELSSNSCSPGCGPEVPPTPPGSHSAFTSSFSFIRLSLGSAGERGEAEGCPPSREAESHCQSPQEMGAKAASLDGPHEDPRCLSRPFSLLATRVSADLAQAARNSSRPERDMHSLPDMDPGSSSSLDPSLAGCGGDGSSGSGDAHSWDTLLRKWEPVLRDCLLRNRRQMEVISLRLKLQKLQEDAVENDDYDKAETLQQRLEDLEQEKISLHFQLPSRQPALSSFLGHLAAQVQAALRRGATQQASGDDTHTPLRMEPRLLEPTAQDSLHVSITRRDWLLQEKQQLQKEIEALQARMFVLEAKDQQLRREIEEQEQQLQWQGCDLTPLVGQLSLGQLQEVSKALQDTLASAGQIPFHAEPPETIRSLQERIKSLNLSLKEITTKVCMSEKFCSTLRKKVNDIETQLPALLEAKMHAISGNHFWTAKDLTEEIRSLTSEREGLEGLLSKLLVLSSRNVKKLGSVKEDYNRLRREVEHQETAYGYKYCDAESWTQRSQQLA

SEQ ID NO: 25378 - DNA, 2037 bp, Artificial Sequence
  derived and/or modified sequence
atgccaggaggtggcccgcagggggctccagctgctgccggagggggaggtgtgagccatcgagctggaagtcgcgactgcctgcccccagccgcctgcttcaggcgacgtcgcctggctcggcgaccaggctacatgaggtccagcactgggccaggtatcggattcctcagcccggccgtcggcaccctatttaggtttcccggcggtgtgtctggcgaggaatctcaccatagtgagtcaagggcgaggcagtgtggcttagatagccggggtcttctcgtacggtccccggtctcaaaatctgccgccgcacccaccgttacctccgttcggggaacatcagcgcatttcggaatccagctgagaggcggaaccagattgccagatcggctttcttggccctgtggacccggctccgcaggctggcagcaggagttcgctgctatggatagctccgagaccctcgacgcgtcatgggaggctgcttgtagcgacggtgcgaggcgcgtgcgggcggccggctcgctcccatcggctgagctgtcaagcaactcctgcagccctggttgcggtcctgaggtgccaccaactccacccggttcccactctgcctttacatccagtttctcattcattcgccttagcctggggtccgctggcgagcggggggaagcagagggatgtccacccagcagggaggctgaatcccactgccagagccctcaagagatgggtgcgaaagctgctagtcttgatggcccccacgaggatcccagatgcctcagtcgacccttcagtctactcgctactagggtgtctgctgacctcgcgcaggctgccagaaactcttcaagacccgagcgggatatgcacagcctgccagatatggacccggggtcttcttcttcacttgacccatctctggctggctgcggcggtgacggcagcagcgggagcggggacgcccacagctgggacacgctgctccggaagtgggagccagtgttaagagattgcttgttacggaaccgacgacagatggaggtgatctctctccgcctcaagctgcaaaagctgcaggaggatgctgttgagaatgatgattatgataaagccgaaacattgcagcagaggctggaggatctcgaacaagagaaaatcagtcttcatttccagctgccctcacgccagcctgccctctccagtttccttgggcacctagccgcacaagtccaggcagctctcagacgcggagcaacccagcaggcttctggcgacgatacacatacaccacttagaatggagccccggctactggagcccacagcccaggattctctccatgtttcaatcacccgtagggattggctgttacaggaaaagcagcaactgcagaaggaaattgaggcccttcaggctaggatgtttgtacttgaggcaaaggatcagcagcttaggcgcgagatcgaggagcaggagcagcagctgcagtggcaagggtgcgacctaactccgctggtgggacagctgagcctgggccaactccaggaagttagtaaagcgctacaggataccctggcaagcgccggccagattccttttcatgccgagcctccagagactatcaggtccctccaggagcgcatcaaaagccttaacctctccttgaaagaaattacgactaaggtctgtatgagcgaaaaattctgcagcactctgagaaaaaaggtgaacgacatcgagacacagttaccggcgctcctagaggcaaagatgcacgccattagcggaaatcatttctggacagcgaaagacctcaccgaagagattcgcagtctgacaagcgaaagggagggcctggaaggcttgctgagtaaacttctggtgcttagcagcagaaatgtaaaaaagctcggatctgtgaaagaagattataacagactgagaagagaggtagagcaccaggaaacagcgtacggctataagtactgcgacgcagagtcttggacccagagatcacaacagctagcctag

SEQ ID NO: 25379 - DNA, 2037 bp, Artificial Sequence
  derived and/or modified sequence
atgcctgggggcggcccccagggcgccccagctgctgctgggggcggcggcgtgagccaccgggccggcagccgggactgcctgcccccagctgcctgcttcagaagaagaaggctggcccggcggcccggctacatgaggagcagcacaggccctggcatcggcttcctgagccctgctgtgggcaccctcttccgcttccctgggggcgtgtctggagaggagagccaccacagcgagagccgggcccggcagtgtggcctggacagccggggcctgctggtgcgcagccctgtgtccaagtctgctgctgcccccaccgtgacctctgtgcggggcaccagcgcccacttcggcatccagctgcggggcggcacccggctgcctgaccggctgtcctggccctgtggccctggcagcgctggctggcagcaggagtttgctgccatggacagcagcgagaccctggatgcctcctgggaggccgcctgcagtgatggagccaggagagtgcgggccgccggcagcctgcccagcgctgagctgagcagcaacagctgcagccctggctgcggccctgaggtgccccccaccccacctggcagccacagcgccttcaccagcagcttctccttcatccggctgagcctgggcagcgctggggagcggggggaggccgagggctgcccccccagccgggaggccgagagccactgccagagcccccaggagatgggcgccaaggccgccagcctggatggcccccatgaggacccccgctgcctgagccggcccttcagcctgctggccaccagggtgtctgctgacctggcccaggccgccaggaacagcagcaggcctgagcgggacatgcacagcctgcctgacatggaccccggcagcagcagcagcctggaccccagcctggccggctgtggaggagatggcagcagcggcagcggagatgcccacagctgggacaccctgctgaggaagtgggagcctgtgctgcgggactgcctgctgaggaacagacggcagatggaggtgatcagcctgcggctgaagctgcagaagctgcaggaggatgctgtggagaatgatgattatgacaaggccgagaccctgcagcagaggctggaggacctggagcaggagaagatcagcctgcacttccagctgcccagccggcagcctgccctgagcagcttcctgggccacctggccgcccaggtgcaggccgccctgcggcggggggccacccagcaggccagcggagatgacacccacacccccctgaggatggagccccggctgctggagcccacagcccaggacagcctgcacgtgtccatcacccggcgggactggctgctgcaggagaagcagcagctgcagaaggagattgaggccctgcaggccaggatgtttgtgctggaggccaaggaccagcagctgcggcgggagattgaggagcaggagcagcagctgcagtggcagggctgtgacctgacccccctggtgggccagctgagcctgggccagctgcaggaggtgtccaaggccctgcaggacaccctggccagcgctggccagatccccttccacgccgagcccccagagaccatccgcagcctgcaggagcgcatcaagagcctgaacctgagcctgaaggagatcaccaccaaggtgtgcatgtctgagaagttctgcagcaccctgaggaagaaggtgaatgacatcgagacccagctgcctgccctgctggaggccaagatgcacgccatcagcggcaaccacttctggacagccaaggacctgacagaggagatccgcagcctgaccagcgagcgggagggcctggagggcctgctgagcaagctgctggtgctgagcagcagaaatgtgaagaagctgggctctgtgaaggaggactacaaccggctgcggcgggaggtggagcaccaggagacagcctacggctacaagtactgtgatgctgagagctggacccagaggagccagcagctggcctag

SEQ ID NO: 25380 - DNA, 2037 bp, Artificial Sequence
  derived and/or modified sequence
atgcccggcggcggcccccagggcgcccccgccgccgccggcggcgggggggtcagccacagggcaggcagccgcgattgtcttcctccagccgcctgcttccgccgtcgcaggctcgcccgtcgtcccggatatatgagatcctctacggggcccggcattgggtttctcagcccagctgttgggaccctcttcagattccctgggggcgtctctggagaagaatcacatcattctgagagtagggcccggcagtgtgggcttgattcacgaggactgctcgtgcgaagccccgtcagcaagtctgcagctgctcccactgtgacatcagtgcggggcacgtccgcacactttggtatccagcttagaggaggaacccgattgcctgaccgtctgtcatggccgtgtggccctggctcagcggggtggcagcaggaatttgccgcgatggattccagtgagacactagacgctagttgggaggccgcatgctcagatggtgctagacgtgtgcgagctgcaggctcactccccagcgccgagctgtcctccaacagctgttctccaggctgtgggccggaagtacctccaacgccacctgggagccattccgcctttacatccagctttagcttcatcagactgagtctgggcagcgccggcgaaaggggtgaggctgagggttgccctccctcgagggaggctgagtctcactgtcaatccccacaggagatgggtgctaaggcagctagcctggatggcccacatgaagaccctcggtgcctgagccgtccattctcgctcctggcgacaagggtctccgcagacctcgcacaggccgctcgaaactcaagtcgacccgagcgggatatgcacagtctccccgatatggatccggggtcttccagcagtctggatccttctctggcaggctgtggaggtgacggcagttccgggtcgggagatgcccacagttgggatactctcctgcgaaagtgggagccagtcttgcgagattgcttactccgcaaccggagacagatggaggtaataagcctccggttgaaattgcagaaacttcaggaagacgccgtggaaaacgatgactatgataaagctgaaactttacagcagcggttggaagatctggaacaggaaaagatatctctgcatttccaattgccctctcgacagcctgctctgagctcctttcttggtcatctggccgcccaggtgcaggcagccctgcgcaggggagcaacacagcaggcaagtggtgacgacacccatacccctctccgaatggaacctcgcctgctcgagcctacagcccaggacagtctacacgttagcatcacccggcgggactggctgctgcaagaaaagcaacagcttcagaaggaaatagaggcactgcaggcccgtatgtttgtcctggaagctaaggaccaacagctacggcgagagatcgaggagcaagaacagcagctgcagtggcaaggatgtgatttgacacccctcgtcggtcagctctcactgggccagttacaggaagtgagtaaagccctgcaggataccctggctagtgcaggacagatccctttccatgccgagccaccagaaactatccgcagtcttcaggagaggatcaagagccttaatctgtcactgaaggagataacaactaaagtctgtatgagcgagaagttctgctcgaccctgagaaaaaaggtgaatgatatcgagactcagctacctgcactcttagaggccaaaatgcacgcaatctctgggaaccatttttggaccgcaaaggatttaaccgaagagatacggagccttacatcagagagggaaggactggaaggcctcttgtctaaactcttggtcttaagtagccggaatgtgaaaaagctgggttctgtcaaggaagactataacaggttgcgcagagaagtggaacaccaagagactgcttacgggtataagtactgtgacgccgagtcttggacccagagaagccagcagctggcttag

SEQ ID NO: 25381 - DNA, 2037 bp, Artificial Sequence
  derived and/or modified sequence
atgccaggtgggggtccccagggcgcaccagccgcagcaggaggaggcggagtgtcccatagggctggctcacgagactgcctcccgcctgcggcttgtttccgcaggcggagactcgctcgcagacctgggtatatgagatcttctactggtccaggaataggcttcttgtcaccggcagtcgggacactattccggttcccaggcggagtatctggggaagagagtcatcactcagagagtagagctagacagtgtgggctcgatagcagaggcctgctggtcaggagtccagtatccaagtccgcagccgctcccacagtgactagcgtaaggggaacctccgctcactttgggatacagctgcgcggaggcacccgcttgccagaccgactcagctggccatgcggccctgggagtgcgggatggcagcaggagttcgccgcaatggattcctcagaaacactcgacgcaagttgggaggctgcatgcagtgacggggctcggcgagtgcgcgctgctggctccttaccttctgctgaactcagtagcaacagctgttccccagggtgtgggccagaggtgccaccaactcctcctggatcccacagtgcgtttacgtcctccttctctttcatccgactgtcgctaggatccgcaggtgaacgtggggaagctgaaggatgtcctccttcgagagaggcagaatctcactgtcaatccccacaagaaatgggtgctaaggcggcttccttggacgggccacatgaggatccccgatgtctctcccgcccattctcactgctcgcaacacgggtgtccgcagatctcgcccaggctgccagaaactcatccagacctgaaagagacatgcacagcctgcctgacatggatccagggtctagcagcagcctcgacccaagtctcgccggatgcgggggagacggcagcagcggatcaggcgatgcccattcctgggacactctgcttcggaaatgggaacctgtactgagagattgccttctgcggaacaggaggcagatggaggtcattagcttgcgcttaaaacttcagaaattgcaggaagatgcggtcgagaatgatgattacgataaagcggagacactacagcaacgactggaagatctggaacaagagaaaatctccctgcacttccagttgccttcacggcagcctgcattatcctcctttctggggcacctcgccgcacaggtgcaagcagctctcaggcgcggtgccacccagcaggctagcggggatgacacccatactcccttaagaatggagccaagactcctagaaccaactgctcaagattctctccacgttagtataacccgcagagattggttactccaagaaaagcagcagctacagaaggagatcgaggccctccaagctcggatgttcgttctggaggccaaggatcaacagttgaggcgcgaaattgaggaacaggagcaacagctccagtggcaagggtgtgacctgacccccctcgttggacagctgtcactagggcagctgcaggaggtgtctaaagcactacaggatacactggctagcgccggacagattccattccatgcagagccccctgaaacgattagaagcctacaagagcggattaaatccctgaatttatctcttaaagagataactacaaaagtgtgtatgtctgagaaattttgctccacactgcggaaaaaagtgaatgatatcgagacgcagctcccagccctgctcgaggctaagatgcacgccatttctggaaaccacttttggacagcaaaggacctaaccgaggagatccgttcactaactagtgaacgggagggactagaggggctcctttctaaactgctcgtgctgtcctcgcggaatgtgaagaagctcggatctgttaaagaggactacaaccggctgcgccgagaagtggagcaccaggaaaccgcatacggatacaagtactgcgatgctgaatcttggacacaacgctcccagcagttggcatag

SEQ ID NO: 25382 - DNA, 2037 bp, Artificial Sequence
  derived and/or modified sequence
atgcccggcggcggcccccagggcgcccccgccgccgccggcggcggcggcgtgagccacagagccggcagcagagactgcctgccccccgccgcctgcttcagaagaagaagactggccagaagacccggctacatgagaagcagcaccggccccggcatcggcttcctgagccccgccgtgggcaccctgttcagattccccggcggcgtgagcggcgaggagagccaccacagcgagagcagagccagacagtgcggcctggacagcagaggcctgctggtgagaagccccgtgagcaagagcgccgccgcccccaccgtgaccagcgtgagaggcaccagcgcccacttcggcatccagctgagaggcggcaccagactgcccgacagactgagctggccctgcggccccggcagcgccggctggcagcaggagttcgccgccatggacagcagcgagaccctggacgccagctgggaggccgcctgcagcgacggcgccagaagagtgagagccgccggcagcctgcccagcgccgagctgagcagcaacagctgcagccccggctgcggccccgaggtgccccccaccccccccggcagccacagcgccttcaccagcagcttcagcttcatcagactgagcctgggcagcgccggcgagagaggcgaggccgagggctgcccccccagcagagaggccgagagccactgccagagcccccaggagatgggcgccaaggccgccagcctggacggcccccacgaggaccccagatgcctgagcagacccttcagcctgctggccaccagagtgagcgccgacctggcccaggccgccagaaacagcagcagacccgagagagacatgcacagcctgcccgacatggaccccggcagcagcagcagcctggaccccagcctggccggctgcggcggcgacggcagcagcggcagcggcgacgcccacagctgggacaccctgctgagaaagtgggagcccgtgctgagagactgcctgctgagaaacagaagacagatggaggtgatcagcctgagactgaagctgcagaagctgcaggaggacgccgtggagaacgacgactacgacaaggccgagaccctgcagcagagactggaggacctggagcaggagaagatcagcctgcacttccagctgcccagcagacagcccgccctgagcagcttcctgggccacctggccgcccaggtgcaggccgccctgagaagaggcgccacccagcaggccagcggcgacgacacccacacccccctgagaatggagcccagactgctggagcccaccgcccaggacagcctgcacgtgagcatcaccagaagagactggctgctgcaggagaagcagcagctgcagaaggagatcgaggccctgcaggccagaatgttcgtgctggaggccaaggaccagcagctgagaagagagatcgaggagcaggagcagcagctgcagtggcagggctgcgacctgacccccctggtgggccagctgagcctgggccagctgcaggaggtgagcaaggccctgcaggacaccctggccagcgccggccagatccccttccacgccgagccccccgagaccatcagaagcctgcaggagagaatcaagagcctgaacctgagcctgaaggagatcaccaccaaggtgtgcatgagcgagaagttctgcagcaccctgagaaagaaggtgaacgacatcgagacccagctgcccgccctgctggaggccaagatgcacgccatcagcggcaaccacttctggaccgccaaggacctgaccgaggagatcagaagcctgaccagcgagagagagggcctggagggcctgctgagcaagctgctggtgctgagcagcagaaacgtgaagaagctgggcagcgtgaaggaggactacaacagactgagaagagaggtggagcaccaggagaccgcctacggctacaagtactgcgacgccgagagctggacccagagaagccagcagctggcctag

SEQ ID NO: 25383 - DNA, 2224 bp, Artificial Sequence
  derived and/or modified sequence
ggaaggagcaggaggcagcccaggcggagcgggaggagctggcagcggggcgcatgccaggcgggggtcctcagggcgccccagccgccgccggcggcggcggcgtgagccaccgcgcaggcagccgggattgcttaccacctgcagcgtgctttcggaggcggcggctggcacggaggccgggctacatgagaagctcgacagggcctgggatcgggttcctttccccagcagtgggcacactgttccggttcccaggaggggtgtctggcgaggagtcccaccactcggagtccagggccagacagtgtggccttgactcgagaggcctcttggtccggagccctgtttccaagagtgcagcagcccctactgtgacctctgtgagaggaacctcggcgcactttgggattcagctcagaggtggcaccagattgcctgacaggcttagctggccgtgtggccctgggagtgctgggtggcagcaagagtttgcagccatggatagttctgagaccctggacgccagctgggaggcagcctgcagcgatggagcaaggcgtgtccgggcagcaggctctctgccatcagcagagttgagtagcaacagctgcagccctggctgtggccctgaggtccccccaacccctcctggctctcacagtgcctttacctcaagctttagctttattcggctctcgcttggctctgccggggaacgtggagaagcagaaggctgcccaccatccagagaggctgagtcccattgccagagcccccaggagatgggagccaaagctgccagcttggacgggcctcacgaggacccgcgatgtctctctcggcccttcagtctcttggctacacgggtctctgcagacttggcccaggccgcaaggaacagctccaggccagagcgtgacatgcattctttaccagacatggaccctggctcctccagttctctggatccctcactggctggctgtggtggtgatgggagcagcggctcaggggatgcccactcttgggacaccctgctcaggaaatgggagccagtgctgcgggactgcctgctgagaaaccggaggcagatggaggtaatatccttaagattaaaacttcagaaacttcaggaagatgcagttgagaatgatgattatgataaagctgagacgttacaacaaagattagaagacctggaacaagagaaaatcagcctgcactttcaacttccttcaaggcagccagctcttagcagtttcctgggtcacctggcagcacaagtccaggctgccttgcgccgtggggccactcagcaggccagcggagatgacacccacaccccactgagaatggagccgaggctgttggaacccactgctcaggacagcttgcacgtgtccatcacgagacgagactggcttcttcaggaaaagcagcagctacagaaagaaatcgaagctctccaagcaaggatgtttgtgctggaagccaaagatcaacagctgagaagggaaatagaggagcaagagcagcaactccagtggcagggctgcgacctgaccccactggtgggccagctgtccctgggtcagctgcaggaggtcagcaaggccttgcaggacaccctggcctcagccggtcagattcccttccatgcagagccaccggaaaccataaggagcctccaggaaagaataaaatccctcaacttgtcacttaaagaaatcactactaaggtgtgtatgagtgagaaattctgcagcaccctgaggaagaaagttaacgatattgaaacccaactaccagccttgcttgaagccaaaatgcatgccatatcaggaaaccatttctggacggctaaagacctcaccgaggagattagatcattaacatcagagagagaagggctggagggactcctcagcaagctgttggtgttgagttccaggaatgtcaaaaagctgggaagtgttaaagaagattacaacagactgagaagagaagtggagcaccaggagactgcctatggatataagtactgtgatgcagagtcctggacacagagaagtcagcaacttgcctgaggacagcctgcaggacacagcactgtgatttgaacccagagagtctgacttcagcccccagcgctcaactactattaattgaaagggcattgaagagacatgatgtcacaataaaaagaaaaaaagaaaagaaa

SEQ ID NO: 25384 - protein, 244 aa, Artificial Sequence
  derived and/or modified sequence
MKKLMVVLSLIAAAWAEEQNKLVHGGPCDKTSHPYQAALYTSGHLLCGGVLIHPLWVLTAAHCKKPNLQVFLGKHNLRQRESSQEQSSVVRAVIHPDYDAASHDQDIMLLRLARPAKLSELIQPLPLERDCSANTTSCHILGWGKTADGDFPDTIQCAYIHLVSREECEHAYPGQITQNMLCAGDEKYGKDSCQGDSGGPLVCGDHLRGLVSWGNIPCGSKEKPGVYTNVCRYTNWIQKTIQAK

SEQ ID NO: 25385 - protein, 120 aa, Artificial Sequence
  derived and/or modified sequence
MKKLMVVLSLIAAAWAEEQNKLVHGGPCDKTSHPYQAALYTSGHLLCGGVLIHPLWVLTAAHCKKPVILGVRWYVETTSEALCHGVTSPVDQRRSQESTPTSADTRTGSKKPFRPSDPDM

SEQ ID NO: 25386 - protein, 137 aa, Artificial Sequence
  derived and/or modified sequence
MLLRLARPAKLSELIQPLPLERDCSANTTSCHILGWGKTADGDFPDTIQCAYIHLVSREECEHAYPGQITQNMLCAGDEKYGKDSCQGDSGGPLVCGDHLRGLVSWGNIPCGSKEKPGVYTNVCRYTNWIQKTIQAK

SEQ ID NO: 25387 - DNA, 735 bp, Artificial Sequence
  derived and/or modified sequence
atgaagaagctcatggtggttctgtcactgattgcagcagcttgggccgaggaacagaataaactcgtgcacgggggcccttgcgacaagacctcccacccatatcaagccgcactgtacacgtccgggcacctcctttgcggtggcgtgctgatccatccactatgggtcctcaccgccgcgcactgcaaaaagcctaatctccaggtctttctaggaaagcataaccttaggcagagggaatctagccaggagcaatcttctgtggtccgtgccgtgatccatcccgactacgatgcagcttctcatgatcaggacattatgctgcttcgactggcaaggccagccaagctttccgagttaatccagccactgccattggaaagggattgttccgccaatacaacctcttgccacatcctcgggtggggaaaaacagccgatggcgacttccctgacactatccagtgcgcttatattcacctcgtatctagggaagagtgcgagcacgcctaccctggacaaatcactcagaatatgctgtgtgccggagacgagaaatatggtaaggactcctgtcagggagattcaggaggaccacttgtctgtggggatcacctgcggggattagtatcgtggggaaatattccatgtggaagcaaggagaaaccgggggtctacaccaacgtatgtagatataccaactggatccagaaaacaatccaggcaaagtag

SEQ ID NO: 25388 - DNA, 735 bp, Artificial Sequence
  derived and/or modified sequence
atgaaaaagctgatggtggtgctttcgctcatcgccgcagcatgggccgaggaacagaacaaactggtgcacggggggccatgcgacaaaaccagccacccttatcaggctgccctgtatacctctggacatcttctttgcgggggcgtacttatccatcctctttgggtattaactgctgcgcactgcaagaagccaaacctgcaggtcttcttggggaaacataatctccggcagcgagaaagctctcaggaacagtcctctgttgtccgagcagtcatacatccagattacgatgcggcctcccacgatcaagatataatgttactgcgcctggctaggccagctaagttgtcagaactgattcagccactgcccctcgaacgtgactgtagtgccaatacgacttcatgtcacattctggggtgggggaaaacagctgatggcgactttcctgatacaatccagtgtgcttacatccaccttgtctctcgcgaagagtgtgagcacgcctacccaggacaaattactcagaatatgctttgtgccggcgacgaaaaatatggcaaagactcctgccagggggatagcggtgggccacttgtatgcggggatcacttgcgaggattggtgagttggggaaatatcccgtgtggctctaaggaaaagcccggtgtctacacgaatgtctgccgctacaccaactggatccagaaaacaatccaagccaaatag

SEQ ID NO: 25389 - DNA, 363 bp, Artificial Sequence
  derived and/or modified sequence
atgaaaaagttaatggtggtgctgagtctgattgccgctgcttgggctgaagagcagaacaaactggtgcacggcggtccgtgcgataaaacctctcacccataccaggcagcactttatacaagcggccatctgctgtgtgggggcgttctgattcatcctctgtgggtcctaaccgctgcacattgcaaaaagcctgttatcctgggcgtacgctggtacgtagaaactacgagtgaggccttgtgtcatggcgttacgagtccagtagaccaacgccgctcacaggaatctacccccacctcggcagacacccgcaccggaagcaagaaacccttcagaccttctgacccagacatgtag

SEQ ID NO: 25390 - DNA, 1510 bp, Artificial Sequence
  derived and/or modified sequence
ggcggacaaagcccgattgttcctgggccctttccccatcgcgcctgggcctgctccccagcccggggcaggggcgggggccagtgtggtgacacacgctgtagctgtctccccggctggctggctcgctctctcctggggacacagaggtcggcaggcagcacacagagggacctacgggcagctgttccttcccccgactcaagaatccccggagcccggaggcctgcagcaggagcggccatgaagaagctgatggtggtgctgagtctgattgctgcagcctgggcagaggagcagaataagttggtgcatggcggaccctgcgacaagacatctcacccctaccaagctgccctctacacctcgggccacttgctctgtggtggggtccttatccatccactgtgggtcctcacagctgcccactgcaaaaaaccgaatcttcaggtcttcctggggaagcataaccttcggcaaagggagagttcccaggagcagagttctgttgtccgggctgtgatccaccctgactatgatgccgccagccatgaccaggacatcatgctgttgcgcctggcacgcccagccaaactctctgaactcatccagccccttcccctggagagggactgctcagccaacaccaccagctgccacatcctgggctggggcaagacagcagatggtgatttccctgacaccatccagtgtgcatacatccacctggtgtcccgtgaggagtgtgagcatgcctaccctggccagatcacccagaacatgttgtgtgctggggatgagaagtacgggaaggattcctgccagggtgattctgggggtccgctggtatgtggagaccacctccgaggccttgtgtcatggggtaacatcccctgtggatcaaaggagaagccaggagtctacaccaacgtctgcagatacacgaactggatccaaaaaaccattcaggccaagtgaccctgacatgtgacatctacctcccgacctaccaccccactggctggttccagaacgtctctcacctagaccttgcctcccctcctctcctgcccagctctgaccctgatgcttaataaacgcagcgacgtgagggtcctgattctccctggttttaccccagctccatccttgcatcactggggaggacgtgatgagtgaggacttgggtcctcggtcttacccccaccactaagagaatacaggaaaatcccttctaggcatctcctctccccaacccttccacacgtttgatttcttcctgcagaggcccagccacgtgtctggaatcccagctccgctgcttactgtcggtgtccccttgggatgtacctttcttcactgcagatttctcacctgtaagatgaagataaggatgatacagtctccataaggcagtggctgttggaaagatttaaggtttcacacctatgacatacatggaatagcacctgggccaccatgcactcaataaagaatgaattttattatg

SEQ ID NO: 25391 - DNA, 1526 bp, Artificial Sequence
  derived and/or modified sequence
aggacgttccagaagcatctggggacagaaccagcctcttccagggaggcctgggagctgggggtgtgtgtctggcagtccctgcagccctgggctctgcggcccctgcgtcctccgcttggctctgccactgcatctgagtgtcttctctcctcacggctccccgcatttctaactctttctgcctcctcgtctcaaagctgttccttcccccgactcaagaatccccggagcccggaggcctgcagcaggagcggccatgaagaagctgatggtggtgctgagtctgattgctgcagcctgggcagaggagcagaataagttggtgcatggcggaccctgcgacaagacatctcacccctaccaagctgccctctacacctcgggccacttgctctgtggtggggtccttatccatccactgtgggtcctcacagctgcccactgcaaaaaaccgaatcttcaggtcttcctggggaagcataaccttcggcaaagggagagttcccaggagcagagttctgttgtccgggctgtgatccaccctgactatgatgccgccagccatgaccaggacatcatgctgttgcgcctggcacgcccagccaaactctctgaactcatccagccccttcccctggagagggactgctcagccaacaccaccagctgccacatcctgggctggggcaagacagcagatggtgatttccctgacaccatccagtgtgcatacatccacctggtgtcccgtgaggagtgtgagcatgcctaccctggccagatcacccagaacatgttgtgtgctggggatgagaagtacgggaaggattcctgccagggtgattctgggggtccgctggtatgtggagaccacctccgaggccttgtgtcatggggtaacatcccctgtggatcaaaggagaagccaggagtctacaccaacgtctgcagatacacgaactggatccaaaaaaccattcaggccaagtgaccctgacatgtgacatctacctcccgacctaccaccccactggctggttccagaacgtctctcacctagaccttgcctcccctcctctcctgcccagctctgaccctgatgcttaataaacgcagcgacgtgagggtcctgattctccctggttttaccccagctccatccttgcatcactggggaggacgtgatgagtgaggacttgggtcctcggtcttacccccaccactaagagaatacaggaaaatcccttctaggcatctcctctccccaacccttccacacgtttgatttcttcctgcagaggcccagccacgtgtctggaatcccagctccgctgcttactgtcggtgtccccttgggatgtacctttcttcactgcagatttctcacctgtaagatgaagataaggatgatacagtctccataaggcagtggctgttggaaagatttaaggtttcacacctatgacatacatggaatagcacctgggccaccatgcactcaataaagaatgaattttattatg

SEQ ID NO: 25392 - DNA, 376 bp, Artificial Sequence
  derived and/or modified sequence
caggagcggccatgaagaagctgatggtggtgctgagtctgattgctgcagcctgggcagaggagcagaataagttggtgcatggcggaccctgcgacaagacatctcacccctaccaagctgccctctacacctcgggccacttgctctgtggtggggtccttatccatccactgtgggtcctcacagctgcccactgcaaaaaaccggtgattctgggggtccgctggtatgtggagaccacctccgaggccttgtgtcatggggtaacatcccctgtggatcaaaggagaagccaggagtctacaccaacgtctgcagatacacgaactggatccaaaaaaccattcaggccaagtgaccctgacatgtgaca

SEQ ID NO: 25393 - DNA, 1478 bp, Artificial Sequence
  derived and/or modified sequence
aggacgttccagaagcatctggggacagaaccagcctcttccagggaggcctgggagctgggggtgtgtgtctggcagtccctgcagccctgggctctgcggcccctgcgtcctccgcttggctctgccactgcatctgagtgtcttctctcctcacggctccccgcatttctaactctttctgcctcctcgtctcaaagctgttccttcccccgactcaagaatccccggagcccggaggcctgcagcagcctgggcagaggagcagaataagttggtgcatggcggaccctgcgacaagacatctcacccctaccaagctgccctctacacctcgggccacttgctctgtggtggggtccttatccatccactgtgggtcctcacagctgcccactgcaaaaaaccgaatcttcaggtcttcctggggaagcataaccttcggcaaagggagagttcccaggagcagagttctgttgtccgggctgtgatccaccctgactatgatgccgccagccatgaccaggacatcatgctgttgcgcctggcacgcccagccaaactctctgaactcatccagccccttcccctggagagggactgctcagccaacaccaccagctgccacatcctgggctggggcaagacagcagatggtgatttccctgacaccatccagtgtgcatacatccacctggtgtcccgtgaggagtgtgagcatgcctaccctggccagatcacccagaacatgttgtgtgctggggatgagaagtacgggaaggattcctgccagggtgattctgggggtccgctggtatgtggagaccacctccgaggccttgtgtcatggggtaacatcccctgtggatcaaaggagaagccaggagtctacaccaacgtctgcagatacacgaactggatccaaaaaaccattcaggccaagtgaccctgacatgtgacatctacctcccgacctaccaccccactggctggttccagaacgtctctcacctagaccttgcctcccctcctctcctgcccagctctgaccctgatgcttaataaacgcagcgacgtgagggtcctgattctccctggttttaccccagctccatccttgcatcactggggaggacgtgatgagtgaggacttgggtcctcggtcttacccccaccactaagagaatacaggaaaatcccttctaggcatctcctctccccaacccttccacacgtttgatttcttcctgcagaggcccagccacgtgtctggaatcccagctccgctgcttactgtcggtgtccccttgggatgtacctttcttcactgcagatttctcacctgtaagatgaagataaggatgatacagtctccataaggcagtggctgttggaaagatttaaggtttcacacctatgacatacatggaatagcacctgggccaccatgcactcaataaagaatgaattttattatg

SEQ ID NO: 25394 - DNA, 735 bp, Artificial Sequence
  derived and/or modified sequence
atgaagaagctgatggtggtgctgagcctgattgctgctgcctgggccgaggagcagaacaagctggtgcacggcggcccctgtgacaagaccagccacccctaccaggccgccctgtacaccagcggccacctgctgtgtggcggcgtgctgatccaccccctgtgggtgctgacagctgcccactgcaagaagcccaacctgcaggtgttcctgggcaagcacaacctgcggcagcgggagagcagccaggagcagagctctgtggtgcgggccgtcatccacccagactatgatgctgccagccatgaccaggacatcatgctgctgcggctggcccggcctgccaagctgtctgagctgatccagcccctgcccctggagcgggactgcagcgccaacaccaccagctgccacatcctgggctggggcaagacagcagatggagacttcccagacaccatccagtgtgcctacatccacctggtgtcccgggaggagtgtgagcacgcctacccaggccagatcacccagaacatgctgtgtgctggagatgagaagtatggcaaggacagctgccagggcgacagcggcggccccctggtgtgtggggaccacctgcggggcctggtgtcctggggcaacatcccctgtggcagcaaggagaagccaggagtgtacaccaacgtgtgccgctacaccaactggatccagaagaccatccaggccaagtag

SEQ ID NO: 25395 - DNA, 363 bp, Artificial Sequence
  derived and/or modified sequence
atgaagaagctgatggtggtgctgagcctgattgctgctgcctgggccgaggagcagaacaagctggtgcacggcggcccctgtgacaagaccagccacccctaccaggccgccctgtacaccagcggccacctgctgtgtggcggcgtgctgatccaccccctgtgggtgctgacagctgcccactgcaagaagcctgtgatcctgggcgtgcgctggtacgtggagaccaccagcgaggccctgtgccacggcgtgaccagccctgtggaccagaggaggagccaggagagcacccccaccagcgctgacaccaggacaggcagcaagaagcccttccggcccagcgaccctgacatgtag

SEQ ID NO: 25396 - DNA, 735 bp, Artificial Sequence
  derived and/or modified sequence
atgaagaagctgatggtggtgctgagcctgatcgccgccgcctgggcagaggaacagaacaagcttgtccacggcggcccgtgtgataaaacaagtcatccgtaccaggcggcgctatacacttctggtcaccttctttgtggaggggtgctcatccacccactatgggtgctgactgccgcccattgcaagaaaccgaaccttcaggtgtttctgggtaaacataatttacggcagcgagagtcttcacaagaacagagctcagtcgtacgggcagttattcatcctgattacgatgcggcgtctcatgaccaagatatcatgttgttgcgtctcgccagaccagccaaactttctgaattgatacagcctctgcctttggagcgggactgttcagccaatactacttcttgccatattctgggctggggaaagaccgctgatggagattttcccgacaccattcaatgcgcctacatccacctggtgagcagggaggaatgcgaacacgcatatccaggccagattactcaaaacatgctgtgcgcgggtgatgagaagtacgggaaagatagttgtcagggagattctgggggtcctttggtctgtggcgaccacctgcggggtcttgtgagttggggaaacatcccttgtggaagtaaggagaaaccaggcgtctacaccaatgtctgtagatacacaaactggattcaaaagactattcaggccaaatag

SEQ ID NO: 25397 - DNA, 735 bp, Artificial Sequence
  derived and/or modified sequence
atgaagaagctgatggtggtgctgagcctgatcgccgccgcctgggctgaggaacagaacaagctggttcacggcggcccgtgtgataaaacatcccacccttatcaggccgctctgtacacctctgggcacttgctctgcggcggggtgctgatccaccccctctgggtattgacagccgctcactgtaagaagcctaacctgcaggtgtttctcggtaagcacaatctcaggcaaagagaatcctctcaggagcaatcgtccgtagtgagagccgtgatccaccctgattatgatgccgcatcacatgatcaggatattatgctgctccggttagctaggcctgccaaactctcagaattgatccagcccctgccactggaaagagactgttccgctaacaccacctcctgccatattctcggttggggcaaaacggccgacggcgattttcccgatacaatacaatgcgcttacattcacttagtgagcagggaggaatgcgaacatgcatacccaggccaaataacccagaatatgctgtgtgcaggtgacgagaagtatggcaaggactcttgtcagggcgatagcggagggcctttggtgtgcggggatcatttgcgcggactggtgagctggggcaacatcccatgcgggtccaaggaaaaacctggggtgtacacgaatgtttgccggtatacaaactggatacagaagacaattcaagctaagtag

SEQ ID NO: 25398 - DNA, 363 bp, Artificial Sequence
  derived and/or modified sequence
atgaagaagctgatggtggtgctgagcctgatcgccgccgcctgggccgaggagcaaaataaattagtgcatgggggcccgtgtgacaaaacctctcacccatatcaagctgccctatacaccagcgggcatctattatgtggcggtgtactgatacaccctctgtgggtcctgactgcggcacactgcaaaaaacctgtcatcttgggggtgaggtggtacgtggagacaacctccgaggccttatgtcacggcgtgacctctcccgtggaccaaaggagatcccaagagtccacaccaacttccgctgacacacggaccggcagcaaaaaaccctttagaccgagcgaccctgatatgtag

SEQ ID NO: 25399 - DNA, 735 bp, Artificial Sequence
  derived and/or modified sequence
atgaaaaaattgatggtggtcctgtccctaatagcggctgcttgggcagaagagcagaacaagcttgttcacggaggcccttgcgacaagacaagccatccgtaccaggccgcattgtacacaagcggacatttgctgtgtgggggagtactgatccaccccctctgggtactcactgctgctcactgtaagaagccaaacttacaggtgttcctgggtaagcacaatctacggcaacgggaaagctctcaggagcagtcatctgtcgtgagggccgttattcacccagattacgacgcagcctcccatgatcaagacatcatgctcttacgtcttgcccgacctgctaagctgtccgagctgattcagcctcttccactggagagagactgttccgctaataccacttcatgtcatatcctgggctggggcaaaaccgctgacggcgatttccccgatacgatacagtgtgcctacattcatttagtatcccgggaagaatgcgagcatgcttacccaggtcagattactcagaatatgctctgtgcgggagacgagaaatatgggaaggatagctgccaaggggactcaggcggacccttagtttgtggagatcaccttcggggtctggtgtcgtgggggaacataccctgcggcagcaaagaaaagcccggtgtgtacacaaacgtgtgtaggtacacaaactggatccagaagaccatccaagccaagtag

SEQ ID NO: 25400 - DNA, 735 bp, Artificial Sequence
  derived and/or modified sequence
atgaagaagctgatggtggtacttagtctgatagcagccgcatgggccgaggaacaaaataagctggttcacggtggtccctgcgataagacaagccatccctatcaagctgctctgtacacttctggtcacctactgtgtggaggtgtactgatccaccccttatgggtgctcaccgcagcccactgcaagaagccgaacctccaagtgttcttaggaaaacacaacctgagacaaagagagtcctcacaggaacagtcatccgtcgtgcgcgcagtcattcaccctgattacgacgctgctagccacgaccaggacattatgctgcttcgcttagccaggcctgcaaaactcagcgagctgatccagccactgccgctcgagcgggattgtagcgccaataccacttcctgtcacatcttggggtggggcaagaccgcggatggggacttcccagacaccattcagtgcgcctatatccatctggtgtctagggaagaatgcgaacatgcataccccggtcaaattacccagaacatgctttgcgcaggcgatgagaaatacggcaaagatagctgtcagggagacagtggtggcccattagtctgcggtgaccatctgcgaggtctcgtgtcctggggtaacatcccttgcggctctaaggagaaacccggagtatacaccaatgtttgccggtataccaattggatacagaagacgattcaggccaaatag

SEQ ID NO: 25401 - DNA, 363 bp, Artificial Sequence
  derived and/or modified sequence
atgaagaagctgatggtggtcctctccctcattgccgctgcctgggccgaggagcagaacaagctcgtacatggcggaccctgtgataagacttcccacccctaccaagcagctttgtacacatcagggcacctgctgtgcggcggtgtgttgatccatcccctctgggtgctaacggccgctcattgtaaaaagcccgtcatcttgggcgtaaggtggtacgtggagacaacaagcgaggctctgtgtcacggcgtcacctctcccgtggatcagaggcggtcccaggagagcacccccacttctgctgacactcgtacaggttccaagaagccgttcaggccctctgatcccgatatgtag

SEQ ID NO: 25402 - DNA, 123 bp, Artificial Sequence
  derived and/or modified sequence
atgaagaagctgatggtagtacttagtctgatcgctgccggtatcttccgctcgagctggggatctatcacgttcggaaaggggagagtccctcggtcacgcgttttgctgagtggtctgtag

SEQ ID NO: 25403 - DNA, 735 bp, Artificial Sequence
  derived and/or modified sequence
atgaagaagctgatggtggtgctgagcctgatcgccgccgcctgggccgaggagcagaacaagctggtgcacggcggcccctgcgacaagaccagccacccctaccaggccgccctgtacaccagcggccacctgctgtgcggcggcgtgctgatccaccccctgtgggtgctgaccgccgcccactgcaagaagcccaacctgcaggtgttcctgggcaagcacaacctgagacagagagagagcagccaggagcagagcagcgtggtgagagccgtgatccaccccgactacgacgccgccagccacgaccaggacatcatgctgctgagactggccagacccgccaagctgagcgagctgatccagcccctgcccctggagagagactgcagcgccaacaccaccagctgccacatcctgggctggggcaagaccgccgacggcgacttccccgacaccatccagtgcgcctacatccacctggtgagcagagaggagtgcgagcacgcctaccccggccagatcacccagaacatgctgtgcgccggcgacgagaagtacggcaaggacagctgccagggcgacagcggcggccccctggtgtgcggcgaccacctgagaggcctggtgagctggggcaacatcccctgcggcagcaaggagaagcccggcgtgtacaccaacgtgtgcagatacaccaactggatccagaagaccatccaggccaagtag

SEQ ID NO: 25404 - DNA, 363 bp, Artificial Sequence
  derived and/or modified sequence
atgaagaagctgatggtggtgctgagcctgatcgccgccgcctgggccgaggagcagaacaagctggtgcacggcggcccctgcgacaagaccagccacccctaccaggccgccctgtacaccagcggccacctgctgtgcggcggcgtgctgatccaccccctgtgggtgctgaccgccgcccactgcaagaagcccgtgatcctgggcgtgagatggtacgtggagaccaccagcgaggccctgtgccacggcgtgaccagccccgtggaccagagaagaagccaggagagcacccccaccagcgccgacaccagaaccggcagcaagaagcccttcagacccagcgaccccgacatgtag

SEQ ID NO: 25405 - DNA, 123 bp, Artificial Sequence
  derived and/or modified sequence
atgaagaagctgatggtggtgctgagcctgatcgccgccggcatcttcagaagcagctggggcagcatcaccttcggcaagggcagagtgcccagaagcagagtgctgctgagcggcctgtag

SEQ ID NO: 25406 - DNA, 414 bp, Artificial Sequence
  derived and/or modified sequence
atgctgctaaggctcgctcgccccgccaaactgtctgagctgatccagcctctgcccctcgagcgagattgcagtgcaaacacaaccagctgtcatattcttgggtggggcaagaccgctgacggagactttcccgacactatccagtgcgcctatatacatttagtgagccgtgaagagtgcgagcacgcttacccaggccaaattacccagaacatgctgtgcgcgggagacgaaaagtatggcaaagattcctgtcaaggagacagtggaggcccgctcgtatgcggagatcatttgcgcggcctggtgagttggggcaatattccatgtggctctaaagagaagcccggggtatacacaaacgtgtgcaggtacaccaattggatacagaagacaattcaggccaaatag

SEQ ID NO: 25407 - DNA, 414 bp, Artificial Sequence
  derived and/or modified sequence
atgctcctgagactggcacggcccgccaagctgtcggaactcattcagccactgccgttagagcgtgactgttccgcgaatactaccagctgccacattctgggatgggggaaaacagcggacggtgacttcccagacacaatacagtgcgcatacatccacctggtgtctagggaagaatgcgagcacgcatatcccggtcaaatcactcagaatatgctttgcgctggcgacgaaaaatacggaaaggattcctgtcaaggcgactctgggggacccctggtctgcggagaccatctgcgggggctggtgtcctggggaaacattccatgtggtagcaaagagaagccaggagtctatactaacgtatgtagatacacaaattggatccagaagactatccaggccaaatag

SEQ ID NO: 25408 - DNA, 429 bp, Artificial Sequence
  derived and/or modified sequence
atgctgttgcgcctggcacgcccagccaaactctctgaactcatccagccccttcccctggagagggactgctcagccaacaccaccagctgccacatcctgggctggggcaagacagcagatggtgatttccctgacaccatccagtgtgcatacatccacctggtgtcccgtgaggagtgtgagcatgcctaccctggccagatcacccagaacatgttgtgtgctggggatgagaagtacgggaaggattcctgccagggtgattctgggggtccgctggtatgtggagaccacctccgaggccttgtgtcatggggtaacatcccctgtggatcaaaggagaagccaggagtctacaccaacgtctgcagatacacgaactggatccaaaaaaccattcaggccaagtgaccctgacatgtgaca

SEQ ID NO: 25409 - DNA, 414 bp, Artificial Sequence
  derived and/or modified sequence
atgctgctgcggctggcccggcctgccaagctgtctgagctgatccagcccctgcccctggagcgggactgcagcgccaacaccaccagctgccacatcctgggctggggcaagacagcagatggagacttcccagacaccatccagtgtgcctacatccacctggtgtcccgggaggagtgtgaacatgcctacccaggccagatcacccagaacatgctgtgtgctggagatgagaagtatggcaaggacagctgccagggcgacagcggcggccccctggtgtgtggggaccacctgcggggcctggtgtcctggggcaacatcccctgtggcagcaaggagaagccaggagtgtacaccaacgtgtgccgctacaccaactggatccagaagaccatccaggccaagtag

SEQ ID NO: 25410 - DNA, 414 bp, Artificial Sequence
  derived and/or modified sequence
atgctgctgcggctggcccggcccgccaagctgagcgagctgatccaacctctgcctctagagagagattgttcagccaataccacatcgtgtcacatcttaggatgggggaaaactgcagatggtgattttccagacactattcagtgcgcctatatccacctggtttccagagaagagtgtgagcacgcttatccaggccaaattacacaaaatatgctctgcgcaggggatgagaaatatggtaaggactcctgtcagggggacagcggaggacctctcgtgtgtggggatcatctccgcggtctggtctcatggggcaatatcccttgcggctcgaaagagaagcccggtgtctacaccaacgtctgccgttatacaaactggattcagaagacaatccaggcgaaatag

SEQ ID NO: 25411 - DNA, 414 bp, Artificial Sequence
  derived and/or modified sequence
atgctgctgcggctggcccggcccgccaagctgagcgagctgatccagccactgcctttagagcgggattgttctgcaaatacaaccagctgccacattctggggtggggtaagaccgccgatggcgattttccggatacgatccagtgcgcatatatccacttagtgtcccgagaagagtgcgagcacgcctaccctggacagattacccagaatatgttgtgtgccggcgacgaaaagtatggtaaggattcatgccagggtgattctggtggcccactggtctgtggagatcaccttagaggtcttgtgtcctgggggaatattccgtgcggctcaaaggaaaaacccggagtctacaccaacgtgtgtagatataccaactggattcagaagacaattcaggccaaatag

SEQ ID NO: 25412 - DNA, 414 bp, Artificial Sequence
  derived and/or modified sequence
atgttgctgagactggcaaggccagcaaagctgagtgagttaatccagccactgccactggagcgtgactgtagcgccaacaccacaagctgccacattctaggctgggggaaaaccgctgatggagacttcccagatacgattcagtgcgcttacatccatcttgtcagccgggaagaatgtgagcatgcctaccctgggcagattacccaaaacatgctgtgtgccggagacgaaaagtacggcaaggatagctgtcagggggatagcggaggcccactcgtgtgcggcgatcacttgcgcggtctcgtgagctggggcaatattccctgcggatctaaagagaaaccgggtgtttatacaaatgtgtgtcgctatactaactggatccagaaaactattcaggcgaagtag

SEQ ID NO: 25413 - DNA, 414 bp, Artificial Sequence
  derived and/or modified sequence
atgctgctgagactggccagaccagccaaattatccgaactgattcagccgctccctctggagagagactgcagcgccaacacaacctcctgccatatcctgggctggggtaaaacagccgatggggatttccccgataccattcaatgtgcttacatacacttggtgtcgcgcgaagagtgcgaacatgcctatcccggtcagattacgcaaaacatgctgtgcgcgggagacgagaaatacggcaaagatagttgtcaaggggattcaggaggtcccctggtttgtggtgaccacctacgcggactggttagttggggtaatatcccctgtggctcaaaagagaaaccaggagtatacacaaacgtgtgtcgctataccaactggattcagaagaccatccaggcaaaatag

SEQ ID NO: 25414 - DNA, 414 bp, Artificial Sequence
  derived and/or modified sequence
atgctgctgagactggccagacccgccaagctgagcgagctgatccagcccctgcccctggagagagactgcagcgccaacaccaccagctgccacatcctgggctggggcaagaccgccgacggcgacttccccgacaccatccagtgcgcctacatccacctggtgagcagagaggagtgcgagcacgcctaccccggccagatcacccagaacatgctgtgcgccggcgacgagaagtacggcaaggacagctgccagggcgacagcggcggccccctggtgtgcggcgaccacctgagaggcctggtgagctggggcaacatcccctgcggcagcaaggagaagcccggcgtgtacaccaacgtgtgcagatacaccaactggatccagaagaccatccaggccaagtag

SEQ ID NO: 25415 - protein, 445 aa, Artificial Sequence
  derived and/or modified sequence
MSPPGMWQPGVQQPGISQQVPSHPDMSQPGMSQQVPSQPGIRQPDTSQSCKNQTDMSQPDANQSSLSDSNQTGIIQPSPSLLGMNQMDMNQWSASLYEMNQVDMKQPSMSQAGMRQSGTNLPDINQPGMKQPGTWQLGRSQPGMWPQSLSELVLSEASISQPGPPQRAPSQSGPRQSSTSQAGTNQSGISQPVMWQLDMRQSGGSQPSMRQVGTSQSGTSQIGMSQPGTWQTGLSQPVPRQPNKSPPGMWQRGMWQPGMSQQVPSQLGMRQPGTSQSSKNQTGMSHPGRGQPGIWEPGPSQPGLSQQDLNQLVLSQPGLSQPGRSQPSVSQMGMRQTSMDYFQIRHAEAGDCPEILRLIKELAACENMLDAMELTAADLLRDGFGDNPLFYCLIAEVNDQQKPSGKLTVGFAMYYFTYDSWTGKVLYLEDFYVTQAYQDSHHNSM

SEQ ID NO: 25416 - protein, 632 aa, Artificial Sequence
  derived and/or modified sequence
MNQSGTNQSSLSDSNQAGINQPSTNSLGMNQMDMNQGSASLYEMNQVDMKQPSMSQAGMRQSGTNLPDINQPDMKQPDTWQLGRSQPGMLQQELSQLVLSKAGISQPDPSQPGPSQSGPSQSRMRQIGTNQSGMSQPVMQQLDSQSGGSQPSMRQVGTSQLGTSQIGMSQPGTWQTGLSQPVLRQPNMSPPGMWQPGVQQPGISQQVPSHPDMSQPGMSQQVPSQPGIRQPDTSQSCKNQTDMSQPDANQSSLSDSNQTGIIQPSPSLLGMNQMDMNQWSASLYEMNQVDMKQPSMSQAGMRQSGTNLPDINQPGMKQPGTWQLGRSQPGMWPQSLSELVLSEASISQPGPPQRAPSQSGPRQSSTSQAGTNQSGISQPVMWQLDMRQSGGSQPSMRQVGTSQSGTSQIGMSQPGTWQTGLSQPVPRQPNKSPPGMWQRGMWQPGMSQQVPSQLGMRQPGTSQSSKNQTGMSHPGRGQPGIWEPGPSQPGLSQQDLNQLVLSQPGLSQPGRSQPSVSQMGMRQTSMDYFQIRHAEAGDCPEILRLIKELAACENMLDAMELTAADLLRDGFGDNPLFYCLIAEVNDQQKPSGKLTVGFAMYYFTYDSWTGKVLYLEDFYVTQAYQDSHHNSM

SEQ ID NO: 25417 - DNA, 1338 bp, Artificial Sequence
  derived and/or modified sequence
atgagcccccccggcatgtggcagcccggcgtgcagcagcccggcatcagccagcaggtgcccagccaccccgacatgagccagcccggcatgagccagcaggtgcccagccagcccggcatcagacagcccgacaccagccagagctgcaagaaccagaccgacatgagccagcccgacgccaaccagagcagcctgagcgacagcaaccagaccggcatcatccagcccagccccagcctgctgggcatgaaccagatggacatgaaccagtggagcgccagcctgtacgagatgaaccaggtggacatgaagcagcccagcatgagccaggccggcatgagacagagcggcaccaacctgcccgacatcaaccagcccggcatgaagcagcccggcacctggcagctgggcagaagccagcccggcatgtggccccagagcctgagcgagctggtgctgagcgaggccagcatcagccagcccggccccccccagagagcccccagccagagcggccccagacagagcagcaccagccaggccggcaccaaccagagcggcatcagccagcccgtgatgtggcagctggacatgagacagagcggcggcagccagcccagcatgagacaggtgggcaccagccagagcggcaccagccagatcggcatgagccagcccggcacctggcagaccggcctgagccagcccgtgcccagacagcccaacaagagcccccccggcatgtggcagagaggcatgtggcagcccggcatgagccagcaggtgcccagccagctgggcatgagacagcccggcaccagccagagcagcaagaaccagaccggcatgagccaccccggcagaggccagcccggcatctgggagcccggccccagccagcccggcctgagccagcaggacctgaaccagctggtgctgagccagcccggcctgagccagcccggcagaagccagcccagcgtgagccagatgggcatgagacagaccagcatggactacttccagatcagacacgccgaggccggcgactgccccgagatcctgagactgatcaaggagctggccgcctgcgagaacatgctggacgccatggagctgaccgccgccgacctgctgagagacggcttcggcgacaaccccctgttctactgcctgatcgccgaggtgaacgaccagcagaagcccagcggcaagctgaccgtgggcttcgccatgtactacttcacctacgacagctggaccggcaaggtgctgtacctggaggacttctacgtgacccaggcctaccaggacagccaccacaacagcatgtag

SEQ ID NO: 25418 - DNA, 1899 bp, Artificial Sequence
  derived and/or modified sequence
atgaaccagagcggcaccaaccagagcagcctgagcgacagcaaccaggccggcatcaaccagcccagcaccaacagcctgggcatgaaccagatggacatgaaccagggcagcgccagcctgtacgagatgaaccaggtggacatgaagcagcccagcatgagccaggccggcatgagacagagcggcaccaacctgcccgacatcaaccagcccgacatgaagcagcccgacacctggcagctgggcagaagccagcccggcatgctgcagcaggagctgagccagctggtgctgagcaaggccggcatcagccagcccgaccccagccagcccggccccagccagagcggccccagccagagcagaatgagacagatcggcaccaaccagagcggcatgagccagcccgtgatgcagcagctggacagccagagcggcggcagccagcccagcatgagacaggtgggcaccagccagctgggcaccagccagatcggcatgagccagcccggcacctggcagaccggcctgagccagcccgtgctgagacagcccaacatgagcccccccggcatgtggcagcccggcgtgcagcagcccggcatcagccagcaggtgcccagccaccccgacatgagccagcccggcatgagccagcaggtgcccagccagcccggcatcagacagcccgacaccagccagagctgcaagaaccagaccgacatgagccagcccgacgccaaccagagcagcctgagcgacagcaaccagaccggcatcatccagcccagccccagcctgctgggcatgaaccagatggacatgaaccagtggagcgccagcctgtacgagatgaaccaggtggacatgaagcagcccagcatgagccaggccggcatgagacagagcggcaccaacctgcccgacatcaaccagcccggcatgaagcagcccggcacctggcagctgggcagaagccagcccggcatgtggccccagagcctgagcgagctggtgctgagcgaggccagcatcagccagcccggccccccccagagagcccccagccagagcggccccagacagagcagcaccagccaggccggcaccaaccagagcggcatcagccagcccgtgatgtggcagctggacatgagacagagcggcggcagccagcccagcatgagacaggtgggcaccagccagagcggcaccagccagatcggcatgagccagcccggcacctggcagaccggcctgagccagcccgtgcccagacagcccaacaagagcccccccggcatgtggcagagaggcatgtggcagcccggcatgagccagcaggtgcccagccagctgggcatgagacagcccggcaccagccagagcagcaagaaccagaccggcatgagccaccccggcagaggccagcccggcatctgggagcccggccccagccagcccggcctgagccagcaggacctgaaccagctggtgctgagccagcccggcctgagccagcccggcagaagccagcccagcgtgagccagatgggcatgagacagaccagcatggactacttccagatcagacacgccgaggccggcgactgccccgagatcctgagactgatcaaggagctggccgcctgcgagaacatgctggacgccatggagctgaccgccgccgacctgctgagagacggcttcggcgacaaccccctgttctactgcctgatcgccgaggtgaacgaccagcagaagcccagcggcaagctgaccgtgggcttcgccatgtactacttcacctacgacagctggaccggcaaggtgctgtacctggaggacttctacgtgacccaggcctaccaggacagccaccacaacagcatgtag

SEQ ID NO: 25419 - DNA, 1338 bp, Artificial Sequence
  derived and/or modified sequence
atgtccccacctgggatgtggcaacccggcgtgcagcagcccggcatatctcagcaagtcccaagtcatcctgatatgtcccaaccaggcatgtctcaacaggtccccagccagcccgggattagacagcctgataccagtcagtcatgtaagaaccagacagatatgtcccagcccgacgctaaccagtcttcactatctgactctaatcaaactgggattatacagcccagcccctcactgttgggtatgaatcaaatggatatgaaccagtggtccgcttccctttatgaaatgaaccaggtggacatgaaacaaccctccatgagccaggcaggtatgagacaatccggaacaaatctgccggatatcaaccagcctggaatgaaacagcctggaacatggcagctaggaaggtcacagccaggcatgtggccacagtccctttctgagctggtactgagtgaggcttcaatttcgcagcccggaccaccccagagagcaccttctcagtccgggcctaggcagtcctcaaccagccaggctgggacaaaccagtccggcattagtcagccagtcatgtggcagttagatatgcggcaaagtggtggcagccaaccatccatgcgtcaagtaggcaccagccagtcaggtactagtcaaataggcatgtcacagccaggtacatggcagactggcctatcccagccagtccctcgccaacccaacaagtctcctccaggcatgtggcagcgggggatgtggcagcctggaatgtcccagcaggtacctagccaactggggatgcgccagcctggcacctctcagtccagcaaaaaccagacgggaatgtctcatccgggcagagggcagcccggcatttgggagccaggaccgtctcagcccggtctctcacagcaggacctaaatcaacttgtcctgtcacagcctggactgtcacaacccggccgctcccagcctagcgtgtcacagatgggaatgcggcaaacgtctatggactattttcagatccgtcatgctgaggcaggagactgtcctgagattcttagactgatcaaggaactagctgcatgtgagaacatgctggacgcgatggagctcaccgcggccgatttgctgcgagacggtttcggagataatccactgttctattgtctgatcgcggaggtgaacgatcagcaaaagccgtccggtaaactgactgtgggctttgctatgtactattttacctacgacagttggacggggaaggtgctgtatctggaagacttctacgtaacacaggcctatcaggatagtcaccataacagtatgtag

SEQ ID NO: 25420 - DNA, 1899 bp, Artificial Sequence
  derived and/or modified sequence
atgaaccagtcgggtaccaatcagtcctctctgtctgacagtaatcaggccgggatcaaccaaccaagtactaacagcctgggcatgaatcaaatggatatgaatcaggggagtgcgtctttgtatgagatgaaccaggtagacatgaagcagccaagcatgagccaagctggcatgagacagagcggaacaaacttgccagacatcaaccagccggacatgaagcagcccgacacgtggcaactcggacgaagtcagccaggcatgctgcaacaggaactctctcaattggtgctcagcaaggctggcatttctcaaccagacccttctcagcccggacctagccaatctggccccagccagagcagaatgcggcagattggaaccaaccagtctggcatgtcacagcccgtgatgcaacagctggattcacagagcggcggcagccaaccaagtatgaggcaggtcggaacatcccagctcggtacaagtcagatcggcatgtctcagcctggaacttggcagacaggtttgagtcagcccgttctgagacagcccaacatgtctccccctggaatgtggcagcccggggtgcagcagccaggcatctcacagcaagtcccatcccacccagatatgagccagccagggatgtcacagcaggtgccatcacagcccggcattcggcagcccgatacgagccaatcatgcaaaaatcagactgacatgtctcagcccgacgccaatcagtcctccctgtctgattccaaccagaccggcatcattcagcccagtccttctctgctgggcatgaatcagatggacatgaatcagtggagcgcatctctgtatgaaatgaaccaggtagacatgaagcagcctagtatgagccaggcagggatgcggcagtctggcaccaatctacccgacatcaatcagccagggatgaaacagccaggaacttggcaactgggtaggtctcagcccggcatgtggccgcagtcacttagcgagcttgttctaagcgaggccagtatctctcaaccgggaccaccccagcgtgctccttctcaaagtggaccccgccagagctccaccagtcaggcagggaccaatcagtcgggtatttctcagcccgtgatgtggcagctcgacatgaggcaatctggcgggtctcagccaagtatgaggcaagtcggcacctctcagagtggcacctcgcagatcggtatgagccagcccggtacctggcagaccggcctgagccagcccgtccctcgtcagcccaacaagtctccacccggaatgtggcaacgagggatgtggcaacccgggatgagtcagcaggtccctagtcagctaggaatgcgtcagccaggtacctctcagtccagtaaaaatcaaaccggtatgtctcatcccgggcgagggcaacctggtatctgggagcccggtccgtcccagcccggtctgagccagcaggacctcaaccaactggtcttatcacagcctggcttatcccagccgggaaggagccagccctcagtcagtcagatgggcatgaggcagacttccatggattatttccagattcggcacgcagaagccggtgactgtcctgaaattttgaggttgatcaaagagcttgcagcttgtgagaacatgctcgatgccatggaactgacggccgccgatcttttgcgcgatggtttcggggataaccctcttttctattgcttaatcgcggaagtgaatgaccagcagaaacctagtggaaagctgactgtggggttcgccatgtattactttacctatgatagctggactggcaaggtactgtatttggaggatttctacgtgactcaggcatatcaagactcacatcataatagtatgtag

SEQ ID NO: 25421 - DNA, 1338 bp, Artificial Sequence
  derived and/or modified sequence
atgagccccccaggcatgtggcagcccggggtgcagcagcccggcatcagccagcaggtgcccagccacccagacatgagccagcccggcatgagccagcaggtgcccagccagcccggcatccggcagcctgacaccagccagagctgcaagaaccagacagacatgagccagccagatgccaaccagagcagcctgagtgacagcaaccagacaggcatcatccagcccagccccagcctgctgggcatgaaccagatggacatgaaccagtggagcgccagcctgtatgagatgaaccaggtggacatgaagcagcccagcatgagccaggccggcatgaggcagagcggcaccaacctgcctgacatcaaccagcccggcatgaagcagcccggcacctggcagctgggccgcagccagcccggcatgtggccccagagcctgtctgagctggtgctgtctgaggccagcatcagccagcccggccccccccagagggcccccagccagagcggcccccggcagagcagcaccagccaggccggcaccaaccagagcggcatcagccagcctgtgatgtggcagctggacatgaggcagagcggcggcagccagcccagcatgaggcaggtgggcaccagccagagcggcaccagccagatcggcatgagccagcccggcacctggcagacaggcctgagccagcctgtgccccggcagcccaacaagagccccccaggcatgtggcagaggggcatgtggcagcccggcatgagccagcaggtgcccagccagctgggcatgaggcagcccggcaccagccagagcagcaagaaccagacaggcatgagccaccctggccggggccagcccggcatctgggagcccggccccagccagcccggcctgagccagcaggacctgaaccagctggtgctgagccagcccggcctgagccagcccggccgcagccagcccagcgtgtcccagatgggcatgaggcagacctccatggactacttccagatcagacatgctgaggccggggactgcccagagatcctgcggctcatcaaggagctggccgcctgtgagaacatgctggatgccatggagctgacagctgctgacctgctgagagatggctttggagacaaccccctcttctactgcctgattgctgaggtgaatgaccagcagaagcccagcggcaagctgactgtgggctttgccatgtactacttcacctatgacagctggacaggcaaggtgctgtacctggaggacttctacgtgacccaggcctaccaggacagccaccacaacagcatgtag

SEQ ID NO: 25422 - DNA, 1899 bp, Artificial Sequence
  derived and/or modified sequence
atgaaccagagcggcaccaaccagagcagcctgagtgacagcaaccaggccggcatcaaccagcccagcaccaacagcctgggcatgaaccagatggacatgaaccagggcagcgccagcctgtatgagatgaaccaggtggacatgaagcagcccagcatgagccaggccggcatgaggcagagcggcaccaacctgcctgacatcaaccagcctgacatgaagcagcctgacacctggcagctgggccgcagccagcccggcatgctgcagcaggagctgagccagctggtgctgagcaaggccggcatcagccagcctgaccccagccagcccggccccagccagagcggccccagccagagcaggatgaggcagatcggcaccaaccagagcggcatgagccagcctgtgatgcagcagctggacagccagagcggcggcagccagcccagcatgaggcaggtgggcaccagccagctgggcaccagccagatcggcatgagccagcccggcacctggcagacaggcctgagccagcctgtgctgcggcagcccaacatgagccccccaggcatgtggcagcccggggtgcagcagcccggcatcagccagcaggtgcccagccacccagacatgagccagcccggcatgagccagcaggtgcccagccagcccggcatccggcagcctgacaccagccagagctgcaagaaccagacagacatgagccagccagatgccaaccagagcagcctgagtgacagcaaccagacaggcatcatccagcccagccccagcctgctgggcatgaaccagatggacatgaaccagtggagcgccagcctgtatgagatgaaccaggtggacatgaagcagcccagcatgagccaggccggcatgaggcagagcggcaccaacctgcctgacatcaaccagcccggcatgaagcagcccggcacctggcagctgggccgcagccagcccggcatgtggccccagagcctgtctgagctggtgctgtctgaggccagcatcagccagcccggccccccccagagggcccccagccagagcggcccccggcagagcagcaccagccaggccggcaccaaccagagcggcatcagccagcctgtgatgtggcagctggacatgaggcagagcggcggcagccagcccagcatgaggcaggtgggcaccagccagagcggcaccagccagatcggcatgagccagcccggcacctggcagacaggcctgagccagcctgtgccccggcagcccaacaagagccccccaggcatgtggcagaggggcatgtggcagcccggcatgagccagcaggtgcccagccagctgggcatgaggcagcccggcaccagccagagcagcaagaaccagacaggcatgagccaccctggccggggccagcccggcatctgggagcccggccccagccagcccggcctgagccagcaggacctgaaccagctggtgctgagccagcccggcctgagccagcccggccgcagccagcccagcgtgtcccagatgggcatgaggcagacctccatggactacttccagatcagacatgctgaggccggggactgcccagagatcctgcggctcatcaaggagctggccgcctgtgagaacatgctggatgccatggagctgacagctgctgacctgctgagagatggctttggagacaaccccctcttctactgcctgattgctgaggtgaatgaccagcagaagcccagcggcaagctgactgtgggctttgccatgtactacttcacctatgacagctggacaggcaaggtgctgtacctggaggacttctacgtgacccaggcctaccaggacagccaccacaacagcatgtag

SEQ ID NO: 25423 - DNA, 1338 bp, Artificial Sequence
  derived and/or modified sequence
atgagcccccccggcatgtggcagcccggcgtgcagcagcccggcatttcacaacaagtcccatctcatcctgacatgtctcagcccggtatgtcccagcaagtgcccagccaacccggcataaggcaaccagatacatcgcaatcttgcaaaaaccagaccgatatgtcacagcctgatgctaatcagagctccctgagcgactcaaaccagacaggtattattcaaccctcccctagtctgcttgggatgaatcagatggacatgaaccagtggtccgctagtctgtatgaaatgaatcaggttgatatgaaacaaccttcaatgtcacaagctgggatgcgccagtccggcacaaatctgccagacatcaaccagccagggatgaaacaacccgggacctggcagctgggccgctcccagcccggaatgtggccacagtccctgtcagagctggtgctgagtgaggcctctatttcccagcctggaccacctcagcgggcccccagccaaagtgggcccaggcaaagctccacctctcaagccggtaccaatcagtcgggtatctcgcaacctgtcatgtggcaactggacatgaggcagtcggggggctctcagccttccatgaggcaagtgggcacatcccagtccggcaccagccagattgggatgagccagccaggcacctggcagacaggattatctcagcctgtgccccgacagcccaataaaagtccccctggtatgtggcagcgtgggatgtggcagcctggaatgtcccagcaggtaccgagccagctcggcatgaggcagccaggtacatcccagtcctcgaaaaaccagaccggaatgagccaccctggacggggccaacccggaatctgggagccaggaccgtcgcaaccaggactgtcccagcaggacctgaaccaactagtgctttcccagcctggtttgtctcaacccggtcgctcccaaccaagcgtgtctcagatgggcatgcgccagacatcaatggactacttccaaatccggcacgccgaagctggagactgcccagaaatcctcaggcttattaaagaactcgccgcctgcgaaaatatgctggatgcaatggaactcacggccgcagatttattacgagatggctttggagataatccactgttttactgtctcatcgcggaagtgaatgatcaacagaagccttctggcaagttgaccgtggggttcgctatgtattactttacttacgattcctggactggaaaggtgctatatctagaagatttctatgtgactcaggcttaccaggacagtcaccataacagcatgtag

SEQ ID NO: 25424 - DNA, 1899 bp, Artificial Sequence
  derived and/or modified sequence
atgaaccagagcggcaccaaccagagcagcctgagcgacagcaaccaggccgggattaatcagccttcaacaaactccttgggaatgaaccagatggacatgaaccagggaagtgcctctttatacgaaatgaaccaggttgacatgaaacagccaagcatgagtcaagctggcatgcgacagtcgggtacgaatctgcccgatataaatcaacccgacatgaagcagcctgatacctggcagctcggccgcagccagccgggcatgttgcagcaggagctgagtcagctggttctttcaaaggctggtattagccaacctgaccccagtcaaccgggaccctcacaatcaggcccgtcacagagccgaatgagacagatcggaaccaaccagtctggcatgtcacagccagtgatgcagcagcttgactctcagagtgggggcagtcagcccagcatgcggcaagtgggaaccagtcagctggggacatctcagattggcatgtctcagcctgggacgtggcaaacaggcctgagccagccagtactgcggcaaccgaatatgagcccccctgggatgtggcagcccggcgtgcagcaaccaggaatcagtcagcaggtgcctagccatccagacatgtctcagcccggcatgagccagcaagttccttcccagccgggtatccggcagccagacacatcccagtcatgcaagaatcaaactgatatgagtcaaccagatgccaatcaatctagcctctccgactctaaccagaccggcattatccagccctcgccctccctcctgggcatgaatcaaatggacatgaaccagtggagtgccagcctgtacgaaatgaaccaggtggacatgaaacagccgtcaatgagccaagccggcatgagacagtcaggtactaacctcccagatatcaaccagcccggcatgaagcagcctggtacttggcaactgggaaggagccagccaggtatgtggccccaaagtctttcagaactcgtgttatctgaggcttccatttcgcagcctggacctcctcagagggccccatcacagagtggtccccggcagtcgtctaccagtcaagctgggacaaatcagtccggcatttctcagccagtcatgtggcagttggacatgagacagagcggggggtctcagcctagtatgaggcaggtggggacctcccagtccgggacaagccagattgggatgagtcagcccggaacgtggcagaccggcctgtctcaacctgtccctagacagcctaataaaagtccccctggcatgtggcagagggggatgtggcagcccggaatgagccagcaggtgccctcacaacttgggatgagacagcccggcacatcacagagcagcaagaatcaaaccgggatgtctcacccaggccggggacagcccgggatatgggaacctggccccagccagccgggcctgagtcaacaagatttaaatcagcttgtcctctcccagccgggcctatcgcagcccgggagaagccaacccagtgtgagccaaatgggaatgcgccagacatcaatggattactttcagattaggcatgccgaggccggcgattgcccggagattctgcgcctcatcaaggagcttgctgcgtgcgaaaacatgctggatgccatggagctgacggccgccgatttactgcgcgacgggttcggcgataaccctcttttctattgccttatcgcggaagtcaacgaccagcagaagccctccggaaaactgacagtgggatttgctatgtattacttcacctatgattcgtggacaggcaaggtgctctacttggaggacttctatgtcactcaggcctatcaggacagtcaccataactctatgtag

SEQ ID NO: 25425 - DNA, 1338 bp, Artificial Sequence
  derived and/or modified sequence
atgagccctcctggtatgtggcagcccggagtacaacagccgggaatctctcaacaggtgcctagtcatcccgacatgagtcagccaggaatgtcacagcaggtgccttcgcagccaggcatcaggcagcctgacacctcccagagctgtaagaaccaaaccgacatgtcccaacccgatgctaatcagagcagtctctcagactccaatcagaccggcattatccagcccagcccctcacttctgggcatgaaccagatggacatgaaccagtggagtgcctccctgtacgaaatgaatcaagtcgacatgaaacagcctagtatgtcccaggccggaatgcggcaatccggtactaatttgccggacataaatcaacccggtatgaaacaacccggtacgtggcagcttggacgaagtcagccgggaatgtggccgcaaagtctgtcagaactggttctctcggaggcttcgatttcccaaccaggccctcctcaaagggctccaagtcagagcggaccccgtcagtcctctacctctcaggctggaacaaaccagtccggaatttcccagcctgtgatgtggcagctggacatgcggcagagcggcggttcccagccgagcatgcggcaggtgggcacctcccagagtggaacctctcagatcggtatgagtcagcctggaacatggcagacgggcctgagccaaccagtgcccaggcagcctaacaagtcgcccccaggcatgtggcagagaggtatgtggcagccgggaatgagccagcaggttccctctcagctcgggatgaggcagccaggcaccagccagagtagtaagaatcagaccggtatgagccaccctgggagaggccaacctggcatctgggagcccggacctagccagcccggtttgagtcagcaggatctgaaccagctggtgctttctcagcccggactctctcagcctggacggagccagccatccgtgtcacagatggggatgaggcagacgagcatggattacttccagatccgccacgctgaagccggagattgccccgaaatcctccgcctgatcaaggagctggcagcttgcgagaacatgctggacgccatggaacttactgcggctgacttactccgagacggcttcggtgataaccccttattttattgtctgatcgctgaggttaatgatcaacagaagccctccggcaaattgacagtgggtttcgccatgtactacttcacctacgatagctggacagggaaggtgctatacctcgaggatttctacgtcacacaggcctatcaggattcccatcataactcaatgtag

SEQ ID NO: 25426 - DNA, 1899 bp, Artificial Sequence
  derived and/or modified sequence
atgaaccagtcggggacaaaccagagctccctctcagactctaatcaagccggaatcaaccagccatctacaaactctttgggcatgaaccagatggatatgaatcaaggcagtgcctccctttatgaaatgaaccaggtcgatatgaagcagccatctatgtctcaggccggaatgagacagagtggcaccaacctgcccgatatcaatcagcccgacatgaagcagccagacacctggcagctcgggaggagtcagccaggtatgttgcaacaagagctgtcacagctcgtgctctctaaggcgggaatttctcaaccagatccctcccaaccaggccctagccagtcagggcctagtcaaagtcgcatgcgtcagatcggaactaaccagtcgggcatgtctcagccagtgatgcaacagctggattcccaatctgggggtagtcagccctctatgcggcaggtgggcaccagtcagctggggacaagccagataggcatgtctcagccagggacctggcagaccggtctgagtcagcctgtcctgaggcaacccaatatgagtccaccaggcatgtggcaaccaggagtccagcagcctggtatcagtcagcaggtaccttcccaccccgatatgtcacagcccggtatgagccaacaggtgccctctcagcccggaatacgccagccagacacaagccaatcttgcaaaaaccaaactgatatgagccagcccgatgccaaccagtcaagcctttccgattcgaatcagaccggtattatccagccatcacccagtttactggggatgaaccagatggatatgaaccagtggtctgcaagcctttatgaaatgaaccaggtggatatgaaacaacctagtatgtctcaagcagggatgcgtcagagtgggacaaacctgcctgacatcaatcagcccggaatgaaacagcctggcacatggcaactcggacgatcccaaccaggaatgtggccacagtctttgtccgagctggtgcttagtgaggctagcatcagtcagccaggcccaccacagagagctccttcccagtcagggccacgccagagttctacgagtcaggctggtaccaatcagtccggaatctcccagcctgttatgtggcagctggatatgcgccagtctgggggttcccagccatccatgcggcaggtggggactagccagagcggtaccagccagattggcatgtcacagcccggaacttggcagacaggtctaagccagcctgtgccacgccagcccaacaagtccccccctgggatgtggcagcggggaatgtggcaaccaggaatgtcacagcaggtgccatcccagctgggaatgcgtcagccaggtacttcccagagtagtaagaatcagacaggcatgagccacccaggcagaggacagccaggaatctgggagcctggacccagtcagcccggtctatctcaacaggatctcaatcaactggtcctgagtcagccaggtctgtcacaacccggacgctcacagccctccgtttcccagatgggtatgagacagaccagcatggactacttccaaatccgacacgcagaggctggggattgcccagaaattctacgcctgatcaaggagctcgcagcttgcgaaaacatgctggatgccatggaattaacggctgccgacctgctcagagacgggtttggggataatcccctgttctactgcctcatcgctgaggtgaacgaccagcagaaaccgagtggaaagctcactgtgggttttgcaatgtactacttcacatatgatagctggaccgggaaagtcctctacctggaggatttttacgttacccaggcctatcaagattcacaccacaattctatgtag

SEQ ID NO: 25427 - DNA, 2151 bp, Artificial Sequence
  derived and/or modified sequence
atgaaccaatcaggcacgaaccaatcaagtttatcagactcgaaccaagcaggcataaaccagccaagcacaaactcacttggtatgaaccaaatggacatgaaccaagggagtgcaagcctatatgaaatgaaccaagtggacatgaaacaaccaagcatgagccaagctggcatgaggcaatcaggtacaaacctaccagacataaaccaacccgacatgaaacaaccagacacatggcaattaggtaggagccaaccaggcatgctgcaacaagaactgagccaactagtcctgagcaaagcaggcataagccaaccagacccatcgcaaccaggcccaagccaatcaggccccagccaatcacgcatgaggcaaataggcacgaaccaatcaggtatgagccaaccagtgatgcagcaactagacagccagtcaggtgggagccaaccaagcatgagacaagtaggcaccagccaattaggcacaagccaaataggcatgagccaaccaggcacatggcaaacaggactgagccaaccagtcctgaggcaaccaaacatgagtccaccaggcatgtggcaaccaggcgtgcaacaaccaggcatcagccagcaagtcccaagccacccagacatgagtcaaccaggcatgagccagcaagtccccagccaaccaggcataaggcaaccagacactagccaatcatgtaagaaccaaacagacatgagccaaccagacgcaaaccaatcaagtttatcagattccaaccaaacaggtataatccagccaagcccaagcttacttggtatgaaccaaatggacatgaaccaatggagtgcaagcctatatgaaatgaaccaagtggacatgaaacaaccaagcatgagccaagctggcatgaggcaatcaggtacaaacctaccagacataaaccaacctggcatgaaacaaccaggcacatggcaattaggtaggagccaaccaggcatgtggccacaaagcctgagcgaactagtcctgagtgaagcaagcataagccaaccaggtccaccgcaacgagccccaagccaatcaggccccagacaatcaagcacgagccaagcaggcacaaaccaatcaggtataagccaaccagtgatgtggcaactagacatgagacagtcaggtgggagccaaccaagcatgagacaagtaggcaccagccaatcaggcacaagccaaataggcatgagccaaccaggcacatggcaaacaggcctgagccaaccagtcccgaggcaaccaaacaagagtccaccaggcatgtggcaacgaggcatgtggcaaccaggcatgagccagcaagtccccagccaactaggcatgagacaaccaggcactagccaatcaagtaagaaccaaacaggcatgagccatccaggcaggggccaaccaggcatatgggaaccggggccgagtcagccaggcctgagccaacaagacctgaaccaattagtgctgagccaaccaggcctgagtcaaccaggcaggagccaaccaagtgtgagccaaatgggcatgaggcaaacaagcatggattactttcaaataagacatgcagaggctggagactgcccagaaattttgcgactgattaaagaattggctgcctgtgaaaacatgctagatgcaatggagttaacagcagctgatttactcagagatggctttggggacaatccccttttctactgcctgattgcagaagtaaacgatcaacaaaaaccatcaggcaaactgactgttggatttgccatgtactactttacatacgactcatggactggcaaggtactttacctagaggacttttatgtcacacaagcttaccaagatagccatcacaactcaatgtaactgcatgcactttcttgtcgtcatttggaaccaggcttctatcaactactatactagtcgaggggctttagacctttcctctgaggagggctggcatctcttcaggtttaacagagaagaactcctggacatggcatgggaagaatgaaagaggctttgtaacaactcatcccaacacagcctccaacatttgactgtcacctgagtctaacagcagtttgactttgttgtacaatacagcaagtgatcatc

SEQ ID NO: 25428 - DNA, 2224 bp, Artificial Sequence
  derived and/or modified sequence
cagccatcagccaatcagttgtctgccaacccatcatctgccaccccatccttagtcaacaaagcaggaatcaactgggcatgaaccaatcaggcacgaaccaatcaagtttatcagactcgaaccaagcaggcataaaccagccaagcacaaactcacttggtatgaaccaaatggacatgaaccaagggagtgcaagcctatatgaaatgaaccaagtggacatgaaacaaccaagcatgagccaagctggcatgaggcaatcaggtacaaacctaccagacataaaccaacccgacatgaaacaaccagacacatggcaattaggtaggagccaaccaggcatgctgcaacaagaactgagccaactagtcctgagcaaagcaggcataagccaaccagacccatcgcaaccaggcccaagccaatcaggccccagccaatcacgcatgaggcaaataggcacgaaccaatcaggtatgagccaaccagtgatgcagcaactagacagccagtcaggtgggagccaaccaagcatgagacaagtaggcaccagccaattaggcacaagccaaataggcatgagccaaccaggcacatggcaaacaggactgagccaaccagtcctgaggcaaccaaacatgagtccaccaggcatgtggcaaccaggcgtgcaacaaccaggcatcagccagcaagtcccaagccacccagacatgagtcaaccaggcatgagccagcaagtccccagccaaccaggcataaggcaaccagacactagccaatcatgtaagaaccaaacagacatgagccaaccagacgcaaaccaatcaagtttatcagattccaaccaaacaggtataatccagccaagcccaagcttacttggtatgaaccaaatggacatgaaccaatggagtgcaagcctatatgaaatgaaccaagtggacatgaaacaaccaagcatgagccaagctggcatgaggcaatcaggtacaaacctaccagacataaaccaacctggcatgaaacaaccaggcacatggcaattaggtaggagccaaccaggcatgtggccacaaagcctgagcgaactagtcctgagtgaagcaagcataagccaaccaggtccaccgcaacgagccccaagccaatcaggccccagacaatcaagcacgagccaagcaggcacaaaccaatcaggtataagccaaccagtgatgtggcaactagacatgagacagtcaggtgggagccaaccaagcatgagacaagtaggcaccagccaatcaggcacaagccaaataggcatgagccaaccaggcacatggcaaacaggcctgagccaaccagtcccgaggcaaccaaacaagagtccaccaggcatgtggcaacgaggcatgtggcaaccaggcatgagccagcaagtccccagccaactaggcatgagacaaccaggcactagccaatcaagtaagaaccaaacaggcatgagccatccaggcaggggccaaccaggcatatgggaaccggggccgagtcagccaggcctgagccaacaagacctgaaccaattagtgctgagccaaccaggcctgagtcaaccaggcaggagccaaccaagtgtgagccaaatgggcatgaggcaaacaagcatggattactttcaaataagacatgcagaggctggagactgcccagaaattttgcgactgattaaagaattggctgcctgtgaaaacatgctagatgcaatggagttaacagcagctgatttactcagagatggctttggggacaatccccttttctactgcctgattgcagaagtaaacgatcaacaaaaaccatcaggcaaactgactgttggatttgccatgtactactttacatacgactcatggactggcaaggtactttacctagaggacttttatgtcacacaagcttaccaagatagccatcacaactcaatgtaactgcatgcactttcttgtcgtcatttggaaccaggcttctatcaactactatactagtcgaggggctttagacctttcctctgaggagggctggcatctcttcaggtttaacagagaagaactcctggacatggcatgggaagaatgaaagaggctttgtaacaactcatcccaacacagcctccaacatttgactgtcacctgagtctaacagcagtttgactttgttgtacaatacagcaagt

SEQ ID NO: 25429 - protein, 239 aa, Artificial Sequence
  derived and/or modified sequence
MEGLPCPCPALPHFWQLRSHLMAEGSRTQAPGKGPPLSIQFLRAQYEGLKRQQRTQAHLLVLPKGGNTPAPAESMVNAVWINKERRSSLSLEEADSEVEGRLEEAAQGCLQAPKSPWHTHLEMHCLVQTSPQDTSHQVHHRGKLVGSDQRLPPEGDTHLFETNQMTQQGTGIPEAAQLPCQVGNTQTKAVESGLKFSTQCPLSIKNPHRSGKPAYYPFPQRKTPRISQAARNLGLYGSA

SEQ ID NO: 25430 - DNA, 720 bp, Artificial Sequence
  derived and/or modified sequence
atggagggcctgccctgcccctgccccgccctgccccacttctggcagctgagaagccacctgatggccgagggcagcagaacccaggcccccggcaagggcccccccctgagcatccagttcctgagagcccagtacgagggcctgaagagacagcagagaacccaggcccacctgctggtgctgcccaagggcggcaacacccccgcccccgccgagagcatggtgaacgccgtgtggatcaacaaggagagaagaagcagcctgagcctggaggaggccgacagcgaggtggagggcagactggaggaggccgcccagggctgcctgcaggcccccaagagcccctggcacacccacctggagatgcactgcctggtgcagaccagcccccaggacaccagccaccaggtgcaccacagaggcaagctggtgggcagcgaccagagactgccccccgagggcgacacccacctgttcgagaccaaccagatgacccagcagggcaccggcatccccgaggccgcccagctgccctgccaggtgggcaacacccagaccaaggccgtggagagcggcctgaagttcagcacccagtgccccctgagcatcaagaacccccacagaagcggcaagcccgcctactaccccttcccccagagaaagacccccagaatcagccaggccgccagaaacctgggcctgtacggcagcgcctag

SEQ ID NO: 25431 - DNA, 2717 bp, Artificial Sequence
  derived and/or modified sequence
cagagcgcgagcttagcactccccagccccagtcccagctctgccaggaaaggggagacttcaccgtggcactgggaattggattctaaactttaggatcaagcaatggaaggacctggaataagacaccttcttgacccccctgaagggctctgagcagctgggcttgcctttctctttgctcccccagtcctccccttacttctcggtctcccactccccatcactcctttccctgcctcctcctgcctgtctccatcttcctccctctctttcttctctcgccccattaatccccgcttgtcactatcacctccttcctccagtctttcccccttcgctgccccttctttcctctgacatttccttctcctcttactgccactgtctcccacctttctcctcccccacatttctccctatccctacctcctcttccccttcatctttctccttcccccttatttttctatctccttcctcagtcccactcctctttccaccctccttttgcccgtcacttctccttctccctcactgccccctccctctctctcccctccccaggtcctgccccacccagctgtgtttgcttttctcccggatccggatggaggggttgccctgcccgtgcccagccctgccccacttctggcagcttaggtctcacttaatggctgagggctccaggactcaggcccctgggaaagggcccccactcagcatccagttcctgcgagcccagtatgaaggcttgaagaggcagcagaggacccaggcccacctcctggtgcttccaaaaggaggaaacacacctgctcctgcagaatcgatggtcaatgctgtttggattaacaaggagagaagaagctcactgtccctggaagaggcagattctgaggtggaggggaggctggaggaggctgcccagggctgccttcaggcccccaagtctccatggcacacgcacctggagatgcattgtttggtccaaacctccccccaggacaccagtcatcaagtacatcataggggcaagcttgtgggatctgatcaaaggctccctcctgaaggagacacacacttgtttgaaaccaatcagatgactcagcaaggaaccggaatcccagaggctgcccagcttccatgccaggtgggcaatacccaaacaaaggcagtggaatctggcttaaaattcagcactcaatgtcctctttccataaagaacccacacaggtctggcaaaccagcttactatccatttccccagaggaaaacacccaggatctcccaagctgcccggaacctgggcttatatggctcagcgtgaagctttctattctgccagatgtcttgaccttgaggccacctatggccttatagaagaaccaaggaggcagagccacaacgaggtctctagctatgagcaagaactggactaacctaattataggaattgtgggagacgaacttcacaatggtaacatggttttacccttccaataagaagagacttcccaggccaaattgcccacagtttaggatgaagaggactgtctggtcagtgcagccccattctgacattactatgaggtcctggatatccattccttggggaggaccagtaagacatctgctccatccctggaactggataattttggaacataaaccagggacctagccaacagaatgccttagcaatgcccaggggtcaatgggcgtggcattcttgttttcaatgtcttctgatgatttctcatatattctggagaagacaagctctgagaattcagatgctttttctggtggctatgtctggggggccatctcacttagaagtcacaacactcattggcagtgatcacatcatttcaatttgggcttcccaaagtatggtcacccagggtatgaaggtgagatcaatgctacctaccattttgtgtctttaaggggtctttagaaagggctaatcatctgtcactgctcactgagacatgtacattccagcatcatcacagagttatctccttccttccttccttccttccttccttccttccttctgtctctccctccctccctcccttcctcccttctttccttctttctttcctctcttccttcttgccttctttcctgccttcctgcctatcttttctctctctctctctctgcaaattaagttcttattaaaaactgccaatcattgacgatatataatgatgagatcctgaacaaaagaggcaaagaaatgctcctacttgaaaaatacacattccctatagactgcctcctgtttagtccaacttagatcactcagatccttcctgggatcaaatatatttttaaacctaagacaaagcgaagcaggtgtcacttgggtgatagggaaaaaagcttgtatttcctggttaatgtttagcttttgtaatgctatttaaacacacctaaggtgcctttccctcatctcaggtgctttctctgtaaagtttcactcccacctttcttttctctgcatggccgtccagtcttgcccatctacatccagagctgttaactagtagtgtcattacctgtgaaaaacatgtagaagcttccttgaaccacccagaaatccactcaaatttggggattgtcattccttttgtgaataattaatacaattcagttgttttttaaatattctaataaaaaaggaaattttctcaaaaaaa

SEQ ID NO: 25432 - DNA, 720 bp, Artificial Sequence
  derived and/or modified sequence
atggagggccttccatgtccttgccctgctctgcctcacttctggcagctgcgcagtcatttgatggccgagggatctagaacacaggcccctggcaagggcccgcccctgagcatccagttcttgcgggctcagtacgagggcctgaaaaggcaacagcgcacacaggcacatcttctagtattgcctaagggaggcaataccccagccccggcagagtcaatggttaacgctgtatggattaataaagagcgaaggagttcgctgtcattggaggaagccgacagcgaagttgagggacgattggaggaagccgcccagggctgcctgcaggccccaaagagtccttggcatactcacctggaaatgcactgcctagtacaaacctctccccaagataccagccaccaggtgcatcataggggcaagctggtcggctctgatcagcgactgcctccagaaggagacacccacctctttgaaaccaatcagatgacacagcaggggactggaatccccgaagccgctcagctgccgtgtcaggttggaaatacgcagaccaaagccgtggagagcgggctgaaattctcaactcaatgcccattgtctatcaagaatcctcaccgcagcggcaagcctgcatactatccttttcctcagcgcaagaccccacggatctcacaggcagccagaaatctgggactgtatggcagtgcctag

SEQ ID NO: 25433 - DNA, 720 bp, Artificial Sequence
  derived and/or modified sequence
atggagggcctgccctgcccctgcccagccctgccccacttctggcagctgcggagccacctgatggccgagggcagcaggacccaggcccctggaaaaggaccacccctgagcatccagttcctgcgggcccagtatgagggcctgaagaggcagcagaggacccaggcccacctgctggtgctgcccaagggcggcaacaccccagccccagctgagagcatggtgaatgctgtgtggatcaacaaggagaggaggagcagcctgagcctggaggaggccgacagcgaggtggagggccgcctggaggaggccgcccagggctgcctgcaggcccccaagagcccctggcacacccacctggagatgcactgcctggtgcagaccagcccccaggacaccagccaccaggtgcaccaccggggcaagctggtgggcagtgaccagaggctgcccccagagggggacacccacctgtttgagaccaaccagatgacccagcagggcaccggcatccctgaggccgcccagctgccctgccaggtgggcaacacccagaccaaggctgtggagagcggcctgaagttcagcacccagtgccccctgagcatcaagaacccccacaggtctgggaagccagcctactaccccttcccccagaggaagaccccccgcatcagccaggccgccaggaacctgggcctgtatggcagcgcctag

SEQ ID NO: 25434 - DNA, 720 bp, Artificial Sequence
  derived and/or modified sequence
atggagggcctgccctgcccctgccccgccctgccccacttctggcagctgcgttctcacctgatggccgaagggagtagaactcaggcgccagggaagggccctccactctccatacaatttttgcgtgcccagtatgagggactgaaaagacagcaacgtacccaagcacatcttctggtcctccccaagggaggtaatactcctgcccctgcagagtccatggtaaatgccgtatggattaataaggaacgccgcagttcactatcgttggaagaggccgattcagaagttgaggggagactggaggaagccgcccaaggctgcctgcaggccccaaagtctccttggcatactcacctggaaatgcattgtttagtgcaaacctcaccccaggacactagccaccaggtacatcatcggggcaaactcgtcgggtcagaccagagactgcctcctgagggggatacccacctgtttgagaccaaccagatgacccagcagggcacaggaattcccgaggcagcccagctgccgtgccaagtgggcaatactcagacgaaagctgtggagagcggcctgaagttcagcacccagtgcccactgtctataaagaacccccatcgaagcggaaaacctgcctactacccattcccacagcgtaagacgcctaggatcagccaggccgcgcgcaacctggggctatacggctctgcctag

SEQ ID NO: 25435 - DNA, 720 bp, Artificial Sequence
  derived and/or modified sequence
atggaagggctgccctgcccttgccctgcgctaccccacttctggcagctcaggagccatcttatggccgaggggagccgcactcaggcccctggcaagggccctccgctcagcattcagttcttgcgcgctcagtacgagggactcaaaagacagcagaggacccaggcccatttattggtcctgcccaaagggggtaacaccccggctccagccgagtccatggtcaacgcagtgtggattaataaagagaggcggtcatccctgagtttggaagaagcagatagtgaggtggaaggaagactagaggaggcagcacagggttgcctccaggccccaaaatcaccttggcatacacacctcgaaatgcattgtttggtccagacctctccccaggatacctcccatcaggtgcatcacagagggaagcttgtcggttctgaccagaggctccctcccgagggggatactcatctgtttgaaactaatcagatgacacagcaaggcactggcatcccagaggccgcacagcttccatgtcaggtcggtaacacgcaaacgaaagccgtagaatctggtctgaaattttctactcagtgtcccctttcgataaaaaatccccataggtccggcaaacctgcttactatccattccctcagcggaagacaccacgaattagccaggccgcacggaatctgggactttacgggagcgcatag

SEQ ID NO: 25436 - protein, 437 aa, Artificial Sequence
  derived and/or modified sequence
MAGGPPKALPSTGPHSLRDMPHPLAGSSSEEAVGGDSTPSPDLLMARSFGDKDLILPNGGTPAGTSSPASSSSLLNRLQLDDDIDGETRDLFVIVDDPKKHVCTMETYITYRITTKSTRVEFDLPEYSVRRRYQDFDWLRSKLEESQPTHLIPPLPEKFVVKGVVDRFSEEFVETRRKALDKFLKRITDHPVLSFNEHFNIFLTAKDLNAYKKQGIALLTRMGESVKHVTGGYKLRTRPLEFAAIGDYLDTFALKLGTIDRIAQRIIKEEIEYLVELREYGPVYSTWSALEGELAEPLEGVSACIGNCSTALEELTDDMTEDFLPVLREYILYSDSMKSVLKKRDQVQAEYEAKLEAVALRKEDRPKVPADVEKCQDRMECFNADLKADMERWQNNKRQDFRQLLMGMADKNIQYYEKCLMAWESIIPLLQEKQEAK

SEQ ID NO: 25437 - DNA, 1314 bp, Artificial Sequence
  derived and/or modified sequence
atggccggcggcccccccaaggccctgcccagcaccggcccccacagcctgagagacatgccccaccccctggccggcagcagcagcgaggaggccgtgggcggcgacagcacccccagccccgacctgctgatggccagaagcttcggcgacaaggacctgatcctgcccaacggcggcacccccgccggcaccagcagccccgccagcagcagcagcctgctgaacagactgcagctggacgacgacatcgacggcgagaccagagacctgttcgtgatcgtggacgaccccaagaagcacgtgtgcaccatggagacctacatcacctacagaatcaccaccaagagcaccagagtggagttcgacctgcccgagtacagcgtgagaagaagataccaggacttcgactggctgagaagcaagctggaggagagccagcccacccacctgatcccccccctgcccgagaagttcgtggtgaagggcgtggtggacagattcagcgaggagttcgtggagaccagaagaaaggccctggacaagttcctgaagagaatcaccgaccaccccgtgctgagcttcaacgagcacttcaacatcttcctgaccgccaaggacctgaacgcctacaagaagcagggcatcgccctgctgaccagaatgggcgagagcgtgaagcacgtgaccggcggctacaagctgagaaccagacccctggagttcgccgccatcggcgactacctggacaccttcgccctgaagctgggcaccatcgacagaatcgcccagagaatcatcaaggaggagatcgagtacctggtggagctgagagagtacggccccgtgtacagcacctggagcgccctggagggcgagctggccgagcccctggagggcgtgagcgcctgcatcggcaactgcagcaccgccctggaggagctgaccgacgacatgaccgaggacttcctgcccgtgctgagagagtacatcctgtacagcgacagcatgaagagcgtgctgaagaagagagaccaggtgcaggccgagtacgaggccaagctggaggccgtggccctgagaaaggaggacagacccaaggtgcccgccgacgtggagaagtgccaggacagaatggagtgcttcaacgccgacctgaaggccgacatggagagatggcagaacaacaagagacaggacttcagacagctgctgatgggcatggccgacaagaacatccagtactacgagaagtgcctgatggcctgggagagcatcatccccctgctgcaggagaagcaggaggccaagtag

SEQ ID NO: 25438 - DNA, 1314 bp, Artificial Sequence
  derived and/or modified sequence
atggccggcgggccacctaaggcactccccagcaccggacctcactccctgcgggatatgccccatcctttggctggctccagcagcgaagaggccgtcggaggagattccacaccttctcccgacctcctcatggccagatcatttggagataaggaccttattctccctaatggagggacaccagcgggtacatccagcccagcatcctcttcttccctcctgaacagactgcaactcgacgatgacatcgatggggagacaagggacctcttcgtgatcgtggacgacccaaaaaaacacgtctgcaccatggagacgtatattacataccgaatcaccacaaagagcaccagggttgagtttgatttgcccgagtatagcgtccggaggagatatcaggattttgactggttgaggtctaaacttgaagagtcacagccaacacacctcatcccacctcttcctgaaaaattcgtggtgaaaggcgtggtagaccggtttagcgaagagtttgtcgaaacacgacgcaaagctctcgacaaattcctgaaacgaatcacggaccaccccgtcctgtccttcaacgaacactttaacatcttcttaaccgcaaaagacctcaacgcgtacaagaagcagggtatcgcactgttgacccgaatgggcgaaagcgttaaacatgtgacaggcggctacaaactgcggaccagaccactggagtttgccgcgatcggcgattatctggatactttcgcgctcaaacttggtactattgacaggatcgctcagcgaatcataaaggaggaaattgagtacctggttgagttgagggagtacggacctgtctatagcacatggagtgctttggagggtgaactggctgaaccccttgagggggtctccgcctgcatcgggaactgttcgactgcccttgaagagctgaccgacgatatgaccgaggactttctgcccgttctgagagagtacatcctctattcggactcaatgaaaagtgtgctcaaaaaaagagatcaggttcaagcagagtacgaggctaagctggaggccgttgctctcagaaaggaggaccgtccaaaagtgcctgcggacgtggaaaaatgtcaagaccggatggagtgtttcaatgcggaccttaaggccgacatggaaaggtggcagaacaataagcggcaggacttccggcagctgctgatgggcatggcagacaaaaatatccagtattacgagaagtgcctcatggcttgggaatctattattcccttattacaagagaaacaagaagccaagtag

SEQ ID NO: 25439 - DNA, 7622 bp, Artificial Sequence
  derived and/or modified sequence
gccggcagagaccagccggcgggtggcggcggcccccagcacggccggtgcaaggcctcgggttaagcggcggccgagcggggctcggcccggggtgctcggggagctcgccgcggcgggcagcaggaggaagcggcggcggcgcgtcccgagcggtgcgcgccatggcgggcgggccccccaaggccctgccgtccacggggccccactccctgcgcgacatgccgcacccgctggccggctccagcagcgaggaggccgtgggtggtgacagcacgcccagcccggacctgctgatggcccgcagcttcggtgacaaggatctcattttgcccaacggtggtactccagcaggtacttcaagtccagcttcttcatcttcccttctcaacagacttcagcttgatgatgatattgatggtgagactagagatctcttcgttatagttgatgatcccaagaagcatgtgtgtacaatggagacttacatcacctataggatcaccaccaaaagtactcgggtggagtttgacctgccagaatattctgttcgtcgaagataccaggattttgactggttgaggagcaaactggaagaatcccagcccactcatctcattccccctcttcccgagaagtttgtggtaaaaggtgttgtggatcgtttttcagaagagtttgtggagaccagaagaaaagctttggataaatttctaaaaagaattacggaccatcctgtgctgtctttcaatgaacactttaatattttccttactgctaaggacctgaacgcctacaagaagcaagggatagcattgctgaccagaatgggcgagtcagtcaagcacgtcactggcggctacaagctgaggactcggccgcttgagtttgctgccataggtgactacttagatacatttgcactcaaactgggaaccattgatcgaatagcccagcggatcatcaaagaagaaatagagtaccttgtggagctgagagaatacgggcctgtgtactccacatggagcgccttggagggtgagctggctgaacccctggagggtgtgtcagcttgcattgggaactgctctacagccttagaagagctgacagatgacatgacagaagacttcctacctgtgctcagggaatatattttatactctgactccatgaagagtgtattgaagaagagggaccaagttcaagcagagtatgaagccaaactggaagctgtggctctgcggaaggaagaccgccccaaggtaccggcggacgtcgagaaatgtcaggatcggatggagtgtttcaatgctgacctgaaagctgacatggagaggtggcagaacaacaagaggcaggacttccggcagctactcatggggatggctgacaagaacatccagtattatgagaagtgcctcatggcgtgggagtcgattattccactactgcaggagaaacaagaggccaagtaaagttctttcttgggacggagactcttctacctacacagggcctggcaccctataccggaatgtccctgcagtgccagagacgcagtgctgggaaaacaaccacagaaacatctctcctttgtgtatttttccctcccccacctttcaccccacagtggttttcaattagtatttattccatggtggagtctgtgaggctagaatatctctcagcaagagcagcatacctccatgttgtgaaggcatctgttcagtgaagcactacgaaaatttgaaaccaagggacaagacaacctgcagctgacgctctgacatttcatgacagtttcctctttagggacagctgagttgccagttgtgggagagaacccggggcctgcttttcaaggatgaggaggaggcaggaacagaaggcagctgctgctttctgtggaaacctggcccctctggaattggcctctgtgggcattgactcgtcttggcctaggaggcattggtgcctccctggcaagtccttaacgtacagtacctgtagctgtgagtgtggcctgctgcctgcttgtgatgagtgataccgtcttactgtttctgtttcacatagggacatttaaatcaatgtcaatgtgcgtccatgcttgagtgagcaagccagcgtccttgtcctcctgcaatgcctttgggaagctcaggggaatgctccccaagcttgtttctgacactagaatgcaacagattggaaactttttgtgtaaaatgaaaaaaacaaagtgctggttttttttttttttctgtgaaggtcttcagtgttttgcttgttcactgtcatcagagcagggattagacctgttagggaatatctattgtcttgaagtcagagtagctccccattgttgagatcagtgggcatataccaagctccacccccagtgtcagctttgtgcaatttgcctttacctcaccaaaaatacctactttaatatttcctcctgtgtcctctgaatgtctgggcgagcttttggtgagagggctggtatgtcatgttgttatgatacagtcgaaatttgtcaatgcagtgtgaatgttctacataaagtgctttaacccttaacatttcctggtcaggaaggaaaatcagtacctggacgggcctcgaaaatgacaaatgcaacagcgagccctttgtgtccagctaagctaaagtctcctcagtgtgcagccagattcctggggactgctgagtgtggttacaggctgcatttcagacaatgaccaggtttacttttcagatcacaaagcaaacagtcaccaaggatctgtcttccaactcttttttttttctgctgaaatgaagctacatgtcatgtttgtgttctttcatctgtggctcatccctgtaaaactacgaatctgagcctcaaataagcagtagtttttttgttgtttatttttaatgaaacagctgtgttaaggcgctgcttcagatgcaagttcacctggaaatactggtcagcgggcagcacgtcaaggtcacttaagcccacttttaactgcaggtcatcctcgcatcagccaaggctgtggtgctgttgatgccgcagttggacagcataggacggcttggttctgtttcattgtgtttgacaatgttgcagtttaaatgataatgtttaaatcaattggtacttgcctgtagtgttaaaccctatttgtgccattctcaagtcctttgatgtgaattttcagtttggtacagttagaaatgactcattgatgcggacaggtaagaacaacccatgtacccccgagtgattgcatgctttattctacctctaagccatcgtgttgacgtgggtatggacgcctgggtctgacctgacactgtgctgggagaatcaggatgtgtgtctaatggcgagctgacagccctctgctgatatttggcagaaggcaccagaccagcccagcagcaaatgctcatctttgggaacataggaagctttaccttggggaaggtatgctttacaaatgtccagtgtaatgaatgtttggaaaaaactggagttacaggaaaatgaaatctgactatctgctagttgccaaaacccagaaacattcctgtgtaatggttagttgggaaagaaggcagcacttgaaaaaatttaccaggttcctcactgggagatgtgggaaggggcgtgggacgcacgcggtcactccctctcctagtgagaggcagatggctggctctgaagggaggcaggcaccgtgggatttgggcttgctctgcttggtccccatgtgatgccctgtgctgtaagatatcagaaagacctggaacaaggcaaactttatgtcctcctggcatgttattgataacagagccaggaagtccagtgtacattacagattttctgggagaaatagtccttccagagaaaggattccttcccagcctccaggctggtgtctcatgaggtgaggaggctggcccagaaggaaggggacgttaggtggtgaagcaggctcccctgggcctctgagggccagcagtcccaaccatttgcctcttcgttttgaccaagcacaaaagagatattccctagaagtgtcacacggaggcttctgtgccaaagactgccttgtagaggtctcatcacctcacacttcttgacttcacaaaattgtggccctgagatcagtactcctctcttaagtatttattattattattatttactttacctcaagcagacagacataggttttgaggcttgaatacatggcagtggaatacaaggccctccctagcagccgccccaggcctggaaagtgggagatttcattcgcccgggttaaaaatccagaggaagacagaagagaggagtcctaggaactgagcagattttagagacgcaaatgatgtttaagagagccttgtgatttgtagcaagcatgggcactgctttttcttactaatgtggtagatctacacgaacattctaggctgttctgctcagagcgaggaaccactgctcctcaatggggagggaacataccacccagccaggcttagcattgggttttatcctttaataaaagttttataatgaatcctgttcaccttaaagtgtgattatggagatgattggctccatattccaccacgtcattccttcaactcaccagacacctttctttagttgaaataaaccagcatgacctggagatcatggtgactgtaagctaagtctgttttcatgccagatttcagccccacccagagtgtgctctagatgttgttgatttgaatggttttcccagttcccactccacatggggaagttgaatgaatgcacacctgctgctcacttcttgtgaggctgccttttgtgatcaaataacaggaagttctgctttagaggagggcacgatgaccatgtggcagtctgcaagtggaattttgggatggcagcccgaggaacatccagagttactgtgtgacttggtcctgccatcgttagctttgaaatcacaggcattgggctctgttttgacaccattcattggactgcgggacagtcattctttacgttctctcttgagctggtgagagaggaggaagagggaagtcaagagcaacctccaaggcctatgtcagcctcttctccttgggtcttggggtgggttagaactgggttccagtctggccagatgggttgctggctgcactgagggtgattcttctcagaagatgggctgcctgtggtcaggacagggcataccagtctggactccaccttcccagacacctactttaaggacctgtggaaactgggtgatccaattatagggctggggcaaccctgctttggccaccctcatttacaaacttaggttgggagcttgggtttcctgtctcacttccaaaagccttcaagatggcagcagatggacacaccctctcatttcttgtgtcttgtctgtcagatggcaggaggcctgtatcagtaaatttgaggaaaatgttctctcctgggccagcctcacagcttgcgttgggtgtgttggaattgttctcttcggccttgttctgccttgtgatcttttcaattcagtgaataaaccaggaatccattttttcaccaacccaccctgtagattgtcagctttttgtttgagagatgcctggtctcacagttacatgtatcagagtgtgtgtaagttgtctgtgttagaaaggttggggtgggggctttgttgcaggggattagactgttctttcttcatcataatttgagatacatcctgagtatgactgtctaaccctttctgtgtggcagaaaaatatgttttccaggtagtttttactactacagagagtctgtaaataagtgctttaaaaaaataacaaaccaataagatatttgtctcctatataaacattctgtgtatttagcacttgaaaatcaacaaatccagaatttaaaaaaatgccacagacttttcaaagcccaactctacttttttgagaatttgtccgtacctactaatatgccttattcttcttcacctagtgttttaaaagtcctgggtagaaagagttttagaaatgtaatcagttgttcagcttcaataatatagagatctaacatagtcagtcctcaggccccctaaagaaacaagcaagaaagtgagggccatcactagggttggctttggggaggggaaaactaaggactgcttttgccaaatgatatttttgataatgtaaggaaacacagggaccacaaaaccttttttttttttttaagtgtgaaagattagtgccttttggcatacttttgattttagaggatatagtatcggcattgacaaatcacgtagaaacaaagaatgctatagatgacaacagtattaaatgttactcctgattctgcagaacagcttttgaagatactggggggtatcttcaagcctcagagcagcttgtttcagatagaaattctctatgggttgaaatgccaaaaacagaaaacatgatgttgactcatgtaatttagtccattttagcagagcctttagtgttaacaccagtggcgaggagcattgcatattctctgtcagcagcagcactcccacaccaggtggttctgggctctctgtaggctggtcctagtaggtgacacccagcaacacccctgttggacaggattgattgttcgcagtcttagaccaacacttcagtcagaaatgttactgggaggaggaaaggaaaatcactttttttcctccatgtggaaatgaggagagaggaaagtggattgcaaaccaaaatgtgagtcagtgtgatgaagcagtggctctgtcatctcggcctttatccaataacaaaccagcatctcttaaaggcgcttttggcctagacacccctgaagtttggatgaagtctggtggattccctgtctgttgtatttctgtgtgcctgttcccttcattgctgtgagttgggagtgcattgagagatgatgtccatctgatatattcctgtgaaataaactgccagcaaactttctaacttgtattttaactgttaaagaagagattaaaaacttcggctttggacatgtccacattatggactgtcatcttatttttaaaagtcattctttacgtttaaaattttaaaataaaaaccttctgaggtattgatgtagtccaccgtgtaaatgttaccttctctccatgctgccattatgccaaaacaaaagctgtgataaaaaaagtgcttgagagagtgtgttgataagaaagtgatttatttacagatggaagtctttgtttcatgaagctaccaaactttaaaaagaatgtcacccttttttttgtttgttatggaaaccagagattgtaaaatggaaaaagaatcgtttttttgttgactttttgatgctggcacgaggtttttgtccacttttttcatatatctgtgtataaaaaaattgttgtttactatggaattagtattacattttgaggtaaacaaaagaatttgtattgcttgataaatattagcttgtaaatttaaagtttctttacttcaattaacttaaaggaccaataaacccataaaagatgctttcttta

SEQ ID NO: 25440 - DNA, 1314 bp, Artificial Sequence
  derived and/or modified sequence
atggccggcggcccccccaaggccctgcccagcacaggcccccacagcctgcgggacatgccccaccccctggccggcagcagcagcgaggaggccgtgggcggggacagcacccccagcccagacctgctgatggcccggagctttggagacaaggacctgatcctgcccaacggcggcaccccagctggcaccagcagccctgccagcagcagcagcctgctgaaccggctgcagctggatgatgacattgatggagagacccgggacctcttcgtcatcgtggatgaccccaagaagcacgtgtgcaccatggagacctacatcacctaccgcatcaccaccaagagcaccagggtggagtttgacctgcctgagtacagcgtgagaagacgctaccaggactttgactggctgcggagcaagctggaggagagccagcccacccacctgatcccccccctgcctgagaagtttgtggtgaagggcgtggtggaccgcttcagcgaggagtttgtggagaccaggaggaaggccctggacaagttcctgaagaggatcacagaccaccctgtgctgtccttcaatgagcacttcaacatcttcctgacagccaaggacctgaatgcctacaagaagcagggcatcgccctgctgaccaggatgggagagagcgtgaagcacgtgactggaggctacaagctgcggacccggcccctggagtttgctgccatcggggactacctggacacctttgccctgaagctgggcaccatcgaccgcatcgcccagaggatcatcaaggaggagattgagtacctggtggagctgcgggagtatggccctgtgtacagcacctggagcgccctggagggggagctggccgagcccctggagggcgtgtctgcctgcatcggcaactgcagcacagccctggaggagctgacagatgacatgacagaggacttcctgcctgtgctgcgggagtacatcctgtacagcgacagcatgaagtctgtgctgaagaagagggaccaggtgcaggccgagtatgaggccaagctggaggccgtggccctgaggaaagaagatcggcccaaggtgcctgcagatgtggagaagtgccaggacaggatggagtgcttcaatgctgacctgaaggctgacatggagcgctggcagaacaacaagaggcaggacttccggcagctgctgatgggcatggctgacaagaacatccagtactatgagaagtgcctgatggcctgggagagcatcatccccctgctgcaggagaagcaggaggccaagtag

SEQ ID NO: 25441 - DNA, 1314 bp, Artificial Sequence
  derived and/or modified sequence
atggccggcggcccccccaaggccctgcccagcaccggcccccactcgctaagagatatgcctcacccactcgctggcagctcgagcgaggaggctgtagggggcgatagcactccttcccccgacctgctgatggctcggtcgttcggagataaagatctcatcttgcccaatggcgggactccagccggcacttcttccccagcttcgtcaagctctctactgaataggctgcaactggatgacgatatcgatggcgagacccgggatttatttgtgattgtggacgatcctaaaaagcacgtctgcactatggaaacatacatcacataccgtataaccacaaaatctactcgcgtggaatttgatctgcctgagtatagtgttcgtcgccgctatcaggactttgattggctgcggtcaaaactggaggagtcacagcctactcatcttataccgccacttcctgaaaagtttgtcgtgaagggagtcgtagatcgatttagcgaagaatttgtggagaccaggcgcaaggctctcgacaagttcctcaagcgcataacagaccaccccgtgctcagctttaacgagcattttaacatttttcttaccgcgaaggatctaaacgcgtacaagaagcagggcatcgctctcttgacgagaatgggcgaatccgtaaaacacgtgactggcggttataaactcaggacaaggcctttggagttcgcggccatcggagattatctcgacactttcgccctgaagctcggcactatcgaccgaatagcacagcgcatcatcaaagaagaaatcgagtatcttgtggaacttcgcgagtatggtcccgtctactccacgtggagcgccttggaaggtgagctggctgagcccctggagggtgtgtcagcctgcatcgggaactgtagcacggcactggaggagctgacagacgacatgaccgaagactttcttccggtgctgagagaatatatactttattcggattccatgaagtcagtactcaaaaagcgcgatcaggttcaggcggagtatgaggcaaaactagaagcggtcgccctccggaaagaagatagacctaaggtcccggccgacgtggagaagtgtcaggaccgcatggaatgcttcaatgccgacctgaaagccgatatggagaggtggcagaacaacaaaagacaggacttccgccaacttcttatgggaatggcggataaaaatatccagtactatgaaaaatgcctgatggcctgggagtctattatccccctgctacaggagaaacaggaggccaaatag

SEQ ID NO: 25442 - DNA, 1314 bp, Artificial Sequence
  derived and/or modified sequence
atggctggtggaccccctaaagccctgcctagtacaggacctcactccctccgtgacatgccgcatcctctcgccggaagttcttcagaggaagccgttggcggtgacagtactccctcacccgaccttctgatggccaggagttttggcgacaaagacttgatcctcccaaacggtgggacccccgctgggaccagttcaccagcctcaagctcctccctactcaaccgtctgcagctcgacgacgatatcgacggagagactcgtgatttgttcgtgatcgtggacgatcccaagaagcacgtgtgtactatggagacttacatcacctatcggattactaccaagtccactcgcgtagagttcgatctgcctgaatactctgtgcgacgtagatatcaggactttgattggctgcgttcaaaactggaagaaagccaacccacccatctgatacctcccctcccagagaagtttgtggtcaagggcgtagtggaccgcttcagtgaggagttcgtggaaacccgcaggaaagccctggacaaattcttgaagagaattacggatcacccagtactgtcatttaacgaacacttcaacatttttctgactgccaaggacctaaacgcttacaagaaacaggggattgcactcctcaccaggatgggcgaatctgtaaaacacgtgacgggaggctacaaactgcggacacgtcctctggagttcgctgccatcggcgattatctggatacgttcgccctgaaactgggcacaattgaccgaattgcacagcggataatcaaggaagagatcgagtatcttgtggagctgcgagaatatgggccagtgtactccacctggtctgccctcgagggggagcttgccgaacccttggagggcgtctccgcctgcattggaaattgctccactgcactcgaggagctgactgatgacatgacagaggattttttgcctgtgctcagagagtacattctgtactcagattcaatgaagtcagtcttgaagaagcgtgatcaggtgcaggctgagtacgaagcgaagttagaagctgttgctttacggaaggaggaccgcccaaaagtgcctgccgatgtggagaagtgtcaggacaggatggaatgcttcaatgccgacttgaaggctgacatggaaagatggcagaacaataaacgacaggactttagacagttgctgatggggatggccgataaaaatattcaatattacgagaagtgccttatggcctgggaaagcataatcccactcctccaagaaaagcaagaagctaagtag

SEQ ID NO: 25443 - protein, 1198 aa, Artificial Sequence
  derived and/or modified sequence
MGKVGAGGGSQARLSALLAGAGLLILCAPGVCGGGSCCPSPHPSSAPRSASTPRGFSHQGRPGRAPATPLPLVVRPLFSVAPGDRALSLERARGTGASMAVAARSGRRRRSGADQEKAERGEGASRSPRGVLRDGGQQEPGTRERDPDKATRFRMEELRLTSTTFALTGDSAHNQAMVHWSGHNSSVILILTKLYDYNLGSITESSLWRSTDYGTTYEKLNDKVGLKTILSYLYVCPTNKRKIMLLTDPEIESSLLISSDEGATYQKYRLNFYIQSLLFHPKQEDWILAYSQDQKLYSSAEFGRRWQLIQEGVVPNRFYWSVMGSNKEPDLVHLEARTVDGHSHYLTCRMQNCTEANRNQPFPGYIDPDSLIVQDHYVFVQLTSGGRPHYYVSYRRNAFAQMKLPKYALPKDMHVISTDENQVFAAVQEWNQNDTYNLYISDTRGVYFTLALENVQSSRGPEGNIMIDLYEVAGIKGMFLANKKIDNQVKTFITYNKGRDWRLLQAPDTDLRGDPVHCLLPYCSLHLHLKVSENPYTSGIIASKDTAPSIIVASGNIGSELSDTDISMFVSSDAGNTWRQIFEEEHSVLYLDQGGVLVAMKHTSLPIRHLWLSFDEGRSWSKYSFTSIPLFVDGVLGEPGEETLIMTVFGHFSHRSEWQLVKVDYKSIFDRRCAEEDYRPWQLHSQGEACIMGAKRIYKKRKSERKCMQGKYAGAMESEPCVCTEADFDCDYGYERHSNGQCLPAFWFNPSSLSKDCSLGQSYLNSTGYRKVVSNNCTDGVREQYTAKPQKCPGKAPRGLRIVTADGKLTAEQGHNVTLMVQLEEGDVQRTLIQVDFGDGIAVSYVNLSSMEDGIKHVYQNVGIFRVTVQVDNSLGSDSAVLYLHVTCPLEHVHLSLPFVTTKNKEVNATAVLWPSQVGTLTYVWWYGNNTEPLITLEGSISFRFTSEGMNTITVQVSAGNAILQDTKTIAVYEEFRSLRLSFSPNLDDYNPDIPEWRRDIGRVIKKSLVEATGVPGQHILVAVLPGLPTTAELFVLPYQDPAGENKRSTDDLEQISELLIHTLNQNSVHFELKPGVRVLVHAAHLTAAPLVDLTPTHSGSAMLMLLSVVFVGLAVFVIYKFKRKIPGINVYAQMQNEKEQEMISPVSHSESRPNVPQTELRRPGQLIDEKVESQLIGSISIVAENQSTKEIPTYVNV

SEQ ID NO: 25444 - DNA, 3597 bp, Artificial Sequence
  derived and/or modified sequence
atgggcaaggtgggcgccggcggcggcagccaggccagactgagcgccctgctggccggcgccggcctgctgatcctgtgcgcccccggcgtgtgcggcggcggcagctgctgccccagcccccaccccagcagcgcccccagaagcgccagcacccccagaggcttcagccaccagggcagacccggcagagcccccgccacccccctgcccctggtggtgagacccctgttcagcgtggcccccggcgacagagccctgagcctggagagagccagaggcaccggcgccagcatggccgtggccgccagaagcggcagaagaagaagaagcggcgccgaccaggagaaggccgagagaggcgagggcgccagcagaagccccagaggcgtgctgagagacggcggccagcaggagcccggcaccagagagagagaccccgacaaggccaccagattcagaatggaggagctgagactgaccagcaccaccttcgccctgaccggcgacagcgcccacaaccaggccatggtgcactggagcggccacaacagcagcgtgatcctgatcctgaccaagctgtacgactacaacctgggcagcatcaccgagagcagcctgtggagaagcaccgactacggcaccacctacgagaagctgaacgacaaggtgggcctgaagaccatcctgagctacctgtacgtgtgccccaccaacaagagaaagatcatgctgctgaccgaccccgagatcgagagcagcctgctgatcagcagcgacgagggcgccacctaccagaagtacagactgaacttctacatccagagcctgctgttccaccccaagcaggaggactggatcctggcctacagccaggaccagaagctgtacagcagcgccgagttcggcagaagatggcagctgatccaggagggcgtggtgcccaacagattctactggagcgtgatgggcagcaacaaggagcccgacctggtgcacctggaggccagaaccgtggacggccacagccactacctgacctgcagaatgcagaactgcaccgaggccaacagaaaccagcccttccccggctacatcgaccccgacagcctgatcgtgcaggaccactacgtgttcgtgcagctgaccagcggcggcagaccccactactacgtgagctacagaagaaacgccttcgcccagatgaagctgcccaagtacgccctgcccaaggacatgcacgtgatcagcaccgacgagaaccaggtgttcgccgccgtgcaggagtggaaccagaacgacacctacaacctgtacatcagcgacaccagaggcgtgtacttcaccctggccctggagaacgtgcagagcagcagaggccccgagggcaacatcatgatcgacctgtacgaggtggccggcatcaagggcatgttcctggccaacaagaagatcgacaaccaggtgaagaccttcatcacctacaacaagggcagagactggagactgctgcaggcccccgacaccgacctgagaggcgaccccgtgcactgcctgctgccctactgcagcctgcacctgcacctgaaggtgagcgagaacccctacaccagcggcatcatcgccagcaaggacaccgcccccagcatcatcgtggccagcggcaacatcggcagcgagctgagcgacaccgacatcagcatgttcgtgagcagcgacgccggcaacacctggagacagatcttcgaggaggagcacagcgtgctgtacctggaccagggcggcgtgctggtggccatgaagcacaccagcctgcccatcagacacctgtggctgagcttcgacgagggcagaagctggagcaagtacagcttcaccagcatccccctgttcgtggacggcgtgctgggcgagcccggcgaggagaccctgatcatgaccgtgttcggccacttcagccacagaagcgagtggcagctggtgaaggtggactacaagagcatcttcgacagaagatgcgccgaggaggactacagaccctggcagctgcacagccagggcgaggcctgcatcatgggcgccaagagaatctacaagaagagaaagagcgagagaaagtgcatgcagggcaagtacgccggcgccatggagagcgagccctgcgtgtgcaccgaggccgacttcgactgcgactacggctacgagagacacagcaacggccagtgcctgcccgccttctggttcaaccccagcagcctgagcaaggactgcagcctgggccagagctacctgaacagcaccggctacagaaaggtggtgagcaacaactgcaccgacggcgtgagagagcagtacaccgccaagccccagaagtgccccggcaaggcccccagaggcctgagaatcgtgaccgccgacggcaagctgaccgccgagcagggccacaacgtgaccctgatggtgcagctggaggagggcgacgtgcagagaaccctgatccaggtggacttcggcgacggcatcgccgtgagctacgtgaacctgagcagcatggaggacggcatcaagcacgtgtaccagaacgtgggcatcttcagagtgaccgtgcaggtggacaacagcctgggcagcgacagcgccgtgctgtacctgcacgtgacctgccccctggagcacgtgcacctgagcctgcccttcgtgaccaccaagaacaaggaggtgaacgccaccgccgtgctgtggcccagccaggtgggcaccctgacctacgtgtggtggtacggcaacaacaccgagcccctgatcaccctggagggcagcatcagcttcagattcaccagcgagggcatgaacaccatcaccgtgcaggtgagcgccggcaacgccatcctgcaggacaccaagaccatcgccgtgtacgaggagttcagaagcctgagactgagcttcagccccaacctggacgactacaaccccgacatccccgagtggagaagagacatcggcagagtgatcaagaagagcctggtggaggccaccggcgtgcccggccagcacatcctggtggccgtgctgcccggcctgcccaccaccgccgagctgttcgtgctgccctaccaggaccccgccggcgagaacaagagaagcaccgacgacctggagcagatcagcgagctgctgatccacaccctgaaccagaacagcgtgcacttcgagctgaagcccggcgtgagagtgctggtgcacgccgcccacctgaccgccgcccccctggtggacctgacccccacccacagcggcagcgccatgctgatgctgctgagcgtggtgttcgtgggcctggccgtgttcgtgatctacaagttcaagagaaagatccccggcatcaacgtgtacgcccagatgcagaacgagaaggagcaggagatgatcagccccgtgagccacagcgagagcagacccaacgtgccccagaccgagctgagaagacccggccagctgatcgacgagaaggtggagagccagctgatcggcagcatcagcatcgtggccgagaaccagagcaccaaggagatccccacctacgtgaacgtgtag

SEQ ID NO: 25445 - DNA, 3597 bp, Artificial Sequence
  derived and/or modified sequence
atggggaaagtcggggcaggtggaggctctcaggccagactgtccgccctgttggctggagccggattgctcattctttgtgcccctggggtgtgtggagggggatcctgctgtccttcaccgcatcctagtagtgccccccgaagcgcatcaactcccagggggttctcacatcagggccggccaggccgagcccccgccactccccttccactagtagttaggccactcttcagcgtagccccaggcgatcgcgccctgagtttagaacgcgcacggggtaccggtgcaagcatggcagtggccgctcgcagcggccgtcggcgaagaagtggtgcagaccaggagaaagcagagagaggtgagggcgccagtcgctctccaagaggggtgttgcgggacggggggcagcaggagcccgggacaagagagagagaccccgataaggccaccagattcaggatggaggaactgcgacttacttctacaacatttgcgttaaccggcgactctgcccacaatcaggccatggttcactggtctggacacaactcatctgtgatcctcatactgacaaaactgtacgactataacctgggatctattacggagtctagtctctggcgatcgactgattatggaacaacctatgaaaaattaaatgacaaagtcggattgaaaaccatcttgagttacctttacgtgtgcccaaccaacaagagaaaaattatgctccttacagatcctgaaatcgaatcctcgttacttatctctagtgacgagggagccacttaccagaagtatcgcctcaacttttatattcagtcccttctctttcaccctaaacaagaggattggattctcgcttactcgcaagaccagaaactctactcaagtgcggaattcggccgtcgttggcaactcattcaggagggagtggtgccaaaccggttttattggtcagtaatgggaagcaataaggagcctgacctggtccacctcgaggcaagaactgtcgacggccactcgcattatctgacatgtcgcatgcagaattgcacagaagctaatcgtaatcagccatttcctgggtatattgaccccgatagcttgatcgtacaggaccactacgtattcgtccagttgacttccggcggacgaccacactactatgtgagttatcgaagaaatgcattcgcacagatgaagttgccaaagtatgctctacccaaagacatgcatgtcataagtactgatgaaaatcaggtgttcgcagcggtccaggagtggaaccagaatgacacttataacctgtacatctccgacacgaggggtgtgtacttcaccttggccctggagaatgtgcagtcgagccgaggccccgagggaaacattatgattgacctgtatgaggtggcaggaatcaagggtatgttcctcgctaataagaagatcgataatcaagtcaagacctttattacctacaacaaaggtagagactggcgactcttgcaagctcccgacacagatctgagaggtgacccggtgcattgcctgctgccctactgctcgttacatttacacctgaaggtgtctgagaacccctacaccagcggcattatcgcgagtaaggacacagccccttctatcatcgtcgcctccgggaacattggaagtgagttgtcagatacggatatctcaatgtttgtctcctcagatgccggcaacacatggaggcagatattcgaagaggaacattcagtgctctacctcgaccaagggggcgtactggtggccatgaagcacacctcgctacccattcggcacctgtggctctcattcgacgaagggagatcctggtccaaatatagctttaccagcattcctctgtttgtagatggagtgctcggagagccgggcgaggaaaccctgattatgacagtttttggacactttagtcaccggagtgagtggcagctcgtgaaggtagattacaaatccatttttgaccggcgttgcgccgaagaagactatcggccctggcagttgcacagccagggcgaggcctgtataatgggcgccaagcgcatctataagaaacggaaaagcgaacgaaaatgtatgcagggcaagtacgccggagctatggaatcagagccttgtgtgtgcacagaagccgacttcgactgcgactatggctatgaacgtcactcaaacgggcagtgcctgcctgcattctggtttaacccttccagtttgtcaaaggattgcagcctaggacagagctatctgaacagcacagggtacaggaaggtcgttagcaataactgcacagatggggtgagagagcaatatactgccaagccccagaagtgtcccggcaaagctccccggggtctgcggatcgttacggcagacggcaaactgactgccgagcagggacataatgtgacactcatggtgcagttggaggaaggcgacgtccagcgaacgctcatccaggtggatttcggggatggaatagcagttagctacgtaaacttgagttcaatggaggatggaatcaagcacgtgtatcagaatgtgggcattttccgggtaaccgtacaggtcgacaacagcctcggatcagatagtgctgtcttgtatctccatgttacatgtcctcttgaacatgtccatctgagcctgccattcgtaacaaccaaaaacaaggaggtgaatgcaactgctgtgctctggcctagtcaggttggaacacttacttacgtctggtggtatggcaataatacagagcctctgatcacgttggagggtagtatcagcttcaggttcacaagtgagggaatgaataccatcacggtccaagtctccgccgggaacgcgatacttcaagacactaagaccatcgccgtgtacgaagagttccgttcactgcggctcagcttttcaccgaaccttgatgactacaatcctgatattcctgaatggcgcagagatattggacgcgtgatcaaaaaaagtttagtagaggccacgggcgtacccggacagcacatcctcgtagcggtccttccaggtttgcctactaccgccgagctcttcgtgctaccgtatcaggaccctgccggcgagaataagaggagcactgatgatctggaacaaatctctgagctccttatccatacgcttaaccagaactccgttcatttcgaactgaagccaggtgtgagagtgctggtacatgccgctcatctcactgctgctccgctagtggacctgactcccactcactccggcagtgctatgctaatgctcctatctgtggtatttgtgggtctggcagtgttcgtcatttataagttcaaacgaaaaattcctgggattaatgtatatgcacagatgcagaatgagaaagagcaggagatgatcagtcccgtgagccacagtgaatccagacctaacgtgccacagacagagctgagaagacctgggcagctgatagacgaaaaagtggagagtcagctcattggaagcatctccattgtggctgagaaccagtccaccaaggagatccctacatacgttaacgtgtag

SEQ ID NO: 25446 - DNA, 3597 bp, Artificial Sequence
  derived and/or modified sequence
atgggcaaggtgggcgctgggggcggcagccaggcccggctgagcgccctgctggccggggccggcctgctgatcctgtgtgcccctggggtgtgtggcggcggcagctgctgccccagcccccaccccagcagcgcccccaggtctgccagcaccccccggggcttcagccaccagggccggcccggccgggccccagccacccccctgcccctggtggtgcggcccctcttctctgtggcccctggggaccgggccctgagcctggagcgggcccggggcactggagcctccatggctgtggccgcccggtctggaagaagaagaagaagtggagctgaccaggagaaggccgagcggggggagggcgccagccgcagcccccggggcgtgctgagagatggcggccagcaggagcccggcacccgggagcgggaccctgacaaggccacccgcttcaggatggaggagctgcggctgaccagcaccacctttgccctgaccggggacagcgcccacaaccaggccatggtgcactggagcggccacaacagcagcgtcatcctgatcctgaccaagctgtatgactacaacctgggcagcatcacagagagcagcctgtggaggagcacagattatggcaccacctatgagaagctgaatgacaaggtgggcctgaagaccatcctgagctacctgtatgtgtgccccaccaacaagaggaagatcatgctgctgacagatcctgagattgagagcagcctgctgatcagcagtgatgagggcgccacctaccagaagtaccgcctgaacttctacatccagagcctgctcttccaccccaagcaggaggactggatcctggcctacagccaggaccagaagctgtacagcagcgctgagtttggccgccgctggcagctgatccaggagggcgtggtgcccaaccgcttctactggagcgtgatgggcagcaacaaggagccagacctggtgcacctggaggccaggacagtggatggccacagccactacctgacctgcaggatgcagaactgcacagaggccaacagaaaccagcccttccctggctacatcgaccctgacagcctcatcgtgcaggaccactacgtgtttgtgcagctgaccagcggcggccggccccactactacgtgtcctacagaagaaatgcctttgcccagatgaagctgcccaagtatgccctgcccaaggacatgcacgtgatcagcacagatgagaaccaggtgtttgctgctgtgcaggagtggaaccagaatgacacctacaacctgtacatcagtgacacccggggcgtgtacttcaccctggccctggagaatgtgcagagcagccggggccctgagggcaacatcatgattgacctgtatgaggtggccggcatcaagggcatgttcctggccaacaagaagattgacaaccaggtgaagaccttcatcacctacaacaagggccgggactggaggctgctgcaggccccagacacagacctgcggggggaccctgtgcactgcctgctgccctactgcagcctgcacctgcacctgaaggtgtctgagaacccctacaccagcggcatcatcgccagcaaggacacagcccccagcatcatcgtggccagcggcaacatcggcagcgagctgagtgacacagacatctccatgtttgtgtccagtgatgctggcaacacctggaggcagatctttgaggaggagcacagcgtgctgtacctggaccagggcggcgtgctggtggccatgaagcacaccagcctgcccatccgccacctgtggctgagctttgatgagggccgctcctggagcaagtacagcttcaccagcatccccctgtttgtggatggagtgctgggggagcctggagaggagaccctcatcatgacagtgtttggccacttcagccacaggtctgagtggcagctggtgaaggtggactacaagagcatctttgacagaagatgtgccgaggaggactaccggccctggcagctgcacagccagggcgaggcctgcatcatgggcgccaagaggatctacaagaagaggaagtctgagaggaagtgcatgcagggcaagtatgctggggccatggagagcgagccctgtgtgtgcacagaggccgactttgactgtgactatggctatgaaagacacagcaatggccagtgcctgcctgccttctggttcaaccccagcagcctgagcaaggactgcagcctgggccagagctacctgaacagcacaggctacaggaaggtggtgagcaacaactgcacagatggagtgcgggagcagtacacagccaagccccagaagtgccctgggaaggccccccggggcctgcgcatcgtgacagcagatggcaagctgacagctgagcagggccacaacgtgaccctgatggtgcagctggaggagggagatgtgcagaggaccctcatccaggtggactttggagatggcattgctgtgtcctatgtgaacctgagctccatggaggatggcatcaagcacgtgtaccagaatgtgggcatcttccgggtgacagtgcaggtggacaacagcctgggcagtgacagcgctgtgctgtacctgcacgtgacctgccccctggagcacgtgcacctgagcctgccctttgtgaccaccaagaacaaggaggtgaatgccacagctgtgctgtggcccagccaggtgggcaccctgacctacgtgtggtggtacggcaacaacacagagcccctcatcaccctggagggcagcatctccttccgcttcaccagcgagggcatgaacaccatcaccgtgcaggtgtctgctggaaatgccatcctgcaggacaccaagaccatcgctgtgtatgaggagttccgcagcctgcggctgtccttcagccccaacctggatgactacaacccagacatccctgagtggaggcgggacatcggccgggtcatcaagaagagcctggtggaggccactggagtgcccggccagcacatcctggtggccgtgctgcccggcctgcccaccacagctgagctgtttgtgctgccctaccaggaccctgctggggagaacaagaggagcacagatgacctggagcagatcagcgagctgctgatccacaccctgaaccagaacagcgtgcactttgagctgaagccaggagtgcgggtgctggtgcatgctgcccacctgacagctgcccccctggtggacctgacccccacccacagcggcagcgccatgctgatgctgctgtctgtggtgtttgtgggcctggccgtgtttgtgatctacaagttcaagaggaagatccctggcatcaacgtgtatgcccagatgcagaatgagaaggagcaggagatgatcagccctgtgagccacagcgagagccggcccaacgtgccccagacagagctgcggcggcccggccagctgattgatgagaaggtggagagccagctgattggcagcatcagcatcgtggccgagaaccagagcaccaaggagatccccacctacgtgaatgtgtag

SEQ ID NO: 25447 - DNA, 3597 bp, Artificial Sequence
  derived and/or modified sequence
atgggcaaggtgggcgccggcggcggcagccaggcccggctgagcgccttactggccggagcgggcctgcttatattatgcgcccccggagtgtgcggcggggggagttgttgcccttctcctcaccctagctctgcccctcggagcgcctcaacaccgcgtgggttcagccatcagggacgaccaggaagagcacctgccactcccctccctttggttgttcggccactttttagcgtggccccaggggacagagcgctgtcgctagaacgggccaggggtacaggggcgtcaatggccgtggccgcccgcagcggcaggcgcaggcgcagcggggccgaccaggaaaaggcagaaagaggggagggcgcttcaagatcaccaagaggagtactccgggatggggggcagcaggagcccggcacccgggagagggatccagataaggccactcgcttcagaatggaggaactgcggctgacctcaacaacatttgcccttactggagactcggcccataatcaggccatggttcactggagtggccataatagctcagtaatcctgattttgaccaagctctatgattacaatcttggctcaatcaccgagagcagtctctggcgaagcaccgactatggcacaacttacgaaaagctcaatgacaaagtggggctgaaaactatcctgtcctacctctacgtgtgtcccactaataagagaaaaatcatgctgttgactgatcctgagatcgagagttctctgctaatttcaagcgatgagggagcgacctaccagaaataccgcttgaacttctacatccagtctttgctattccatcctaagcaggaagattggatcctagcttacagccaggatcagaaactctatagctcagctgagttcggccggcgctggcagctgatccaggagggcgttgtgccaaaccgattctactggagcgttatgggctcaaacaaagaacctgacctcgtccacctggaagccagaaccgtggacggtcacagccattacttaacatgccggatgcagaactgtactgaggctaaccgtaatcagccctttcctggatatatagacccggactcactgattgtgcaggatcattatgtgttcgtacaattgacgagcggcggccgcccacattactatgtctcttacaggcggaatgctttcgcccagatgaaattgcctaaatatgcacttcctaaggacatgcatgtcatttcaaccgacgagaaccaagtgtttgctgctgttcaagagtggaatcagaacgacacatacaacctttacatcagcgatacacggggagtgtatttcaccttggcactcgagaatgtccagagttctcgcggacctgaaggcaatatcatgatagatctatacgaagtagcaggcatcaaggggatgtttttagctaataaaaagatcgataaccaggtaaagacttttataacctataataaaggcagggattggaggctgctgcaggcccctgacactgacctgcgcggagaccccgtacattgtcttcttccctactgcagccttcacctgcatctgaaggtttccgagaacccctatacatctggaatcattgcatcgaaggacactgcaccatcgataatagtggcttcaggtaatatcggttctgagctgagcgacaccgatatttcaatgttcgtgtcatctgatgccgggaacacctggagacagattttcgaggaggaacactccgtcttgtacctggaccagggcggcgtccttgttgcaatgaagcatacatccttaccaattaggcatctgtggctctcgtttgatgagggacgaagctggagtaaatattctttcacaagtatccccctcttcgtggacggcgttctcggcgagccaggagaggagacccttattatgaccgtatttggtcatttcagtcaccgctctgaatggcaattggtaaaggtggactataaaagcatcttcgatcggcgctgcgctgaagaagactaccgaccatggcagttacacagtcagggagaagcctgcataatgggcgccaagaggatctataaaaaacggaagagcgaaaggaaatgtatgcagggcaaatacgccggagctatggaatctgagccatgtgtctgtacagaggctgactttgactgcgattacggctatgaaaggcactctaacgggcagtgcctccctgccttctggttcaatccttcttccctttccaaggattgcagcctgggccaatcttacctgaactcaacaggataccgcaaggtcgtgtccaataactgcacagatggggtcagagaacagtataccgctaagcctcagaagtgtccaggcaaggctcctcggggccttaggattgtgaccgctgacggtaaattaaccgctgaacagggccacaatgtcactctcatggtacagcttgaagaaggcgacgtgcagcgcacccttattcaggtggactttggcgatggcattgcggtttcctatgtgaacctgtctagcatggaggatggtatcaagcatgtctaccaaaacgtgggcatctttcgggtgactgtgcaggtagataattctctggggtcagacagtgccgtattgtacttgcacgtaacatgccctctcgaacacgtgcatctcagcctgccttttgtgaccacaaagaacaaagaagtgaacgctacggcagtactctggccaagccaggtaggcaccctcacatacgtctggtggtacggtaacaacaccgagcccttgatcactttagagggtagcattagctttcggtttacttctgagggcatgaacaccattacagtgcaggtatccgccggtaacgctattctgcaggacacaaaaaccattgcagtgtacgaggaatttagatctcttaggcttagtttttcgccaaatttagacgattataacccagacatcccagaatggcgacgcgatattggacgtgtaatcaaaaaaagcctcgttgaggcaactggcgtgccaggacagcacatcctggttgccgtgcttcccggcctgcctacgaccgcagagcttttcgtgctgccgtaccaagatcctgccggcgaaaacaagagaagtactgacgacctggaacagatcagtgagcttctaattcacaccttgaatcagaactccgttcactttgaactgaagccaggcgttagagttctggtgcacgcagcccacttgacggcagccccactcgtggacctcaccccaacacactcaggcagcgctatgctcatgctgctgtccgtggtctttgttggcctggctgtgttcgtgatctacaagttcaaaagaaagatcccagggatcaacgtgtacgctcaaatgcagaatgagaaggagcaagagatgattagcccagtaagccactccgaatcacgccccaacgtgcctcagacagaactccggcgaccaggacagctgatcgacgaaaaagttgagagtcagctgattggtagcatcagcattgtggccgaaaaccagtctacgaaggagatacctacatacgtcaacgtgtag

SEQ ID NO: 25448 - DNA, 3597 bp, Artificial Sequence
  derived and/or modified sequence
atgggcaaggttggtgccggtggcggttctcaggctcgcctcagtgccctgttggctggcgcaggcctgttgatcctgtgtgcccctggagtttgcggcggtggttcctgctgtcccagtcctcacccatcttccgcacccagaagcgcaagcacaccaagaggattcagtcatcaaggacgcccagggagagctcccgcaaccccgttaccactggtagtcagaccgctgttctctgtcgccccaggtgacagagcactgagcctagaacgcgcaaggggaaccggtgcaagcatggcagttgccgcaaggagcggcagacgaaggagatctggagcagaccaggagaaggcagagcgtggcgaaggggctagcaggtctcccagaggtgttctccgggacggagggcagcaggaaccgggaacacgggagcgagacccagacaaagctacccgttttaggatggaggagttacgccttacatccaccacatttgctctcacgggggacagtgcccataatcaagccatggtgcactggagcgggcacaacagttctgtgattctgattctaaccaaattgtatgactacaacctaggttcaatcactgaatcgtcactgtggcgtagtactgattacgggaccacgtacgaaaagcttaacgataaagtcggtctaaaaaccattctgtcatatttatacgtctgtcctactaacaaaaggaaaattatgctcctgactgatcctgaaatcgagtcgtcactacttatcagttccgacgagggggcaacctatcagaaatatcggttgaatttctacatccagtccttgctgttccaccccaaacaggaggactggatccttgcctactctcaggatcagaagctgtatagctcggccgagttcggcagacgctggcagctgatccaggagggcgtggtcccaaaccgcttctattggtccgttatgggctcaaacaaagaaccagacctcgtgcacctcgaggcgcgaacagtcgatgggcactcacattatcttacatgccgcatgcagaattgtacagaagcaaacagaaatcagcccttccctgggtacattgatcccgactctctcatcgtgcaggaccactatgtgttcgtgcaattaacctccggaggtaggccacactactacgtgtcctatcgcaggaatgctttcgcgcagatgaaactcccaaaatacgctttgcccaaggatatgcacgtcatttcaaccgatgaaaaccaggtgtttgcggcagttcaggaatggaaccagaatgatacttacaacctctacatctccgatacgcgaggtgtctattttacacttgcgctcgagaacgtacaatctagccgcggacctgaaggtaacattatgatcgacctgtatgaggtcgcaggtatcaagggcatgttcttggctaataaaaaaatagacaatcaggtgaaaacctttatcacctacaacaaaggtcgcgattggcgcctccttcaggcaccagacacagatctccggggagacccagttcactgcctgcttccttactgctctttgcacttgcatctcaaggtgtcggaaaatccatacacgtctggcatcatcgcgtccaaagatacggccccatctattatcgtggcaagcggaaatatcgggtccgagctgagtgataccgatatcagcatgtttgtctcttctgacgccggaaacacctggagacagattttcgaggaggaacactctgtactatacctcgatcagggcggagtgctggtcgctatgaaacatacctctctgcccatccgccatctgtggctgagcttcgatgaagggagatcatggtccaagtactcatttactagcatccccctattcgtggatggcgtactaggagagcctggggaagaaaccctgattatgactgtgttcggccacttttcccatcgcagtgagtggcagctcgtcaaagttgattataaaagcatcttcgaccggaggtgcgccgaggaggactacagaccatggcagctgcacagccagggagaagcctgcataatgggtgccaagaggatctacaagaagaggaaatcggagcgaaagtgtatgcagggtaagtatgctggtgctatggagagcgaaccatgtgtgtgcaccgaggcggactttgactgtgattacgggtatgaacgccattccaatggtcagtgcctgccagcgttttggtttaacccttcgtcactgagtaaagactgctcccttggacaaagctatctaaactctactggataccgcaaagtggtttccaataactgcacggacggcgttagggagcagtacacagcaaagcctcaaaaatgtccaggtaaggcccctaggggacttcgcattgtcactgctgatggtaaactgactgcagaacaggggcataatgtcacccttatggtccagctcgaagagggggacgttcagagaacactgatacaagtggattttggggacggtatcgccgtctcttatgtcaatttatctagcatggaggatggcattaagcacgtgtaccagaatgtgggaatcttcagagtgaccgtgcaagttgataactctttgggctctgatagcgccgtgctgtacctacatgtgacatgcccactggagcacgtccaccttagtctgcctttcgttactaccaaaaataaggaggttaacgccaccgccgtcctgtggccgtctcaggttggcacactaacgtatgtgtggtggtacggaaataatacagaaccgctaatcacgttggagggttccatcagcttcagattcaccagcgagggaatgaataccataaccgttcaggtctctgcaggaaacgccatccttcaggataccaagaccatcgcggtgtatgaagaattcaggtcgcttaggctttccttttcaccaaatctcgacgactataacccagacatccccgagtggaggagagacatcgggagagtgattaagaagagccttgttgaggccactggcgtgcctggccagcatatcctagtggcagtgttaccaggcctgccgacaacagctgagttatttgtgctgccctaccaggatcccgctggagagaataaaagaagtactgacgaccttgagcagatctcggaactcctgatccataccctgaaccaaaactccgtccactttgaactgaagccaggggtgagagttctcgtccatgctgcacacctgactgccgctccattggtggacttgacccccacccattcaggttctgcaatgcttatgcttttgagcgtggtctttgttggtttggccgtgttcgtgatatacaaatttaagcggaagattccaggaatcaacgtatatgcccagatgcagaatgagaaggagcaggaaatgatttctcctgtcagtcattcagagtcaaggcctaacgtgccccagaccgaactgagacgtcctggccagctcatcgacgaaaaggtggaatctcagctgatcggcagtatcagtatcgtagctgaaaaccagtcaacaaaagaaatcccaacctatgtgaatgtttag

SEQ ID NO: 25449 - DNA, 3612 bp, Artificial Sequence
  derived and/or modified sequence
atgggaaaagttggcgccggcggcggctcccaagcccggctgagcgcgctcctcgccggcgcggggctcttgatcctctgcgccccgggcgtctgcggcggcggctcctgctgcccctcgccgcaccccagctccgctccacgctcggcctcgacccctaggggcttttcccaccaggggcggccaggcagggctcctgccacgcccctgcccctcgtagtgcgtcccctgttctcagtggcccccggggaccgagcgctatccctggagcgggctcggggcactggggcatccatggcggttgctgcacgctccggccggaggagacggagcggagcggatcaggagaaggcagaacggggagagggcgcgagtcggagcccccggggagtgctaagagatggagggcagcaggagcctgggactcgggagcgggacccggacaaagccacccgcttccggatggaggagctgagactgaccagcaccacgtttgcgctgacgggagactcagcacacaaccaagccatggtccactggtctggccacaacagcagcgtgattctcattttgacaaagctctatgactataacctggggagcatcacagagagctcgctttggaggtcaaccgattatggaacaacctatgagaagctgaatgataaagttggtttgaaaaccattttgagctatctctatgtgtgtcctaccaacaagcgtaagataatgttactcacagacccggagattgagagcagtttattgatcagctcagatgaaggggcaacttatcaaaagtaccggctgaacttctacattcaaagcttgctttttcaccccaaacaagaagactggattctggcatacagtcaagaccaaaagttatacagctctgctgaatttgggagaagatggcagcttatccaagaaggggttgtaccaaacaggttctactggtctgtgatggggtcaaataaagaaccagaccttgtgcatcttgaggccagaactgtggatggtcattcacattatctaacttgccgaatgcagaactgtacagaggccaacaggaatcagccttttccaggctacattgacccagactctttgattgttcaggatcattatgtgtttgttcagctgacatcaggagggcggccacattactacgtgtcctaccgaaggaatgcatttgcccaaatgaagcttccgaaatatgctttgcccaaggacatgcatgttatcagcaccgatgagaatcaggtgttcgcagcggtccaagaatggaaccagaatgacacgtacaacctctacatctcagacacacgtggtgtctacttcaccctggccttggagaatgtccagagcagcagaggccctgagggcaacatcatgatcgacctctatgaggtagcagggataaagggaatgttcttggctaacaagaagattgacaaccaagtgaagactttcatcacatataacaaaggcagagactggcgtttgctgcaggcgccggacacggatctaaggggggaccccgtgcactgcttgctgccctattgctcactacaccttcacctgaaggtctctgagaatccctacacatcagggatcattgccagcaaagacacagctccaagcatcatagtggcatcaggtaatataggttctgaattgtcagacactgacatcagcatgtttgtctcttcagatgcagggaacacctggagacagatctttgaagaagagcacagtgttttgtacctggatcaaggtggagtcctggttgctatgaaacacacatctctcccaattcgacatctttggttgagttttgatgaagggagatcttggagcaaatacagtttcacatctattccactttttgtggatggggttctgggtgagcctggagaagagactctcatcatgacagtgtttggacacttcagccaccgctctgaatggcagctggtcaaagtagattacaagtccatttttgatagacggtgtgccgaagaggactacagaccttggcagctgcacagccagggggaagcatgtatcatgggagcaaaaaggatatataagaagcgaaaatcagagcggaagtgtatgcaaggaaaatatgcaggagctatggaatctgaaccctgtgtctgcactgaggctgattttgattgcgactatggttatgagcgacacagcaatggccagtgcctgccggcattttggttcaatccatcctctctgtcaaaggattgcagcttgggacagagttacctcaatagtactgggtacaggaaggtggtttccaataattgcactgatggcgtaagggaacagtacactgccaaaccgcagaagtgcccagggaaagccccgcgggggctgcggatagtcacggctgatggaaagctgacagcggaacaaggacacaacgtcactctcatggtgcaattagaagagggtgatgttcagcggacactcatccaagtggactttggcgatggtatcgcggtgtcttacgtcaatctcagctccatggaagatgggatcaaacacgtctatcagaacgtgggcattttccgtgtgaccgtgcaggtggacaacagtctgggttctgacagcgccgtcctgtacttacatgtaacttgtcccttggagcacgtgcacctgtctcttccctttgtcaccacaaagaacaaagaggtcaatgcgacggcagtgctgtggcccagccaagtgggcaccctcacttacgtgtggtggtacggaaacaacacggagcctttgatcaccttggagggaagcatatccttcagatttacttcagaaggaatgaataccatcacagtgcaggtctcagctgggaatgccatcctacaagacacaaagaccatcgcagtatatgaggaattccggtctcttcgcttgtccttttctccaaacctggatgactacaacccggacatccctgagtggaggagggacatcggtcgagtcatcaaaaaatccctggtggaagccacaggggttccaggccagcacatcctggtggcggtgctccctggcttacccaccactgctgaactctttgtcctaccctatcaggatccagctggagaaaacaaaaggtcaactgatgacctggagcagatatcagaattgctgatccacacgctcaaccaaaactcagtacacttcgagctgaagccaggagtccgagtccttgtccatgctgctcacttaacagcggcccccctggtggacctcactccaacccacagtggatctgccatgctgatgctgctctcagtggtgtttgtggggctggcagtgttcgtcatctacaagtttaaaaggaagatcccggggattaatgtttatgcccagatgcagaatgagaaagaacaagagatgatcagtccagtcagtcactctgaaagcaggcccaatgtccctcagactgaactaaggaggcctggccagcttatagatgagaaggtggaatcccagctcataggaagtatttccatagttgctgagaatcaaagcacaaaagaaatccctacctatgtaaatgtttgaatggaggacgccagt

SEQ ID NO: 25450 - DNA, 1590 bp, Artificial Sequence
  derived and/or modified sequence
atgtctcaggatacagaggtagacatgaaagaggtggaactcaacgagctcgagccggagaaacagcctatgaacgctgctagcggggctgccatgtcccttgctggcgccgagaaaaacgggctggttaagattaaggtggctgaagatgaggcggaggcggccgctgctgccaaattcacgggcttgagtaaagaggaactcctgaaagtagcagggagcccagggtgggtcagaacacggtgggcattgctgctactgttctggttgggttggctcggcatgctggcaggcgcggtggtgataattgtgagggccccaaggtgcagggagttgccagcacagaaatggtggcataccggtgccctgtatcggataggagatttgcaggcttttcagggtcatggggcaggcaatttggcaggccttaagggccgtctagactacttgagcagcctgaaagtgaaaggccttgtgctgggtcccattcataagaaccagaaagacgacgtggctcagacagacctgcttcagatcgatcctaacttcgggtctaaggaggatttcgacagcctgttgcaatcagccaaaaagaagtcgattcgggtaatcctggacttaaccccaaattaccggggcgaaaatagttggttctccacccaggttgacacagtggcaacaaaagtcaaagacgcactcgaattttggctccaggctggcgtggatggatttcaggttcgcgacattgagaatttgaaggacgcctctagctttcttgctgaatggcaaaacatcaccaagggattttctgaggaccgcctcctaattgccggtaccaatagcagtgatctacaacagatcctgtctctactggaaagcaataaggacctgctgctgactagtagctatctctccgacagcggcagcacaggagagcacaccaagtctctcgtgactcaatatcttaacgccacaggcaatcgatggtgcagctggtcactgagccaggcccggctcctgacctcttttctacctgcacagctcctacgactctatcagctgatgctctttactttgcctggcaccccagtgttctcctacggcgacgaaattggactggacgccgctgctctcccaggacaaccgatggaggccccggtgatgctgtgggatgagtcctcttttcccgacatacctggcgccgtgtcagcaaacatgaccgtgaaaggacagtccgaggaccccggatcactgctgagcctgtttaggaggctttccgaccagcggtccaaggagcgttccctcctgcacggtgacttccacgctttcagcgcgggccctggactgttctcatacatccgacactgggaccagaacgaacggtttctggtggtgcttaatttcggtgacgtgggcttgtccgcagggctgcaagccagcgacttgcctgcctctgccagtcttccggctaaagccgaccttctactgtctacacaacccggccgcgaggaaggctcaccattggaactcgaaaggctcaagctggagccacatgaggggttgttactgagatttccatatgccgcatag

SEQ ID NO: 25451 - DNA, 1536 bp, Artificial Sequence
  derived and/or modified sequence
atgtcccaagatacagaagtggatatgaaggaggtcgagttgaatgagttggaacccgagaaacagcccatgaatgctgcttccggcgctgccatgagcctagccggagccgagaaaaatggcctggtgaaaattaaagtagctgaggatgaagcagaagcagcagcagcggccaagtttaccggactaagtaaagaggaactgctgttttggctgggctggctgggtatgctcgctggcgctgttgtgatcattgtgagggccccacgatgtcgcgagctgcctgctcaaaaatggtggcacacgggcgctctctacagaattggcgatctgcaagccttccaggggcacggagccggtaatctcgccggcctgaaaggacgacttgattacctgagcagcttgaaggtcaagggactggtcctcggtccgattcataagaaccagaaagatgatgtggcccagactgatctgctccagatcgaccctaacttcgggtccaaggaagattttgatagtctgttgcaaagtgctaaaaaaaagtccatcagggttatactggaccttacccctaactaccggggcgaaaactcctggttttctacacaggttgacacagtggcgacaaaggtcaaggacgctctagagttctggctgcaggctggggtcgacggatttcaagtccgggacattgagaacctgaaggatgcatccagtttcctggctgaatggcagaacattaccaagggattctcggaggatcggctcttaatcgcaggcactaactcatccgatttgcagcagatcttaagcctgctcgaaagcaacaaggacctgctcctgacgagcagctacctgtcggactctggatcaacaggcgaacataccaaatcattggttacccagtacctcaatgctacagggaaccggtggtgttcctggtctctatctcaagcacggttactgacaagtttcctgccggctcagttgctacgcctgtatcagctcatgttattcaccctgcctggcacaccggtgttctcttacggagacgagatcggcctggacgcagcagccctcccaggccagcctatggaggctccagttatgctttgggacgaatcaagctttcccgatattcccggcgccgtgagtgctaatatgaccgttaagggccagtccgaagaccccggctctcttttgtctcttttcaggcgcctcagcgaccaacgcagcaaggaacgcagtttgctccatggagatttccacgccttctccgcgggtcctggcctattttcctatatccgccactgggatcagaacgagcgttttttagtggtgctcaattttggtgatgttgggctctcagccggcctccaggcatccgatcttcctgctagtgctagcttacccgctaaagcagatctcttgctctcaacacagccgggccgggaagagggaagcccactcgaattagaacgccttaaactggagccccatgaagggctcttgcttagattcccctatgccgcctag

SEQ ID NO: 25452 - DNA, 408 bp, Artificial Sequence
  derived and/or modified sequence
atgtcacaggacactgaggttgacatgaaagaggtcgaacttaacgaacttgaacccgaaaagcaacccatgaacgctgcctcgggagccgccatgtctctggcgggcgctgagaaaaacggcttagtgaaaatcaaagtggctgaggacgaagctgaggccgctgccgcagctaagttcacagggttaagtaaggaagaactacttaaagtagcagggtcccctggatgggtcagaacgcgctgggcgctgctgcttctattctggctgggatggctcggcatgcttgctggggccgtagtgattattgttagagcccctcggtgtcgagagctgcctgcccagaaatggtggcatactggggccctctaccggattggggacctccaggcttttcagggccactag

SEQ ID NO: 25453 - DNA, 1590 bp, Artificial Sequence
  derived and/or modified sequence
atgagccaggacacagaggtggacatgaaggaggtggagctgaatgagctggagcctgagaagcagcccatgaatgctgccagcggggccgccatgagcctggccggggctgagaagaatggcctggtgaagatcaaggtggctgaagatgaggccgaggccgctgctgctgccaagttcaccggcctgagcaaggaggagctgctgaaggtggccggcagccctggctgggtgaggacccgctgggccctgctgctgctcttctggctgggctggctgggcatgctggccggggctgtggtgatcatcgtgcgggccccccgctgccgggagctgcctgcccagaagtggtggcacactggagccctgtaccgcatcggggacctgcaggccttccagggccatggagctggcaacctggccggcctgaagggccgcctggactacctgagcagcctgaaggtgaagggcctggtgctgggccccatccacaagaaccagaaggatgatgtggcccagacagacctgctgcagattgaccccaactttggcagcaaagaagattttgacagcctgctgcagagcgccaagaagaagagcatccgggtcatcctggacctgacccccaactacagaggagagaacagctggttcagcacccaggtggacacagtggccaccaaggtgaaggatgccctggagttctggctgcaggccggcgtggatggcttccaggtgcgggacatcgagaacctgaaggatgccagcagcttcctggccgagtggcagaacatcaccaagggcttctctgaagatcggctgctgattgctggcaccaacagcagtgacctgcagcagatcctgagcctgctggagagcaacaaggacctgctgctgaccagcagctacctgagtgacagcggcagcactggagagcacaccaagagcctggtgacccagtacctgaatgccactggaaaccgctggtgctcctggagcctgagccaggcccggctgctgaccagcttcctgcctgcccagctgctgcggctgtaccagctgatgctgttcaccctgcccggcacccctgtgttctcctatggagatgaaattggcctggatgctgctgccctgcccggccagcccatggaggcccctgtgatgctgtgggatgagagcagcttcccagacatccctggagctgtgtctgccaacatgacagtgaagggccagagtgaagatcctggcagcctgctgagcctcttccggcggctgagtgaccagaggagcaaggagaggagcctgctgcatggagacttccacgccttctctgctggccctggcctcttctcctacatccgccactgggaccagaatgaacgcttcctggtggtgctgaactttggagatgtgggcctgtctgctggcctgcaggccagtgacctgcctgccagcgccagcctgcctgccaaggctgacctgctgctgagcacccagcccggccgggaggagggcagccccctggagctggagcggctgaagctggagccccatgagggcctgctgctgcgcttcccctatgctgcctag

SEQ ID NO: 25454 - DNA, 1536 bp, Artificial Sequence
  derived and/or modified sequence
atgagccaggacacagaggtggacatgaaggaggtggagctgaatgagctggagcctgagaagcagcccatgaatgctgccagcggggccgccatgagcctggccggggctgagaagaatggcctggtgaagatcaaggtggctgaagatgaggccgaggccgctgctgctgccaagttcaccggcctgagcaaggaggagctgctcttctggctgggctggctgggcatgctggccggggctgtggtgatcatcgtgcgggccccccgctgccgggagctgcctgcccagaagtggtggcacactggagccctgtaccgcatcggggacctgcaggccttccagggccatggagctggcaacctggccggcctgaagggccgcctggactacctgagcagcctgaaggtgaagggcctggtgctgggccccatccacaagaaccagaaggatgatgtggcccagacagacctgctgcagattgaccccaactttggcagcaaagaagattttgacagcctgctgcagagcgccaagaagaagagcatccgggtcatcctggacctgacccccaactacagaggagagaacagctggttcagcacccaggtggacacagtggccaccaaggtgaaggatgccctggagttctggctgcaggccggcgtggatggcttccaggtgcgggacatcgagaacctgaaggatgccagcagcttcctggccgagtggcagaacatcaccaagggcttctctgaagatcggctgctgattgctggcaccaacagcagtgacctgcagcagatcctgagcctgctggagagcaacaaggacctgctgctgaccagcagctacctgagtgacagcggcagcactggagagcacaccaagagcctggtgacccagtacctgaatgccactggaaaccgctggtgctcctggagcctgagccaggcccggctgctgaccagcttcctgcctgcccagctgctgcggctgtaccagctgatgctgttcaccctgcccggcacccctgtgttctcctatggagatgaaattggcctggatgctgctgccctgcccggccagcccatggaggcccctgtgatgctgtgggatgagagcagcttcccagacatccctggagctgtgtctgccaacatgacagtgaagggccagagtgaagatcctggcagcctgctgagcctcttccggcggctgagtgaccagaggagcaaggagaggagcctgctgcatggagacttccacgccttctctgctggccctggcctcttctcctacatccgccactgggaccagaatgaacgcttcctggtggtgctgaactttggagatgtgggcctgtctgctggcctgcaggccagtgacctgcctgccagcgccagcctgcctgccaaggctgacctgctgctgagcacccagcccggccgggaggagggcagccccctggagctggagcggctgaagctggagccccatgagggcctgctgctgcgcttcccctatgctgcctag

SEQ ID NO: 25455 - DNA, 408 bp, Artificial Sequence
  derived and/or modified sequence
atgagccaggacacagaggtggacatgaaggaggtggagctgaatgagctggagcctgagaagcagcccatgaatgctgccagcggggccgccatgagcctggccggggctgagaagaatggcctggtgaagatcaaggtggctgaagatgaggccgaggccgctgctgctgccaagttcaccggcctgagcaaggaggagctgctgaaggtggccggcagccctggctgggtgaggacccgctgggccctgctgctgctcttctggctgggctggctgggcatgctggccggggctgtggtgatcatcgtgcgggccccccgctgccgggagctgcctgcccagaagtggtggcacactggagccctgtaccgcatcggggacctgcaggccttccagggccactag

SEQ ID NO: 25456 - DNA, 1590 bp, Artificial Sequence
  derived and/or modified sequence
atgagccaggacaccgaggtggacatgaaggaggtggagctgaacgagttggaacctgaaaagcagccaatgaacgccgcttctggtgctgccatgtctttggctggggctgagaagaatggactggtgaaaattaaggtggctgaggacgaggccgaggccgcggccgctgcaaaatttacaggattgtccaaggaagagctgctgaaagtggcagggagccccgggtgggtacgcacccgctgggcattactcctgctgttctggcttggttggctgggtatgttggcaggtgccgtggttattatcgttagggccccgcggtgcagagaactccctgcgcagaagtggtggcacactggcgcactctatcgtatcggagacttacaggcatttcagggtcatggagccggaaatctggccggccttaagggccggctggactatttgtcgtcgctgaaggtcaaagggttagttctcggccccatacataaaaaccaaaaggatgacgttgcacagaccgatctactgcaaatcgaccctaactttgggagtaaagaggacttcgactccttgcttcagtcggccaagaagaagagtattcgggtgattcttgacctgacacctaattatagaggtgaaaatagctggttctcaacccaggtggataccgtagcaaccaaggtcaaggacgcactggagttctggctacaagcaggggtcgacggcttccaagtacgcgacattgaaaacttaaaggacgcctcaagcttcctggccgagtggcagaatattaccaaaggattctcagaggacagactgctgatagcagggacgaattcaagcgatctgcagcagattctgagcctactggaatcaaacaaagatctgctgctgaccagcagctaccttagcgattctggctccacgggagagcacaccaagtccctcgtgacacaatacttaaatgcaaccggcaaccgctggtgttcctggtccctttctcaagcccggttgctgacaagctttctccccgcacagctgcttagattgtatcaattgatgttattcactcttcccgggacacccgtgttcagttacggcgacgaaatcggtctggacgcggccgctttgcccggtcagcctatggaggcccccgtgatgctctgggatgagagcagctttccagatattcccggagcggtgtcagcaaatatgacagtgaaaggtcagtccgaggaccctggctctctcctcagtctttttcgacggctctccgatcagcgatcgaaggagcgcagcctgttgcatggcgacttccacgccttcagcgctggccctggtttattcagttacatccggcactgggaccagaatgaacgatttctggtggttctcaatttcggggacgtgggcttatccgcgggacttcaggccagtgacctgcccgcatcggcctccctacctgccaaagcagacctgctgctgtcaacgcagccgggacgtgaagaaggctcccccttagaactcgagcggcttaagctggagcctcacgaaggactgctgctgcgcttcccttacgcagcctag

SEQ ID NO: 25457 - DNA, 1536 bp, Artificial Sequence
  derived and/or modified sequence
atgagccaggacaccgaggtggacatgaaggaggtggagctgaacgaactggaacctgaaaaacagcccatgaatgcggcctccggcgccgctatgagcttggcgggggctgaaaagaacggactggttaaaattaaagtagctgaggacgaggccgaggcagccgccgccgctaagttcaccggtctatccaaagaggagctccttttttggttagggtggctgggtatgctggcaggagcagtggtcatcatagttcgagccccacggtgccgtgagttgcctgctcagaaatggtggcatacgggcgccttatacaggatcggtgatctgcaggcgttccaggggcacggtgccggcaatctggcgggcctgaaaggccgactagactatctaagctctctaaaagtgaagggtcttgtgttgggtcccatacacaaaaaccaaaaggatgacgtggctcagacagatttgttacaaatagacccgaacttcggtagtaaagaagacttcgactcactgctacagtctgccaagaagaagagtatcagggtgattttggatcttactcctaattacaggggcgagaacagctggttcagcactcaggtggacacagttgcaactaaggtgaaagacgcattggagttctggctgcaggccggcgttgatggttttcaagttagagatatcgagaatttgaaggatgcatctagttttctggccgaatggcaaaacattacaaaaggattcagcgaggaccgactactgatagccggaactaattcaagcgacctccaacaaatactgagcctactggagagcaacaaggacctcctgcttacaagcagttatctgtctgattccgggagtactggagaacacactaagtctctggtgacccagtacctgaacgccaccggcaatcgctggtgctcctggagcctatcccaggcccggttgctgactagtttcctacctgcacaacttctacgactgtatcaactcatgctgttcacattacctggaacacccgtctttagctatggggatgagatcggactggatgctgcagcactgcctgggcagcctatggaggcccccgtcatgctctgggacgaatcctccttccccgatattcctggagctgtctccgcgaatatgacagtgaaaggccaaagtgaagatccgggaagcttgctcagcctcttcagacgcctgagcgatcagaggagcaaagaacgcagtttgctccacggagacttccatgctttctcagctggtccaggcctcttcagttacatccgccattgggaccagaatgagcgattcttagttgtgctgaactttggcgatgtgggcctcagcgcaggtttacaggccagtgatttgcccgcttccgcgtcattgccggctaaggccgatctactgctaagtacacagccaggaagggaagaaggttcccctctagaactcgaaagactgaaactggagcctcacgagggtctgctcctccggtttccctacgcagcctag

SEQ ID NO: 25458 - DNA, 408 bp, Artificial Sequence
  derived and/or modified sequence
atgagccaggacaccgaggtggacatgaaggaggtggagctgaacgagctcgagcccgagaaacagcctatgaatgctgcatctggtgccgccatgagcctggccggcgccgagaagaacggtctagtgaagatcaaagtggccgaagatgaagcagaggccgccgctgccgccaaatttacgggcctgagtaaagaagagttgctgaaggtggcaggatcacctggctgggtgcgcactaggtgggctctattattattgttttggttgggatggcttggcatgctcgctggggcagtggtaatcatcgtgagagccccccgatgccgcgaactcccggcccaaaaatggtggcacacaggcgcattataccgcatcggagatctacaggccttccaggggcattag

SEQ ID NO: 25459 - DNA, 1590 bp, Artificial Sequence
  derived and/or modified sequence
atgagccaagatacagaagtggacatgaaagaggtcgagctgaatgagctggaacctgagaagcagcctatgaacgcagccagcggggctgcaatgtccctggccggtgctgaaaaaaatggcttggtcaaaatcaaggtggctgaggacgaggcagaagccgctgcggctgctaaattcaccgggctgtcaaaggaagagctgctgaaggtagctggtagccccggatgggtgaggacgcggtgggctctgctccttctgttctggcttggatggctaggcatgcttgccggtgcagtagttatcatcgtgagagcccctcgctgtagagagcttccggcacagaagtggtggcacactggcgcactctatcgcatcggggatcttcaggcatttcaaggccacggcgcaggcaatcttgctggcctgaaggggaggctggactaccttagttcccttaaggtgaaaggtctcgtgctgggccctatccacaagaatcagaaagatgatgtggcacagaccgacttgctgcaaatcgatcctaactttggttcaaaggaggactttgatagcctcttgcagtctgcaaagaagaagagtatccgtgtgatcctcgacctgacccccaactatagaggagagaatagctggttctcgacccaggtagatactgttgccacaaaggttaaagacgctctggaattttggctccaagccggagttgacggttttcaggtgagggacattgagaatctgaaagacgcttcatcctttctcgctgaatggcagaacatcaccaaaggatttagcgaagatcggttgctcatcgctgggacaaacagcagcgacctgcagcagatcttgtcactgctggagtccaacaaggacctcttgcttacttccagctatcttagcgactccgggtccaccggcgagcacaccaaatctctggtgacacagtatttgaacgcaactggcaatcggtggtgctcatggtccctgagccaggcacggttattaacaagtttccttcctgctcagcttctgaggctgtatcaattaatgctgttcacactcccaggaacacccgtgttttcttatggcgatgagatagggcttgacgccgctgccttgcccggtcagcctatggaagcacctgtgatgctctgggacgagtcatcctttcccgacattcccggagccgttagtgctaatatgacagtgaaagggcagtcagaggatcctggaagtctgctgagcctgttccgaagactctcagatcagagatccaaggagcgctctctcctccacggcgacttccacgcttttagcgccggtcctggcttgttttcatatatcagacattgggatcagaatgagaggtttctggttgtgttaaacttcggggacgtgggactctccgcaggtctgcaggcgtccgacttgccagcctccgcgtcgctgccggcaaaggcagatcttttattaagcacacagccgggaagggaggaaggcagccctctggaactggaacgactcaaattggagccccacgaggggctgctgctccgattcccatacgcagcatag

SEQ ID NO: 25460 - DNA, 1536 bp, Artificial Sequence
  derived and/or modified sequence
atgtctcaggatactgaggtggatatgaaagaggtagagctgaacgagctcgaacccgaaaaacaaccaatgaatgccgcaagtggcgctgcaatgtctctcgccggagccgaaaaaaacgggctagtgaaaattaaagtggccgaggatgaggccgaggccgcagccgctgcaaaattcaccggcctgtccaaagaggaacttctgttctggctgggatggctcggtatgctagccggagccgtcgtgatcatcgtgcgcgcaccccgttgccgtgagctgcccgctcagaagtggtggcacaccggcgctctgtataggattggcgatcttcaggctttccagggccacggggctgggaatcttgctggtcttaaagggcgtttagactacctgagtagtctgaaggttaaaggcttagtactggggccaattcacaaaaatcagaaagatgatgtggcccagacagacttgcttcagattgaccctaacttcggcagcaaggaggattttgatagcctcctgcagagcgcaaaaaagaagtcaattagagtgattcttgatctaaccccaaactatcggggagaaaattcctggttttcaacccaggtcgatacggtggctacaaaagtgaaggatgcacttgaattctggctgcaggcaggcgtggatggtttccaggtgagagacatagaaaatttgaaagatgccagtagcttcctggccgaatggcagaatattacaaagggattttctgaagataggctgcttatcgccggaacaaattcatctgatctccagcaaatcctgtcgctgctggagagtaataaagacttgttacttacatcctcatacctgtccgactctggcagcaccggcgagcacacgaagtccctggtgacccagtacctcaatgctacaggaaaccggtggtgttcctggtccctttctcaggctaggctgctcacgtcattcctcccagcccagctgctgaggctgtatcagcttatgttgttcacacttcccggtactcctgttttttcttatggtgatgagatcggcttagatgcggcagcccttcctggacaaccaatggaggcccctgttatgctgtgggacgaatccagttttcctgacataccaggggctgtatccgcaaatatgacagtgaaaggtcagtccgaagacccaggctcactccttagcctattccgacggctgtcggaccaaaggagcaaggaaagatcccttttgcacggggacttccacgcttttagcgcgggacccggactctttagctatatacggcactgggaccagaatgaacgcttccttgtggtgctcaacttcggagatgtgggcctctctgcaggcctgcaggccagtgatctaccagcaagcgcctcattgcctgccaaggctgatctgctgctctcgacccagcctgggagggaggagggttcacccctcgagcttgagcgactgaaactggaaccccacgaggggctgctgctgagattcccctatgccgcttag

SEQ ID NO: 25461 - DNA, 408 bp, Artificial Sequence
  derived and/or modified sequence
atgtctcaagacaccgaggtggacatgaaagaagtcgagctgaatgagctcgaaccagaaaaacagcctatgaacgccgcaagcggagctgccatgtcgctggcaggcgcagaaaagaacggcctcgtaaagataaaagtagccgaggatgaggctgaggctgcggcagctgcaaaatttactgggctgtcgaaggaggagcttcttaaggtggctggcagtccaggctgggttcgaacgcgatgggctcttttgcttttgttttggttggggtggctggggatgctagccggtgcagttgtcattatcgtgcgggcacctagatgtcgggagctgccagcccaaaaatggtggcacactggagccctgtacaggattggcgatctgcaagcctttcagggacactag

SEQ ID NO: 25462 - DNA, 1590 bp, Artificial Sequence
  derived and/or modified sequence
atgagccaggacaccgaggtggacatgaaggaggtggagctgaacgagctggagcccgagaagcagcccatgaacgccgccagcggcgccgccatgagcctggccggcgccgagaagaacggcctggtgaagatcaaggtggccgaggacgaggccgaggccgccgccgccgccaagttcaccggcctgagcaaggaggagctgctgaaggtggccggcagccccggctgggtgagaaccagatgggccctgctgctgctgttctggctgggctggctgggcatgctggccggcgccgtggtgatcatcgtgagagcccccagatgcagagagctgcccgcccagaagtggtggcacaccggcgccctgtacagaatcggcgacctgcaggccttccagggccacggcgccggcaacctggccggcctgaagggcagactggactacctgagcagcctgaaggtgaagggcctggtgctgggccccatccacaagaaccagaaggacgacgtggcccagaccgacctgctgcagatcgaccccaacttcggcagcaaggaggacttcgacagcctgctgcagagcgccaagaagaagagcatcagagtgatcctggacctgacccccaactacagaggcgagaacagctggttcagcacccaggtggacaccgtggccaccaaggtgaaggacgccctggagttctggctgcaggccggcgtggacggcttccaggtgagagacatcgagaacctgaaggacgccagcagcttcctggccgagtggcagaacatcaccaagggcttcagcgaggacagactgctgatcgccggcaccaacagcagcgacctgcagcagatcctgagcctgctggagagcaacaaggacctgctgctgaccagcagctacctgagcgacagcggcagcaccggcgagcacaccaagagcctggtgacccagtacctgaacgccaccggcaacagatggtgcagctggagcctgagccaggccagactgctgaccagcttcctgcccgcccagctgctgagactgtaccagctgatgctgttcaccctgcccggcacccccgtgttcagctacggcgacgagatcggcctggacgccgccgccctgcccggccagcccatggaggcccccgtgatgctgtgggacgagagcagcttccccgacatccccggcgccgtgagcgccaacatgaccgtgaagggccagagcgaggaccccggcagcctgctgagcctgttcagaagactgagcgaccagagaagcaaggagagaagcctgctgcacggcgacttccacgccttcagcgccggccccggcctgttcagctacatcagacactgggaccagaacgagagattcctggtggtgctgaacttcggcgacgtgggcctgagcgccggcctgcaggccagcgacctgcccgccagcgccagcctgcccgccaaggccgacctgctgctgagcacccagcccggcagagaggagggcagccccctggagctggagagactgaagctggagccccacgagggcctgctgctgagattcccctacgccgcctag

SEQ ID NO: 25463 - DNA, 1536 bp, Artificial Sequence
  derived and/or modified sequence
atgagccaggacaccgaggtggacatgaaggaggtggagctgaacgagctggagcccgagaagcagcccatgaacgccgccagcggcgccgccatgagcctggccggcgccgagaagaacggcctggtgaagatcaaggtggccgaggacgaggccgaggccgccgccgccgccaagttcaccggcctgagcaaggaggagctgctgttctggctgggctggctgggcatgctggccggcgccgtggtgatcatcgtgagagcccccagatgcagagagctgcccgcccagaagtggtggcacaccggcgccctgtacagaatcggcgacctgcaggccttccagggccacggcgccggcaacctggccggcctgaagggcagactggactacctgagcagcctgaaggtgaagggcctggtgctgggccccatccacaagaaccagaaggacgacgtggcccagaccgacctgctgcagatcgaccccaacttcggcagcaaggaggacttcgacagcctgctgcagagcgccaagaagaagagcatcagagtgatcctggacctgacccccaactacagaggcgagaacagctggttcagcacccaggtggacaccgtggccaccaaggtgaaggacgccctggagttctggctgcaggccggcgtggacggcttccaggtgagagacatcgagaacctgaaggacgccagcagcttcctggccgagtggcagaacatcaccaagggcttcagcgaggacagactgctgatcgccggcaccaacagcagcgacctgcagcagatcctgagcctgctggagagcaacaaggacctgctgctgaccagcagctacctgagcgacagcggcagcaccggcgagcacaccaagagcctggtgacccagtacctgaacgccaccggcaacagatggtgcagctggagcctgagccaggccagactgctgaccagcttcctgcccgcccagctgctgagactgtaccagctgatgctgttcaccctgcccggcacccccgtgttcagctacggcgacgagatcggcctggacgccgccgccctgcccggccagcccatggaggcccccgtgatgctgtgggacgagagcagcttccccgacatccccggcgccgtgagcgccaacatgaccgtgaagggccagagcgaggaccccggcagcctgctgagcctgttcagaagactgagcgaccagagaagcaaggagagaagcctgctgcacggcgacttccacgccttcagcgccggccccggcctgttcagctacatcagacactgggaccagaacgagagattcctggtggtgctgaacttcggcgacgtgggcctgagcgccggcctgcaggccagcgacctgcccgccagcgccagcctgcccgccaaggccgacctgctgctgagcacccagcccggcagagaggagggcagccccctggagctggagagactgaagctggagccccacgagggcctgctgctgagattcccctacgccgcctag

SEQ ID NO: 25464 - DNA, 408 bp, Artificial Sequence
  derived and/or modified sequence
atgagccaggacaccgaggtggacatgaaggaggtggagctgaacgagctggagcccgagaagcagcccatgaacgccgccagcggcgccgccatgagcctggccggcgccgagaagaacggcctggtgaagatcaaggtggccgaggacgaggccgaggccgccgccgccgccaagttcaccggcctgagcaaggaggagctgctgaaggtggccggcagccccggctgggtgagaaccagatgggccctgctgctgctgttctggctgggctggctgggcatgctggccggcgccgtggtgatcatcgtgagagcccccagatgcagagagctgcccgcccagaagtggtggcacaccggcgccctgtacagaatcggcgacctgcaggccttccagggccactag

SEQ ID NO: 25465 - protein, 277 aa, Artificial Sequence
  derived and/or modified sequence
MLLSLKPSEAPELDEDEGFGDWSQRPEQRQQHEGAQGALDSGEPPQCRSPEGEQEDRPGLHAYEKEDSDEVHLEELSLSKEGPGPEDTVQDNLGAAGAEEEQEEHQKCQQPRTPSPLVLEGTIEQSSPPLSPTTKLIDRTESLNRSIEKSNSVKKSQPDLPISKIDQWLEQYTQAIETAGRTPKLARQASIELPSMAVASTKSRWETGEVQAQSAAKTPSCKDIVAGDMSKKSLWEQKGGSKTSSTIKSTPSGKRYKFVATGHGKYEKVLVEGGPAP

SEQ ID NO: 25466 - protein, 222 aa, Artificial Sequence
  derived and/or modified sequence
MLLSLKPSEAPELDEDEGFGDWSQRPEQRQQHEGAQGALDSGEPPQCRSPEGEQEDRPGLHAYEKEDSDEVHLEELSLSKEGPGPEDTVQDNLGAAGAEEEQEEHQKCQQPRTPSPLVLEGTIEQSSPPLSPTTKLIDRTESLNRSIEKSNSVKKSQPDLPISKIDQWLEQYTQAIETAGRTPKLARQASIELPSMAVASTKSRWETGEVQAQSAAKTPSCK

SEQ ID NO: 25467 - protein, 60 aa, Artificial Sequence
  derived and/or modified sequence
MLLSLKPSEAPELDEDEGFGDWSQRPEQRQQHEGAQGALDSGEPPQCRSPEGEQEDRPGL

SEQ ID NO: 25468 - protein, 126 aa, Artificial Sequence
  derived and/or modified sequence
MLLSLKPSEAPELDEDEGFGDWSQRPEQRQQHEGAQGALDSGEPPQCRSPEGEQEDRPGLHAYEKEDSDEVHLEELSLSKEGPGPEDTVQDNLGAAGAEEEQEEHQKCQQPRTPSPLVLEGTIEQS

SEQ ID NO: 25469 - protein, 64 aa, Artificial Sequence
  derived and/or modified sequence
MLLSLKPSEAPELDEDEGFGDWSQRPEQRQQHEGAQGALDSGEPPQCRSPEGEQEDRPGLHAYE

SEQ ID NO: 25470 - DNA, 834 bp, Artificial Sequence
  derived and/or modified sequence
atgctgttgtccctgaagccttctgaggccccagagctggacgaagacgaagggttcggagattggtcacaaagacctgaacaaaggcagcagcatgaaggggctcagggggcgttggacagcggggaaccaccacagtgcaggagtccggagggcgagcaggaagacaggcccggtctgcacgcgtacgagaaggaagactccgatgaggttcaccttgaggagctgagcctttccaaagagggccctggccccgaggacaccgtgcaggataacttgggagctgctggcgcagaggaagagcaagaagaacaccagaaatgtcaacagcccaggaccccatcccccctggttttggagggtaccatcgagcagtcatcacctccactgtcccctacaaccaaactgattgatcgcaccgaaagtctcaaccgctctattgagaagagtaactctgttaaaaagtcacaacctgacctgccgattagcaagattgatcagtggcttgaacaatacacccaggccatcgagaccgctggaagaacccccaagctggcgcgccaggccagtatcgagctgccctccatggctgttgcgtctaccaagtctcgttgggagacgggagaggttcaagcccagtcggccgctaaaaccccttcatgcaaggacatcgtcgcgggagacatgtcaaaaaagtcattgtgggaacaaaaagggggttccaagacatcgagcaccatcaagagtactccttctggtaagaggtataagtttgtggctactggccatgggaaatatgaaaaagtgttagtggagggtggccctgcgccttag

SEQ ID NO: 25471 - DNA, 834 bp, Artificial Sequence
  derived and/or modified sequence
atgctgttgagtctgaaaccaagcgaggcccctgaactggatgaggacgaagggttcggcgattggtcacagaggccagaacaacgccagcagcacgaaggagcccagggagctctggactccggagagccccctcagtgcagaagtcctgagggtgagcaggaagacagacccggcctacatgcctacgaaaaagaggattccgatgaagtccatctggaagaactgtctctctccaaagagggacccgggcccgaggacacagtccaagataatcttggtgccgcaggggcagaggaagagcaggaggagcatcagaagtgtcaacaaccaaggacaccctcgcctctcgtgctggaaggcactattgagcagtcatccccaccactctcccccaccaccaaactgatcgaccgcacagagagcctgaatcggagcattgagaagagtaacagcgtgaagaagtctcagcccgatttgcctatcagtaagatcgatcaatggctggaacagtatacccaagctatcgagaccgctggccggactcccaagctggcccggcaagccagcatcgagctccctagcatggccgtggcatccacgaaatccaggtgggagacaggtgaagtgcaggctcaaagcgccgctaaaactccttcttgtaaggatattgtagccggagacatgagcaaaaaaagcctgtgggaacagaagggtggatcaaagacaagcagtaccattaagagcaccccttcgggcaagcgctataagttcgtcgccaccggacatggtaagtatgaaaaagttctcgtcgaaggggggcctgctccttag

SEQ ID NO: 25472 - DNA, 669 bp, Artificial Sequence
  derived and/or modified sequence
atgctactgagtttgaaaccaagtgaagctccagagctagatgaagatgaaggcttcggggactggagccagcggccagagcagcgtcagcagcatgagggcgcacagggcgccctggactcaggggaaccaccacagtgccgttcacccgagggcgaacaagaggaccggccgggcctgcacgcatatgaaaaagaagattctgacgaagtgcacttggaagagttaagcctttcgaaggagggcccaggcccagaggatactgtgcaagacaatctcggagctgcaggagcggaagaggagcaggaggagcaccagaaatgtcagcagcctcggacccccagccctctggttctggagggcacaattgagcagagcagccctccccttagccccacaactaagctgatcgataggactgaaagcctaaacaggagtatcgagaaatctaatagcgtaaagaagtcgcagcctgacttgcccatcagcaaaatcgatcaatggctggagcagtatacccaggcgatagagacagctggccgaacgcctaaactcgcacggcaggcctcaattgaactcccaagtatggctgtggcgtctacaaagtctcggtgggaaacaggagaagtccaagcgcagtccgctgccaagacaccttcttgtaaatag

SEQ ID NO: 25473 - DNA, 183 bp, Artificial Sequence
  derived and/or modified sequence
atgctgctgagcttaaagccaagtgaagcccccgaacttgatgaagatgaggggtttggggattggtcccagcgtccggaacagaggcagcagcacgagggagctcagggagccctggactctggcgaaccccctcagtgtaggagccctgagggggaacaggaggacaggcccggcttgtag

SEQ ID NO: 25474 - DNA, 669 bp, Artificial Sequence
  derived and/or modified sequence
atgctgctgtccttgaagcctagcgaagctccagagctggatgaggatgagggatttggcgactggagccagcgtcccgagcaaaggcaacaacacgagggggctcaaggagcgctcgatagcggggagcctccacagtgtcgctcaccagaaggcgagcaagaagacagacctgggctgcacgcctatgagaaggaagattccgacgaagtccacctggaggaactcagcctgtccaaagagggtccaggccccgaggacacagtccaggacaatctcggagccgcaggtgcagaggaggaacaggaagaacaccaaaagtgccagcagccccgcaccccttctcctctggtgttggagggtaccatcgagcagtcttctccccccctctcacctacaactaagctgattgaccggacagaatctctcaatagaagcatagaaaagagcaacagcgtaaagaaaagccagcccgatctgcccatatccaaaattgaccagtggctggagcagtacacacaggccatcgaaacggctggcagaacaccgaaactcgccagacaggccagcatcgaacttcccagtatggctgtcgcctctactaagtcaaggtgggaaactggggaggtgcaggcgcagagtgcagccaagacgccctcttgcaaatag

SEQ ID NO: 25475 - DNA, 381 bp, Artificial Sequence
  derived and/or modified sequence
atgctgctcagccttaaacctagcgaagcacccgagctcgacgaagatgaggggttcggcgattggtcccaacgtccagaacagaggcagcaacatgagggggcccagggcgcactggacagtggggaacctccccagtgtcgctcaccggagggcgagcaagaagacaggccgggtctgcatgcctacgaaaaagaggactccgacgaggtccatttggaagaactctcgctgtcgaaagaagggcccggcccggaagacactgtacaagataaccttggcgccgctggcgccgaagaggaacaagaggagcatcagaagtgccagcaacctcgaactcctagccccctggtgctggagggaacaatcgagcaatcgtag

SEQ ID NO: 25476 - DNA, 195 bp, Artificial Sequence
  derived and/or modified sequence
atgctgctgtcactaaagccttcggaggccccagagcttgacgaggacgaaggcttcggagattggagtcagcgcccagaacagcgccagcagcatgaaggcgctcagggcgctctcgatagcggcgagccacctcaatgtcgatccccagagggagaacaggaagataggcctggcctgcacgcttacgaatag

SEQ ID NO: 25477 - DNA, 834 bp, Artificial Sequence
  derived and/or modified sequence
atgctgctgagcctgaagcccagcgaggcccctgagctggatgaagatgagggctttggagactggagccagaggcctgagcagaggcagcagcacgagggcgcccagggcgccctggacagcggggagcccccccagtgccgcagccctgagggggagcaggaggaccggcccggcctgcacgcctatgagaaggaggacagtgatgaggtgcacctggaggagctgagcctgagcaaggagggccctggccctgaggacacagtgcaggacaacctgggcgccgccggggctgaggaggagcaggaggagcaccagaagtgccagcagcccaggacccccagccccctggtgctggagggcaccatcgagcagagcagcccccccctgagccccaccaccaagctgattgacagaacagagagcctgaacagaagcattgagaagagcaacagcgtgaagaagagccagcctgacctgcccatcagcaagattgaccagtggctggagcagtacacccaggccatcgagacagctggccgcacccccaagctggcccggcaggccagcattgagctgcccagcatggctgtggccagcaccaagagccgctgggagactggagaggtgcaggcccagagcgctgccaagacccccagctgcaaggacatcgtggccggggacatgagcaagaagagcctgtgggagcagaagggcggcagcaagaccagcagcaccatcaagagcacccccagcggcaagcgctacaagtttgtggccactggacatggcaagtatgagaaggtgctggtggagggcggccctgccccctag

SEQ ID NO: 25478 - DNA, 669 bp, Artificial Sequence
  derived and/or modified sequence
atgctgctgagcctgaagcccagcgaggcccctgagctggatgaagatgagggctttggagactggagccagaggcctgagcagaggcagcagcacgagggcgcccagggcgccctggacagcggggagcccccccagtgccgcagccctgagggggagcaggaggaccggcccggcctgcacgcctatgagaaggaggacagtgatgaggtgcacctggaggagctgagcctgagcaaggagggccctggccctgaggacacagtgcaggacaacctgggcgccgccggggctgaggaggagcaggaggagcaccagaagtgccagcagcccaggacccccagccccctggtgctggagggcaccatcgagcagagcagcccccccctgagccccaccaccaagctgattgacagaacagagagcctgaacagaagcattgagaagagcaacagcgtgaagaagagccagcctgacctgcccatcagcaagattgaccagtggctggagcagtacacccaggccatcgagacagctggccgcacccccaagctggcccggcaggccagcattgagctgcccagcatggctgtggccagcaccaagagccgctgggagactggagaggtgcaggcccagagcgctgccaagacccccagctgcaagtag

SEQ ID NO: 25479 - DNA, 183 bp, Artificial Sequence
  derived and/or modified sequence
atgctgctgagcctgaagcccagcgaggcccctgagctggatgaagatgagggctttggagactggagccagaggcctgagcagaggcagcagcacgagggcgcccagggcgccctggacagcggggagcccccccagtgccgcagccctgagggggagcaggaggaccggcccggcctgtag

SEQ ID NO: 25480 - DNA, 381 bp, Artificial Sequence
  derived and/or modified sequence
atgctgctgagcctgaagcccagcgaggcccctgagctggatgaagatgagggctttggagactggagccagaggcctgagcagaggcagcagcacgagggcgcccagggcgccctggacagcggggagcccccccagtgccgcagccctgagggggagcaggaggaccggcccggcctgcacgcctatgagaaggaggacagtgatgaggtgcacctggaggagctgagcctgagcaaggagggccctggccctgaggacacagtgcaggacaacctgggcgccgccggggctgaggaggagcaggaggagcaccagaagtgccagcagcccaggacccccagccccctggtgctggagggcaccatcgagcagagctag

SEQ ID NO: 25481 - DNA, 195 bp, Artificial Sequence
  derived and/or modified sequence
atgctgctgagcctgaagcccagcgaggcccctgagctggatgaagatgagggctttggagactggagccagaggcctgagcagaggcagcagcacgagggcgcccagggcgccctggacagcggggagcccccccagtgccgcagccctgagggggagcaggaggaccggcccggcctgcacgcctatgaatag

SEQ ID NO: 25482 - DNA, 834 bp, Artificial Sequence
  derived and/or modified sequence
atgctgctgagcctgaagcccagcgaggcccccgagctggacgaggatgagggattcggcgattggagccagcggcccgagcagcggcaacagcatgagggagctcagggagctctggactctggagagcctccccagtgcaggtctcctgagggggagcaagaggacagaccaggtctgcacgcctatgagaaggaggacagcgatgaggtgcatctggaggagctgagcttaagcaaggaagggccggggcccgaggatacagttcaagataacctcggggccgctggggcagaggaagagcaggaggagcaccagaaatgccagcagcctagaactccctcccccctggtgttggagggtactatcgagcagtcaagtccccccctgagtccaacaacaaagctcatcgaccggaccgagtccctcaaccgctctatcgaaaaaagcaattcagtcaaaaagtctcagcccgacctgcctatatcaaagattgatcagtggcttgaacaatatacccaagccatcgagaccgccggtagaactcctaagctggcaaggcaggctagtatagagctgccctccatggccgttgcctcaacaaaatcccgatgggagacgggtgaggttcaagcacagagtgccgccaagaccccctcctgcaaagatatcgtcgctggcgacatgtccaagaagtccttgtgggaacaaaagggcggatctaagaccagtagtaccatcaagagcacacctagcggaaaacgatataagttcgtggccacgggtcacggaaaatatgagaaagtcttggtagaaggagggcctgctccctag

SEQ ID NO: 25483 - DNA, 834 bp, Artificial Sequence
  derived and/or modified sequence
atgctgctgagcctgaagcccagcgaggcccccgagctggacgaggatgaggggttcggagactggtcccagcggcccgaacagcggcagcaacacgagggcgcccagggcgccctcgattctggggaaccgcctcagtgtagatctccagaaggagagcaagaagataggcctgggctccacgcctacgaaaaagaggacagcgatgaagtgcatttggaggagctgagcctgtctaaggaagggcccggccctgaagatacagtgcaggacaacctgggggccgctggggcggaagaagagcaggaggaacaccaaaagtgtcagcaaccacggacccctagcccgctggttctcgaagggaccattgagcagtcctcgccccccttgtcacctaccactaagctgattgaccggacagaatccctcaaccgctccatcgagaagagtaattcagttaagaaatcacaacctgatctccccatctcgaaaatagatcagtggctcgagcagtatacccaggcaattgagaccgcagggcgcacaccgaaactcgctcggcaggcctcaattgaactcccctccatggcggtcgccagcactaagtctcgttgggagacaggtgaagtgcaggctcaatccgccgctaagacacccagttgcaaggacatcgtggccggggatatgtccaaaaagtccctttgggagcagaaggggggatcaaaaacgtccagcacaatcaagagtaccccatccggcaagcgatataaatttgtcgccactggccacggcaagtacgaaaaagtacttgtagaaggtggtcctgcaccttag

SEQ ID NO: 25484 - DNA, 669 bp, Artificial Sequence
  derived and/or modified sequence
atgctgctgagcctgaagcccagcgaggcccccgagctggacgaggatgaaggatttggggattggtcccagcgaccagaacaacgacaacagcatgaaggggcccagggcgccctagattccggcgagcctccccagtgtaggtctccagagggggagcaggaggataggccaggcctacacgcttacgagaaggaggattccgatgaagtgcacctcgaggaactgagcctgtcaaaagaaggacccggaccagaagacaccgtacaagataatctgggcgccgctggcgccgaggaggaacaggaagaacaccagaagtgtcaacagccacgtaccccctcccccttggtgctcgaagggacaatcgaacaatcctccccccctttatcccctaccaccaaactaattgatcggacggaaagcctcaatcgaagcattgaaaagagcaactcagttaagaagtcccaacctgacctgcctatctccaaaatcgaccagtggcttgaacagtatacacaggccattgaaaccgctggaaggacgccgaaacttgcccggcaagccagtattgaactgcctagcatggccgtggcttccacaaagtctaggtgggagactggtgaggtgcaggctcagagcgcagcaaaaaccccatcctgcaaatag

SEQ ID NO: 25485 - DNA, 183 bp, Artificial Sequence
  derived and/or modified sequence
atgctgctgagcctgaagcccagcgaggcccccgagctggacgaggacgagggatttggcgactggtctcagcgccccgagcaaaggcagcaacacgaaggtgcccagggcgcacttgacagtggggaaccaccgcagtgtaggagccctgagggtgaacaggaggacagaccaggtctgtag

SEQ ID NO: 25486 - DNA, 669 bp, Artificial Sequence
  derived and/or modified sequence
atgctgctgagcctgaagcccagcgaggcccccgagctggacgaggatgaaggtttcggagactggtctcagcggcctgagcagcgccagcagcacgagggtgcccagggggctctggatagtggcgagcctcctcaatgccggtcgccagagggcgagcaagaagacagacctggcctgcatgcgtacgaaaaagaggattctgacgaggtgcatctggaagagcttagtctcagtaaggagggacctggaccagaagatacggttcaggacaaccttggggcagccggcgccgaagaagagcaggaggaacaccaaaaatgccagcagcccaggacgccatctcccctggtgttggagggcaccatcgaacagagtagtccccctctgtcgccgactactaagcttatcgaccggaccgagtcccttaatcgcagcattgagaagtcgaactccgtgaaaaagtcccagcccgatctgccgatctcaaagattgaccagtggctcgaacagtatacccaggcaatcgaaaccgccggcaggacacccaagctggcacgtcaggcctcaatagagctgccttcgatggcggtggctagtaccaagtccaggtgggagacgggagaggtgcaagcacagtcggcagcaaagaccccttcctgcaaatag

SEQ ID NO: 25487 - DNA, 381 bp, Artificial Sequence
  derived and/or modified sequence
atgctgctgagcctgaagcccagcgaggcccccgagctggacgaggatgagggctttggcgattggagccagaggcccgaacagcgtcagcagcatgagggggctcagggtgcccttgattccggcgaacccccccagtgcaggtctccagagggagagcaagaagatcgccctggcctgcacgcatatgagaaagaagatagcgatgaagtccatctcgaggagctgtctctgtccaaggaggggccggggcctgaggatacagtacaggataacctgggggccgcaggcgcagaggaagaacaagaggagcaccagaaatgtcagcagccacgcacaccatcacccctcgtgttggagggtactatcgaacagagctag

SEQ ID NO: 25488 - DNA, 195 bp, Artificial Sequence
  derived and/or modified sequence
atgctgctgagcctgaagcccagcgaggcccccgagctggacgaggacgaaggttttggcgattggtcacagcgacccgagcagaggcaacaacacgaaggggcccagggagcacttgacagcggagaacctccccagtgccggtcaccagaaggggagcaggaagaccgaccaggcctgcatgcttacgagtag

SEQ ID NO: 25489 - DNA, 834 bp, Artificial Sequence
  derived and/or modified sequence
atgctgctgtccctgaagcccagcgaggctcccgagctcgatgaggatgagggtttcggagactggagtcagagacctgagcagagacagcagcatgaaggtgctcagggtgccctggacagcggcgagcctccacagtgtagatcccctgaaggggagcaagaggatcgccctggtttgcacgcctatgagaaggaggatagcgatgaagttcatcttgaggaactgagcttaagcaaggaaggcccaggacccgaagacacggtgcaagataatctgggtgctgcgggtgccgaggaggaacaagaagagcatcagaaatgtcagcagccaagaaccccaagtcctcttgtgcttgagggaacaatcgaacagagtagtcccccactcagcccaactacaaagctgatcgaccgtaccgaaagtttgaatcgctctattgagaaaagcaactcagtaaagaaatcccagcccgacttgccaatcagcaagatcgatcagtggttggaacagtacacacaggcgattgaaaccgccggacgcacacctaaactcgcccgtcaggcctctatcgaactgccctctatggccgtagcctctacgaaaagccgttgggagaccggcgaggtgcaggcacagtcggctgccaagaccccctcctgtaaagacatcgtcgctggggatatgtcaaagaagagtctatgggagcaaaagggcggatcaaaaacgagcagcacaatcaagtccacccctagcggtaagagatataaattcgtggctactggacacggtaagtacgaaaaagtgctcgtggagggcggacctgcgccttag

SEQ ID NO: 25490 - DNA, 834 bp, Artificial Sequence
  derived and/or modified sequence
atgctgctgtccctgaaaccatctgaggcgccagagctagacgaggatgaagggttcggagactggtctcagcggccagaacaaaggcagcagcacgaaggagcccagggcgcactggattcaggcgagccccctcagtgccgatctcccgagggagaacaggaagatcgcccaggtctccacgcctacgaaaaggaagactccgacgaagttcacctggaagaactgtccctttccaaggaaggccctggccctgaggacacggttcaggacaatctcggggcagcgggtgccgaagaagagcaggaggaacatcagaaatgtcagcagccgaggaccccctcccctttagtcctcgaaggcaccatcgagcagagctcacctcccctttccccaacaaccaaactgatcgacagaaccgagagcctgaatcggagcattgaaaaaagtaactccgtcaagaaatcacaaccagatctgccaatcagcaagatcgatcagtggctcgagcaatatacccaggctatcgagaccgctggccgtacccccaaactggccagacaggccagcattgagctgccatcaatggccgtagcatccaccaagtcccgatgggagacaggggaggtccaggctcagtcagccgctaaaaccccaagttgcaaggacatcgtcgcaggcgacatgtctaagaaatccctatgggaacagaaggggggatcaaaaacatcttctactataaaatcgactccatctggaaaacgctataagtttgtggccaccggtcatgggaaatatgagaaggtgctggtggaagggggacccgcaccctag

SEQ ID NO: 25491 - DNA, 669 bp, Artificial Sequence
  derived and/or modified sequence
atgctgctgagcctgaagccatccgaagctccggagctggatgaagacgaagggtttggagactggagccaacgccctgaacagagacagcagcatgaaggagctcaaggggctctcgactcgggcgagccacctcagtgtagatctccggagggagaacaggaagatcgcccaggacttcatgcctacgagaaggaggacagtgatgaggtgcacctagaggagctgtccctttccaaagagggacctgggcctgaggacacagtccaggataatttgggagctgctggcgcagaggaagagcaggaagaacatcagaagtgtcagcagcctcggactccttcgcctctcgtacttgagggaaccatcgagcagagttcacctccactaagccccaccaccaagttgatagatcggacagaaagcctcaacagaagcattgagaagtctaacagcgtgaagaagagccagcccgatttgcccattagcaagattgatcagtggcttgagcagtacacccaagcgatcgagacagcagggagaacccccaaacttgctcgccaggcgagcatcgagctaccaagtatggccgtcgccagcactaagagccggtgggagaccggggaagtccaggctcagagcgctgctaagaccccttcttgcaaatag

SEQ ID NO: 25492 - DNA, 183 bp, Artificial Sequence
  derived and/or modified sequence
atgctgctgtccttgaaacccagtgaggccccagagcttgatgaggatgagggctttggcgattggagtcagcgcccagaacagcgccagcagcacgaaggggcacagggggctctggacagtggggaaccccctcaatgcaggtcccctgagggagagcaggaggaccgccctggactttag

SEQ ID NO: 25493 - DNA, 669 bp, Artificial Sequence
  derived and/or modified sequence
atgctgttaagtctaaaacccagcgaagccccagagctggacgaggatgagggttttggagactggagtcagcggcctgaacagcggcagcagcatgaaggcgcacaaggagccttggactctggcgaaccacctcagtgtcgctcgcccgaaggtgaacaggaggacagaccaggcctgcatgcctatgagaaagaagattctgacgaagtccacctggaggagctctccctatccaaggaggggccagggccagaggatacagtgcaggataacttgggggcagccggagccgaagaagagcaggaagagcatcagaagtgtcagcaacctagaaccccatctcctttggttttggaaggcactatcgagcagagctctcctccgctgagccccacaaccaaactaatcgaccggacagagagtctgaatagatccatcgagaaatcaaacagcgtcaaaaagtcccaacccgacctacctataagtaagattgaccagtggcttgagcagtatactcaagctatcgagactgccggacgaacaccaaaactggctcggcaggccagtatcgagctgccttcaatggcagttgctagtacaaaatcccgatgggaaacgggggaagtgcaggcacaatcagcagcaaaaactccgtcttgcaagtag

SEQ ID NO: 25494 - DNA, 381 bp, Artificial Sequence
  derived and/or modified sequence
atgctgctgtcattaaaaccatctgaagctccggaactagacgaggacgagggtttcggtgactggagccagagacccgaacagaggcagcagcacgagggcgctcagggggctctcgattcaggcgagccccctcagtgtcgtagccccgagggcgaacaggaagacaggcctgggctacacgcatatgaaaaggaggatagcgatgaggtacacctggaagaactcagcctgagcaaagaagggccaggaccagaagatacagttcaggataatctgggggcagccggtgccgaagaagaacaggaggaacaccaaaagtgccagcagccacgaaccccgtcacccctggtgttggaaggaactatcgaacagtcatag

SEQ ID NO: 25495 - DNA, 195 bp, Artificial Sequence
  derived and/or modified sequence
atgctgctctctttgaaaccttctgaagccccagagctcgatgaggacgagggtttcggagactggagtcaaagacctgagcaaaggcagcagcatgagggggctcagggagccctcgacagtggggagcccccacagtgccggtcccccgagggcgagcaggaggataggcctggcctgcacgcatacgaatag

SEQ ID NO: 25496 - DNA, 834 bp, Artificial Sequence
  derived and/or modified sequence
atgctgctgagcctgaagcccagcgaggcccccgagctggacgaggacgagggcttcggcgactggagccagagacccgagcagagacagcagcacgagggcgcccagggcgccctggacagcggcgagcccccccagtgcagaagccccgagggcgagcaggaggacagacccggcctgcacgcctacgagaaggaggacagcgacgaggtgcacctggaggagctgagcctgagcaaggagggccccggccccgaggacaccgtgcaggacaacctgggcgccgccggcgccgaggaggagcaggaggagcaccagaagtgccagcagcccagaacccccagccccctggtgctggagggcaccatcgagcagagcagcccccccctgagccccaccaccaagctgatcgacagaaccgagagcctgaacagaagcatcgagaagagcaacagcgtgaagaagagccagcccgacctgcccatcagcaagatcgaccagtggctggagcagtacacccaggccatcgagaccgccggcagaacccccaagctggccagacaggccagcatcgagctgcccagcatggccgtggccagcaccaagagcagatgggagaccggcgaggtgcaggcccagagcgccgccaagacccccagctgcaaggacatcgtggccggcgacatgagcaagaagagcctgtgggagcagaagggcggcagcaagaccagcagcaccatcaagagcacccccagcggcaagagatacaagttcgtggccaccggccacggcaagtacgagaaggtgctggtggagggcggccccgccccctag

SEQ ID NO: 25497 - DNA, 669 bp, Artificial Sequence
  derived and/or modified sequence
atgctgctgagcctgaagcccagcgaggcccccgagctggacgaggacgagggcttcggcgactggagccagagacccgagcagagacagcagcacgagggcgcccagggcgccctggacagcggcgagcccccccagtgcagaagccccgagggcgagcaggaggacagacccggcctgcacgcctacgagaaggaggacagcgacgaggtgcacctggaggagctgagcctgagcaaggagggccccggccccgaggacaccgtgcaggacaacctgggcgccgccggcgccgaggaggagcaggaggagcaccagaagtgccagcagcccagaacccccagccccctggtgctggagggcaccatcgagcagagcagcccccccctgagccccaccaccaagctgatcgacagaaccgagagcctgaacagaagcatcgagaagagcaacagcgtgaagaagagccagcccgacctgcccatcagcaagatcgaccagtggctggagcagtacacccaggccatcgagaccgccggcagaacccccaagctggccagacaggccagcatcgagctgcccagcatggccgtggccagcaccaagagcagatgggagaccggcgaggtgcaggcccagagcgccgccaagacccccagctgcaagtag

SEQ ID NO: 25498 - DNA, 183 bp, Artificial Sequence
  derived and/or modified sequence
atgctgctgagcctgaagcccagcgaggcccccgagctggacgaggacgagggcttcggcgactggagccagagacccgagcagagacagcagcacgagggcgcccagggcgccctggacagcggcgagcccccccagtgcagaagccccgagggcgagcaggaggacagacccggcctgtag

SEQ ID NO: 25499 - DNA, 381 bp, Artificial Sequence
  derived and/or modified sequence
atgctgctgagcctgaagcccagcgaggcccccgagctggacgaggacgagggcttcggcgactggagccagagacccgagcagagacagcagcacgagggcgcccagggcgccctggacagcggcgagcccccccagtgcagaagccccgagggcgagcaggaggacagacccggcctgcacgcctacgagaaggaggacagcgacgaggtgcacctggaggagctgagcctgagcaaggagggccccggccccgaggacaccgtgcaggacaacctgggcgccgccggcgccgaggaggagcaggaggagcaccagaagtgccagcagcccagaacccccagccccctggtgctggagggcaccatcgagcagagctag

SEQ ID NO: 25500 - DNA, 195 bp, Artificial Sequence
  derived and/or modified sequence
atgctgctgagcctgaagcccagcgaggcccccgagctggacgaggacgagggcttcggcgactggagccagagacccgagcagagacagcagcacgagggcgcccagggcgccctggacagcggcgagcccccccagtgcagaagccccgagggcgagcaggaggacagacccggcctgcacgcctacgagtag

SEQ ID NO: 25501 - protein, 588 aa, Artificial Sequence
  derived and/or modified sequence
MEPPDAPAQARGAPRLLLLAVLLAAHPDAQAEVRLSVPPLVEVMRGKSVILDCTPTGTHDHYMLEWFLTDRSGARPRLASAEMQGSELQVTMHDTRGRSPPYQLDSQGRLVLAEAQVGDERDYVCVVRAGAAGTAEATARLNVFAKPEATEVSPNKGTLSVMEDSAQEIATCNSRNGNPAPKITWYRNGQRLEVPVEMNPEGYMTSRTVREASGLLSLTSTLYLRLRKDDRDASFHCAAHYSLPEGRHGRLDSPTFHLTLHYPTEHVQFWVGSPSTPAGWVREGDTVQLLCRGDGSPSPEYTLFRLQDEQEEVLNVNLEGNLTLEGVTRGQSGTYGCRVEDYDAADDVQLSKTLELRVAYLDPLELSEGKVLSLPLNSSAVVNCSVHGLPTPALRWTKDSTPLGDGPMLSLSSITFDSNGTYVCEASLPTVPVLSRTQNFTLLVQGSPELKTAEIEPKADGSWREGDEVTLICSARGHPDPKLSWSQLGGSPAEPIPGRQGWVSSSLTLKVTSALSRDGISCEASNPHGNKRHVFHFGTVSPQTSQAGVAVMAVAVSVGLLLLVVAVFYCVRRKGGPCCRQRREKGAP

SEQ ID NO: 25502 - DNA, 1767 bp, Artificial Sequence
  derived and/or modified sequence
atggagcctccggatgcacctgcccaagcccgcggtgcccctcgtttgttgttgctggctgtgctactggccgcccaccccgatgcccaggctgaggtgcggctgagcgttcccccccttgtagaggttatgcgaggcaagtctgttattctggattgcacaccaacaggtacacacgatcattatatgctggagtggtttcttactgacagaagtggtgctcggcctcggctggcctccgccgagatgcagggcagtgagttgcaggtgacaatgcacgacactagaggtcgttcacctccctaccagttggactcacaagggcgtctggtgctggccgaagctcaggtgggtgacgagagggactacgtgtgcgttgtgagggccggggctgctggaaccgctgaggctactgccagactgaacgtgtttgcgaagcccgaggcgaccgaagtgtcacctaacaaaggaactctgtccgtgatggaggacagcgcacaggagatcgcaacatgtaactctcgcaatgggaatccagccccaaaaattacatggtatcggaacggccagcggctggaggtccctgtagagatgaaccctgagggctacatgacatccagaactgtccgagaggctagcgggttactctccttgactagtacactgtatcttagattgagaaaggacgatagagacgcgtcattccattgtgccgcacactattctctgccagaaggccgccacggccggctggactctcccacattccatctgactctgcactatccaaccgagcacgtgcagttctgggtcggatcgcctagcactcccgctggttgggtacgggaaggcgatactgtgcagttgctatgtaggggggatgggtcacccagccctgagtacacactattccgcctccaggatgagcaagaagaggtgctcaatgtgaatctcgaaggtaatctgacattagagggcgtgaccagagggcagtccggtacctacggatgccgagtcgaggactacgacgctgccgacgatgtacaattaagtaaaacacttgaactccgggtggcttacctggaccccttggagctgtcagaaggtaaggtcctcagcttgcctctgaattccagcgcagttgtgaattgttctgtacacgggctgcccacccccgctctcaggtggacaaaagactctacccccctcggagacggccccatgctgtctctgagttccataacttttgactcaaacggtacatacgtgtgcgaggctagtttacctaccgtgccagtcctatcacggacccagaatttcacactcctcgtccagggctcaccagaacttaagaccgctgaaattgaaccgaaggccgatggatcttggcgcgagggggacgaggtgaccctgatctgcagcgcacgtggtcatcccgatcccaagctttcttggtctcagctgggtgggtcccccgccgaacccatcccggggcggcagggctgggtttctagtagcctcaccttaaaggtcacttcagctttgtcccgagatggtatatcttgtgaggcaagcaatccgcatgggaataaaaggcatgtgttccattttgggacagtatccccgcagacctcgcaggcaggtgttgcagtgatggcggtggccgtctcggtgggattgctcttattggtggttgccgtcttttactgcgtgagaagaaaaggggggccatgctgtagacaacggcgagaaaaaggtgccccgtag

SEQ ID NO: 25503 - DNA, 1767 bp, Artificial Sequence
  derived and/or modified sequence
atggagcccccagatgccccagcccaggcccggggggccccccggctgctgctgctggccgtgctgctggccgcccacccagatgcccaggccgaggtgcggctgtctgtgccccccctggtggaggtgatgaggggcaagagcgtcatcctggactgcacccccaccggcacccatgaccactacatgctggagtggttcctgacagacagaagtggggcccggccccggctggccagcgctgagatgcagggcagcgagctgcaggtgaccatgcatgacacccggggccgcagccccccctaccagctggacagccagggccgcctggtgctggccgaggcccaggtgggagatgagcgggactatgtgtgtgtggtgcgggccggggccgccggcacagctgaggccacagcccggctgaatgtgtttgccaagccagaggccacagaggtgagccccaacaagggcaccctgtctgtgatggaggacagcgcccaggagatcgccacctgcaacagcagaaatggaaatcctgcccccaagatcacctggtacagaaatggccagaggctggaggtgcctgtggagatgaaccctgagggctacatgaccagcaggacagtgcgggaggccagcggcctgctgagcctgaccagcaccctgtacctgcggctgaggaaggatgacagagatgccagcttccactgtgccgcccactacagcctgcctgagggccgccacggccgcctggacagccccaccttccacctgaccctgcactaccccacagagcacgtgcagttctgggtgggcagccccagcaccccagctggctgggtgcgggagggggacacagtgcagctgctgtgcagaggagatggcagccccagccctgagtacaccctcttccggctgcaggatgagcaggaggaggtgctgaatgtgaacctggagggcaacctgaccctggagggcgtgacccggggccagagcggcacctacggctgccgggtggaggactatgatgctgctgatgatgtgcagctgagcaagaccctggagctgcgggtggcctacctggaccccctggagctgtctgagggcaaggtgctgagcctgcccctgaacagcagcgctgtggtgaactgcagcgtgcacggcctgcccaccccagccctgcgctggaccaaggacagcacccccctgggagatggccccatgctgagcctgagcagcatcacctttgacagcaatggcacctacgtgtgtgaggccagcctgcccaccgtgcctgtgctgagcaggacccagaacttcaccctgctggtgcagggcagccctgagctgaagacagctgagattgagcccaaggcagatggctcctggagagaaggagatgaggtgaccctcatctgcagcgcccggggccacccagaccccaagctgtcctggagccagctgggcggcagccctgctgagcccatccctggccggcagggctgggtgagcagcagcctgaccctgaaggtgaccagcgccctgagcagagatggcatcagctgtgaggccagcaacccccacggcaacaagagacatgtgttccactttggaacagtgagcccccagaccagccaggccggcgtggccgtgatggctgtggccgtgtctgtgggcctgctgctgctggtggtggccgtgttctactgtgtgcggaggaagggcggcccctgctgccggcagaggcgggagaagggggccccctag

SEQ ID NO: 25504 - DNA, 1767 bp, Artificial Sequence
  derived and/or modified sequence
atggagccccccgacgcccccgcccaggcccggggcgccccccggcttctgttactggctgttctgttggctgcgcatcctgatgcacaggcagaagtacggctgagcgtaccccccctcgtagaggtgatgagagggaaatctgttatcttggactgcacccctactggaacacacgaccactatatgctggagtggttcctgacagacaggagtggagccaggccccgcctggcaagtgcggagatgcaaggtagcgaactgcaggtgacaatgcacgatactcggggacgctcccctccctaccaattggactcccagggacggctggtactcgcagaagctcaggtaggagacgagagagactacgtgtgtgtcgttcgagctggagccgccgggacagcagaggccaccgcgaggttgaacgtcttcgcgaagccagaagcgacagaggtgagtcctaacaagggtaccctgtctgtaatggaggatagcgcacaagagatagccacctgcaattctcgtaatgggaatccagctccaaagatcacatggtaccgcaacgggcagaggctggaagtgccggttgagatgaatcctgaggggtatatgacaagccggacagtgcgcgaggcttctggtctcctgtccctgacatcaactctatacctgcggttaaggaaagatgatcgagacgcctcttttcattgcgccgcccattactcactaccagagggccgacacggccggctcgactcccccacgtttcatctgacactccattatccgaccgaacacgttcagttttgggtaggctccccttctactcctgccggatgggtgagagagggggataccgttcagctgctttgcagaggagacgggagtcccagccctgagtatacattgttcagactgcaggacgagcaagaggaagttctgaacgtcaacctggaagggaatctgacgcttgagggagtcactaggggacagagcggcacatacggctgcagggtggaagattatgacgcagctgatgatgtccagctatccaagactctcgaattacgagtagcctatctcgaccccctcgaactttcagaggggaaagtgctaagcctgcctttgaacagtagcgcggtggtgaactgttccgtgcatggacttcccacccccgctctccgatggactaaggatagtacccctctgggcgatgggcccatgttgtccctctcttctatcacctttgattctaatggcacctacgtctgtgaagcctctctgcccactgttcctgtcctctctaggacccaaaatttcactctcctggtccagggttcgcctgaactaaagactgccgagattgagccaaaagcagacggttcatggcgagagggggacgaggtaacactgatttgttcagcccgcggtcatccagaccccaagttgtcatggtctcagctgggcggaagccctgctgagccaattcctgggcgacaaggatgggtttcgagcagccttacactcaaagtgaccagcgctctttcaagggacgggatttcctgcgaggcttctaacccgcacggcaacaaacggcatgtgttccacttcggcacagtttccccgcaaacgagtcaggctggggtggcagttatggcggtggccgtcagtgtgggattgctgctgctggtggtcgccgtcttctactgcgtcagaaggaaaggcggaccttgttgtcggcagaggcgcgaaaagggagccccatag

SEQ ID NO: 25505 - DNA, 1767 bp, Artificial Sequence
  derived and/or modified sequence
atggaaccccctgacgccccagcccaggctcgtggcgctcccaggctgctgctactggccgttctcttagccgcacacccagacgcacaggccgaggtgcggcttagtgtccctccccttgtggaggtcatgaggggcaaatcagtcattctggactgcactcccaccggaactcacgaccactatatgctggaatggttcctaacagataggagcggcgcaaggccaagactcgcctccgctgaaatgcagggttccgaattacaggtgacaatgcatgatacccgcggaaggtcaccaccctatcagctggattcacagggcaggttggtgctggccgaggcccaggtcggcgacgaacgagattacgtgtgtgtggtcagagccggagccgctggaacagccgaggccactgcacgcttgaacgtgtttgccaagccagaagcaactgaggtgtcaccaaataaggggaccctttctgtgatggaagactccgcccaggaaattgctacctgtaattcgaggaatggcaaccctgccccaaaaatcacatggtatagaaatggacagagactagaggtaccagtcgaaatgaacccggagggatacatgactagcagaaccgtgcgcgaggcgtccgggttattgtctttaaccagcactctctacctccggctgcgaaaggacgacagggatgcatcgttccactgcgctgcccactactctctcccagaaggcaggcatggcagattggattctcccacattccatcttaccctacattatcctacagagcatgtgcagttctgggtggggtccccctccactcccgctgggtgggtccgggagggtgatacagtacaactgctgtgccgcggagatggcagcccgtccccggaatataccctgtttaggctgcaggacgaacaggaggaggttctcaacgttaacctggagggtaatttaacattggagggcgtaaccagaggccagtccggcacttacggctgtcgcgtcgaggactacgacgctgcagacgacgtccagctgagtaagacactcgaactcagggtggcgtaccttgatccgctggagctctctgaagggaaagttctctctcttccactgaatagttcagcagtcgtcaattgttcggtccatgggctgccaacgccagctcttcggtggacaaaggacagcactccactcggagacgggccaatgctgtccctgtctagtatcactttcgactccaacggaacttatgtgtgtgaagcgagtctcccaacggtgcccgtcctcagtaggacgcagaactttaccctgctggtgcaaggttcacccgaactgaaaacggccgagattgaacccaaagctgacggttcttggcgcgagggagacgaggtcacacttatctgcagtgcacgcggacatcccgatccaaagttaagttggtcccaattaggaggatctcccgctgaaccaatcccaggacggcaggggtgggtctcctctagcttaaccctgaaggtcaccagtgcattatcgcgagatggaatctcatgtgaggctagtaaccctcacggaaataagaggcatgtgttccacttcgggaccgtgtctccacaaacctctcaggccggtgtggctgtcatggctgtggccgtcagtgttggcctgctgctcttagtagttgccgtcttctactgcgtacgccgaaaggggggtccttgctgtcgccagcggcgagaaaagggggctccttag

SEQ ID NO: 25506 - DNA, 2434 bp, Artificial Sequence
  derived and/or modified sequence
ggccgagctgcagcccgggctcagtctccgccgccgccgtgaacatggagcccccggacgcaccggcccaggcgcgcggggccccgcggctgctgttgctcgcagtcctgctggcggcgcacccagatgcccaggcggaggtgcgcttgtctgtacccccgctggtggaggtgatgcgaggaaagtctgtcattctggactgcacccctacgggaacccacgaccattatatgctggaatggttccttaccgaccgctcgggagctcgcccccgcctagcctcggctgagatgcagggctctgagctccaggtcacaatgcacgacacccggggccgcagtcccccataccagctggactcccaggggcgcctggtgctggctgaggcccaggtgggcgacgagcgagactacgtgtgcgtggtgagggcaggggcggcaggcactgctgaggccactgcgcggctcaacgtgtttgcaaagccagaggccactgaggtctcccccaacaaagggacactgtctgtgatggaggactctgcccaggagatcgccacctgcaacagccggaacgggaacccggcccccaagatcacgtggtatcgcaacgggcagcgcctggaggtgcccgtagagatgaacccagagggctacatgaccagccgcacggtccgggaggcctcgggcctgctctccctcaccagcaccctctacctgcggctccgcaaggatgaccgagacgccagcttccactgcgccgcccactacagcctgcccgagggccgccacggccgcctggacagccccaccttccacctcaccctgcactatcccacggagcacgtgcagttctgggtgggcagcccgtccaccccagcaggctgggtacgcgagggtgacactgtccagctgctctgccggggggacggcagccccagcccggagtatacgcttttccgccttcaggatgagcaggaggaagtgctgaatgtgaatctcgaggggaacttgaccctggagggagtgacccggggccagagcgggacctatggctgcagagtggaggattacgacgcggcagatgacgtgcagctctccaagacgctggagctgcgcgtggcctatctggaccccctggagctcagcgaggggaaggtgctttccttacctctaaacagcagtgcagtcgtgaactgctccgtgcacggcctgcccacccctgccctacgctggaccaaggactccactcccctgggcgatggccccatgctgtcgctcagttctatcaccttcgattccaatggcacctacgtatgtgaggcctccctgcccacagtcccggtcctcagccgcacccagaacttcacgctgctggtccaaggctcgccagagctaaagacagcggaaatagagcccaaggcagatggcagctggagggaaggagacgaagtcacactcatctgctctgcccgcggccatccagaccccaaactcagctggagccaattggggggcagccccgcagagccaatccccggacggcagggttgggtgagcagctctctgaccctgaaagtgaccagcgccctgagccgcgatggcatctcctgtgaagcctccaacccccacgggaacaagcgccatgtcttccacttcggcaccgtgagcccccagacctcccaggctggagtggccgtcatggccgtggccgtcagcgtgggcctcctgctcctcgtcgttgctgtcttctactgcgtgagacgcaaagggggcccctgctgccgccagcggcgggagaagggggctccgtgagtggcctgctatctgcaatgaccaccatagcttaaccccatccccaccctcaaccccaagctcaacccataacctcaaccacatcttatcctccaccccacatcccaccacatccacctccatccccaacccatcctcatccccaactacagccccaaacccagccccagactaatccacagccatccccaactcatcctcatccccaactgcagccccaaacccaacccagggccatccccaaacccatccccaagccaaactcaacaccatccccttccctaatcacctctcctgcccctagctcagcctcatccccaactccatgcctgtctccaatcccaaccctgcccccaatctcccctcaactccaatccataacccccttcaaaccatcctcaactaagctcctctccagccctggccacatccccatcctcccccaacctccagccccaacacccatcatccccctgagctcacccttaactccaatttatcctccaagcctatctctcaccatccagccctcacctagccatttcccaaccctagtcctccaccgtcccgaagccaacttcacccatgtccccatccccaatcttgtccccattcctgactcc

SEQ ID NO: 25507 - DNA, 1767 bp, Artificial Sequence
  derived and/or modified sequence
atggagccccccgacgcccccgcccaggccagaggcgcccccagactgctgctgctggccgtgctgctggccgcccaccccgacgcccaggccgaggtgagactgagcgtgccccccctggtggaggtgatgagaggcaagagcgtgatcctggactgcacccccaccggcacccacgaccactacatgctggagtggttcctgaccgacagaagcggcgccagacccagactggccagcgccgagatgcagggcagcgagctgcaggtgaccatgcacgacaccagaggcagaagccccccctaccagctggacagccagggcagactggtgctggccgaggcccaggtgggcgacgagagagactacgtgtgcgtggtgagagccggcgccgccggcaccgccgaggccaccgccagactgaacgtgttcgccaagcccgaggccaccgaggtgagccccaacaagggcaccctgagcgtgatggaggacagcgcccaggagatcgccacctgcaacagcagaaacggcaaccccgcccccaagatcacctggtacagaaacggccagagactggaggtgcccgtggagatgaaccccgagggctacatgaccagcagaaccgtgagagaggccagcggcctgctgagcctgaccagcaccctgtacctgagactgagaaaggacgacagagacgccagcttccactgcgccgcccactacagcctgcccgagggcagacacggcagactggacagccccaccttccacctgaccctgcactaccccaccgagcacgtgcagttctgggtgggcagccccagcacccccgccggctgggtgagagagggcgacaccgtgcagctgctgtgcagaggcgacggcagccccagccccgagtacaccctgttcagactgcaggacgagcaggaggaggtgctgaacgtgaacctggagggcaacctgaccctggagggcgtgaccagaggccagagcggcacctacggctgcagagtggaggactacgacgccgccgacgacgtgcagctgagcaagaccctggagctgagagtggcctacctggaccccctggagctgagcgagggcaaggtgctgagcctgcccctgaacagcagcgccgtggtgaactgcagcgtgcacggcctgcccacccccgccctgagatggaccaaggacagcacccccctgggcgacggccccatgctgagcctgagcagcatcaccttcgacagcaacggcacctacgtgtgcgaggccagcctgcccaccgtgcccgtgctgagcagaacccagaacttcaccctgctggtgcagggcagccccgagctgaagaccgccgagatcgagcccaaggccgacggcagctggagagagggcgacgaggtgaccctgatctgcagcgccagaggccaccccgaccccaagctgagctggagccagctgggcggcagccccgccgagcccatccccggcagacagggctgggtgagcagcagcctgaccctgaaggtgaccagcgccctgagcagagacggcatcagctgcgaggccagcaacccccacggcaacaagagacacgtgttccacttcggcaccgtgagcccccagaccagccaggccggcgtggccgtgatggccgtggccgtgagcgtgggcctgctgctgctggtggtggccgtgttctactgcgtgagaagaaagggcggcccctgctgcagacagagaagagagaagggcgccccctag

SEQ ID NO: 25508 - protein, 297 aa, Artificial Sequence
  derived and/or modified sequence
MQRARPTLWAAALTLLVLLRGPPVARAGASSAGLGPVVRCEPCDARALAQCAPPPAVCAELVREPGCGCCLTCALSEGQPCGIYTERCGSGLRCQPSPDEARPLQALLDGRGLCVNASAVSRLRAYLLPAPPAPGEPPAPGNASESEEDRSAGSVESPSVSSTHRVSDPKFHPLHSKIIIIKKGHAKDSQRYKVDYESQSTDTQNFSSESKRETEYGPCRREMEDTLNHLKFLNVLSPRGVHIPNCDKKGFYKKKQCRPSKGRKRGFCWCVDKYGQPLPGYTTKGKEDVHCYSMQSK

SEQ ID NO: 25509 - DNA, 894 bp, Artificial Sequence
  derived and/or modified sequence
atgcagagagccagacccaccctgtgggccgccgccctgaccctgctggtgctgctgagaggcccccccgtggccagagccggcgccagcagcgccggcctgggccccgtggtgagatgcgagccctgcgacgccagagccctggcccagtgcgcccccccccccgccgtgtgcgccgagctggtgagagagcccggctgcggctgctgcctgacctgcgccctgagcgagggccagccctgcggcatctacaccgagagatgcggcagcggcctgagatgccagcccagccccgacgaggccagacccctgcaggccctgctggacggcagaggcctgtgcgtgaacgccagcgccgtgagcagactgagagcctacctgctgcccgccccccccgcccccggcgagccccccgcccccggcaacgccagcgagagcgaggaggacagaagcgccggcagcgtggagagccccagcgtgagcagcacccacagagtgagcgaccccaagttccaccccctgcacagcaagatcatcatcatcaagaagggccacgccaaggacagccagagatacaaggtggactacgagagccagagcaccgacacccagaacttcagcagcgagagcaagagagagaccgagtacggcccctgcagaagagagatggaggacaccctgaaccacctgaagttcctgaacgtgctgagccccagaggcgtgcacatccccaactgcgacaagaagggcttctacaagaagaagcagtgcagacccagcaagggcagaaagagaggcttctgctggtgcgtggacaagtacggccagcccctgcccggctacaccaccaagggcaaggaggacgtgcactgctacagcatgcagagcaagtag

SEQ ID NO: 25510 - DNA, 894 bp, Artificial Sequence
  derived and/or modified sequence
atgcagcgtgccagaccaactctgtgggcggcagctctgactttgctggtgcttctgcgcggaccccccgtggctagagcaggagccagctcagccgggctgggcccagtggtgaggtgcgagccctgtgacgcacgcgccctagctcagtgcgccccacctcccgccgtgtgtgctgaactggtgagggaacccggttgcggttgctgtttaacttgtgcgctcagcgaggggcagccttgtgggatctataccgaacgctgtgggagtgggctacggtgtcagccctctcctgatgaggccaggcctctgcaggctctcctcgatggaagaggtctctgtgtgaacgcgtcggcggtgtcgcgcttgagagcttaccttctgcctgctccaccagcccctggggaacctcctgcccccggaaatgcatctgaatctgaagaggatcggtccgctggctccgttgagtcccccagcgtcagctcaacccatagagttagtgatcccaagttccacccgctgcactcaaaaattatcattatcaagaagggacatgccaaagacagccagcggtacaaggtggattatgaatctcagagcactgacacccagaactttagcagcgaatctaagagagaaacagagtacgggccttgccggcgcgagatggaggacactcttaatcatctcaaattcctgaatgtgttgtcccctcgaggcgtacacatccccaactgtgataaaaaaggtttctacaagaagaagcagtgtaggcccagcaagggacgcaaacggggcttctgctggtgtgttgacaaatacggccaaccccttccaggctacacaaccaaagggaaggaggacgtacactgttactcaatgcaatctaagtag

SEQ ID NO: 25511 - DNA, 894 bp, Artificial Sequence
  derived and/or modified sequence
atgcagagggcccggcccaccctgtgggccgccgccctgaccctgctggtgctgctgcggggcccccctgtggcccgggccggggccagcagcgctggcctgggccctgtggtgcgctgtgagccctgtgatgcccgggccctggcccagtgtgcccctcctcctgctgtgtgtgccgagctggtgcgggagcccggctgcggctgctgcctgacctgtgccctgtctgagggccagccctgtggcatctacacagagcgctgtggcagcggcctgcgctgccagcccagcccagatgaggcccggcccctgcaggccctgctggatggccggggcctgtgtgtgaatgccagcgctgtgtcccggctgcgggcctacctgctgcctgcccccccagcccctggagagcccccagcccctggaaatgccagcgagagcgaggaggacagatctgctggctctgtggagagccccagcgtgagcagcacccaccgggtgtctgaccccaagttccaccccctgcacagcaagatcatcatcatcaagaagggccacgccaaggacagccagcgctacaaggtggactatgagagccagagcacagacacccagaacttcagcagcgagagcaagcgggagacagaatatggcccctgccggcgggagatggaggacaccctgaaccacctgaagttcctgaatgtgctgagcccccggggcgtgcacatccccaactgtgacaagaagggcttctacaagaagaagcagtgccggcccagcaaaggaaggaagaggggcttctgctggtgtgtggacaagtatggccagcccctgcccggctacaccaccaagggcaaggaggatgtgcactgctacagcatgcagagcaagtag

SEQ ID NO: 25512 - DNA, 1050 bp, Artificial Sequence
  derived and/or modified sequence
gcgctgaggatcagccgcttcctgcctggattccacagcttcgcgccgtgtactgtcgccccatccctgcgcgcccagcctgccaagcagcgtgccccggttgcaggcgtcatgcagcgggcgcgacccacgctctgggccgctgcgctgactctgctggtgctgctccgcgggccgccggtggcgcgggctggcgcgagctcggcgggcttgggtcccgtggtgcgctgcgagccgtgcgacgcgcgtgcactggcccagtgcgcgcctccgcccgccgtgtgcgcggagctggtgcgcgagccgggctgcggctgctgcctgacgtgcgcactgagcgagggccagccgtgcggcatctacaccgagcgctgtggctccggccttcgctgccagccgtcgcccgacgaggcgcgaccgctgcaggcgctgctggacggccgcgggctctgcgtcaacgctagtgccgtcagccgcctgcgcgcctacctgctgccagcgccgccagctccaggtgagccgcccgcgccaggaaatgctagtgagtcggaggaagaccgcagcgccggcagtgtggagagcccgtccgtctccagcacgcaccgggtgtctgatcccaagttccaccccctccattcaaagataatcatcatcaagaaagggcatgctaaagacagccagcgctacaaagttgactacgagtctcagagcacagatacccagaacttctcctccgagtccaagcgggagacagaatatggtccctgccgtagagaaatggaagacacactgaatcacctgaagttcctcaatgtgctgagtcccaggggtgtacacattcccaactgtgacaagaagggattttataagaaaaagcagtgtcgcccttccaaaggcaggaagcggggcttctgctggtgtgtggataagtatgggcagcctctcccaggctacaccaccaaggggaaggaggacgtgcactgctacagcatgcagagcaagtagacgcctgccgcaaggttaatgtggagctcaaatatgccttatttt

SEQ ID NO: 25513 - DNA, 894 bp, Artificial Sequence
  derived and/or modified sequence
atgcagcgggcccggcccaccctgtgggccgccgccctgaccctgctggttctcctgagaggcccacctgttgcccgggccggcgcctcaagcgccggcctgggacctgtggtgaggtgtgagccctgtgacgcccgggctctcgcgcaatgcgcccccccccctgccgtgtgcgcggagttggtgcgggaacctggatgcggctgttgcctgacttgtgctcttagcgagggccagccctgcggaatttacacagaaaggtgtgggtccggactgcggtgccagcctagcccagacgaagcgcggccccttcaagctctccttgacggcagggggctgtgtgtgaacgccagcgctgtcagtcggctcagagcttatttgcttcccgcccctcctgctcctggggagcccccggcacccggaaacgcgtcggagagtgaagaggacaggtccgcgggatcggtcgaaagtccctcggtctcctctacgcaccgcgtcagcgatcccaagtttcacccgctgcactccaaaatcatcattatcaagaaagggcacgctaaggattctcagaggtataaagtggattacgagagccaatcaaccgatactcaaaacttttcctctgaaagcaagagggagaccgagtacgggccttgccgcagggaaatggaggatacactcaatcacctgaagttcctcaatgttctgagcccgaggggagtgcacatcccgaactgcgataaaaaagggttttataagaagaaacagtgcaggccaagcaaggggcgaaagagggggttttgttggtgtgtggacaagtatggacagccattacctggttacaccaccaagggaaaggaggatgtacactgttatagcatgcaatcgaaatag

SEQ ID NO: 25514 - DNA, 894 bp, Artificial Sequence
  derived and/or modified sequence
atgcagagggctagaccgacgctgtgggctgccgcactgacccttctggtactgttaagaggccctccggtagcacgtgccggagccagcagcgcaggtctcggacccgttgtccgatgcgagccatgtgatgcacgggctctggcccaatgcgctcccccacccgctgtgtgcgctgagctggtgagagagccaggatgcgggtgctgcctgacatgcgccctctcagaagggcagccgtgtggcatctacacagaacgatgcggatccggactcagatgccagccttcgcctgacgaagcacgtcctctacaggctctcttggacggtcgcggtctgtgtgtgaacgctagcgctgtgagccgcttgcgcgcatatctactccccgcacctcccgctcccggagaaccgcctgcaccaggaaacgcttcagagagcgaagaggaccgcagtgccggtagtgtggagagcccttcagtgtcttccactcatagggtgagcgacccgaagtttcaccctctccactccaagatcattattattaagaaggggcacgctaaagacagccaacgttacaaagttgactatgaaagccagtctacagacactcagaacttttcatctgaaagcaaacgagaaacggaatacggaccctgccgaagggaaatggaggatactctgaaccatctcaaattcttgaacgtgctgtcccccagaggcgtgcacattccgaattgcgacaagaaagggttctacaaaaaaaaacagtgccgtccttccaaaggcaggaagaggggattctgctggtgcgtcgataagtatgggcagcccctccccggatacaccaccaaaggcaaggaggatgtgcactgctactcgatgcagagtaagtag

SEQ ID NO: 25515 - DNA, 894 bp, Artificial Sequence
  derived and/or modified sequence
atgcagagggctagacccaccctctgggccgccgccctgactctgctcgtcttgctccgcggaccaccggtggcaagggcaggcgcaagctctgccggcctgggaccagtcgtccgctgtgaaccatgtgacgctcgcgcgttggcccaatgcgccccaccacccgctgtgtgcgctgagctggtgcgcgagcccggttgcggctgttgtctaacttgcgccctgtctgagggacagccgtgcggcatttatactgaacgttgtggatcgggccttcgctgccagccttcccccgatgaagccaggccgctgcaggccctccttgacggtcgtggcctgtgtgtaaatgcttctgctgtctcccgtttgagagcctacctactgcctgcccctcccgcccctggagaacctcctgctccaggtaatgcatctgaatcagaggaagatagatccgctggatccgttgagagccctagcgtgtcatctactcatagagtatccgatccgaaattccaccctctacattcaaaaataatcataattaaaaagggccacgcgaaagattcccagagatataaggtagactatgagtcccaatctaccgatacccagaatttctcttctgaatcaaagagggagactgagtatggtccttgtaggagggaaatggaggatactcttaatcatctaaagtttttaaatgtcttatcacctcgcggcgtccacatccctaactgcgacaaaaagggtttctataagaaaaaacaatgcagaccctcgaaggggagaaagcgcggtttctgctggtgcgtggataagtacggccagccactccccgggtacacaacgaaaggcaaggaagacgtccactgctattcaatgcaatccaagtag

SEQ ID NO: 25516 - DNA, 894 bp, Artificial Sequence
  derived and/or modified sequence
atgcaaagggcacgtcctaccctctgggcagctgctcttaccctgctggtactcttacggggacctcccgtggctagagcgggcgcctcatccgccggtttgggaccagtggtccgttgcgagccatgtgacgcaagagcccttgctcagtgtgcgccccctccggccgtgtgcgctgaattagttagagaacctggttgcggatgttgtctaacttgcgcattgtctgagggccaaccctgcggaatttatacagaacgctgtggaagtgggctcagatgccagccaagtcccgatgaggccaggccgctgcaggccctccttgacggtcgtggcctgtgtgtaaatgcttctgctgtctcccgtttgagagcctacctactgcctgcccctcccgcccctggagaacctcctgctccaggtaatgcatctgaatcagaggaagatagatccgctggatccgttgagagccctagcgtgtcatctactcatagagtatccgatccgaaattccaccctctacattcaaaaataatcataattaaaaagggccacgcgaaagattcccagagatataaggtagactatgagtcccaatctacagacactcaaaattttagctcagaatccaaaagggaaacagagtacggcccatgcaggcgggagatggaagacacgctcaatcacctcaagttcctcaacgtgctgtctccccgaggcgttcatattccaaattgtgataaaaagggattttacaagaagaaacagtgcaggccatccaaagggcgcaagagagggttctgttggtgcgtggacaaatatgggcagccactcccgggctataccacaaaaggaaaagaagacgttcactgttatagtatgcagtccaaatag

SEQ ID NO: 25517 - RNA, 894 nt, Artificial Sequence
  derived and/or modified sequence
augcagagggcuagacccacccucugggccgccgcccugacucugcucgucuugcuccgcggaccaccgguggcaagggcaggcgcaagcucugccggccugggaccagucguccgcugugaaccaugugacgcucgcgcguuggcccaaugcgccccaccacccgcugugugcgcugagcuggugcgcgagcccgguugcggcuguugucuaacuugcgcccugucugagggacagccgugcggcauuuauacugaacguuguggaucgggccuucgcugccagccuucccccgaugaagccaggccgcugcaggcccuccuugacggucguggccuguguguaaaugcuucugcugucucccguuugagagccuaccuacugccugccccucccgccccuggagaaccuccugcuccagguaaugcaucugaaucagaggaagauagauccgcuggauccguugagagcccuagcgugucaucuacucauagaguauccgauccgaaauuccacccucuacauucaaaaauaaucauaauuaaaaagggccacgcgaaagauucccagagauauaagguagacuaugagucccaaucuaccgauacccagaauuucucuucugaaucaaagagggagacugaguaugguccuuguaggagggaaauggaggauacucuuaaucaucuaaaguuuuuaaaugucuuaucaccucgcggcguccacaucccuaacugcgacaaaaaggguuucuauaagaaaaaacaaugcagacccucgaaggggagaaagcgcgguuucugcuggugcguggauaaguacggccagccacuccccggguacacaacgaaaggcaaggaagacguccacugcuauucaaugcaauccaaguag

SEQ ID NO: 25518 - RNA, 894 nt, Artificial Sequence
  derived and/or modified sequence
augcaaagggcacguccuacccucugggcagcugcucuuacccugcugguacucuuacggggaccucccguggcuagagcgggcgccucauccgccgguuugggaccagugguccguugcgagccaugugacgcaagagcccuugcucagugugcgcccccuccggccgugugcgcugaauuaguuagagaaccugguugcggauguugucuaacuugcgcauugucugagggccaacccugcggaauuuauacagaacgcuguggaagugggcucagaugccagccaagucccgaugaggccaggccgcugcaggcccuccuugacggucguggccuguguguaaaugcuucugcugucucccguuugagagccuaccuacugccugccccucccgccccuggagaaccuccugcuccagguaaugcaucugaaucagaggaagauagauccgcuggauccguugagagcccuagcgugucaucuacucauagaguauccgauccgaaauuccacccucuacauucaaaaauaaucauaauuaaaaagggccacgcgaaagauucccagagauauaagguagacuaugagucccaaucuacagacacucaaaauuuuagcucagaauccaaaagggaaacagaguacggcccaugcaggcgggagauggaagacacgcucaaucaccucaaguuccucaacgugcugucuccccgaggcguucauauuccaaauugugauaaaaagggauuuuacaagaagaaacagugcaggccauccaaagggcgcaagagaggguucuguuggugcguggacaaauaugggcagccacucccgggcuauaccacaaaaggaaaagaagacguucacuguuauaguaugcaguccaaauag

SEQ ID NO: 25519 - DNA, 597 bp, Artificial Sequence
  derived and/or modified sequence
atggcccccacctgcgtgttcctggccagcaaggtggaggagttcggcgtggtgagcaacaccagactgatcgccgccgccaccagcgtgctgaagaccagattcagctacgccttccccaaggagttcccctacagaatgaaccacatcctggagtgcgagttctacctgctggagctgatggactgctgcctgatcgtgtaccacccctacagacccctgctgcagtacgtgcaggacatgggccaggaggacatgctgctgcccctggcctggagaatcgtgaacgacacctacagaaccgacctgtgcctgctgtacccccccttcatgatcgccctggcctgcctgcacgtggcctgcgtggtgcagcagaaggacgccagacagtggttcgccgagctgagcgtggacatggagaagatcctggagatcatcagagtgatcctgaagctgtacgagcagtggaagaacttcgacgagagaaaggagatggccaccatcctgagcaagatgcccaagcccaagcccccccccaacagcgagggcgagcagggccccaacggcagccagaacagcagctacagccagagctag

SEQ ID NO: 25520 - DNA, 489 bp, Artificial Sequence
  derived and/or modified sequence
atggcccccacctgcgtgttcctggccagcaaggtggaggagttcggcgtggtgagcaacaccagactgatcgccgccgccaccagcgtgctgaagaccagattcagctacgccttccccaaggagttcccctacagaatgaaccacatcctggagtgcgagttctacctgctggagctgatggactgctgcctgatcgtgtaccacccctacagacccctgctgcagtacgtgcaggacatgggccaggaggacatgctgctgcccctggcctggagaatcgtgaacgacacctacagaaccgacctgtgcctgctgtacccccccttcatgatcgccctggcctgcctgcacgtggcctgcgtggtgcagcagaaggacgccagacagtggttcgccgagctgagcgtggacatggagaagatcctggagatcatcagagtgatcctgaagctgtacgagcagtggaagaacttcgacgagagatag

SEQ ID NO: 25521 - DNA, 597 bp, Artificial Sequence
  derived and/or modified sequence
atggcacccacatgtgtcttccttgctagcaaagtcgaagaatttggggtggtctcaaacacacgattgattgccgctgccacttctgttctgaaaactcgctttagctatgccttcccaaaagagtttccatacagaatgaaccacatcctggagtgtgaattctacttgcttgagctgatggattgctgcttgattgtgtatcacccatacaggccactacttcagtatgtccaggacatggggcaggaggacatgctcctgccactggcatggaggattgtcaacgacacctatcgcactgatctttgtcttctctaccccccttttatgatagctctcgcctgcctccacgtggcctgtgtggtacaacaaaaagacgcgcgtcagtggtttgcagaactttccgtcgacatggaaaagatcctagaaattatccgcgtgatcctgaagctttacgagcagtggaagaacttcgacgaacgcaaggagatggctaccatattaagcaagatgccgaaacctaagccccctcccaatagtgagggagaacaagggcccaacgggtctcagaactcatcttactcccagagctag

SEQ ID NO: 25522 - DNA, 597 bp, Artificial Sequence
  derived and/or modified sequence
atggcaccaacatgcgtatttctcgcctctaaggtggaagagttcggcgtagtgtctaatacccggttgatcgccgcagccaccagtgttctgaaaacaagattcagctatgccttcccgaaagagtttccctaccggatgaaccacattctggagtgtgaattctacttgttagagttgatggattgctgcctgatcgtataccatccatatcgtcctctgcttcaatacgtacaggacatggggcaggaagacatgcttctgcctctggcttggagaatcgtcaacgacacctacagaacagatttgtgcctcttatatcctcccttcatgattgcactcgcctgcctacatgtggcctgtgtggtgcagcagaaagacgcaagacagtggttcgcggagctaagtgtggacatggaaaagatactggagatcattagggtaatccttaaactgtatgagcagtggaaaaacttcgatgagaggaaagagatggccaccattctgtctaaaatgccaaaacccaagccccctcctaattcagagggtgagcagggccctaacggaagccagaattcttcctattcacaaagttag

SEQ ID NO: 25523 - DNA, 489 bp, Artificial Sequence
  derived and/or modified sequence
atggcccccacatgcgtgtttttggccagtaaggtggaggagtttggagtggtgtccaacacccgcttaatagccgccgcaacgtctgttctgaagacgaggtttagttacgcatttccgaaggaattcccctacaggatgaatcatatcctggaatgtgagttttatctgctggagctgatggattgttgcctgatcgtgtatcatccgtacagacccctcctccaatatgttcaggacatgggacaggaagacatgctcctgcccctcgcttggagaatcgtaaacgacacgtatagaaccgacctgtgcctactctaccccccattcatgattgcactcgcctgtctccacgtggcctgtgtagtgcagcagaaagatgcaagacaatggttcgctgagctctctgtggatatggagaagattctcgaaattataagagttattctaaagctctacgagcagtggaaaaattttgacgagcgctag

SEQ ID NO: 25524 - DNA, 597 bp, Artificial Sequence
  derived and/or modified sequence
atggcccccacctgtgtgttcctggccagcaaggtggaggagtttggagtggtgagcaacacccggctgattgctgctgccacctctgtgctgaagacccgcttctcctatgccttccccaaggagttcccctacaggatgaaccacatcctggagtgtgagttctacctgctggagctgatggactgctgcctgattgtgtaccacccctaccggcccctgctgcagtatgtgcaggacatgggccaggaggacatgctgctgcccctggcctggagaattgtgaatgacacctacagaacagacctgtgcctgctgtacccacccttcatgattgccctggcctgcctgcacgtggcctgtgtggtgcagcagaaggatgcccggcagtggtttgctgagctgtctgtggacatggagaagatcctggagatcatccgggtcatcctgaagctgtatgagcagtggaagaactttgatgagaggaaggagatggccaccatcctgagcaagatgcccaagcccaagcccccacccaacagcgagggggagcagggccccaacggcagccagaacagcagctacagccagagctag

SEQ ID NO: 25525 - DNA, 489 bp, Artificial Sequence
  derived and/or modified sequence
atggcccccacctgtgtgttcctggccagcaaggtggaggagtttggagtggtgagcaacacccggctgattgctgctgccacctctgtgctgaagacccgcttctcctatgccttccccaaggagttcccctacaggatgaaccacatcctggagtgtgagttctacctgctggagctgatggactgctgcctgattgtgtaccacccctaccggcccctgctgcagtatgtgcaggacatgggccaggaggacatgctgctgcccctggcctggagaattgtgaatgacacctacagaacagacctgtgcctgctgtacccacccttcatgattgccctggcctgcctgcacgtggcctgtgtggtgcagcagaaggatgcccggcagtggtttgctgagctgtctgtggacatggagaagatcctggagatcatccgggtcatcctgaagctgtatgagcagtggaagaactttgatgagaggtag

SEQ ID NO: 25526 - DNA, 597 bp, Artificial Sequence
  derived and/or modified sequence
atggcccccacctgcgtgttcctggccagcaaggtggaggagttcggcgtcgtctcaaacactcggcttatcgccgcagccacaagcgtgttaaagacccgcttttcttatgcatttcccaaagagtttccctaccggatgaaccatatcttggagtgcgagttttatctgcttgagctgatggattgttgtctaatcgtgtaccatccctaccggcccttacttcagtacgtgcaggatatgggacaagaggacatgctgttacctttagcatggcggatcgtcaacgatacctatcggacagatctctgtctgttatatccaccgttcatgatcgctctcgcctgcctccatgtggcatgcgtcgtccagcagaaggatgctcggcagtggtttgccgaactctcggtggacatggagaaaatcctcgaaattatccgtgtgattctgaaactgtacgaacagtggaaaaattttgacgagagaaaggagatggccaccattctctcaaagatgcccaagccaaaacctccgccaaacagcgagggggagcaggggcccaatggaagtcagaacagctcatactctcagtcctag

SEQ ID NO: 25527 - DNA, 597 bp, Artificial Sequence
  derived and/or modified sequence
atggcccccacctgcgtgttcctggccagcaaggtggaggagttcggggtggtctcaaacacacgcctcatcgccgcagccacatctgtgctgaagacgaggttttcatacgcattccccaaagagtttccataccgtatgaaccacattctcgagtgtgaattctacctgctagaattgatggactgctgtttgattgtttaccacccctacagaccattacttcagtatgtccaagatatgggccaggaagacatgttactaccactcgcttggcgtatcgtaaacgacacgtatagaacggacttatgcctgttgtatcccccatttatgatcgccctcgcatgtctgcatgtcgcatgcgtggtccagcagaaagatgcgagacagtggttcgccgaactgagcgtggacatggaaaaaattttggagatcattagggtgattctgaaattgtacgagcaatggaaaaatttcgatgagaggaaagagatggccaccatcttaagcaaaatgccaaaacccaagccgccgccaaattcggagggggagcaaggccccaatggctctcagaattcctcttatagtcagtcttag

SEQ ID NO: 25528 - DNA, 489 bp, Artificial Sequence
  derived and/or modified sequence
atggcccccacctgcgtgttcctggccagcaaggtggaggagttcggcgtcgtgtccaacacacgactgatcgccgcggccactagcgtgctgaaaactaggttttcctacgcatttccaaaagagttcccttataggatgaaccatatcctcgagtgtgaattctatctgctggagttaatggattgctgtctcatcgtgtaccacccctacagacccctgcttcagtacgtgcaggatatgggtcaagaggacatgctgttgccgctggcgtggagaattgttaatgacacctataggacagacctgtgtcttctgtacccgccctttatgattgccctggcctgcctccacgttgcatgcgtcgtccagcagaaggatgcccggcagtggttcgccgagctgtcggtcgatatggaaaagattctcgaaatcatacgggtgatccttaagctttatgagcagtggaagaacttcgacgaaaggtag

SEQ ID NO: 25529 - DNA, 597 bp, Artificial Sequence
  derived and/or modified sequence
atggcccctacatgcgtttttctagcaagcaaagttgaggaattcggagtagtatcaaacacccgccttatagccgctgctaccagcgtgctgaaaacacgcttctcatatgcattccccaaggagttcccatacaggatgaatcatatcctggagtgcgagttttaccttctggagctgatggactgttgcctcattgtgtaccacccgtatcggccacttctccaatacgtgcaggatatgggccaagaagacatgctattgcccttagcttggaggattgttaacgacacgtatagaaccgatctgtgcttgttatatcctccttttatgatcgcactggcttgcctacatgtagcgtgcgtcgtgcagcagaaagatgccagacagtggttcgcggaactgagcgtggatatggaaaaaattctcgagatcatcagggtgatcttgaaactttatgagcagtggaagaacttcgacgaacgcaaggaaatggcgacaatcctgtccaagatgcctaagcccaaaccgcctcctaattccgagggcgagcagggccctaacggatcccagaattcaagctatagtcagtcctag

SEQ ID NO: 25530 - DNA, 597 bp, Artificial Sequence
  derived and/or modified sequence
atggctccgacgtgcgtctttctcgcctcaaaggtcgaggaattcggggtggttagcaatacccggttgatcgctgcagccacctctgtcctgaagacacgcttcagttacgcttttccaaaggagttcccataccgaatgaatcacatcctggaatgcgagttctaccttctcgagctcatggattgttgtctcatcgtgtaccatccataccgtccactccttcagtacgtccaggacatggggcaggaagacatgttactccccttggcatggcgcattgtgaacgatacctacaggaccgacctctgtctgctgtatccacctttcatgattgctctagcctgtcttcacgtggcatgtgtggtgcagcagaaggatgccaggcagtggttcgcggagctttcagttgacatggagaagatccttgaaattattcgtgttattctcaagctgtatgagcagtggaagaactttgacgagcgaaaagaaatggctacaattctgtcgaaaatgcccaagcctaaacctcccccaaactccgagggcgaacaggggcctaacggaagccaaaacagttcgtacagccagagttag

SEQ ID NO: 25531 - DNA, 489 bp, Artificial Sequence
  derived and/or modified sequence
atggcccctacctgtgtgtttctcgcatcaaaagtagaggagttcggcgtcgtgtccaacaccaggctcatcgccgctgcaacaagcgtcctgaaaacacggttcagttacgccttccctaaggaattcccttaccgcatgaaccacatactcgaatgtgagttttatttgctggagctgatggattgttgtctcatcgtgtaccatccttacagacccctgctacagtacgtgcaggacatggggcaggaagatatgcttctcccgctggcctggcgaattgtcaatgatacctaccgtacggacctatgccttctgtacccccctttcatgattgctctcgcgtgcctgcacgttgcgtgtgtggtgcagcaaaaggatgcacgccaatggttcgccgagctaagtgtggatatggagaagatcctggaaatcattagagtcatactcaaactttacgaacagtggaagaatttcgatgaacggtag

SEQ ID NO: 25532 - protein, 361 aa, Artificial Sequence
  derived and/or modified sequence
MNLVICVLLLSIWKNNCMTTNQTNGSSTTGDKPVESMQTKLNYLRRNLLILVGIIIMVFVFICFCYLHYNCLSDDASKAGMVKKKGIAAKSSKTSFSEAKTASQCSPETQPMLSTADKSSDSSSPERASAQSSTEKLIRPSSLQKPSIPNSAGKLTRPSYPKRSSKSSCSKKLSKSSHLEKAHKKGSLEKLCKLDYACKLASSDKPVRPPQLFKPLYSSHPQNEISPSKPFGPQELAKPPKHFNPKRSVSLGRAALLSNSELAETCQPYKKKHLVAKTYRPLVNDISEAKEKNTQNLHVSSKVKSSSRSFRKLDSRNNAYGDHVNDSDTMKYYSEVDSDKVIIITCDRGYNQVTSEVTLND

SEQ ID NO: 25533 - DNA, 1281 bp, Artificial Sequence
  derived and/or modified sequence
aatcatttgaaccaagttgcggacatgaatcttgttatttgtgtcctacttttgtccatttggaaaaataattgcatgactacaaaccaaaccaatggatcttctactacaggagataaacctgttgaatcaatgcagacaaaattgaactaccttagaagaaatctactcattttagttggtattatcatcatggtttttgtctttatctgtttttgttatctccattataattgtctgagcgatgatgcgtccaaagcaggaatggtcaagaaaaaaggcatagcagccaagtcatctaaaacatcattcagtgaagccaagacagcctctcaatgcagtccagaaacacaacccatgctatctactgcagacaagtcatctgattcatcgagtccagaaagggcatccgcacaatccagcacagaaaaattaatcagaccctcaagtctacaaaagccatccataccaaacagtgcaggaaagttaactaggccatcatatccaaaaaggtcatccaagtcatcatgctcaaaaaaattaagcaagtcatctcacctggaaaaggcacataagaaaggcagcctagaaaaattatgtaagctagactatgcgtgtaagctagccagttcagataagccagtcaggccacctcagctattcaagccactttattcatctcatccacaaaatgaaatctcaccatccaagccattcggtccacaggaattggctaagcctcccaaacattttaatccaaaaaggtcagtgagtctaggcagggcagccttattatccaactctgaattagctgaaacttgtcaaccctacaagaaaaaacatcttgttgccaaaacttataggcctttggtcaatgatatttctgaggcaaaggagaaaaacactcaaaacctacatgtttcaagcaaagtcaagtcctcttccaggtcctttcgtaagttagattccaggaacaatgcatacggtgatcatgtgaatgacagtgatacgatgaaatattatagtgaggttgacagtgataaagttataatcattacgtgtgacagagggtacaatcaagtcacctctgaagtaaccctaaatgattaggagctcaacaaaaataaaatccaagtgtgaaagagcaaacttataccaactattttatgctcatcatcccttaagaaaccagtagagggaaaaatcactatcaagatcacccatatctgtcttggaggcgatttattttaaaaatatcaataaaatgcatgacataaatta

SEQ ID NO: 25534 - DNA, 1086 bp, Artificial Sequence
  derived and/or modified sequence
atgaacctggtgatctgcgtgctgctgctgagcatctggaagaacaactgcatgaccaccaaccagaccaacggcagcagcaccaccggcgacaagcccgtggagagcatgcagaccaagctgaactacctgagaagaaacctgctgatcctggtgggcatcatcatcatggtgttcgtgttcatctgcttctgctacctgcactacaactgcctgagcgacgacgccagcaaggccggcatggtgaagaagaagggcatcgccgccaagagcagcaagaccagcttcagcgaggccaagaccgccagccagtgcagccccgagacccagcccatgctgagcaccgccgacaagagcagcgacagcagcagccccgagagagccagcgcccagagcagcaccgagaagctgatcagacccagcagcctgcagaagcccagcatccccaacagcgccggcaagctgaccagacccagctaccccaagagaagcagcaagagcagctgcagcaagaagctgagcaagagcagccacctggagaaggcccacaagaagggcagcctggagaagctgtgcaagctggactacgcctgcaagctggccagcagcgacaagcccgtgagacccccccagctgttcaagcccctgtacagcagccacccccagaacgagatcagccccagcaagcccttcggcccccaggagctggccaagccccccaagcacttcaaccccaagagaagcgtgagcctgggcagagccgccctgctgagcaacagcgagctggccgagacctgccagccctacaagaagaagcacctggtggccaagacctacagacccctggtgaacgacatcagcgaggccaaggagaagaacacccagaacctgcacgtgagcagcaaggtgaagagcagcagcagaagcttcagaaagctggacagcagaaacaacgcctacggcgaccacgtgaacgacagcgacaccatgaagtactacagcgaggtggacagcgacaaggtgatcatcatcacctgcgacagaggctacaaccaggtgaccagcgaggtgaccctgaacgactag

SEQ ID NO: 25535 - DNA, 1086 bp, Artificial Sequence
  derived and/or modified sequence
atgaatctagttatttgcgttttactgttatccatctggaagaacaactgtatgactacaaatcagaccaacggtagtagcaccaccggtgacaaacccgtcgaaagtatgcaaacaaagctaaattacctgcggcggaacctgttaattcttgtgggtattattattatggttttcgtgttcatctgcttttgctatctgcactataactgcctgtccgacgatgcatctaaagctggaatggttaagaagaaagggatcgccgcaaaatcatcaaagaccagcttcagtgaggctaaaaccgcttcacagtgtagccccgagactcagccaatgctgtcaacagctgataaaagcagcgactcttcctcacctgagcgggcaagcgcacagagttctaccgaaaagctgatccggcccagcagcctgcagaaacccagtatcccaaacagcgccggaaaactgacaagaccatcttacccaaaacgttccagtaaatctagttgcagcaaaaagttaagcaagtcctcccacttggaaaaagcccataagaagggaagtctcgagaaactgtgtaaactcgattacgcctgcaaactggcctctagcgacaagcctgtaaggccaccccaacttttcaagcccctgtatagtagccaccctcagaatgaaatcagccccagcaaaccctttggccctcaagagctggctaagcctccaaaacactttaacccgaaacgctccgtctctctgggcagggccgcactcctttctaactccgagctggctgagacctgccagccctataaaaagaaacatctggtggctaaaacctacaggcccctagtaaacgatatcagcgaagccaaggagaagaatacccaaaacctgcacgtcagcagtaaggtcaagagctcctccaggtctttcagaaaactggattcacggaacaatgcctacggcgatcacgttaatgactccgatacaatgaagtattattcagaagtggatagcgataaagtcattattatcacctgcgatcgagggtacaaccaggtgacatccgaggttaccctaaatgattag

SEQ ID NO: 25536 - DNA, 1086 bp, Artificial Sequence
  derived and/or modified sequence
atgaacctggtgatctgtgtgctgctgctgagcatctggaagaacaactgcatgaccaccaaccagaccaacggcagcagcaccactggagacaagcctgtggagagcatgcagaccaagctgaactacctgcggaggaacctgctgatcctggtgggcatcatcatcatggtgtttgtgttcatctgcttctgctacctgcactacaactgcctgagtgatgatgccagcaaggccggcatggtgaagaagaagggcattgctgccaagagcagcaagaccagcttcagcgaggccaagacagccagccagtgcagccctgagacccagcccatgctgagcacagctgacaagagcagtgacagcagcagccctgagcgggccagcgcccagagcagcacagagaagctgatccggcccagcagcctgcagaagcccagcatccccaacagcgctgggaagctgacccggcccagctaccccaagaggagcagcaagagcagctgcagcaagaagctgagcaagagcagccacctggagaaggcccacaagaagggcagcctggagaagctgtgcaagctggactatgcctgcaagctggccagcagtgacaagcctgtgcggcccccccagctgttcaagcccctgtacagcagccacccccagaatgagatcagccccagcaagcccttcggcccccaggagctggccaagccacccaagcacttcaaccccaagaggtctgtgtccctgggccgggccgccctgctgagcaacagcgagctggccgagacctgccagccctacaagaagaagcacctggtggccaagacctaccggcccctggtgaatgacatcagcgaggccaaggagaagaacacccagaacctgcacgtgagcagcaaggtgaagagcagcagccgctccttcaggaagctggacagcaggaacaatgcctacggggaccacgtgaatgacagcgacaccatgaagtactacagcgaggtggacagcgacaaggtgatcatcatcacctgtgaccggggctacaaccaggtgaccagcgaggtgaccctgaatgactag

SEQ ID NO: 25537 - DNA, 1086 bp, Artificial Sequence
  derived and/or modified sequence
atgaacctggtgatctgcgtgctgctgctgagcatctggaagaacaattgcatgaccacgaatcagacaaatggatcctctacgaccggagacaaaccggtggaatctatgcagactaagctaaactacctccggaggaatctccttatcctagtggggataatcatcatggtgttcgtgttcatctgtttttgctatctgcactacaactgccttagcgacgacgcgtccaaggccgggatggttaagaagaaaggcattgcagcaaaatccagcaagactagttttagcgaggctaaaacggcatctcagtgcagccccgaaacacagcctatgctcagcacagccgacaaatcaagtgacagttccagccctgagcgagcctctgcacagagctcaaccgaaaaactgattaggccatccagcctgcagaaacctagcatacctaattccgccggaaaactaacacggccatcctacccaaagcggagttctaaaagcagctgttcaaagaagttgagtaagtcaagtcacctggagaaggctcataagaaggggtcactggaaaagctctgcaaacttgactatgcctgcaaactggcaagctctgataaaccggttcggcctccacagctctttaagcctctctatagcagccacccgcaaaacgagatctccccttcgaaaccttttggtccacaagagctggcaaaacctccgaaacactttaatccaaaaaggtcagtttccctcggacgcgcagctcttcttagcaacagcgagctggctgagacgtgccaaccatataagaagaagcacctggtggccaagacgtataggcctctcgttaatgatatctcagaggctaaagaaaagaatacccagaatctccacgtgagttctaaggtaaagtcgtccagccgctcatttcgcaagctggatagtcgaaacaacgcctacggagatcacgtgaatgacagtgacaccatgaaatactactctgaggtagactcagacaaagtcattatcattacctgtgatagagggtacaaccaggtgacatctgaagttacactaaacgattag

SEQ ID NO: 25538 - DNA, 1086 bp, Artificial Sequence
  derived and/or modified sequence
atgaatctggttatttgtgtgttgctgctaagcatttggaagaataactgtatgacgactaatcagaccaatggatcctcaaccacaggcgataaacctgtggaatctatgcagactaagctgaattatctacggcgtaacttgctgatccttgtgggcatcataatcatggtattcgtgttcatctgtttttgctaccttcactacaattgcctatccgatgatgccagtaaagccggtatggtgaagaaaaaaggcatagccgcaaagagctctaagacttctttcagcgaggctaagacggccagccagtgcagtcctgaaactcaaccgatgctttctacggctgacaaaagtagtgattcctccagcccagagcgggcttccgcccaatcaagcaccgaaaaactcattcgaccaagtagtctccagaagccttccattcccaactcagccggtaaactgaccaggccgtcataccccaagcgtagctcaaaatcgtcctgcagcaagaagttgtcaaaatctagtcacctggagaaggcccacaaaaaggggtcgctggaaaagttgtgcaagctggattatgcatgcaaacttgcttcctctgataagcccgtgcgccctccccaactgttcaagcccttgtactcttcccatccacaaaacgagatctctccatcaaagccttttggccctcaggagctggctaagccccctaagcatttcaatccaaaacgcagtgtatccctgggccgtgcagctcttctttccaatagcgagctggctgaaacatgccagccatataaaaagaagcatttggtcgccaaaacatacaggcctctggtcaacgatataagcgaagcgaaggagaaaaatacgcagaacctgcacgtctcgtcaaaagttaagtcctcatcacgatctttccgaaaacttgatagcagaaacaatgcttacggggaccacgtgaacgactccgatacaatgaagtattactcagaggtcgattctgataaagtgattatcattacgtgcgacaggggatacaatcaggtgacctctgaggtcactctcaacgactag

SEQ ID NO: 25539 - protein, 688 aa, Artificial Sequence
  derived and/or modified sequence
MGNPENIEDAYVAVIRPKNTASLNSREYRAKSYEILLHEVPIEGQKKKRKKVLLETKLQGNSEITQGILDYVVETTKPISPANQGIRGKRVVLMKKFPLDGEKMGREASLFIVPSVVKDNTKYTYTPGCPIFYCLQDIMRVCSESSTHFATLTARMLIALDKWLDERHAQSHFIPALFRPSPLERIKTNVINPAYATESGQTENSLHMGYSALEIKSKMLALEKADTCIYNPLFGSDLQYTNRVDKVVINPYFGLGAPDYSKIQIPKQEKWQRSMSSVTEDKYGKVEATRILLEKGKCNPNLLNGQLSSPLHFAAGGGHAEIVQILLNHPETDRHITDQQGRSPLNICEENKQNNWEEAAKLLKEAINKPYEKVRIYRMDGSYRSVELKHGNNTTVQQIMEGMRLSQETQQYFTIWICSENLSLQLKPYHKPLQHVRDWPEILAELTNLDPQRETPQLFLRRDVRLPLEVEKQIEDPLAILILFDEARYNLLKGFYTAPDAKLITLASLLLQIVYGNYESKKHKQGFLNEENLKSIVPVTKLKSKAPHWTNRILHEYKNLSTSEGVSKEMHHLQRMFLQNCWEIPTYGAAFFTGQIFTKASPSNHKVIPVYVGVNIKGLHLLNMETKALLISLKYGCFMWQLGDTDTCFQIHSMENKMSFIVHTKQAGLVVKLLMKLNGQLMPTERNS

SEQ ID NO: 25540 - protein, 38 aa, Artificial Sequence
  derived and/or modified sequence
MGNPENIEDAYVAVIRPKNTASLNSREYRAKSYEILLH

SEQ ID NO: 25541 - protein, 184 aa, Artificial Sequence
  derived and/or modified sequence
MGNPENIEDAYVAVIRPKNTASLNSREYRAKSYEILLHEVPIEGQKKKRKKVLLETKLQGNSEITQGILDYVVETTKPISPANQGIRGKRVVLMKKFPLDGEKMGREASLFIVPSVVKDNTKYTYTPGCPIFYCLQDIMRVCSESSTHFATLTARMLIALDKWLDERHAQSHFIPALFRPSPLE

SEQ ID NO: 25542 - protein, 243 aa, Artificial Sequence
  derived and/or modified sequence
MGNPENIEDAYVAVIRPKNTASLNSREYRAKSYEILLHEVPIEGQKKKRKKVLLETKLQGNSEITQGILDYVVETTKPISPANQGIRGKRVVLMKKFPLDGEKMGREASLFIVPSVVKDNTKYTYTPGCPIFYCLQDIMRVCSESSTHFATLTARMLIALDKWLDERHAQSHFIPALFRPSPLERIKTNVINPAYATESGQTENSLHMGYSALEIKSKMLALEKADTCIYNPLFGSDLQYTNR

SEQ ID NO: 25543 - DNA, 2067 bp, Artificial Sequence
  derived and/or modified sequence
atgggcaaccccgagaacatcgaggacgcctacgtggccgtgatcagacccaagaacaccgccagcctgaacagcagagagtacagagccaagagctacgagatcctgctgcacgaggtgcccatcgagggccagaagaagaagagaaagaaggtgctgctggagaccaagctgcagggcaacagcgagatcacccagggcatcctggactacgtggtggagaccaccaagcccatcagccccgccaaccagggcatcagaggcaagagagtggtgctgatgaagaagttccccctggacggcgagaagatgggcagagaggccagcctgttcatcgtgcccagcgtggtgaaggacaacaccaagtacacctacacccccggctgccccatcttctactgcctgcaggacatcatgagagtgtgcagcgagagcagcacccacttcgccaccctgaccgccagaatgctgatcgccctggacaagtggctggacgagagacacgcccagagccacttcatccccgccctgttcagacccagccccctggagagaatcaagaccaacgtgatcaaccccgcctacgccaccgagagcggccagaccgagaacagcctgcacatgggctacagcgccctggagatcaagagcaagatgctggccctggagaaggccgacacctgcatctacaaccccctgttcggcagcgacctgcagtacaccaacagagtggacaaggtggtgatcaacccctacttcggcctgggcgcccccgactacagcaagatccagatccccaagcaggagaagtggcagagaagcatgagcagcgtgaccgaggacaagtacggcaaggtggaggccaccagaatcctgctggagaagggcaagtgcaaccccaacctgctgaacggccagctgagcagccccctgcacttcgccgccggcggcggccacgccgagatcgtgcagatcctgctgaaccaccccgagaccgacagacacatcaccgaccagcagggcagaagccccctgaacatctgcgaggagaacaagcagaacaactgggaggaggccgccaagctgctgaaggaggccatcaacaagccctacgagaaggtgagaatctacagaatggacggcagctacagaagcgtggagctgaagcacggcaacaacaccaccgtgcagcagatcatggagggcatgagactgagccaggagacccagcagtacttcaccatctggatctgcagcgagaacctgagcctgcagctgaagccctaccacaagcccctgcagcacgtgagagactggcccgagatcctggccgagctgaccaacctggacccccagagagagaccccccagctgttcctgagaagagacgtgagactgcccctggaggtggagaagcagatcgaggaccccctggccatcctgatcctgttcgacgaggccagatacaacctgctgaagggcttctacaccgcccccgacgccaagctgatcaccctggccagcctgctgctgcagatcgtgtacggcaactacgagagcaagaagcacaagcagggcttcctgaacgaggagaacctgaagagcatcgtgcccgtgaccaagctgaagagcaaggccccccactggaccaacagaatcctgcacgagtacaagaacctgagcaccagcgagggcgtgagcaaggagatgcaccacctgcagagaatgttcctgcagaactgctgggagatccccacctacggcgccgccttcttcaccggccagatcttcaccaaggccagccccagcaaccacaaggtgatccccgtgtacgtgggcgtgaacatcaagggcctgcacctgctgaacatggagaccaaggccctgctgatcagcctgaagtacggctgcttcatgtggcagctgggcgacaccgacacctgcttccagatccacagcatggagaacaagatgagcttcatcgtgcacaccaagcaggccggcctggtggtgaagctgctgatgaagctgaacggccagctgatgcccaccgagagaaacagctag

SEQ ID NO: 25544 - DNA, 210 bp, Artificial Sequence
  derived and/or modified sequence
atgggcaaccccgagaacatcgaggacgcctacgtggccgtgatcagacccaagaacaccgccagcctgaacagcagagagtacagagccaagagctacgagatcctgctgcacgaggtgcccatcgagggccagaagaagaagagaaagaaggtgctgctggagaccaagctgcagggcaacagcgagatcacccagggcatcctgtag

SEQ ID NO: 25545 - DNA, 297 bp, Artificial Sequence
  derived and/or modified sequence
atgggcaaccccgagaacatcgaggacgcctacgtggccgtgatcagacccaagaacaccgccagcctgaacagcagagagtacagagccaagagctacgagatcctgctgcacgaggtgcccatcgagggccagaagaagaagagaaagaaggtgctgctggagaccaagctgcagggcaacagcgagatcacccagggcatcctggactacgtggtggagaccaccaagcccatcagccccgccaaccagggcatcagaggcaagagagtggtgctgatgaagaagttcccctag

SEQ ID NO: 25546 - DNA, 555 bp, Artificial Sequence
  derived and/or modified sequence
atgggcaaccccgagaacatcgaggacgcctacgtggccgtgatcagacccaagaacaccgccagcctgaacagcagagagtacagagccaagagctacgagatcctgctgcacgaggtgcccatcgagggccagaagaagaagagaaagaaggtgctgctggagaccaagctgcagggcaacagcgagatcacccagggcatcctggactacgtggtggagaccaccaagcccatcagccccgccaaccagggcatcagaggcaagagagtggtgctgatgaagaagttccccctggacggcgagaagatgggcagagaggccagcctgttcatcgtgcccagcgtggtgaaggacaacaccaagtacacctacacccccggctgccccatcttctactgcctgcaggacatcatgagagtgtgcagcgagagcagcacccacttcgccaccctgaccgccagaatgctgatcgccctggacaagtggctggacgagagacacgcccagagccacttcatccccgccctgttcagacccagccccctggagtag

SEQ ID NO: 25547 - DNA, 339 bp, Artificial Sequence
  derived and/or modified sequence
atgggcaaccccgagaacatcgaggacgcctacgtggccgtgatcagacccaagaacaccgccagcctgaacagcagagagtacagagccaagagctacgagatcctgctgcacgaggtgcccatcgagggccagaagaagaagagaaagaaggtgctgctggagaccaagctgcagggcaacagcgagatcacccagggcatcctggactacgtggtggagaccaccaagcccatcagccccgccaaccagggcatcagaggcaagagagtggtgctgatgaagaagttccccctggacggcgagaagatgggcagagaggccagcctgttcatctag

SEQ ID NO: 25548 - DNA, 177 bp, Artificial Sequence
  derived and/or modified sequence
atgggcaaccccgagaacatcgaggacgcctacgtggccgtgatcagacccaagaacaccgccagcctgaacagcagagagtacagagccaagagctacgagatcctgctgcacgaggtgcccatcgagggccagaagaagaagagaaagaaggtgctgctggagaccaagctgtag

SEQ ID NO: 25549 - DNA, 489 bp, Artificial Sequence
  derived and/or modified sequence
atgggcaaccccgagaacatcgaggacgcctacgtggccgtgatcagacccaagaacaccgccagcctgaacagcagagagtacagagccaagagctacgagatcctgctgcacgaggtgcccatcgagggccagaagaagaagagaaagaaggtgctgctggagaccaagctgcagggcaacagcgagatcacccagggcatcctggactacgtggtggagaccaccaagcccatcagccccgccaaccagggcatcagaggcaagagagtggtgctgatgaagaagttccccctggacggcgagaagatgggcagagaggccagcctgttcatcgtgcccagcgtggtgaaggacaacaccaagtacacctacacccccggctgccccatcttctactgcctgcaggacatcatgagagtgtgcagcgagagcagcacccacttcgccaccctgaccgccagaatgctgatcgccctggacaagtag

SEQ ID NO: 25550 - DNA, 732 bp, Artificial Sequence
  derived and/or modified sequence
atgggcaaccccgagaacatcgaggacgcctacgtggccgtgatcagacccaagaacaccgccagcctgaacagcagagagtacagagccaagagctacgagatcctgctgcacgaggtgcccatcgagggccagaagaagaagagaaagaaggtgctgctggagaccaagctgcagggcaacagcgagatcacccagggcatcctggactacgtggtggagaccaccaagcccatcagccccgccaaccagggcatcagaggcaagagagtggtgctgatgaagaagttccccctggacggcgagaagatgggcagagaggccagcctgttcatcgtgcccagcgtggtgaaggacaacaccaagtacacctacacccccggctgccccatcttctactgcctgcaggacatcatgagagtgtgcagcgagagcagcacccacttcgccaccctgaccgccagaatgctgatcgccctggacaagtggctggacgagagacacgcccagagccacttcatccccgccctgttcagacccagccccctggagagaatcaagaccaacgtgatcaaccccgcctacgccaccgagagcggccagaccgagaacagcctgcacatgggctacagcgccctggagatcaagagcaagatgctggccctggagaaggccgacacctgcatctacaaccccctgttcggcagcgacctgcagtacaccaacagatag

SEQ ID NO: 25551 - DNA, 198 bp, Artificial Sequence
  derived and/or modified sequence
atgggcaaccccgagaacatcgaggacgcctacgtggccgtgatcagacccaagaacaccgccagcctgaacagcagagagtacagagccaagagctacgagatcctgctgcacgaggtgcccatcgagggccagaagaagaagagaaagaaggtgctgctggagaccaagctgcagggcaacagcgagatcacctag

SEQ ID NO: 25552 - DNA, 2067 bp, Artificial Sequence
  derived and/or modified sequence
atggggaatcccgagaatatagaggatgcctacgtcgctgtaatcagacccaaaaacaccgcatctttgaatagtcgagagtaccgggccaaaagctatgagatcttgctgcatgaagtaccaatcgaagggcagaaaaaaaagcgtaagaaagtgctgctggaaaccaaattacaggggaactcagaaatcactcaaggaattctggattatgtcgtggagaccacgaagccgatctctccagcaaatcaggggattaggggaaagcgggtggtgctcatgaaaaagtttccgctggatggtgagaaaatgggaagggaagcgtcactgttcatcgttcccagcgtggtgaaagataatacaaaatatacttatactccgggatgcccaatcttttactgtttgcaagacataatgagagtgtgttccgagagttccacacatttcgcaactttaacagccaggatgctgattgctctggacaaatggctggacgagaggcacgcccagagccacttcattccagccctgttcaggccgtcccccctggaacggatcaaaaccaatgtgattaatccagcttatgcaacagaaagtggccaaacagaaaatagcctgcatatggggtactccgctctagagatcaagagtaaaatgttggccctagaaaaagccgacacatgtatttataaccccttgtttggaagcgatttacagtatacaaatcgcgtggataaggtagtgattaacccctattttggtctgggagccccagattattctaagatacaaatacccaagcaggaaaagtggcagagaagcatgtcgagtgttacagaagacaagtatggcaaagtagaagccactagaatactgctagaaaagggcaagtgtaatcctaacttacttaatggtcaacttagcagtcctctccacttcgctgctggagggggtcacgccgaaatcgtgcagatccttctcaaccatccggaaacggatcgacatatcacagatcaacagggacgatccccgttgaatatatgtgaagaaaacaagcagaataactgggaggaagcagccaagctcctgaaggaggccattaacaagccctacgaaaaggtcaggatatacagaatggatgggagctataggtcggtcgagctgaagcacggaaacaatactaccgttcaacagatcatggaggggatgcgtctttcacaggagacacaacagtacttcactatttggatttgcagtgaaaatctcagtctgcagttgaagccctaccataagcctctgcagcatgttcgcgattggcccgaaattctggcagagctgaccaacttggacccacagcgcgaaacaccacagctgtttctgaggcgtgatgttagactgccgctcgaagtcgagaaacaaatcgaggacccgctcgcaatacttatcctgttcgatgaggcccggtataacctgctgaaaggcttttacacagcacccgatgctaagttaatcactctggcctcactgctcctgcagatcgtgtatggcaattacgaatctaagaagcacaaacaggggttcctgaacgaggagaatcttaaatcaatcgtccctgtcacgaagctcaaatctaaggccccccactggacaaaccgtattcttcatgagtataagaacctgagtacctctgaaggtgtatccaaggagatgcatcacctgcagcgcatgtttctgcagaattgttgggagatccctacctatggagcagcattctttaccggtcagatttttaccaaagccagcccatccaaccacaaggtcattcccgtttatgtaggagtgaatatcaaagggcttcatctgttgaacatggagaccaaagcgcttcttatttctctgaaatatggctgctttatgtggcagctcggagacactgacacatgctttcagatccacagcatggagaataagatgtccttcatcgtgcacacaaagcaggccggcctggtggtcaaactcttgatgaaactgaatggacagttgatgcccacagaaaggaacagttag

SEQ ID NO: 25553 - DNA, 210 bp, Artificial Sequence
  derived and/or modified sequence
atgggaaaccctgagaacatagaagacgcctacgtggcagtcattcggccaaagaacacagccagcctcaactctagagagtaccgggcgaaaagctatgagatactgctgcatgaagtgccaatcgaagggcagaaaaagaagaggaaaaaggtactcctggaaactaagttacagggaaactccgaaatcacgcagggaatcctgtag

SEQ ID NO: 25554 - DNA, 297 bp, Artificial Sequence
  derived and/or modified sequence
atgggaaacccagaaaatatcgaagacgcttacgtggccgttattcggcccaaaaatacggcatccttgaattcccgggagtatcgagccaaaagctacgaaatccttctgcacgaggtgcccattgaaggacagaaaaagaagcggaagaaagttcttctggagacaaagttgcagggcaactccgagatcacccaggggatcctcgactacgtggtggagactaccaagccaatttctcccgcaaatcagggtatccgggggaagcgcgttgtgctcatgaagaaatttccttag

SEQ ID NO: 25555 - DNA, 555 bp, Artificial Sequence
  derived and/or modified sequence
atgggaaatcccgagaatatcgaggatgcatacgtcgccgtaatcaggcctaaaaacaccgccagcctaaattcgagagagtacagagccaagagctacgaaatcctcttgcacgaggtgcccatcgagggacagaagaagaaaaggaaaaaagtgctgctcgagacgaaactgcaaggaaattccgagattactcagggcattctggattatgtcgttgagaccactaaacccatatcacctgctaaccagggcatacgggggaaaagggtcgtgcttatgaagaaattccctcttgatggtgaaaagatgggacgggaggcctcattgtttatagtccccagtgttgtcaaggacaacactaaatacacttatacacccggatgcccaattttctactgccttcaagacatcatgcgcgtgtgctccgagagtagtacacacttcgctacgcttacggcccggatgctcatcgctctagataaatggttggatgagcgccacgcccagtcccactttattcccgccctgtttcggcccagccctctcgagtag

SEQ ID NO: 25556 - DNA, 339 bp, Artificial Sequence
  derived and/or modified sequence
atgggaaatcctgaaaacatagaagacgcctatgtggcagtcatacggcctaagaacactgcttcactgaacagcagggagtaccgagctaagtcatacgagatcctgttacatgaggtcccgatcgaaggccaaaaaaagaagcgcaagaaggtgctcctggaaaccaaacttcaggggaattcagaaattactcagggtatcctggattacgtcgtcgagactaccaagcctatcagccccgccaaccagggtatccggggaaagagggtggttctgatgaagaagtttcctcttgacggggagaaaatggggcgcgaagcctctctgtttatatag

SEQ ID NO: 25557 - DNA, 177 bp, Artificial Sequence
  derived and/or modified sequence
atgggtaaccccgagaacattgaagacgcctacgttgccgtcatacgaccaaagaacactgcatcactcaatagcagggaatacagagctaaatcttacgagattttgctccacgaagtccccattgagggacagaaaaagaagcggaagaaggtgttgctcgagacaaaactgtag

SEQ ID NO: 25558 - DNA, 489 bp, Artificial Sequence
  derived and/or modified sequence
atgggcaaccccgaaaatattgaggatgcgtatgtagccgtcatccgtccaaaaaacaccgcatcactaaacagccgtgagtaccgagccaagtcctacgaaatccttctgcacgaggtgcccatcgaggggcagaagaaaaagcgcaagaaagtgctacttgagaccaaactgcagggaaactccgaaattactcaggggatactggattacgtggtggagacgactaaacctattagccctgcaaaccagggtatcagggggaaacgggtagtcctgatgaagaagttccccctggacggagagaagatgggtagagaggcttcactgtttatcgtaccgagcgttgtcaaagacaacacaaaatatacctacactcctggttgcccgatcttctactgtctgcaggatattatgcgagtctgtagcgagtcaagcacccatttcgcaacgcttactgcacgtatgcttattgcccttgacaaatag

SEQ ID NO: 25559 - DNA, 732 bp, Artificial Sequence
  derived and/or modified sequence
atgggaaatcctgagaatattgaggatgcatacgtcgccgtaatcagaccaaagaatacggccagtctcaactctcgagaatatcgcgccaagagttacgagatactgctgcacgaggtccccatagagggtcagaagaaaaaaaggaaaaaagttctgcttgagactaaattgcaaggcaatagcgagatcacccaagggatcctcgattatgtggttgaaaccacaaaacccatctcccctgccaaccagggaatccgaggcaagagagtcgtcctgatgaagaagttccccctggatggcgagaaaatgggccgagaagcctctcttttcattgttccgagtgttgtgaaggacaataccaagtacacctacactcctgggtgccctatcttttattgtcttcaggatattatgcgcgtgtgtagcgagtcgtctactcattttgcgacacttacagccagaatgttgatagcgcttgataaatggctcgatgaaagacatgcgcagtcacactttatcccggcgcttttccgtccctccccgttggagagaattaaaacaaacgtgattaatcccgcttacgctactgagagcggacagactgagaattctcttcatatgggctatagtgctctggaaatcaagtcaaaaatgctggccctcgagaaggccgacacctgtatctataaccccctcttcggatctgatttgcaatacacaaatcgctag

SEQ ID NO: 25560 - DNA, 198 bp, Artificial Sequence
  derived and/or modified sequence
atgggaaaccccgaaaatattgaggacgcatatgtggcggttatccgacccaaaaatacagctagcttaaacagccgggaatacagagccaaatcatatgagatactcctgcacgaggtgccaattgaggggcagaagaaaaagcgcaaaaaggtcttgctggagacgaagttgcaggggaactcagaaatcacctag

SEQ ID NO: 25561 - DNA, 2067 bp, Artificial Sequence
  derived and/or modified sequence
atgggcaacccagaaaatattgaagatgcctacgtggccgtcatccggcccaagaacacagccagcctgaacagccgggagtaccgggccaagagctatgagatcctgctgcacgaggtgcccatcgagggccagaagaagaagaggaagaaggtgctgctggagaccaagctgcagggcaacagcgagatcacccagggcatcctggactatgtggtggagaccaccaagcccatcagccctgccaaccagggcatccggggcaagagggtggtgctgatgaagaagttccccctggatggagagaagatgggccgggaggccagcctcttcatcgtgcccagcgtggtgaaggacaacaccaagtacacctacaccccaggctgccccatcttctactgcctgcaggacatcatgagggtgtgcagcgagagcagcacccactttgccaccctgacagccaggatgctgattgccctggacaagtggctggatgaaagacatgcccagagccacttcatcccagccctcttccggcccagccccctggagcgcatcaagaccaacgtcatcaacccagcctatgccacagaaagtggccagacagagaacagcctgcacatgggctacagcgccctggagatcaagagcaagatgctggccctggagaaggctgacacctgcatctacaaccccctgtttggaagtgacctgcagtacaccaacagagtggacaaggtggtgatcaacccctacttcggcctgggcgccccagactacagcaagatccagatccccaagcaggagaagtggcagaggtccatgagctctgtgacagaggacaagtatggcaaggtggaggccacccgcatcctgctggagaagggcaagtgcaaccccaacctgctgaatggccagctgagcagccccctgcactttgctgctgggggcggccacgccgagatcgtgcagatcctgctgaaccaccctgagacagacagacacatcacagaccagcagggccgcagccccctgaacatctgtgaggagaacaagcagaacaactgggaggaggccgccaagctgctgaaggaggccatcaacaagccctatgagaaggtgcgcatctacaggatggatggcagctacagatctgtggagctgaagcacggcaacaacaccaccgtgcagcagatcatggagggcatgaggctgagccaggagacccagcagtacttcaccatctggatctgcagcgagaacctgagcctgcagctgaagccctaccacaagcccctgcagcacgtgcgggactggccagagatcctggccgagctgaccaacctggacccccagcgggagaccccccagctgttcctgcggagagatgtgcggctgcccctggaggtggagaagcagatcgaggaccccctggccatcctgatcctgtttgatgaggcccgctacaacctgctgaagggcttctacacagccccagatgccaagctgatcaccctggccagcctgctgctgcagatcgtgtatggcaactatgagagcaagaagcacaagcagggcttcctgaatgaggagaacctgaagagcatcgtgcctgtgaccaagctgaagagcaaggccccccactggaccaaccgcatcctgcacgagtacaagaacctgagcaccagcgagggcgtgtccaaggagatgcaccacctgcagaggatgttcctgcagaactgctgggagatccccacctatggagctgccttcttcaccggccagatcttcaccaaggccagccccagcaaccacaaggtgattcctgtgtatgtgggcgtgaacatcaagggcctgcacctgctgaacatggagaccaaggccctgctgatcagcctgaagtatggctgcttcatgtggcagctgggggacacagacacctgcttccagatccacagcatggagaacaagatgtccttcatcgtgcacaccaagcaggccggcctggtggtgaagctgctgatgaagctgaatggccagctgatgcccacagagaggaacagctag

SEQ ID NO: 25562 - DNA, 210 bp, Artificial Sequence
  derived and/or modified sequence
atgggcaacccagaaaatattgaagatgcctacgtggccgtcatccggcccaagaacacagccagcctgaacagccgggagtaccgggccaagagctatgagatcctgctgcacgaggtgcccatcgagggccagaagaagaagaggaagaaggtgctgctggagaccaagctgcagggcaacagcgagatcacccagggcatcctgtag

SEQ ID NO: 25563 - DNA, 297 bp, Artificial Sequence
  derived and/or modified sequence
atgggcaacccagaaaatattgaagatgcctacgtggccgtcatccggcccaagaacacagccagcctgaacagccgggagtaccgggccaagagctatgagatcctgctgcacgaggtgcccatcgagggccagaagaagaagaggaagaaggtgctgctggagaccaagctgcagggcaacagcgagatcacccagggcatcctggactatgtggtggagaccaccaagcccatcagccctgccaaccagggcatccggggcaagagggtggtgctgatgaagaagttcccctag

SEQ ID NO: 25564 - DNA, 555 bp, Artificial Sequence
  derived and/or modified sequence
atgggcaacccagaaaatattgaagatgcctacgtggccgtcatccggcccaagaacacagccagcctgaacagccgggagtaccgggccaagagctatgagatcctgctgcacgaggtgcccatcgagggccagaagaagaagaggaagaaggtgctgctggagaccaagctgcagggcaacagcgagatcacccagggcatcctggactatgtggtggagaccaccaagcccatcagccctgccaaccagggcatccggggcaagagggtggtgctgatgaagaagttccccctggatggagagaagatgggccgggaggccagcctcttcatcgtgcccagcgtggtgaaggacaacaccaagtacacctacaccccaggctgccccatcttctactgcctgcaggacatcatgagggtgtgcagcgagagcagcacccactttgccaccctgacagccaggatgctgattgccctggacaagtggctggatgaaagacatgcccagagccacttcatcccagccctcttccggcccagccccctggagtag

SEQ ID NO: 25565 - DNA, 339 bp, Artificial Sequence
  derived and/or modified sequence
atgggcaacccagaaaatattgaagatgcctacgtggccgtcatccggcccaagaacacagccagcctgaacagccgggagtaccgggccaagagctatgagatcctgctgcacgaggtgcccatcgagggccagaagaagaagaggaagaaggtgctgctggagaccaagctgcagggcaacagcgagatcacccagggcatcctggactatgtggtggagaccaccaagcccatcagccctgccaaccagggcatccggggcaagagggtggtgctgatgaagaagttccccctggatggagagaagatgggccgggaggccagcctcttcatctag

SEQ ID NO: 25566 - DNA, 177 bp, Artificial Sequence
  derived and/or modified sequence
atgggcaacccagaaaatattgaagatgcctacgtggccgtcatccggcccaagaacacagccagcctgaacagccgggagtaccgggccaagagctatgagatcctgctgcacgaggtgcccatcgagggccagaagaagaagaggaagaaggtgctgctggagaccaagctgtag

SEQ ID NO: 25567 - DNA, 489 bp, Artificial Sequence
  derived and/or modified sequence
atgggcaacccagaaaatattgaagatgcctacgtggccgtcatccggcccaagaacacagccagcctgaacagccgggagtaccgggccaagagctatgagatcctgctgcacgaggtgcccatcgagggccagaagaagaagaggaagaaggtgctgctggagaccaagctgcagggcaacagcgagatcacccagggcatcctggactatgtggtggagaccaccaagcccatcagccctgccaaccagggcatccggggcaagagggtggtgctgatgaagaagttccccctggatggagagaagatgggccgggaggccagcctcttcatcgtgcccagcgtggtgaaggacaacaccaagtacacctacaccccaggctgccccatcttctactgcctgcaggacatcatgagggtgtgcagcgagagcagcacccactttgccaccctgacagccaggatgctgattgccctggacaagtag

SEQ ID NO: 25568 - DNA, 732 bp, Artificial Sequence
  derived and/or modified sequence
atgggcaacccagaaaatattgaagatgcctacgtggccgtcatccggcccaagaacacagccagcctgaacagccgggagtaccgggccaagagctatgagatcctgctgcacgaggtgcccatcgagggccagaagaagaagaggaagaaggtgctgctggagaccaagctgcagggcaacagcgagatcacccagggcatcctggactatgtggtggagaccaccaagcccatcagccctgccaaccagggcatccggggcaagagggtggtgctgatgaagaagttccccctggatggagagaagatgggccgggaggccagcctcttcatcgtgcccagcgtggtgaaggacaacaccaagtacacctacaccccaggctgccccatcttctactgcctgcaggacatcatgagggtgtgcagcgagagcagcacccactttgccaccctgacagccaggatgctgattgccctggacaagtggctggatgaaagacatgcccagagccacttcatcccagccctcttccggcccagccccctggagcgcatcaagaccaacgtcatcaacccagcctatgccacagaaagtggccagacagagaacagcctgcacatgggctacagcgccctggagatcaagagcaagatgctggccctggagaaggctgacacctgcatctacaaccccctgtttggaagtgacctgcagtacaccaacagatag

SEQ ID NO: 25569 - DNA, 198 bp, Artificial Sequence
  derived and/or modified sequence
atgggcaacccagaaaatattgaagatgcctacgtggccgtcatccggcccaagaacacagccagcctgaacagccgggagtaccgggccaagagctatgagatcctgctgcacgaggtgcccatcgagggccagaagaagaagaggaagaaggtgctgctggagaccaagctgcagggcaacagcgagatcacctag

SEQ ID NO: 25570 - DNA, 2827 bp, Artificial Sequence
  derived and/or modified sequence
atagccacggtaacggcggggtggaaagctaaggcctttgaagacctgggaccccgtagtttcgggagagggtgaggggtgaatggtgctgaggtgcgaggagagggaaggacagtaaagagcaggtttttggctttcatcgctttttctacatgtttttagcctcaccagaagtctttcatctcggtggtccaactcaggatctcagcctcattattttcttacccttctggagtgcatatgtgcctttacagtttctgtttgcaaacgctgtctagcatactaagaggatgttagcaaacctgttccatggacactaaatggcagttgtacatctcccctcatcagtcatagtgacaaccagaaatgccctccatattttccagtgatcccagcaatgggaaatccagaaaacatagaagatgcatatgttgctgttattcgtccaaagaatactgccagtctcaattctcgggaatacagagctaagtcatatgaaattttgttgcatgaagttcccattgaaggacagaaaaaaaagagaaagaaagttttattggaaacgaaacttcaaggcaacagtgaaataacacaaggcatattggattacgtagtagaaaccaccaaaccaatttctcctgcaaaccagggtatcagaggaaaacgagttgtactaatgaaaaaatttcctctggatggagagaagatgggcagagaagcatcattatttattgttccatcagttgtcaaagataatactaaatacacatataccccaggatgcccaattttttactgcttacaagatattatgcgagtctgtagtgaatccagtactcattttgctacacttacagcaaggatgttaatagccttggataagtggttagatgaacgtcatgcacaatctcactttattccagctttattccgaccttctcctcttgagcggataaaaactaatgtcataaatcctgcatatgctactgaatcaggtcagacagaaaactcactacatatgggctatagtgcactagaaataaagagtaaaatgttagccctagagaaagcagatacctgtatttacaaccctttgtttggatcagatcttcagtatacaaatcgggtagataaagtggtaataaatccatactttggtctaggagctccagactactcaaaaatccaaatacctaaacaggaaaaatggcagagaagcatgagcagtgtcacagaagacaagtatggaaaagttgaggccactcgcatattgttagagaaaggaaagtgcaatccaaaccttttaaatggacaacttagttctcctcttcattttgctgctggaggaggacatgctgaaatagtacagattctcctaaaccacccagaaacggatagacatataacagaccaacaaggaagatctccattaaatatttgtgaagaaaacaaacaaaacaactgggaagaagctgcaaaattgttgaaggaagcaattaacaaaccatatgaaaaagttcgaatatacagaatggatgggtcatatcgttctgttgaattgaagcatggaaataataccacagtgcagcagataatggaaggaatgcgtctctctcaagaaactcagcaatatttcactatatggatttgttcagaaaacctcagccttcaactcaaaccatatcataaacccttgcaacatgttcgtgactggccagaaatacttgctgaattgactaatctggatcctcaaagggaaacacctcagctttttctaagaagagatgtgagacttcccttggaagttgaaaaacagattgaagacccactagctattcttattctctttgatgaagccagatataatttattgaagggcttttatacagctcctgatgctaagctgataacattggcaagtctgcttttgcaaatagtctatggaaattatgagagtaaaaaacacaagcaaggtttcctaaatgaagaaaatctaaaatccatcgtacctgttaccaaactgaaaagtaaggcacctcactggacaaatcgcatacttcatgaatacaagaatctcagtacaagtgaaggtgtcagtaaagaaatgcatcaccttcagcgcatgttcttacagaattgctgggaaattcctacttatggagcagcatttttcacaggacagatatttacaaaggcaagccccagcaatcataaagtcatccctgtgtatgtaggagtgaatataaaaggacttcatctcctcaacatggaaactaaggctttactcatcagtcttaagtatggttgttttatgtggcaattgggagatactgatacttgttttcagatccatagcatggaaaataaaatgagctttatagtacatacaaaacaggctggtctcgtggtaaaactgttaatgaagctaaatggacagttaatgcccactgaaagaaattcatgaaagagaagtaactgttactcaagccaccacattttgtaatgcagagttttttttccgtgaaagatttcttaaaatattacttttggccgagcatggtggctcacccctgtaattccagcactttgggaggctggggcaggcggatcacctgaagtcagagttcaagaccagcctggccaacatggtgaaaccctgtctctacaaaaatacaaaaattagctgggtgtggtggcgggcgcctataatcctagctactagggaggccaaggtgggagatcgcttaaacccaggaggtggaggttgtagtgagccaagattgcaccacggcacgctagcctgggtgacacagcaagactccatctc

SEQ ID NO: 25571 - DNA, 551 bp, Artificial Sequence
  derived and/or modified sequence
atagccacggtaacggcggggtggaaagctaaggcctttgaagacctgggaccccgtagtttcgggagagggtttttggctttcatcgctttttctacatgtttttagcctcaccagaagtctttcatctcggtggtccaactcaggatctcagcctcattattttcttacccttctggagtgcatatgtgcctttacagtttctgtttgcaaacgctgtctagcatactaagaggatgttagcaaacctgttccatggacactaaatggcagttgtacatctcccctcatcagtcatagtgacaaccagaaatgccctccatattttccagtgatcccagcaatgggaaatccagaaaacatagaagatgcatatgttgctgttattcgtccaaagaatactgccagtctcaattctcgggaatacagagctaagtcatatgaaattttgttgcatgaagttcccattgaaggacagaaaaaaaagagaaagaaagttttattggaaacgaaacttcaaggcaacagtgaaataacacaaggcatattgg

SEQ ID NO: 25572 - DNA, 483 bp, Artificial Sequence
  derived and/or modified sequence
acccggaagcgatttcatagccacgcctcaccagaagtctttcatctcggtggtccaactcaggatctcagcctcattattttcttacccttctggagtgcatatgtgcctttacagtttctgtttgcaaacgctgtctagcatactaagaggatgttagcaaacctgttccatggacactaaatggcagttgtacatctcccctcatcagtcatagtgacaaccagaaatgccctccatattttccagtgatcccagtcttcaatgcgtctgtctcataatttgtaaacgtttattatcttgaagtcattgttaatctgtggtgaaaagtaattgctaaatagaaattctgagaagaaaaaggcctcatccttttcacatgatgtaggaaggtctgttgcatgagcaatgggaaatccagaaaacatagaagatgcatatgttgctgttattcgtccaaagaatactgccagtctcaattct

SEQ ID NO: 25573 - DNA, 572 bp, Artificial Sequence
  derived and/or modified sequence
gcaaagggtgtgaacccggaagcgatttcatagccacggtttttggctttcatcgctttttctacatgtttttagcctcaccagaagtctttcatctcggtggtccaactcaggatctcagcctcattattttcttacccttctggagtgcatatgtgcctttacagtttctgtttgcaaacgctgtctagcatactaagaggatgttagcaaacctgttccatggacactaaatggcagttgtacatctcccctcatcagtcatagtgacaaccagaaatgccctccatattttccagtgatcccagtcttcaatgcgtctgtctcataatttgtaaacgtttattatcttgaagtcattgttaatctgtggtgaaaagtaattgctaaatagaaattctgagaagaaaaaggcctcatccttttcacatgatgtaggaaggtctgttgcatgagcaatgggaaatccagaaaacatagaagatgcatatgttgctgttattcgtccaaagaatactgccagtctcaattctcgggaatacagagctaagtcatatgaaattttgttgcat

SEQ ID NO: 25574 - DNA, 702 bp, Artificial Sequence
  derived and/or modified sequence
acctgggaccccgtagtttcgggagagggtgaggggtgaatggtgctgaggtgcgaggagagggaaggacagtaaagagcaggtgggcaggagggtctccgactccagagacctgagcttttggggcgcgggtgggagcgcgggggaaccctcaagacggctttcttttggcgactgagggtttttctgccacaggaagctgggccgggctgctgtgcctgggaggagggaaggaggaatgagaaagcggtgacggtccctgccccccctcgccaggtgactgtcccacccatttagttgaatgtagcggccagagaggcactcgcggcagcccgtacgggtgggacctctcggtgtccttcgggaaacaggaggagcaagttcgactccagcgagggaaaacggagcaatgggaaatccagaaaacatagaagatgcatatgttgctgttattcgtccaaagaatactgccagtctcaattctcgggaatacagagctaagtcatatgaaattttgttgcatgaagttcccattgaaggacagaaaaaaaagagaaagaaagttttattggaaacgaaacttcaaggcaacagtgaaataacacaaggcatattggattacgtagtagaaaccaccaaaccaatttctcctgcaaaccagggtatcagaggaaaacgagttgtactaatgaaaaaatttcc

SEQ ID NO: 25575 - DNA, 855 bp, Artificial Sequence
  derived and/or modified sequence
gatttcatagccacggtaacggcggggtggaaagctaaggcctttgaagacctgggaccccgtagtttcgggagagggtgaggggtgaatggtgctgaggtgcgaggagagggaaggacagtaaagagcaggtgactgtcccacccatttagttgaatgtagcggccagagaggcactcgcggcagcccgtacgggtgggacctctcggtgtccttcgggaaacaggaggagcaagttcgactccagcgagggaaaacggaggtgggagactgaaccatctccacatctagttgccccagcaatgggaaatccagaaaacatagaagatgcatatgttgctgttattcgtccaaagaatactgccagtctcaattctcgggaatacagagctaagtcatatgaaattttgttgcatgaagttcccattgaaggacagaaaaaaaagagaaagaaagttttattggaaacgaaacttcaaggcaacagtgaaataacacaaggcatattggattacgtagtagaaaccaccaaaccaatttctcctgcaaaccagggtatcagaggaaaacgagttgtactaatgaaaaaatttcctctggatggagagaagatgggcagagaagcatcattatttattgttccatcagttgtcaaagataatactaaatacacatataccccaggatgcccaattttttactgcttacaagatattatgcgagtctgtagtgaatccagtactcattttgctacacttacagcaaggatgttaatagccttggataagtggttagatgaacgtcatgcacaatctcactttattccagctttattccgaccttctcctcttgagc

SEQ ID NO: 25576 - DNA, 557 bp, Artificial Sequence
  derived and/or modified sequence
atagccacggtaacggcggggtggaaagctaaggcctttgaagacctgggaccccgtagtttcgggagaggttgaatgtagcggccagagaggcactcgcggcagcccgtacgggtgggacctctcggtgtccttcgggaaacaggaggagcaagttcgactccagcgagggaaaacggaggtgggagactgaaccatctccacatctagttgccccagcaatgggaaatccagaaaacatagaagatgcatatgttgctgttattcgtccaaagaatactgccagtctcaattctcgggaatacagagctaagtcatatgaaattttgttgcatgaagttcccattgaaggacagaaaaaaaagagaaagaaagttttattggaaacgaaacttcaaggcaacagtgaaataacacaaggcatattggattacgtagtagaaaccaccaaaccaatttctcctgcaaaccagggtatcagaggaaaacgagttgtactaatgaaaaaatttcctctggatggagagaagatgggcagagaagcatcattatttatt

SEQ ID NO: 25577 - DNA, 783 bp, Artificial Sequence
  derived and/or modified sequence
tcatgttccagccttgcgcgctcgcagccccggccgccctcttcccctcccccgcctccggctccggctccggctcagccgctggcacccccaccgccaccaccctagtctcctagtcgcctgccaccagcccctgagagactgcaggtccagtgaaaaggagcaggaacggcagcagcccggccgccgacccggaagctctttcaccgccaaccgcgaggctgcaaagggtgtgaacccggaagcgatttcatagccacggtttttggctttcatcgctttttctacatgtttttagcctcaccagaagtctttcatctcggtggtccaactcaggatctcagcctcattattttcttacccttctggagtgcatatgtgcctttacagtttctgtttgcaaacgctgtctagcatactaagaggatgttagcaaacctgttccatggacactaaatggcagttgtacatctcccctcatcagtcatagtgacaaccagaaatgccctccatattttccagtgatcccagtcttcaatgcgtctgtctcataatttgtaaacgtttattatcttgaagtcattgttaatctgtggtgaaaagtaattgctaaatagaaattctgagaagaaaaaggcctcatccttttcacatgatgtaggaaggtctgttgcatgagcaatgggaaatccagaaaacatagaagatgcatatgttgctgttattcgtccaaagaatactgccagtctcaattctcgggaatacagagctaagtcatatgaa

SEQ ID NO: 25578 - DNA, 665 bp, Artificial Sequence
  derived and/or modified sequence
catagccacggtaacggcggggtggaaagctaaggcctttgaagacctgggaccccgtagtttcgggagagggtgaggggtgaatggtgctgaggtgcgaggagagggaaggacagtaaagagcaggtgggcaggagggtctccgactccagagacctgagcttttggggcgcgggtgggagcgcgggggaaccctcaagacggctttcttttggcgactgagggtttttctgccacaggaagctgggccgggctgctgtgcctgggaggagggaaggaggaatgagaaagcggtgacggtccctgccccccctcgccaggtgactgtcccacccatttagttgaatgtagcggccagagaggcactcgcggcagcccgtacgggtgggacctctcggtgtccttcgggaaacaggaggagcaagttcgactccagcgagggaaaacggaggtgggagactgaaccatctccacatctagttgccccagcaatgggaaatccagaaaacatagaagatgcatatgttgctgttattcgtccaaagaatactgccagtctcaattctcgggaatacagagctaagtcatatgaaattttgttgcatgaagttcccattgaaggacagaaaaaaaagagaaagaaagttttattggaaacgaaactt

SEQ ID NO: 25579 - DNA, 978 bp, Artificial Sequence
  derived and/or modified sequence
atagccacggtaacggcggggtggaaagctaaggcctttgaagacctgggaccccgtagtttcgggagagggtttttggctttcatcgctttttctacatgtttttagcctcaccagaagtctttcatctcggtggtccaactcaggatctcagcctcattattttcttacccttctggagtgcatatgtgcctttacagtttctgtttgcaaacgctgtctagcatactaagaggatgttagcaaacctgttccatggacactaaatggcagttgtacatctcccctcatcagtcatagtgacaaccagaaatgccctccatattttccagtgatcccagtcttcaatgcgtctgtctcataatttgtaaacgtttattatcttgaagtcattgttaatctgtggtgaaaagtaattgctaaatagaaattctgagaagaaaaaggcctcatccttttcacatgatgtaggaaggtctgttgcatgagcaatgggaaatccagaaaacatagaagatgcatatgttgctgttattcgtccaaagaatactgccagtctcaattctcgggaatacagagctaagtcatatgaaattttgttgcatgaagttcccattgaaggacagaaaaaaaagagaaagaaagttttattggaaacgaaacttcaaggcaacagtgaaataacacaaggcatattggattacgtagtagaaaccaccaaaccaatttctcctgcaaaccagggtatcagaggaaaacgagttgtactaatgaaaaaatttcctctggatggagagaagatgggcagagaagcatcattatttattgttccatcagttgtcaaagataatactaaatacacatataccccaggatgcccaattttttactgcttacaagatattatgcgagtctgtagtgaatccagtactcattttgctacacttacagcaaggatgttaatagccttggataagt

SEQ ID NO: 25580 - DNA, 1472 bp, Artificial Sequence
  derived and/or modified sequence
gtctcctagtcgcctgccaccagcccctgagagactgcaggtccagtgaaaaggagcaggaacggcagcagcccggccgccgacccggaagctctttcaccgccaaccgcgaggctgcaaagggtgtgaacccggaagcgatttcatagccacggtgactgtcccacccatttagttgaatgtagcggccagagaggcactcgcggcagcccgtacgggtgggacctctcggtgtccttcgggaaacaggaggagcaagttcgactccagcgagggaaaacggaggtgggagactgaaccatctccacatctagttgccccaggtttttggctttcatcgctttttctacatgtttttagcctcaccagaagtctttcatctcggtggtccaactcaggatctcagcctcattattttcttacccttctggagtgcatatgtgcctttacagtttctgtttgcaaacgctgtctagcatactaagaggatgttagcaaacctgttccatggacactaaatggcagttgtacatctcccctcatcagtcatagtgacaaccagaaatgccctccatattttccagtgatcccagtcttcaatgcgtctgtctcataatttgtaaacgtttattatcttgaagtcattgttaatctgtggtgaaaagtaattgctaaatagaaattctgagaagaaaaaggcctcatccttttcacatgatgtaggaaggtctgttgcatgagcaatgggaaatccagaaaacatagaagatgcatatgttgctgttattcgtccaaagaatactgccagtctcaattctcgggaatacagagctaagtcatatgaaattttgttgcatgaagttcccattgaaggacagaaaaaaaagagaaagaaagttttattggaaacgaaacttcaaggcaacagtgaaataacacaaggcatattggattacgtagtagaaaccaccaaaccaatttctcctgcaaaccagggtatcagaggaaaacgagttgtactaatgaaaaaatttcctctggatggagagaagatgggcagagaagcatcattatttattgttccatcagttgtcaaagataatactaaatacacatataccccaggatgcccaattttttactgcttacaagatattatgcgagtctgtagtgaatccagtactcattttgctacacttacagcaaggatgttaatagccttggataagtggttagatgaacgtcatgcacaatctcactttattccagctttattccgaccttctcctcttgagcggataaaaactaatgtcataaatcctgcatatgctactgaatcaggtcagacagaaaactcactacatatgggctatagtgcactagaaataaagagtaaaatgttagccctagagaaagcagatacctgtatttacaaccctttgtttggatcagatcttcagtatacaaatcgg

SEQ ID NO: 25581 - DNA, 507 bp, Artificial Sequence
  derived and/or modified sequence
gcaaagggtgtgaacccggaagcgatttcatagccacggtttttggctttcatcgctttttctacatgtttttagcctcaccagaagtctttcatctcggtggtccaactcaggatctcagcctcattattttcttacccttctggagtgcatatgtgcctttacagtttctgtttgcaaacgctgtctagcatactaagaggatgttagcaaacctgttccatggacactaaatggcagttgtacatctcccctcatcagtcatagtgacaaccagaaatgccctccatattttccagtgatcccagcaatgggaaatccagaaaacatagaagatgcatatgttgctgttattcgtccaaagaatactgccagtctcaattctcgggaatacagagctaagtcatatgaaattttgttgcatgaagttcccattgaaggacagaaaaaaaagagaaagaaagttttattggaaacgaaacttcaaggcaacagtgaaataacaca

SEQ ID NO: 25582 - DNA, 2067 bp, Artificial Sequence
  derived and/or modified sequence
atgggcaaccccgagaacatcgaggacgcctacgtggccgtgatccgccctaagaatacagcctctctgaactcaagagagtatcgcgccaaatcctatgagatactccttcacgaagtaccaatcgagggacagaagaagaagagaaaaaaagtattactggaaacgaagctgcaaggcaattcagagattacacagggcatcctcgactatgtcgttgagaccactaagccgataagcccagctaatcaggggataagggggaaaagggtcgttttaatgaaaaagtttccgctggatggcgaaaagatgggaagggaagcttctttgttcatcgttccatcagtggtgaaagataatactaaatatacctacacaccaggatgccccatattctattgcctccaagacatcatgcgcgtgtgttcagaatcttccacacactttgccacactgacagctaggatgctcatcgcccttgacaaatggttggatgagagacatgcccaaagtcacttcattcctgcactctttcgaccttctccactggaacggatcaagaccaacgtgataaatcctgcctacgccacggagagtggtcagacagagaattccctgcacatggggtactcagcacttgaaatcaaatccaagatgttagccctggaaaaagctgacacctgcatctacaacccactctttgggtcagacctgcagtacaccaaccgcgtggacaaggttgtcataaatccatattttgggcttggggctccagattattccaagattcaaatccctaagcaagaaaaatggcaacgatccatgtcaagcgtgaccgaggacaagtatgggaaggtggaggctacccgcatactgttggagaaagggaaatgtaacccgaatctgttaaacggtcagctaagttcccctctgcactttgccgctggcggagggcacgccgagatcgtgcagattctgttaaaccatcccgaaacggacagacacattaccgatcaacagggcaggagccccctgaacatttgtgaagagaacaagcagaataactgggaggaagctgccaaactgctaaaggaggccattaataagccttacgagaaggtccgtatctaccggatggacgggagctaccggagcgtggaactgaagcacggaaataataccactgttcagcagatcatggaaggaatgcgtctgagccaggagacacagcagtactttaccatctggatttgtagcgagaacttatcccttcaacttaagccctatcataagccactgcaacacgttagggattggcccgagatccttgcagagttaacaaatctggacccgcaaagagaaactccgcagctattcttgagaagggacgtgcgtctgcctttggaggtggagaaacaaatcgaggatcctttagctattttgatcctattcgacgaggcaaggtacaatctgttgaaaggcttctacaccgcccccgacgccaagcttatcacccttgcctcgctccttttgcagatcgtgtatgggaactatgaatccaagaagcacaaacagggcttcttgaacgaggagaatctcaaaagtattgtaccagtgacaaagttgaagtctaaggcaccgcactggaccaacaggatactgcatgagtacaagaacctttccaccagtgagggtgtgtccaaagaaatgcaccacctccagagaatgttcctgcaaaattgctgggagatacctacctatggagcagccttcttcactgggcagatcttcactaaggcctccccttctaatcacaaggtcattccagtgtatgtcggtgttaatattaagggcctgcacctgctgaatatggagaccaaggcactcctgatcagtctcaagtatggatgcttcatgtggcagctgggtgacaccgatacctgttttcagatacacagtatggagaataaaatgtcctttattgtccatacaaagcaggcaggcctggtagtaaagctgttaatgaaactgaacgggcaattgatgcccactgagagaaactcctag

SEQ ID NO: 25583 - DNA, 210 bp, Artificial Sequence
  derived and/or modified sequence
atgggcaaccccgagaacatcgaggacgcctacgtggccgtgatcagacccaagaatacagcttctctgaactcccgggagtaccgagccaaatcttacgaaatattattgcacgaagtccctattgaaggccagaagaaaaagcgaaaaaaggtgctcctggagacgaagcttcagggaaattctgagattacacagggaattctgtag

SEQ ID NO: 25584 - DNA, 297 bp, Artificial Sequence
  derived and/or modified sequence
atgggcaaccccgagaacatcgaggacgcctacgtggccgtgatccgccctaaaaacactgcgtctttgaatagccgcgagtatagggctaaatcatatgagatacttcttcacgaagtacccatagagggacagaaaaaaaaacgcaaaaaggtcctgctggagacaaagctgcagggcaactccgagatcactcagggaatccttgattacgtggtggaaacgactaaacccatttcacccgccaatcagggaatacggggaaaaagggtggtgctgatgaaaaagttcccctag

SEQ ID NO: 25585 - DNA, 555 bp, Artificial Sequence
  derived and/or modified sequence
atgggcaaccccgagaacatcgaggacgcctacgtggccgtgatcagacccaaaaatacagccagtttaaacagccgcgagtatcgggcgaaatcctacgagatccttcttcatgaggttcccatagaaggccaaaaaaagaaacgaaaaaaggtgctgctggagactaaactccagggcaattctgagatcacgcaaggaatcctggactatgtggttgaaacgacgaaacccatcagtcccgccaatcaaggcatcagggggaagagagtggtgctcatgaagaagtttcctctcgacggagagaaaatgggcagagaggcctcgctattcattgtcccttccgttgtgaaagacaataccaagtatacatataccccgggttgccctattttctactgcctgcaagacattatgcgggtgtgcagcgagagttctacgcacttcgctactctgaccgcccgaatgctgatcgctttagacaaatggctggatgaacggcatgcccagtcacatttcatcccggccctcttcaggccgagcccgctcgaatag

SEQ ID NO: 25586 - DNA, 339 bp, Artificial Sequence
  derived and/or modified sequence
atgggcaaccccgagaacatcgaggacgcctacgtggccgtgatcagacctaaaaatactgcgtctctgaattcccgcgagtatagggctaagagttacgaaatcctgcttcacgaagtgcccatcgaaggccagaaaaaaaagcggaaaaaggtgctcctcgaaacaaagctacaaggcaactccgagattacacaggggattttggattatgtggtggagactaccaagcccatctcgccagcaaatcagggcatacgcgggaagagggtggtgctcatgaagaaattcccccttgacggcgagaaaatgggaagagaggccagcctgtttatctag

SEQ ID NO: 25587 - DNA, 177 bp, Artificial Sequence
  derived and/or modified sequence
atgggcaaccccgagaacatcgaggacgcctacgtggccgtgatccggcccaaaaacaccgctagcttaaattctagagaatatcgtgctaaatcatacgaaattttactccatgaagtgccgattgaggggcagaagaaaaagcggaaaaaggtgttactcgaaacaaagctatag

SEQ ID NO: 25588 - DNA, 489 bp, Artificial Sequence
  derived and/or modified sequence
atgggcaaccccgagaacatcgaggacgcctacgtggccgtgatccggcctaagaatacggctagtctgaacagccgggagtaccgcgccaagagttatgagattttactccacgaggttcctattgaagggcagaagaagaagagaaagaaggttttactggagacaaagctgcaaggaaactcagagatcactcagggcattctcgattatgttgtggaaacaacaaaacctatttctcctgctaatcaggggatccgaggcaagcgcgtggtcctgatgaaaaaatttcctcttgacggggagaagatgggccgggaagcctccctgtttatcgtgccaagcgtggtaaaggataacactaagtatacatacacaccgggatgtcctatcttctattgcctacaggatattatgcgggtgtgttcagagtcctcgacacattttgccacgctgactgcccgaatgctaatcgctctggacaagtag

SEQ ID NO: 25589 - DNA, 732 bp, Artificial Sequence
  derived and/or modified sequence
atgggcaaccccgagaacatcgaggacgcctacgtggccgtgatcaggcctaaaaacaccgcatccctcaacagccgggaatacagagcgaaatcctacgaaattctattgcatgaggttcctatcgaagggcaaaaaaagaaacggaaaaaggttctactggagacaaaattgcaaggcaatagtgagatcacacagggcattctcgactatgtcgtggagacgaccaaacccatctcccccgctaatcaggggattaggggcaagagggtcgtgctgatgaagaagtttcctttggacggagaaaagatggggagggaagccagcctgtttattgtccctagtgtcgtaaaggacaatacaaagtacacttacacccccggctgccccatattttactgcctccaggatatcatgcgagtgtgtagcgagtcatctactcactttgccactctgaccgctcgcatgttaatcgccctcgacaagtggctggacgagcggcacgcccagtcacactttattcctgcactttttcggccatccccacttgagcgcattaaaacaaacgtgattaatccggcatatgccacagaatccggacaaacagagaactctcttcacatgggttactcagccctggaaattaagagcaagatgttagccctcgaaaaagccgacacatgtatatacaaccctctgtttggcagcgacttgcagtatacgaataggtag

SEQ ID NO: 25590 - DNA, 198 bp, Artificial Sequence
  derived and/or modified sequence
atgggcaaccccgagaacatcgaggacgcctacgtggccgtgatccgcccaaaaaacactgcgtctctgaattcacgggaataccgggcaaagtcatacgagattctcctgcatgaggtacccattgagggacagaagaaaaagaggaagaaagttttgctagaaacgaaactgcaaggcaacagcgagatcacctag

SEQ ID NO: 25591 - DNA, 2067 bp, Artificial Sequence
  derived and/or modified sequence
atgggaaatccagaaaacattgaagacgcatacgtggccgtcattcgccctaaaaacacggcatcacttaactcacgcgaatatagagcaaaaagctacgaaatacttctccatgaggtgcccattgagggccagaagaagaaacgtaaaaaagtgttgctggaaacaaaattgcagggaaattcagaaattacacaggggattctggactatgtagttgagacgactaaacctataagcccggctaatcagggcatcaggggcaagcgggtggttctgatgaaaaaattccctctcgacggcgaaaagatgggacgggaagcctcgctgtttattgtaccatctgttgtcaaagacaatactaagtacacctataccccagggtgtccaatcttctactgtctacaagatattatgagagtctgcagtgaatcttctacgcactttgccacattaaccgctagaatgttgatcgctctggataaatggctcgatgaacggcacgcccaaagtcacttcatcccggcattattccggccatctcctcttgagaggattaagaccaatgtcatcaaccccgcttacgctaccgaaagcggccaaactgaaaatagcctgcatatgggctactctgccctcgaaattaagtccaaaatgttggccctggagaaagctgacacctgtatctataatcccctctttggatcagacctgcagtatacaaaccgagtggataaggttgtcattaacccctacttcggattgggtgctcctgactatagcaagatccaaatcccaaagcaagagaagtggcagcgttcgatgtcatcggtgaccgaagacaaatacggtaaggtggaggccaccagaattctcctagaaaagggaaaatgcaatcctaatttattgaacgggcaactatccagccccctccattttgcagccggaggcggtcacgccgagatcgtgcaaatactgctaaaccaccctgagaccgaccgacacataactgaccagcagggccgatcccctcttaatatctgtgaagagaataaacaaaataactgggaagaggccgcaaagctattgaaggaagccatcaataaaccctatgaaaaggttcgtatctaccgaatggatggaagctacaggtccgtcgagttgaaacacgggaacaatacaacggtgcaacagattatggagggaatgcggctatcgcaggaaacacagcaatactttacaatttggatttgtagtgaaaatctctccctgcagcttaagccataccataaaccattgcagcatgttagagactggcccgagatcctggccgagcttaccaacctagatccccagcgcgaaactcctcagctgtttctccggcgtgatgtccgcctcccccttgaggtagagaagcaaatcgaggaccctcttgccattctgattcttttcgacgaggcgagatacaatttattgaaaggcttttatactgcacctgatgctaagctgatcactctagcaagcctactcctccagattgtttacgggaattacgaatccaaaaagcacaagcagggatttctgaacgaagagaatctcaagtctatcgtgcccgtcaccaagctcaaatctaaggccccacactggaccaaccggatcctgcacgagtacaagaatttgtccacctctgagggcgtttccaaagaaatgcaccacctgcaaagaatgtttctgcagaactgttgggaaattccaacgtatggcgctgcttttttcacaggtcagatcttcacgaaggcctctcccagtaaccataaagttattcccgtgtatgtgggtgtcaatatcaagggcttgcacctcctcaatatggagacaaaggcactcttgatttccttaaagtatggttgcttcatgtggcaacttggcgacaccgatacctgctttcagattcattctatggagaataagatgtcttttatcgttcacacgaagcaggcaggacttgtggtaaagttgctcatgaagttaaacggccagctgatgccaaccgagcggaactcttag

SEQ ID NO: 25592 - DNA, 210 bp, Artificial Sequence
  derived and/or modified sequence
atgggaaaccctgagaatattgaagatgcgtatgtggccgtgataaggccgaagaatacagcttcactgaattctagagagtatagggccaagtcttatgaaattctgcttcacgaggtgcctatcgaaggacaaaagaagaaaagaaagaaggtccttctggagaccaaactgcagggcaactcagagatcacccagggcatcctttag

SEQ ID NO: 25593 - DNA, 297 bp, Artificial Sequence
  derived and/or modified sequence
atgggcaatccagaaaacatcgaggacgcatacgtcgccgtgatccgcccaaagaacaccgcgtctctgaattctagagagtaccgtgctaagtcctatgaaattctcctacacgaggttccgatcgagggacagaaaaagaagcggaagaaggtactgcttgagactaagctccaggggaacagcgaaatcactcagggcattcttgactatgtagtggaaactacaaagccgatctctcctgcaaatcaaggaattaggggaaaaagggtagtgctcatgaagaaattcccttag

SEQ ID NO: 25594 - DNA, 555 bp, Artificial Sequence
  derived and/or modified sequence
atggggaatcctgagaacatagaagacgcatatgtggccgtgatccgcccaaaaaacacggcctctctgaactctagagagtaccgggcaaagagctatgagatactcttgcatgaagtgccaattgaaggtcaaaagaagaaaagaaagaaggtcctcctggaaacaaagctgcagggcaacagcgaaatcacccaggggatcctcgattacgttgtcgaaactaccaagccaatcagccccgcaaatcagggaataaggggcaaaagagtcgttcttatgaaaaaattcccactggacggagagaaaatgggtagagaggctagcctgttcatcgtcccaagcgtggtcaaagataataccaagtacacatatactcctggatgcccaattttctactgtcttcaagacattatgagagtgtgctccgagtcctcgactcacttcgctacattaaccgccaggatgttgatcgccttagataagtggctcgacgaacggcacgcccagagccatttcattccagccctttttagaccgtccccattagagtag

SEQ ID NO: 25595 - DNA, 339 bp, Artificial Sequence
  derived and/or modified sequence
atgggtaaccccgaaaacattgaagatgcatatgtcgcagtgattcggccaaagaacaccgcatcattaaatagcagggagtaccgtgcaaaatcatacgagattctgctgcacgaggtcccaatagagggccaaaaaaagaaacgcaaaaaggtgctgctggaaaccaagttgcaggggaacagcgagattacccaggggatcctggattacgtggtcgagactactaaacctatctctcccgctaaccaaggaattaggggcaagcgtgtggtgctgatgaaaaagtttccactcgatggagaaaaaatgggcagagaagcatcgctgtttatatag

SEQ ID NO: 25596 - DNA, 177 bp, Artificial Sequence
  derived and/or modified sequence
atgggaaatccagaaaatatcgaggatgcctacgtggcagtgataaggcccaagaacacagcatctttgaactccagagagtatcgtgccaaatcgtacgaaatcctgctccatgaggttcccatcgagggccagaagaaaaagaggaaaaaagtcttgcttgagaccaaactttag

SEQ ID NO: 25597 - DNA, 489 bp, Artificial Sequence
  derived and/or modified sequence
atgggtaaccctgagaatattgaagatgcctatgttgcagttattcgacctaaaaacaccgcaagcctcaactcaagagagtacagagcaaaaagttatgagattttgctccatgaggtgcccattgaagggcagaagaagaaacgcaagaaggttctcctcgaaacgaaactacagggaaactcagagattacccagggcatcctggactacgttgttgagaccactaagccgatatccccggctaatcagggaatcaggggcaaacgggtcgttctcatgaaaaagttccctctcgacggagaaaagatggggagggaagcctcccttttcattgtaccttctgtagtgaaagacaatactaagtacacatacactccgggatgcccgatcttctactgcttgcaagacataatgagggtgtgtagcgagagctcaacccacttcgccaccctgaccgctagaatgctcattgctctggacaagtag

SEQ ID NO: 25598 - DNA, 732 bp, Artificial Sequence
  derived and/or modified sequence
atgggaaatccagaaaatatcgaggatgcctacgtcgcggtaatccgtcctaaaaatactgcaagtctcaatagtagagagtacagagccaaaagttacgaaatcctcctacacgaagttcccattgaggggcagaaaaagaagagaaagaaagttctcctggagacaaaacttcaggggaactctgaaatcacccaagggatcctcgactacgtcgttgaaaccactaagcctatctctcctgccaaccagggcattaggggaaaacgcgtggtccttatgaaaaaattcccgctggatggcgagaagatggggagggaggcctcactgttcattgttccttccgtggtgaaggataataccaaatatacatacacccctggctgtcctatcttctattgtttgcaagacatcatgcgggtgtgctcagaaagcagtacacacttcgcaacccttacagctaggatgctcattgcccttgataagtggctcgatgaaaggcacgcccagtctcattttattccagctctattcagaccctcccctctcgagaggattaagactaacgtgattaaccctgcctatgccacagaatccgggcaaaccgaaaattccctacacatggggtatagcgccctggagatcaagtccaagatgctggcactggagaaagccgacacctgcatttataatcctttgttcggtagtgatctgcagtacacaaatcgctag

SEQ ID NO: 25599 - DNA, 198 bp, Artificial Sequence
  derived and/or modified sequence
atgggtaaccctgagaatatagaggacgcctatgtggccgtgatccgcccaaagaatacagcgtccttgaacagccgcgagtaccgtgccaaaagttacgaaatcctgctccacgaggtgccaattgaagggcagaaaaaaaaaagaaaaaaagtacttctggagaccaaactgcaggggaatagtgaaatcacatag

SEQ ID NO: 25600 - DNA, 282 bp, Artificial Sequence
  derived and/or modified sequence
atgagcgagcacgtgaccagaagccagagcagcgagagaggcaacgaccaggagagcagccagcccgtgggccccgtgatcgtgcagcagcccaccgaggagaagagacaggaggaggagccccccaccgacaaccagggcaccgacgtggaggccttccagcaggagctggccctgctgaagatcgaggacgcccccggcgacggccccgacgtgagagagggcaccctgcccaccttcgaccccaccaaggtgctggaggccggcgagggccagctgtag

SEQ ID NO: 25601 - DNA, 333 bp, Artificial Sequence
  derived and/or modified sequence
atgagcgagcacgtgaccagaagccagagcagcgagagaggcaacgaccaggagagcagccagcccgtgggccccgtgatcgtgcagcagcccaccgaggagaagagacaggaggaggagccccccaccgacaaccagggcatcgcccccagcggcgagatcaagaacgagggcgcccccgccgtgcagggcaccgacgtggaggccttccagcaggagctggccctgctgaagatcgaggacgcccccggcgacggccccgacgtgagagagggcaccctgcccaccttcgaccccaccaaggtgctggaggccggcgagggccagctgtag

SEQ ID NO: 25602 - DNA, 282 bp, Artificial Sequence
  derived and/or modified sequence
atgagcgaacatgtcaccagatcacagtcctccgaaagaggcaatgatcaggagagttctcagcctgtgggaccggtcatagtacaacagcctaccgaggaaaaaagacaggaggaagagcctcccaccgataatcaaggaacagacgtcgaagcgtttcagcaagaactcgcgctgctgaaaattgaagatgcgccaggtgatggcccggacgttcgggaaggaacgctgcctacttttgaccctacaaaagtgctggaggccggagaaggccaattatag

SEQ ID NO: 25603 - DNA, 333 bp, Artificial Sequence
  derived and/or modified sequence
atgagtgaacacgtgacacgctctcagtcgtctgaaaggggaaatgatcaagagagttcccagcctgtgggacctgtgattgtccagcagccaacagaagagaaacgccaggaagaagaaccacccactgacaatcagggcattgcaccctccggcgaaatcaaaaacgagggcgcccctgctgtccagggaacagacgtcgaagctttccagcaggagctggcccttctgaagattgaagacgctcccggagacgggccagatgttcgcgaagggacgctccctacattcgacccaacgaaggtcctcgaagctggggagggacagctttag

SEQ ID NO: 25604 - DNA, 282 bp, Artificial Sequence
  derived and/or modified sequence
atgtctgagcacgtgaccaggagccagagcagcgagagaggaaatgaccaggagagcagccagcctgtgggccctgtgattgtgcagcagcccacagaggagaagaggcaggaggaggagcccccaacagacaaccagggcacagatgtggaggccttccagcaggagctggccctgctgaagattgaagatgcccctggagatggcccagatgtgcgggagggcaccctgcccacctttgaccccaccaaggtgctggaggccggggagggccagctgtag

SEQ ID NO: 25605 - DNA, 333 bp, Artificial Sequence
  derived and/or modified sequence
atgtctgagcacgtgaccaggagccagagcagcgagagaggaaatgaccaggagagcagccagcctgtgggccctgtgattgtgcagcagcccacagaggagaagaggcaggaggaggagcccccaacagacaaccagggcatcgcccccagcggggagatcaagaatgaaggagccccagctgtgcagggcacagatgtggaggccttccagcaggagctggccctgctgaagattgaagatgcccctggagatggcccagatgtgcgggagggcaccctgcccacctttgaccccaccaaggtgctggaggccggggagggccagctgtag

SEQ ID NO: 25606 - DNA, 282 bp, Artificial Sequence
  derived and/or modified sequence
atgagcgagcacgtgacccggagccagagcagcgagcggggcaacgatcaagaatcttctcagccagtcggaccagtgatcgtgcagcagccaactgaggagaagcggcaggaagaagagcctccaaccgataatcagggaacagatgtcgaggcctttcagcaggaactagccctgctgaagatcgaagacgcaccaggagatggccccgacgttagagaaggaacactcccaactttcgacccaacaaaggtgctggaagccggggaaggacagctttag

SEQ ID NO: 25607 - DNA, 333 bp, Artificial Sequence
  derived and/or modified sequence
atgagcgagcacgtgacccggagccagagcagcgagcggggcaacgatcaagaatcatcacaaccagtcgggccggttatcgtgcagcagcccacagaggagaagcgccaagaggaggagccccctaccgataaccaagggattgcacctagcggggaaatcaaaaatgagggggcaccagccgttcagggaaccgacgtggaagccttccagcaggaattagccctgcttaagatagaggatgctcctggcgatgggcctgacgtacgcgaaggcactctgccgacgtttgaccccacgaaagttctggaggcgggggagggacagctgtag

SEQ ID NO: 25608 - DNA, 282 bp, Artificial Sequence
  derived and/or modified sequence
atgtcagagcacgtgacaaggagccagagctctgagcggggaaacgaccaggagtcatcccagccagtaggccctgtgatcgtgcagcaacccacagaagaaaaaagacaggaggaggagccgccaactgacaatcaggggaccgacgtggaagccttccagcaggagctagccctcctgaagatcgaggatgcgcctggggacgggccagacgtccgagaaggtacactacccacattcgaccctactaaggtgctggaggcaggcgaaggtcagctctag

SEQ ID NO: 25609 - DNA, 333 bp, Artificial Sequence
  derived and/or modified sequence
atgagcgagcacgttacgcgcagtcagagtagcgagcgaggaaacgatcaagagtcatcccaacccgtgggccctgttattgtgcagcaaccaaccgaggaaaagcggcaggaggaagagcctccaaccgacaaccagggaattgctcccagcggagagatcaagaatgaaggcgctccggctgtgcagggcaccgatgtcgaagcctttcaacaggaactggccctgcttaagattgaggatgcacccggagacggtcccgatgtgcgggagggcactttgcccaccttcgacccaacgaaagttttagaggcgggtgaagggcagctgtag

SEQ ID NO: 25610 - protein, 539 aa, Artificial Sequence
  derived and/or modified sequence
MAELTVEVRGSNGAFYKGFIKDVHEDSLTVVFENNWQPERQVPFNEVRLPPPPDIKKEISEGDEVEVYSRANDQEPCGWWLAKVRMMKGEFYVIEYAACDATYNEIVTFERLRPVNQNKTVKKNTFFKCTVDVPEDLREACANENAHKDFKKAVGACRIFYHPETTQLMILSASEATVKRVNILSDMHLRSIRTKLMLMSRNEEATKHLECTKQLAAAFHEEFVVREDLMGLAIGTHGSNIQQARKVPGVTAIELDEDTGTFRIYGESADAVKKARGFLEFVEDFIQVPRNLVGKVIGKNGKVIQEIVDKSGVVRVRIEGDNENKLPREDGMVPFVFVGTKESIGNVQVLLEYHIAYLKEVEQLRMERLQIDEQLRQIGSRSYSGRGRGRRGPNYTSGYGTNSELSNPSETESERKDELSDWSLAGEDDRDSRHQRDSRRRPGGRGRSVSGGRGRGGPRGGKSSISSVLKDPDSNPYSLLDNTESDQTADTDASESHHSTNRRRRSRRRRTDEDAVLMDGMTESDTASVNENGLGKRCD

SEQ ID NO: 25611 - DNA, 2651 bp, Artificial Sequence
  derived and/or modified sequence
tttgcggttccaacatggcggagctgacggtggaggttcgcggctctaacggggctttctacaagggatttatcaaagatgttcatgaagactcccttacagttgtttttgaaaataattggcaaccagaacgccaggttccatttaatgaagttagattaccaccaccacctgatataaaaaaagaaattagtgaaggagatgaagtagaggtatattcaagagcaaatgaccaagagccatgtgggtggtggttggctaaagttcggatgatgaaaggagaattttatgtcattgaatatgctgcttgtgacgctacttacaatgaaatagtcacatttgaacgacttcggcctgtcaatcaaaataaaactgtcaaaaaaaataccttctttaaatgcacagtggatgttcctgaggatttgagagaggcgtgtgctaatgaaaatgcacataaagattttaagaaagcagtaggagcatgcagaattttttaccatccagaaacaacacagctaatgatactgtctgccagtgaagcaactgtgaagagagtaaacatcttaagtgacatgcatttgcgaagtattcgtacgaagttgatgcttatgtccagaaatgaagaggccactaagcatttagaatgcacaaaacaacttgcagcagcttttcatgaggaatttgttgtgagagaagatttaatgggcctggcaataggaacacatggtagtaacatccagcaagctaggaaggttcctggagttaccgccattgagctagatgaagatactggaacattcagaatctacggagagagtgctgatgctgtaaaaaaggctagaggtttcttggaatttgtggaggattttattcaggttcctaggaatctcgttggaaaagtaattggaaaaaatggcaaagttattcaagaaatagtggacaaatctggtgtggttcgagtgagaattgaaggggacaatgaaaataaattacccagagaagacggtatggttccatttgtatttgttggcactaaagaaagcattggaaatgtgcaggttcttctagagtatcatattgcctatctaaaggaagtagaacagctaagaatggaacgcctacagattgatgaacagctgcgacagattggttctaggtcttatagcggaagaggcagaggtcgtcggggacctaattacacctccggttatggtacaaattctgagctgtctaacccctctgaaacggaatctgagcgtaaagacgagctgagtgattggtcattggcaggagaagatgatcgagacagccgacatcagcgtgacagcaggagacgcccaggaggaagaggcagaagtgtttcagggggtcgaggtcgtggtggaccacgtggtggcaaatcctccatcagttctgtgctcaaagatccagacagcaatccatacagcttacttgataatacagaatcagatcagactgcagacactgatgccagcgaatctcatcacagtactaaccgtcgtaggcggtctcgtagacgaaggactgatgaagatgctgttctgatggatggaatgactgaatctgatacagcttcagttaatgaaaatgggctaggcaaaagatgtgattgaagagcatggtccttcagaaaaggcaataaacggcccaactagtgcttctggcgatgacatttctaagctacagcgtactccaggagaagaaaagattaataccttaaaagaagaaaacactcaagaagcagcagtcctgaatggtgtttcataaactgaagaagttcctagtttacagttcttttacattacatttacaatagtgcttgtacaagcttgccaaagatagaatatggatcgccagtctttacatcgcactttcagttcctccatttggaattcaaaaaggggagggatcctgaagaaatcatatgttaaacatactttgacacctactgtgttataaaatatatcatcagatgtgccttgagaatagtatatgtaacattaaaaaaaagttgctggctataggaaatgttattttgttttcaaaatatggcagagatggggggtggtgggtggggtgggatccctaacgtaatattctttatgaaagcattagctgcttttgttacatttttaatatgcaaccacttcttcacctgaggaaaactagaatgaaatgcagtctaaaatattttgcactgaattgtaatttcttcattagtttagtctggaaactggtctgttttaatgtgttttttaaatgctgtatgtagaggaaaatctgcagaccactggaatacatttgttaaactctcatctgcagggacactgggcgatacttggcagtgactgttctaccttgaggctttgtttggtttatttattaaagtgtacagtatttaaaaatcaaacatagctttagttaaaacactaagctgaattagtcatgtccattcagacataacctgaactactgaaaagatcaatttccagaaggtttattctgtataaactacatgttagtcttcagtagagtatcttttttttttccttttttttttttttatttcggttgtttgatgtgcaatatgtttttgtatgcaggtagtaaataaactttgatcttccatt

SEQ ID NO: 25612 - DNA, 1620 bp, Artificial Sequence
  derived and/or modified sequence
atggccgagcttacggtcgaggtaagaggcagtaatggagcgttctataaagggttcatcaaggacgtgcatgaggactcacttactgtagtgttcgagaacaattggcagccagagcggcaggtcccatttaatgaggtccgactaccaccaccacccgatatcaagaaggagatctccgagggcgacgaagtagaagtctactccagagccaatgaccaggaaccatgtggctggtggttagcgaaagtgcgcatgatgaagggcgagttctatgtgatagaatacgctgcctgtgacgccacctataatgagatcgtgaccttcgagcgccttagaccggtgaatcagaacaagaccgtcaagaaaaacacgttttttaagtgcactgtggacgttcccgaggacctccgagaggcttgtgccaacgagaacgcacacaaggacttcaagaaagccgtcggagcctgtagaatcttctatcatccggaaacaacacagctcatgatactgtcagccagtgaagcgactgttaagagggtgaacatcttatcagatatgcaccttaggtcaatccgcaccaagctgatgttaatgtcgaggaacgaggaagccactaaacacctagagtgcacaaagcaactggccgccgcattccacgaggaattcgtggtaagggaggatctgatgggacttgccattggtacacacggatcaaacatccagcaggctaggaaggtccctggggtgacggccatcgagctcgacgaagacaccggtacctttcggatctatggtgagtctgccgacgctgtcaaaaaggctcgagggttcctcgagtttgtagaggacttcatccaggtgccgcggaaccttgtcggcaaagtgattggaaagaatgggaaggtgatccaggagattgtggacaagagcggcgtcgtgagagtgagaatcgagggggataacgagaataagcttcccagggaggacggcatggtaccgttcgttttcgtgggcactaaggagtcaattggcaatgttcaagtgctgcttgagtatcatatcgcataccttaaagaagtcgagcagctgaggatggaaaggctccaaatagacgaacagctgcgccagatcggcagcaggagctactcgggccgtggcagaggaaggcggggcccgaattacacttccggctatggtactaactccgaattaagcaatccgtccgagaccgaaagcgaaaggaaggacgagctgtccgactggtccctggccggtgaggatgacagggactccagacatcagagggatagccgaagaaggccgggcggtcggggtcgcagtgttagtggaggacgcggccggggcggtccaagagggggcaagtcatcgatctcttctgtgttgaaagaccccgactccaacccatactccctactggacaatacagaaagtgatcagactgctgatactgacgcctccgaaagccaccatagcacaaatcgtaggagaagatctcgacgccgccgcactgatgaagacgccgttctgatggatggcatgacagagtccgatactgcgagtgttaatgaaaacggtctggggaagcggtgcgactag

SEQ ID NO: 25613 - DNA, 1620 bp, Artificial Sequence
  derived and/or modified sequence
atggccgagctgactgtggaggtgcggggcagcaatggagccttctacaagggcttcatcaaggatgtgcatgaggacagcctgactgtggtgtttgagaacaactggcagcctgagcggcaggtgcccttcaatgaggtgcggctgcccccacctccagacatcaagaaggagatcagtgaaggagatgaggtggaggtgtacagccgggccaatgaccaggagccctgtggctggtggctggccaaggtgaggatgatgaagggggagttctacgtgattgaatatgctgcctgtgatgccacctacaatgagatcgtgacctttgagcggctgcggcctgtgaaccagaacaagacagtgaagaagaacaccttcttcaagtgcaccgtggatgtgcctgaggacctgcgggaggcctgtgccaatgaaaatgcccacaaggacttcaagaaggctgtgggcgcctgccgcatcttctaccaccctgagaccacccagctgatgatcctgagcgccagcgaggccaccgtgaagagggtgaacatcctgagtgacatgcacctgcggagcatccgcaccaagctgatgctgatgagcagaaatgaggaggccaccaagcacctggagtgcaccaagcagctggccgccgccttccacgaggagtttgtggtgcgggaggacctgatgggcctggccatcggcacccacggcagcaacatccagcaggccaggaaggtgcctggggtgacagccatcgagctggatgaggacaccggcaccttccgcatctatggagagagcgcagatgctgtgaagaaggcccggggcttcctggagtttgtggaggacttcatccaggtgcccaggaacctggtgggcaaggtgattggcaagaatggcaaggtgatccaggagatcgtggacaagtctggagtggtgcgggtgcgcatcgagggggacaatgaaaacaagctgcccagagaagatggcatggtgccctttgtgtttgtgggcaccaaggagagcattggaaatgtgcaggtgctgctggagtaccacatcgcctacctgaaggaggtggagcagctgaggatggagcggctgcagattgatgagcagctgcggcagatcggcagccgcagctacagcggccggggccggggccggcggggccccaactacaccagcggctacggcaccaacagcgagctgagcaaccccagcgagacagaaagtgagaggaaggatgagctgagtgactggagcctggccggagaagatgaccgggacagccgccaccagagggacagcagaagaagacctgggggccggggccgctctgtgtctgggggccggggccggggcggcccccggggcggcaagagcagcatcagctctgtgctgaaggaccctgacagcaacccctacagcctgctggacaacacagaaagtgaccagacagctgacacagatgccagcgagagccaccacagcaccaacagaagaagaagaagcagaagaagaagaacagatgaagatgctgtgctgatggatggcatgacagaaagtgacacagcctctgtgaatgaaaatggcctgggcaagagatgtgactag

SEQ ID NO: 25614 - DNA, 1620 bp, Artificial Sequence
  derived and/or modified sequence
atggccgagctgaccgtggaggtgcggggcagcaacggcgccttctataaaggcttcatcaaggatgtgcatgaggattcactaaccgtggtattcgagaataattggcagccagagcggcaggtcccattcaacgaagtcagactgcctccgccccctgacatcaagaaggaaattagtgagggcgatgaagttgaggtgtattcacgcgccaatgatcaagagccatgcggctggtggttggctaaggttaggatgatgaaaggcgagttttacgtgattgaatatgcggcctgtgatgcaacctataacgaaatcgtgacattcgagcggctaaggccagtcaaccagaacaaaactgttaagaagaacacattcttcaaatgcaccgtggacgtccccgaggacctgagggaggcttgtgcaaatgagaatgctcataaggacttcaagaaggctgtgggtgcatgcaggatcttttaccaccctgaaactactcaactgatgatcctgagtgcctcggaagccaccgttaaaagggtcaacatcttgagcgacatgcatttgcgctctattcgtaccaagcttatgctgatgtctagaaatgaagaggcaacgaaacacttggaatgtaccaaacagctcgcggccgcttttcatgaagaatttgtggttcgtgaggacctgatgggcctagcaattggcactcatggttccaatattcagcaagcgagaaaggttcctggcgtaaccgccatcgagttagacgaagacaccgggaccttcaggatttacggtgaatcagctgacgcagtaaaaaaggcgcgcggtttcctggagttcgttgaagacttcattcaagtgcctcgcaacctggtcgggaaagtgataggtaaaaatggtaaagttattcaggagatcgtggataaaagtggcgtggtgagggtgagaattgagggggacaatgaaaataaactgccaagagaagatggcatggtcccttttgtgtttgtaggcactaaagaatcaatcggtaatgtgcaagtgctcttggaataccacattgcctaccttaaagaggtggaacaactaaggatggagagattgcagatcgatgaacaactgcggcagatcggatcaagatcatatagcgggagaggcagaggacgtagaggaccgaattacacctccggctatggcactaatagtgagttgagtaaccccagcgaaaccgagtcagagagaaaagatgagttatccgactggtcccttgcgggagaggatgacagagacagcagacatcaaagggactcgagacgacgaccgggagggaggggtcgtagtgtatctggcggacgaggaagggggggtcctcgcggcggaaaatcttctatttcttctgttttaaaagaccccgattctaacccctactcactcctagataacacagaatctgatcaaactgccgacactgacgcttcggagtctcatcattccactaacaggcggcgccgctcccgacgtcgtcgaacagatgaggatgctgtgctgatggacgggatgaccgagagtgatacggcatccgtgaatgagaacggcctgggcaagagatgcgactag

SEQ ID NO: 25615 - DNA, 1620 bp, Artificial Sequence
  derived and/or modified sequence
atggccgagctgacagtggaggtgcgaggctctaatggggctttctataagggtttcattaaagatgttcatgaggatagcctgacagtggtgttcgagaataactggcaacccgaaagacaagttcccttcaatgaagtaagattgccacctccccctgatatcaagaaagagattagtgaaggcgacgaagtggaggtgtactctcgagccaacgaccaagaaccttgcggctggtggctggcaaaggtaagaatgatgaagggggagttttacgtcatcgagtacgccgcttgcgatgccacctacaatgaaatagtcacgtttgaaaggctgcgaccagtcaaccagaacaaaactgtgaagaaaaatacattctttaagtgcactgtcgacgtgcccgaggatcttagggaggcatgtgcaaatgagaacgctcataaggacttcaaaaaagctgtgggagcctgccggatcttttatcaccccgagacaacccaactgatgatcctgagcgcaagcgaagcgactgtcaagagggtcaatatcttaagtgacatgcatcttcgctcaatccggaccaagctgatgctgatgagccggaacgaggaggcaaccaagcacctggaatgtaccaaacaactcgctgctgccttccacgaagaattcgtagttagggaggatctgatgggtctggctatcgggacccacgggtcgaatattcagcaggctaggaaggtgcccggagttacggccatcgagttggacgaggacacaggtacttttcgaatctacggagaatccgcggatgctgttaagaaagctaggggcttcctggaatttgttgaggattttatacaagtgcccagaaacctggtgggtaaagtgataggcaagaatgggaaagttattcaggagattgtggacaaatccggcgtggttagagttcgtattgaaggggacaacgagaacaaactccccagagaggatgggatggtgccctttgttttcgtgggtacgaaagaatccataggaaacgtccaggttctgctcgagtaccacatcgcatatttgaaggaggtggaacagctgcgcatggagcggctgcagattgacgagcagctaagacagattggatcacggagctatagcggccgagggaggggtcggcgtggaccaaactatacatcaggctacggaaccaatagcgagctgtcgaacccaagtgagactgagagtgagcgcaaagatgagctctctgattggtcgctcgccggagaggacgatagggatagtcgacatcagcgtgattctaggaggaggccaggcggtcgcggtagatctgtttccgggggaagaggcagagggggaccaagagggggaaagtccagtatcagctctgtgctcaaggacccggactctaatccttacagcttgctagacaataccgagtcagaccagaccgccgacaccgatgcatccgaaagtcatcatagcaccaatagaaggaggcgatcccgccgacgccgaacagatgaggacgccgtactgatggatggaatgacagaatccgacacggcttctgttaacgaaaacggcctcggtaagagatgcgattag

SEQ ID NO: 25616 - DNA, 1620 bp, Artificial Sequence
  derived and/or modified sequence
atggccgagctgaccgtggaggtgagaggcagcaacggcgccttctacaagggcttcatcaaggacgtgcacgaggacagcctgaccgtggtgttcgagaacaactggcagcccgagagacaggtgcccttcaacgaggtgagactgccccccccccccgacatcaagaaggagatcagcgagggcgacgaggtggaggtgtacagcagagccaacgaccaggagccctgcggctggtggctggccaaggtgagaatgatgaagggcgagttctacgtgatcgagtacgccgcctgcgacgccacctacaacgagatcgtgaccttcgagagactgagacccgtgaaccagaacaagaccgtgaagaagaacaccttcttcaagtgcaccgtggacgtgcccgaggacctgagagaggcctgcgccaacgagaacgcccacaaggacttcaagaaggccgtgggcgcctgcagaatcttctaccaccccgagaccacccagctgatgatcctgagcgccagcgaggccaccgtgaagagagtgaacatcctgagcgacatgcacctgagaagcatcagaaccaagctgatgctgatgagcagaaacgaggaggccaccaagcacctggagtgcaccaagcagctggccgccgccttccacgaggagttcgtggtgagagaggacctgatgggcctggccatcggcacccacggcagcaacatccagcaggccagaaaggtgcccggcgtgaccgccatcgagctggacgaggacaccggcaccttcagaatctacggcgagagcgccgacgccgtgaagaaggccagaggcttcctggagttcgtggaggacttcatccaggtgcccagaaacctggtgggcaaggtgatcggcaagaacggcaaggtgatccaggagatcgtggacaagagcggcgtggtgagagtgagaatcgagggcgacaacgagaacaagctgcccagagaggacggcatggtgcccttcgtgttcgtgggcaccaaggagagcatcggcaacgtgcaggtgctgctggagtaccacatcgcctacctgaaggaggtggagcagctgagaatggagagactgcagatcgacgagcagctgagacagatcggcagcagaagctacagcggcagaggcagaggcagaagaggccccaactacaccagcggctacggcaccaacagcgagctgagcaaccccagcgagaccgagagcgagagaaaggacgagctgagcgactggagcctggccggcgaggacgacagagacagcagacaccagagagacagcagaagaagacccggcggcagaggcagaagcgtgagcggcggcagaggcagaggcggccccagaggcggcaagagcagcatcagcagcgtgctgaaggaccccgacagcaacccctacagcctgctggacaacaccgagagcgaccagaccgccgacaccgacgccagcgagagccaccacagcaccaacagaagaagaagaagcagaagaagaagaaccgacgaggacgccgtgctgatggacggcatgaccgagagcgacaccgccagcgtgaacgagaacggcctgggcaagagatgcgactag

SEQ ID NO: 25617 - protein, 536 aa, Artificial Sequence
  derived and/or modified sequence
MMKGEFYVIEYAACDATYNEIVTFERLRPVNQNKTVKKNTFFKCTVDVPEDLREACANENAHKDFKKAVGACRIFYHPETTQLMILSASEATVKRVNILSDMHLRSIRTKLMLMSRNEEATKHLECTKQLAAAFHEEFVVREDLMGLAIGTHGSNIQQARKVPGVTAIELDEDTGTFRIYGESADAVKKARGFLEFVEDFIQVPRNLVGKVIGKNGKVIQEIVDKSGVVRVRIEGDNENKLPREDGMVPFVFVGTKESIGNVQVLLEYHIAYLKEVEQLRMERLQIDEQLRQIGSRSYSGRGRGRRGPNYTSGYGTNSELSNPSETESERKDELSDWSLAGEDDRDSRHQRDSRRRPGGRGRSVSGGRGRGGPRGGKSSISSVLKDPDSNPYSLLDNTESDQTADTDASESHHSTNRRRRSRRRRTDEDAVLMDGMTESDTASVNENGLVTVADYISRAESQSRQRNLPRETLAKNKKEMAKDVIEEHGPSEKAINGPTSASGDDISKLQRTPGEEKINTLKEENTQEAAVLNGVS

SEQ ID NO: 25618 - DNA, 1611 bp, Artificial Sequence
  derived and/or modified sequence
atgatgaagggggagttctatgtcattgagtacgcagcgtgcgacgctacctataacgagatcgtcactttcgagcgtcttcgacccgtcaatcagaataagactgtcaaaaagaacacttttttcaagtgtactgtagacgtccccgaggatctacgggaggcctgcgccaatgaaaatgcccataaagatttcaagaaagccgtcggcgcatgccgaattttctaccaccccgagactacccagttaatgattttaagtgcaagcgaagcaaccgtgaaacgcgtcaatatcctgagcgacatgcatctgaggagcatccgaactaagctgatgctcatgtctcgaaacgaagaggctacaaaacatctcgagtgcacaaagcagctggccgcggcattccacgaggagttcgtggtccgagaggatcttatgggcttggctattggaacccacggtagcaatatccagcaggccagaaaggtgccaggcgtcaccgccatagaactggacgaggacacggggacatttaggatatatggagagagcgctgacgccgtcaaaaaggccaggggcttcctcgagtttgtggaggattttatccaggtcccccggaaccttgtcggaaaagtgatcggcaagaacggcaaggtgattcaagaaatcgttgacaagagcggtgtggtcagagtaagaatagagggtgacaatgagaataagctgcccagggaagacggcatggtgccattcgttttcgttggcaccaaggagtcaattggaaatgtgcaagtcctgctggaataccacatcgcgtatttgaaggaggtcgagcagctccgaatggagcgactacagatcgacgaacagctaaggcagattggctctcgctcgtacagtggccgaggacgtggtcgccgcggccccaactatacaagcggatatggcaccaattccgaactgtctaacccttctgagaccgagtcggagagaaaggatgagctaagcgactggagcttggccggggaagatgacagggactctagacaccagcgcgacagtcgcaggaggccaggtgggagaggccgtagtgtgtcaggcggacggggccgaggcggaccacgcggcggcaagtctagtatcagttccgtactcaaggatcccgattctaacccttacagtctgctagacaatacggagagcgaccagaccgcggacacagatgcttctgagagccatcattcaacgaatagaaggcgccggtctcggaggcggcggacagatgaggatgcagtgctgatggatggcatgacagaaagcgacacagcatcagtgaatgagaacggcctagtgacagtggccgactatatctctagggcggaatcccagtcacgccagcgaaacctgccaagggaaaccctggcaaagaataagaaggaaatggcgaaagacgtgattgaagagcatggaccaagcgaaaaagccataaatggtcctactagtgctagcggagatgacatctctaaacttcaacggactcctggagaggaaaaaattaatactcttaaagaagagaatactcaagaggccgctgtgttgaacggcgtgtcatag

SEQ ID NO: 25619 - DNA, 1611 bp, Artificial Sequence
  derived and/or modified sequence
atgatgaagggggagttctacgtgattgaatatgctgcctgtgatgccacctacaatgaaattgtgacctttgagcggctgcggcctgtgaaccagaacaagacagtgaagaagaacaccttcttcaagtgcaccgtggatgtgcctgaggacctgcgggaggcctgtgccaatgaaaatgcccacaaggacttcaagaaggctgtgggcgcctgccgcatcttctaccaccctgagaccacccagctgatgatcctgagcgccagcgaggccaccgtgaagagggtgaacatcctgagtgacatgcacctgcggagcatccgcaccaagctgatgctgatgagcagaaatgaggaggccaccaagcacctggagtgcaccaagcagctggccgccgccttccacgaggagtttgtggtgcgggaggacctgatgggcctggccatcggcacccacggcagcaacatccagcaggccaggaaggtgcctggggtgacagccatcgagctggatgaggacaccggcaccttccgcatctacggggagagcgcagatgctgtgaagaaggcccggggcttcctggagtttgtggaggacttcatccaggtgcccaggaacctggtgggcaaggtgattggcaagaatggcaaggtgatccaggagatcgtggacaagagcggcgtggtgcgggtgagaattgaaggagacaatgaaaacaagctgccccgggaggatggcatggtgccctttgtgtttgtgggcaccaaggagagcattggaaatgtgcaggtgctgctggagtaccacatcgcctacctgaaggaggtggagcagctgaggatggagcggctgcagattgatgagcagctgcggcagatcggcagccgcagctacagcggccggggccggggcagaagaggccccaactacaccagcggctacggcaccaacagcgagctgagcaaccccagcgagacagagagcgagaggaaggatgagctgagtgactggagcctggccggggaggatgaccgggacagccgccaccagagggacagcagaagaagacctgggggccggggccgctctgtgtctgggggccggggccggggcggcccccggggcggcaagagcagcatcagctctgtgctgaaggaccctgacagcaacccctacagcctgctggacaacacagaaagtgaccagacagctgacacagatgccagcgagagccaccacagcaccaacagaagaagaagaagcagaagaagaagaacagatgaagatgctgtgctgatggatggcatgacagaaagtgacacagcctctgtgaatgaaaatggcctggtgacagtggccgactacatcagcagagctgagagccagagccggcagaggaacctgccccgggagaccctggccaagaacaagaaggagatggccaaggatgtgattgaggagcacggccccagcgagaaggccatcaatggccccaccagcgccagcggagatgacatcagcaagctgcagaggaccccaggagaggagaagatcaacaccctgaaggaggagaacacccaggaggccgctgtgctgaatggagtgtcctag

SEQ ID NO: 25620 - DNA, 1611 bp, Artificial Sequence
  derived and/or modified sequence
atgatgaagggcgagttctacgtgatcgagtacgccgcctgcgacgccacttacaatgagattgtaaccttcgagcgcctgcgccccgtgaaccaaaataagacagtcaagaaaaatacatttttcaagtgtaccgtggacgtgccggaagatctgcgggaagcctgtgctaatgagaacgcgcacaaggattttaagaaggcagtgggggcctgtagaatcttttaccaccccgagacaacccagctgatgattttatccgcttccgaggcaaccgtgaagcgtgtcaacatcctgagtgacatgcacctgcgctctattcggacgaaactcatgctcatgtcacgaaacgaggaggctacaaagcacctggagtgcactaagcagctggccgcggcttttcacgaagagtttgtagtgagggaggacttgatgggtctggctataggaacccacgggagcaacattcaacaggcccgcaaggtgcctggcgtaacagccattgagctggatgaagatacgggtactttcaggatctatggtgagagcgcagatgccgtaaaaaaagcccgcggcttcctggagttcgtggaggactttattcaggtgcccagaaacctcgttggaaaggtgatcggcaaaaacgggaaggtaattcaggaaattgtcgataaatccggagtggtgagggtgcgaattgaaggagacaacgagaacaagcttcccagagaggatggaatggtcccttttgtcttcgtaggcacaaaagaatctatcggcaatgttcaggttctgctagaatatcacatcgcttacctgaaagaggtggagcagctgcgtatggagaggctgcagatcgatgagcagctgcggcagattggctctaggtcctacagtggccggggacgtggcaggcgcggacccaactatacatcggggtacggaactaatagcgagttatcaaatcccagcgagacagaaagcgagagaaaggacgaactctctgattggtccttagccggtgaggatgatagagactcacgacatcagcgagactccaggcgaaggccaggggggagggggagatctgtgtctggcggacgaggccggggcggtccacgcggtggtaaaagttccattagctccgtgctgaaggaccctgactccaatccttactccctgctggataacacggaaagtgaccagacagcggacacagacgcttccgagagccaccatagtaccaataggcgccggcggtccagacggagacgtactgatgaggatgccgtcctaatggacggaatgacagaaagcgacactgcttccgtcaacgagaacggcctggtgacagtggcggactacatctcccgcgctgagtctcaatctcgtcagaggaacctgccaagagagactctggccaagaataagaaagagatggccaaggatgtcattgaagagcacgggccgtcagagaaagccatcaatggaccgacgagcgcatccggtgacgatatatccaaactgcagcgcacgccaggggaagaaaagataaacaccctgaaagaggaaaatacccaagaggcggccgttttgaacggtgttagttag

SEQ ID NO: 25621 - DNA, 1611 bp, Artificial Sequence
  derived and/or modified sequence
atgatgaagggagaattctatgtgatagaatacgccgcttgtgacgcaacctacaacgaaatagtaacgttcgagaggctccgacctgttaatcagaataagactgtcaagaagaacacattcttcaagtgcactgtggacgtgccagaagaccttcgcgaagcatgcgctaacgaaaatgcccacaaagattttaaaaaagctgtcggtgcttgcaggatcttctaccacccagaaaccacacagttaatgattctctcagcctctgaagccacggttaagcgcgtcaatatacttagcgatatgcatctgcggtccattcggacaaagcttatgttgatgagtcgcaacgaggaagccacaaaacacctggagtgtaccaagcagttggcagccgctttccacgaggagttcgttgttcgcgaggatttgatgggattggcaataggtacgcacggctcgaacatccagcaggctaggaaagttcctggagtcacagcaattgaactcgacgaggatactgggacctttcgaatctatggtgagtcagcagatgctgttaaaaaggcccgtgggtttttggaattcgtcgaagacttcatccaagtgccacggaatctggtcggcaaagtgattggaaagaacggcaaggttatccaagagatcgtcgacaagagtggtgtggtgagagtaagaattgaaggtgataatgagaataaattgcctagagaggacggtatggtgccgtttgtattcgtcgggaccaaggaatctatcggcaacgtgcaggtgttactcgagtaccatatcgcatatttgaaagaggttgagcagctccgaatggagaggttgcaaatagatgagcaattgagacagatcggaagccggtcctattcaggcagaggaagaggaaggagggggcctaactacaccagcgggtatggtacaaactccgagctaagcaatccaagtgagaccgagagtgagcggaaggacgaactgtccgactggagtctcgcgggagaagatgaccgcgactcgagacatcaacgcgactcccgcaggagacctgggggaaggggcagaagtgtcagtggagggagaggacgaggaggccctcgcggaggtaaatcttcaattagctcagttcttaaggatcccgatagcaatccctatagcctgctggataatacagagagcgatcagactgctgataccgacgcctctgagtctcaccactccactaaccggagacgccgtagccgtcgcaggcggactgatgaggatgcagtgttgatggacggaatgacggagagcgatactgcgtcagttaacgagaatgggctggtaaccgtggccgattacatttcccgggcagagagccaatccagacagcgcaatctgccccgagagacattggccaaaaacaagaaagagatggcaaaggacgtcatcgaggagcacggcccatctgaaaaggccataaatgggcctacaagcgcttcaggagacgacattagtaaacttcagcgcactccgggagaggaaaaaattaacacacttaaggaggaaaacacccaggaagccgctgtgctcaatggcgtgagctag

SEQ ID NO: 25622 - DNA, 1611 bp, Artificial Sequence
  derived and/or modified sequence
atgatgaagggcgagttctacgtgatcgagtacgccgcctgcgacgccacctacaacgagatcgtgaccttcgagagactgagacccgtgaaccagaacaagaccgtgaagaagaacaccttcttcaagtgcaccgtggacgtgcccgaggacctgagagaggcctgcgccaacgagaacgcccacaaggacttcaagaaggccgtgggcgcctgcagaatcttctaccaccccgagaccacccagctgatgatcctgagcgccagcgaggccaccgtgaagagagtgaacatcctgagcgacatgcacctgagaagcatcagaaccaagctgatgctgatgagcagaaacgaggaggccaccaagcacctggagtgcaccaagcagctggccgccgccttccacgaggagttcgtggtgagagaggacctgatgggcctggccatcggcacccacggcagcaacatccagcaggccagaaaggtgcccggcgtgaccgccatcgagctggacgaggacaccggcaccttcagaatctacggcgagagcgccgacgccgtgaagaaggccagaggcttcctggagttcgtggaggacttcatccaggtgcccagaaacctggtgggcaaggtgatcggcaagaacggcaaggtgatccaggagatcgtggacaagagcggcgtggtgagagtgagaatcgagggcgacaacgagaacaagctgcccagagaggacggcatggtgcccttcgtgttcgtgggcaccaaggagagcatcggcaacgtgcaggtgctgctggagtaccacatcgcctacctgaaggaggtggagcagctgagaatggagagactgcagatcgacgagcagctgagacagatcggcagcagaagctacagcggcagaggcagaggcagaagaggccccaactacaccagcggctacggcaccaacagcgagctgagcaaccccagcgagaccgagagcgagagaaaggacgagctgagcgactggagcctggccggcgaggacgacagagacagcagacaccagagagacagcagaagaagacccggcggcagaggcagaagcgtgagcggcggcagaggcagaggcggccccagaggcggcaagagcagcatcagcagcgtgctgaaggaccccgacagcaacccctacagcctgctggacaacaccgagagcgaccagaccgccgacaccgacgccagcgagagccaccacagcaccaacagaagaagaagaagcagaagaagaagaaccgacgaggacgccgtgctgatggacggcatgaccgagagcgacaccgccagcgtgaacgagaacggcctggtgaccgtggccgactacatcagcagagccgagagccagagcagacagagaaacctgcccagagagaccctggccaagaacaagaaggagatggccaaggacgtgatcgaggagcacggccccagcgagaaggccatcaacggccccaccagcgccagcggcgacgacatcagcaagctgcagagaacccccggcgaggagaagatcaacaccctgaaggaggagaacacccaggaggccgccgtgctgaacggcgtgagctag

SEQ ID NO: 25623 - protein, 328 aa, Artificial Sequence
  derived and/or modified sequence
MAHSKQPSHFQSLMLLQWPLSYLAIFWILQPLFVYLLFTSLWPLPVLYFAWLFLDWKTPERGGRRSAWVRNWCVWTHIRDYFPITILKTKDLSPEHNYLMGVHPHGLLTFGAFCNFCTEATGFSKTFPGITPHLATLSWFFKIPFVREYLMAKGVCSVSQPAINYLLSHGTGNLVGIVVGGVGEALQSVPNTTTLILQKRKGFVRTALQHGAHLVPTFTFGETEVYDQVLFHKDSRMYKFQSCFRRIFGFYCCVFYGQSFCQGSTGLLPYSRPIVTVVGEPLPLPQIEKPSQEMVDKYHALYMDALHKLFDQHKTHYGCSETQKLFFL

SEQ ID NO: 25624 - DNA, 987 bp, Artificial Sequence
  derived and/or modified sequence
atggcccacagcaagcagcccagccacttccagagcctgatgctgctgcagtggcccctgagctacctggccatcttctggatcctgcagcccctgttcgtgtacctgctgttcaccagcctgtggcccctgcccgtgctgtacttcgcctggctgttcctggactggaagacccccgagagaggcggcagaagaagcgcctgggtgagaaactggtgcgtgtggacccacatcagagactacttccccatcaccatcctgaagaccaaggacctgagccccgagcacaactacctgatgggcgtgcacccccacggcctgctgaccttcggcgccttctgcaacttctgcaccgaggccaccggcttcagcaagaccttccccggcatcaccccccacctggccaccctgagctggttcttcaagatccccttcgtgagagagtacctgatggccaagggcgtgtgcagcgtgagccagcccgccatcaactacctgctgagccacggcaccggcaacctggtgggcatcgtggtgggcggcgtgggcgaggccctgcagagcgtgcccaacaccaccaccctgatcctgcagaagagaaagggcttcgtgagaaccgccctgcagcacggcgcccacctggtgcccaccttcaccttcggcgagaccgaggtgtacgaccaggtgctgttccacaaggacagcagaatgtacaagttccagagctgcttcagaagaatcttcggcttctactgctgcgtgttctacggccagagcttctgccagggcagcaccggcctgctgccctacagcagacccatcgtgaccgtggtgggcgagcccctgcccctgccccagatcgagaagcccagccaggagatggtggacaagtaccacgccctgtacatggacgccctgcacaagctgttcgaccagcacaagacccactacggctgcagcgagacccagaagctgttcttcctgtag

SEQ ID NO: 25625 - DNA, 987 bp, Artificial Sequence
  derived and/or modified sequence
atggctcactctaaacaaccatcacacttccagagcctgatgctgctgcaatggcctctgagctatctggccattttttggatccttcagcccctgtttgtgtatctgctcttcacctccttatggcccctaccagtgctctattttgcatggctcttcctcgattggaagactccggagcggggcggtcgtcgtagtgcctgggtcaggaattggtgcgtatggacacacattcgggactatttcccgattactatactgaaaaccaaagatctctcccccgaacacaattacctcatgggggtgcacccacacggattgctgacctttggagccttttgcaacttctgtactgaggctaccgggttttcgaaaacttttccgggcattacgcctcacctggctactttgtcatggttcttcaaaatccctttcgtgagggagtatctcatggcaaaaggggtctgttccgtaagtcaacccgccatcaactatcttttatctcatgggacaggtaatctagttggcatcgtggttggcggcgtaggcgaagctctacagagcgtgcccaacactaccactctgatcctccagaagcgtaagggctttgtacgcacggcgctccagcacggtgcgcacctagtgcctactttcactttcggcgagactgaggtctatgaccaggtcctcttccataaagatagcagaatgtataaatttcagtcttgctttcgacgaatcttcggattttactgctgtgttttttatggacaatccttctgccagggctctacagggctgttaccatactctcgtcccatcgtaaccgtggtcggggaacctttaccactccctcagatcgagaagcccagtcaggagatggttgacaagtaccatgccctgtatatggatgcactgcacaagctcttcgaccagcacaaaactcattacgggtgctcagaaacacagaagctatttttcctctag

SEQ ID NO: 25626 - DNA, 1365 bp, Artificial Sequence
  derived and/or modified sequence
actgttctgagatctttgcctccctcaggctcccgagaatcatggctcattccaagcagcctagtcacttccagagtctgatgcttctgcagtggcctttgagctaccttgccatcttttggatcttgcagccattgttcgtctacctgctgtttacatccttgtggccgctaccagtgctttactttgcctggttgttcctggactggaagaccccagagcgaggtggcaggcgttcggcctgggtaaggaactggtgtgtctggacccacatcagggactatttccccattacgatcctgaagacaaaggacctatcacctgagcacaactacctcatgggggttcacccccatggcctcctgacctttggcgccttctgcaacttctgcactgaggccacaggcttctcgaagaccttcccaggcatcactcctcacttggccacgctgtcctggttcttcaagatcccctttgttagggagtacctcatggccaaaggtgtgtgctctgtgagccagccagccatcaactatctgctgagccatggcactggcaacctcgtgggcattgtagtgggaggtgtgggtgaggccctgcaaagtgtgcccaacaccaccaccctcatcctccagaagcgcaaggggttcgtgcgcacagccctccagcatggggctcatctggtccccaccttcacttttggggaaactgaggtgtatgatcaggtgctgttccataaggatagcaggatgtacaagttccagagctgcttccgccgtatctttggtttctactgttgtgtcttctatggacaaagcttctgtcaaggctccactgggctcctgccatactccaggcctattgtcactgtggttggggagcctctgccactgccccaaattgaaaagccaagccaggagatggtggacaaataccatgcactttatatggatgctctgcacaaactgttcgaccagcataagacccactatggctgctcagagacccaaaagctgtttttcctgtgaatgaaggtactgcatgcccaggagcacaggagtgcctgccttgaagaagagactcatctgccactaaccaaagacaggcaggagatgagggaggttatatgtggtaggggagggcatgaggaattccttctttgccttcttgccacagggtccttacaggaattctttctgaagagctgcacacagtcattcctcaaaggagggcatcctagtgcccctcatgctggggcctgatgcctggtcatcatttgagtcctctgggacacattagcagtcactgcatattcccccagcccctgggcaactatctactttctgtctctgtggatttgccaat

SEQ ID NO: 25627 - DNA, 987 bp, Artificial Sequence
  derived and/or modified sequence
atggcccacagcaagcagcccagccacttccagagcctgatgctgctgcagtggcccctgagctacctggccatcttctggatcctgcagcccctgtttgtgtacctgctcttcaccagcctgtggcccctgcctgtgctgtactttgcctggctgttcctggactggaagaccccagagcggggcggccgccgcagcgcctgggtgaggaactggtgtgtgtggacccacatccgggactacttccccatcaccatcctgaagaccaaggacctgagccctgagcacaactacctgatgggcgtgcacccccacggcctgctgaccttcggggccttctgcaacttctgcacagaggccaccggcttcagcaagaccttccctggcatcaccccccacctggccaccctgtcctggttcttcaagatcccctttgtgcgggagtacctgatggccaagggcgtgtgcagcgtgtcccagcctgccatcaactacctgctgagccatggaactggaaacctggtgggcatcgtggtgggcggcgtgggggaggccctgcagagcgtgcccaacaccaccaccctcatcctgcagaagaggaaaggatttgtgaggacagccctgcagcacggggcccacctggtgcccaccttcaccttcggggagacagaggtgtatgaccaggtgctcttccacaaggacagcaggatgtacaagttccagagctgcttccgccgcatcttcggcttctactgctgcgtgttctacggccagagcttctgccagggcagcacaggcctgctgccctacagccggcccatcgtgacagtggtgggggagcccctgcccctgccccagatcgagaagcccagccaggagatggtggacaagtaccacgccctgtacatggatgccctgcacaagctgtttgaccagcacaagacccactacggctgcagcgagacccagaagctgttcttcctgtag

SEQ ID NO: 25628 - DNA, 987 bp, Artificial Sequence
  derived and/or modified sequence
atggcccacagcaagcagcccagccacttccagagcctgatgctgctgcaatggcctctatcctacttggctattttttggatactgcagccgctttttgtgtacctcctgtttacaagcttgtggccattgcctgtgttgtatttcgcctggttgttcctggactggaagacaccagaacgagggggtagaaggagcgcatgggtgcgtaactggtgcgtatggacccacatcagggattactttcccatcacaatcctcaagacaaaagacctgtctccagaacataactaccttatgggagttcacccgcacggccttttgaccttcggcgccttctgcaatttctgtactgaggcaacgggcttctccaaaacctttccagggatcaccccacatctggcaaccctgagctggttctttaagatcccctttgtgcgcgagtacctgatggccaaaggcgtgtgttccgtcagccagcccgctatcaactacctgctctcgcacggaacgggcaatctagtgggcatcgtggtgggcggcgtgggggaagcgctccagtccgtgccaaacaccacgacattaattctccagaaaagaaagggctttgtccgcaccgcattgcagcacggagctcacctcgttccgacgtttacatttggcgagactgaggtgtatgatcaggtcctgtttcacaaggatagtcggatgtataagtttcagagttgttttcgccggattttcggattttattgctgcgtattctacggccaatctttttgtcaagggtctactgggttgctgccgtacagcaggcccattgtaacagtagtgggcgaaccactaccactgcctcagatagaaaagcctagtcaagaaatggtggataagtatcacgccttgtacatggatgcactccataaactcttcgaccagcacaaaactcactatggttgttccgagacacagaaacttttctttttgtag

SEQ ID NO: 25629 - DNA, 987 bp, Artificial Sequence
  derived and/or modified sequence
atggcccactccaagcagccttcacatttccagtctttgatgctcctgcaatggcccctgtcctatctcgctatcttctggattcttcagcccctcttcgtgtaccttttatttacctctctgtggccactaccagtcctctacttcgcttggctatttttagattggaaaaccccagagagagggggacgacggtccgcatgggtgcgcaattggtgcgtttggactcacatccgggattactttcctatcacaatccttaaaactaaagatcttagccccgaacacaattacctaatgggcgtgcaccctcatggtctgttgacattcggggcattttgtaatttctgcaccgaagcaactggattcagtaagaccttccccggtataaccccccacctcgcgacactgagttggttttttaagatacctttcgttcgcgagtatctgatggctaaaggggtgtgttctgtttcccaacctgctattaattacctgctgtcgcatggcactgggaacctcgtaggcatagtcgtgggcggagtgggtgaggcactccagtcagtgccaaatactacaacacttattttacagaagaggaaaggctttgtcagaacagccctgcaacatggagctcacttggttcctacctttaccttcggggagactgaggtgtatgatcaagtgttatttcacaaagattcccgcatgtacaagttccagtcctgtttcagacgaatctttggcttttactgttgtgtattttatggccagagtttttgtcagggctctactggtctcctgccttattccaggcctatcgtgacagtggtgggagagccactgcccctcccacaaatcgaaaagccatcacaggaaatggtggacaagtaccatgccctgtacatggacgcgctacacaagctctttgaccaacataaaactcattatggttgcagtgagacccagaaacttttttttttgtag

SEQ ID NO: 25630 - protein, 172 aa, Artificial Sequence
  derived and/or modified sequence
MSSGNYQQSEALSKPTFSEEQASALVESVFGLKVSKVRPLPSYDDQNFHVYVSKTKDGPTEYVLKISNTKASKNPDLIEVQNHIIMFLKAAGFPTASVCHTKGDNTASLVSVDSGSEIKSYLVRLLTYLPGRPIAELPVSPQLLYEIGKLAAKLDKTLQEGKPRVTPLLAKN

SEQ ID NO: 25631 - protein, 373 aa, Artificial Sequence
  derived and/or modified sequence
MSSGNYQQSEALSKPTFSEEQASALVESVFGLKVSKVRPLPSYDDQNFHVYVSKTKDGPTEYVLKISNTKASKNPDLIEVQNHIIMFLKAAGFPTASVCHTKGDNTASLVSVDSGSEIKSYLVRLLTYLPGRPIAELPVSPQLLYEIGKLAAKLDKTLQRFHHPKLSSLHRENFIWNLKNVPLLEKYLYALGQNRNREIVEHVIHLFKEEVMTKLSHFRECINHGDLNDHNILIESSKSASGNAEYQVSGILDFGDMSYGYYVFEVAITIMYMMIESKSPIQVGGHVLAGFESITPLTAVEKGALFLLVCSRFCQSLVMAAYSCQLYPENKDYLMVTAKTGWKHLQQMFDMGQKAVEEIWFETAKSYESGISM

SEQ ID NO: 25632 - protein, 220 aa, Artificial Sequence
  derived and/or modified sequence
MSSGNYQQSEALSKPTFSEEQASALVESVFGLKVSKVRPLPSYDDQNFHVYVSKTKDGPTEYVLKISNTKASKNPDLIEVQNHIIMFLKAAGFPTASVCHTKGDNTASLVSVDSGSEIKSYLVRLLTYLPGRPIAELPVSPQLLYEIGKLAAKLDKTLQRFHHPKLSSLHRENFIWNLKNVPLLEKYLYALGQNRNREIVEHVIHLFKEEVMTKLSHFRE

SEQ ID NO: 25633 - DNA, 1122 bp, Artificial Sequence
  derived and/or modified sequence
atgagcagcggcaactaccagcagagcgaggccctgagcaagcccaccttcagcgaggagcaggccagcgccctggtggagagcgtgttcggcctgaaggtgagcaaggtgagacccctgcccagctacgacgaccagaacttccacgtgtacgtgagcaagaccaaggacggccccaccgagtacgtgctgaagatcagcaacaccaaggccagcaagaaccccgacctgatcgaggtgcagaaccacatcatcatgttcctgaaggccgccggcttccccaccgccagcgtgtgccacaccaagggcgacaacaccgccagcctggtgagcgtggacagcggcagcgagatcaagagctacctggtgagactgctgacctacctgcccggcagacccatcgccgagctgcccgtgagcccccagctgctgtacgagatcggcaagctggccgccaagctggacaagaccctgcagagattccaccaccccaagctgagcagcctgcacagagagaacttcatctggaacctgaagaacgtgcccctgctggagaagtacctgtacgccctgggccagaacagaaacagagagatcgtggagcacgtgatccacctgttcaaggaggaggtgatgaccaagctgagccacttcagagagtgcatcaaccacggcgacctgaacgaccacaacatcctgatcgagagcagcaagagcgccagcggcaacgccgagtaccaggtgagcggcatcctggacttcggcgacatgagctacggctactacgtgttcgaggtggccatcaccatcatgtacatgatgatcgagagcaagagccccatccaggtgggcggccacgtgctggccggcttcgagagcatcacccccctgaccgccgtggagaagggcgccctgttcctgctggtgtgcagcagattctgccagagcctggtgatggccgcctacagctgccagctgtaccccgagaacaaggactacctgatggtgaccgccaagaccggctggaagcacctgcagcagatgttcgacatgggccagaaggccgtggaggagatctggttcgagaccgccaagagctacgagagcggcatcagcatgtag

SEQ ID NO: 25634 - DNA, 1122 bp, Artificial Sequence
  derived and/or modified sequence
atgtcaagcgggaactatcaacagtcggaggcactttcgaagcccactttctctgaggaacaggcatctgctttggtggaatccgtgtttggcctaaaagtgtcaaaggtgcgtccactgccttcctacgatgaccagaattttcacgtgtatgtgtcgaagacgaaggacggaccaactgaatatgtgctgaagatttcaaacaccaaggcctcaaaaaaccccgatctcattgaagtacagaaccacatcattatgttcctgaaagctgctgggttccccactgcaagcgtatgtcacaccaaaggagacaacacagctagcctggtcagcgtagattctggatccgaaataaagagttatcttgttcgactgctgacatacctgccaggtcgcccaatcgcagagcttcctgtttcaccgcagctactgtacgaaatcgggaagctggctgccaagttggataaaacgctccagcggttccatcaccctaagctgtccagcttgcaccgcgagaactttatttggaatctgaagaacgtcccccttcttgaaaagtatctgtacgcccttggccagaacaggaacagggaaatcgtagaacatgtcattcatctgtttaaggaagaagtgatgacaaaactttcccacttcagggagtgcatcaatcacggcgatctgaatgaccacaatattttgatcgaatcctcgaaaagtgcatcaggaaacgccgaatatcaagtttccggaatcttagatttcggggatatgtcctacggatactatgttttcgaagttgctatcacgatcatgtacatgatgattgaaagcaaaagtccaatccaggtcggtgggcatgtccttgctggctttgagtcgatcacaccccttactgccgtagaaaagggtgcccttttcctgctcgtctgtagcagattttgtcaaagcttggtgatggccgcctatagctgccagctgtacccggaaaacaaggattacctgatggtcactgcaaagacagggtggaagcacctccaacagatgtttgatatggggcagaaagccgtcgaggaaatttggttcgagactgcaaaatcctatgagagcggcataagcatgtag

SEQ ID NO: 25635 - DNA, 1122 bp, Artificial Sequence
  derived and/or modified sequence
atgagcagcggcaactaccagcagagcgaggccctgagcaagcccaccttcagcgaggagcaggccagcgccctggtggagagcgtgtttggcctgaaggtgtccaaggtgcggcccctgcccagctatgatgaccagaacttccacgtgtatgtgtccaagaccaaggatggccccacagaatatgtgctgaagatcagcaacaccaaggccagcaagaacccagacctgattgaggtgcagaaccacatcatcatgttcctgaaggctgctggcttccccacagcctctgtgtgccacaccaagggggacaacacagccagcctggtgtctgtggacagcggcagcgagatcaagagctacctggtgcggctgctgacctacctgcccggccggcccatcgccgagctgcctgtgagcccccagctgctgtatgaaattggcaagctggccgccaagctggacaagaccctgcagcgcttccaccaccccaagctgagcagcctgcaccgggagaacttcatctggaacctgaagaatgtgcccctgctggagaagtacctgtatgccctgggccagaacagaaaccgggagatcgtggagcacgtgatccacctgttcaaggaggaggtgatgaccaagctgagccacttccgggagtgcatcaaccacggggacctgaatgaccacaacatcctgattgagagcagcaagagcgccagcggaaatgctgagtaccaggtgtctggcatcctggactttggagacatgtcctatggctactacgtgtttgaggtggccatcaccatcatgtacatgatgattgagagcaagagccccatccaggtgggcggccacgtgctggccggctttgagagcatcacccccctgacagctgtggagaagggggccctcttcctgctggtgtgcagccgcttctgccagagcctggtgatggccgcctacagctgccagctgtacccagagaacaaggactacctgatggtgacagccaagacaggctggaagcacctgcagcagatgtttgacatgggccagaaggctgtggaggagatctggtttgaaacagccaagagctatgaaagtggcatctccatgtag

SEQ ID NO: 25636 - DNA, 1235 bp, Artificial Sequence
  derived and/or modified sequence
gcgggcgctgcggcccctgctctacctcctagcgccggtgcgcggccgaggccgcactacctgtctgcgggaaagcgggatccaccccaggacgtcgggtcgctgccgacataatgtcaagtggaaactatcagcagtcagaggctcttagcaaacccactttcagtgaggaacaagcctctgcgttagtggagtcagtgtttgggttgaaagtttccaaggtccggccacttcctagctatgatgaccaaaactttcatgtctacgtttcaaaaaccaaagatggcccaactgaatatgtcctcaaaataagcaacaccaaggctagcaaaaatccagacctgattgaagtgcagaatcacatcatcatgtttctgaaagccgctggatttccaacagcctctgtgtgtcacactaaaggagacaacacagcttctctcgtgtctgtagatagtggctctgaaatcaaaagctacttggtgaggctgctgacttacctcccaggaagacccatcgctgagcttcccgtcagcccccagctattgtatgaaattggaaaactagctgccaaattggataagacactgcagagattccatcacccaaagttaagtagtcttcatcgggagaacttcatctggaatctgaaaaatgttcctcttctggagaaatacctgtatgccctgggccagaatcgaaaccgagagattgttgagcatgtcattcatctgttcaaggaggaagtaatgaccaaattaagtcattttcgagaatgtatcaatcacggagatcttaatgaccataatattttaatagagtccagcaagtcagcctctggaaatgctgaatatcaagtgtctgggattttagactttggtgacatgagctatggctactatgtgtttgaagtggcaattaccatcatgtacatgatgattgagagcaagagtcctatacaagtaggaggccatgtccttgcagggtttgaaagcatcaccccactgacagctgtagagaagggtgctttgtttttacttgtatgcagtcgtttttgtcagtcacttgtcatggctgcatactcttgccagctatacccagagaacaaagactatctcatggttactgcaaaaaccgggtggaaacacttacagcaaatgtttgacatgggtcagaaagctgtagaagaaatctggtttgaaactgccaaatcctatgaatctgggatctccatgtga

SEQ ID NO: 25637 - DNA, 1122 bp, Artificial Sequence
  derived and/or modified sequence
atgagcagcggcaactaccagcagagcgaggccctgagcaagcccacgttctccgaagaacaggccagtgctttggtggagagcgtcttcggtctaaaggtgagtaaggttcgcccccttccttcttatgacgatcagaactttcacgtttatgtgagtaagactaaggatggacctactgagtatgtattgaagatcagtaacactaaagcgagcaaaaacccagatttgattgaggtccaaaaccacataattatgttccttaaggcggccggcttcccgaccgctagcgtttgccatactaagggcgacaatacagcgtccctggtgtcggtcgactcgggaagcgaaattaaaagttaccttgttcggctcctcacttaccttccaggaaggcccattgccgagctccctgtgtcgccacagctgctgtatgagattggcaagttggccgctaagctggataagaccctgcagcgctttcaccacccaaaactatcaagtctgcaccgagaaaacttcatctggaaccttaaaaacgtgcccctattagagaagtatctctacgctttgggccagaaccggaacagagagattgtggaacacgtgattcacctattcaaggaggaggtgatgacgaaactgtcccatttccgggaatgtatcaatcatggcgacctaaacgatcataacattcttatcgagtcttccaaatctgctagcgggaatgctgaatatcaagtcagcggaattctggactttggagatatgtcctatggttactacgtttttgaggtcgcaattactatcatgtacatgatgatcgaatccaaatcccccatccaggtcggaggccacgtcctggctggattcgaaagtatcacaccgttgaccgccgtggagaaaggcgctctgtttcttcttgtgtgtagtcgcttttgccagtctctggtaatggcagcttacagctgtcagttgtatcctgagaacaaagactatctaatggtgaccgctaaaaccggatggaagcaccttcagcagatgttcgacatgggtcagaaagccgtggaggagatctggttcgagaccgccaagtcttatgaatccgggattagtatgtag

SEQ ID NO: 25638 - DNA, 1122 bp, Artificial Sequence
  derived and/or modified sequence
atgagttccggcaattatcagcagagtgaggcgctctcaaaaccaacatttagcgaggagcaggcatctgctctggtggaatcggttttcgggttgaaagtttcaaaagtgcggccattgcctagttatgacgatcagaacttccatgtgtacgtttccaaaaccaaagatggcccaactgagtacgtgctaaaaattagcaacaccaaggccagtaagaatcctgatctaatcgaggtgcagaaccacattatcatgttcctgaaagcggctggcttcccgactgcctccgtctgccatacaaaaggagacaacaccgcctccctggtgtcagtggattcggggtctgagatcaagtcatatcttgttcgcctgctgacctatctgcccggaagacccatcgccgaactccctgtctctcctcagctcctttatgagataggaaagcttgctgcgaagctcgacaagaccctgcaacgctttcaccatcctaagctgtctagcctgcatcgcgagaatttcatttggaacctcaagaatgtgccccttctagaaaaatacctgtacgcattgggacagaatcggaatcgggaaattgttgagcacgtgatccatctgttcaaagaggaagtaatgacaaagttatcccatttccgggagtgcattaatcatggagacctgaacgaccacaacatcctgattgagtcttctaaatcagccagtggcaacgcagaatatcaagtcagcgggatcctggatttcggagatatgagttacggctactatgttttcgaggtggccataacaattatgtatatgatgatagaatcaaagagccccatccaagttggtggccacgttctggcaggatttgagagcatcacccccctgacagccgtggaaaagggcgctctctttctgttagtgtgttctagattctgtcagagcctggtaatggcagcatacagttgtcagctgtaccccgagaataaggattacttgatggtcactgcaaagaccggctggaaacacctccaacagatgttcgacatgggccaaaaggcggtcgaggaaatttggtttgaaacggccaagagctatgagtccggtatcagcatgtag

SEQ ID NO: 25639 - protein, 473 aa, Artificial Sequence
  derived and/or modified sequence
MAQLEGYCFSAALSCTFLVSCLLFSAFSRALREPYMDEIFHLPQAQRYCEGHFSLSQWDPMITTLPGLYLVSVGVVKPAIWIFAWSEHVVCSIGMLRFVNLLFSVGNFYLLYLLFHKVQPRNKAASSIQRVLSTLTLAVFPTLYFFNFLYYTEAGSMFFTLFAYLMCLYGNHKTSAFLGFCGFMFRQTNIIWAVFCAGNVIAQKLTEAWKTELQKKEDRLPPIKGPFAEFRKILQFLLAYSMSFKNLSMLFCLTWPYILLGFLFCAFVVVNGGIVIGDRSSHEACLHFPQLFYFFSFTLFFSFPHLLSPSKIKTFLSLVWKHGILFLVVTLVSVFLVWKFTYAHKYLLADNRHYTFYVWKRVFQRYAILKYLLVPAYIFAGWSIADSLKSKPIFWNLMFFICLFIVIVPQKLLEFRYFILPYVIYRLNITLPPTSRLVCELSCYAIVNFITFYIFLNKTFQWPNSQDIQRFMW

SEQ ID NO: 25640 - DNA, 1422 bp, Artificial Sequence
  derived and/or modified sequence
atggcccagctggagggctactgcttcagcgccgccctgagctgcaccttcctggtgagctgcctgctgttcagcgccttcagcagagccctgagagagccctacatggacgagatcttccacctgccccaggcccagagatactgcgagggccacttcagcctgagccagtgggaccccatgatcaccaccctgcccggcctgtacctggtgagcgtgggcgtggtgaagcccgccatctggatcttcgcctggagcgagcacgtggtgtgcagcatcggcatgctgagattcgtgaacctgctgttcagcgtgggcaacttctacctgctgtacctgctgttccacaaggtgcagcccagaaacaaggccgccagcagcatccagagagtgctgagcaccctgaccctggccgtgttccccaccctgtacttcttcaacttcctgtactacaccgaggccggcagcatgttcttcaccctgttcgcctacctgatgtgcctgtacggcaaccacaagaccagcgccttcctgggcttctgcggcttcatgttcagacagaccaacatcatctgggccgtgttctgcgccggcaacgtgatcgcccagaagctgaccgaggcctggaagaccgagctgcagaagaaggaggacagactgccccccatcaagggccccttcgccgagttcagaaagatcctgcagttcctgctggcctacagcatgagcttcaagaacctgagcatgctgttctgcctgacctggccctacatcctgctgggcttcctgttctgcgccttcgtggtggtgaacggcggcatcgtgatcggcgacagaagcagccacgaggcctgcctgcacttcccccagctgttctacttcttcagcttcaccctgttcttcagcttcccccacctgctgagccccagcaagatcaagaccttcctgagcctggtgtggaagcacggcatcctgttcctggtggtgaccctggtgagcgtgttcctggtgtggaagttcacctacgcccacaagtacctgctggccgacaacagacactacaccttctacgtgtggaagagagtgttccagagatacgccatcctgaagtacctgctggtgcccgcctacatcttcgccggctggagcatcgccgacagcctgaagagcaagcccatcttctggaacctgatgttcttcatctgcctgttcatcgtgatcgtgccccagaagctgctggagttcagatacttcatcctgccctacgtgatctacagactgaacatcaccctgccccccaccagcagactggtgtgcgagctgagctgctacgccatcgtgaacttcatcaccttctacatcttcctgaacaagaccttccagtggcccaacagccaggacatccagagattcatgtggtag

SEQ ID NO: 25641 - DNA, 1422 bp, Artificial Sequence
  derived and/or modified sequence
atggcccagctagaggggtactgcttctccgccgcattgagctgcaccttcttagtttcctgccttctctttagtgcattttcccgtgcactccgggagccttatatggacgagatctttcatctgcctcaggctcagagatactgcgagggacatttttccctgtcacaatgggaccccatgattactacacttcccgggctctacctcgtgtcggtgggggttgtgaagccagctatctggattttcgcttggtctgagcacgtcgtttgctcaatcggcatgcttagatttgtgaatctgttattttctgtcggcaatttctatctcctctaccttttgtttcataaagttcaaccacgcaataaagctgccagttctatccagagagtgctttccacgcttacactcgcagtgtttccaaccctttattttttcaatttcttatattacaccgaagctgggtcaatgtttttcacactattcgcttatctgatgtgcctgtatggtaaccataagacttctgcgttccttggattctgcggcttcatgttccgacaaactaacatcatctgggccgtgttctgtgccgggaacgtgatcgcccagaaactgacagaggcttggaaaactgaactccagaaaaaagaggatcgactgccccccatcaaaggccccttcgccgaatttcgtaagattttacagttcctgctcgcctatagtatgagcttcaagaatctctccatgttattttgcctgacttggccatacatacttctagggtttcttttttgcgcgtttgtggtggttaacggaggtattgtgataggtgaccggtctagccacgaagcttgcctccacttcccccagctattctacttcttctcattcaccttgttcttttcattccctcaccttctgtcaccatcaaaaataaagacatttttaagcctggtgtggaaacacggaattcttttcctagtagtcactctggtgtccgtgttcctggtgtggaaatttacatacgcacataagtacctgcttgctgacaaccgtcactatactttttacgtgtggaagagagtgtttcagcggtatgccatcctaaagtatctcctggttcccgcatatatatttgcaggttggagtatagctgattcacttaagtctaaacccatcttttggaatctcatgttctttatatgcctgttcatcgtaatcgtgccccagaaactgctggagttcaggtattttatactgccctacgtgatttataggctgaatatcaccctccctcctacaagccggctggtgtgtgagctctcatgctatgctattgttaacttcattacgttttacatcttcttgaataaaaccttccaatggccgaactctcaggacattcaacggtttatgtggtag

SEQ ID NO: 25642 - DNA, 1422 bp, Artificial Sequence
  derived and/or modified sequence
atggcccagctggagggctactgcttctctgctgccctgagctgcaccttcctggtgtcctgcctgctcttcagcgccttcagccgggccctgcgggagccctacatggatgagatcttccacctgccccaggcccagcgctactgtgagggccacttcagcctgagccagtgggaccccatgatcaccaccctgcccggcctgtacctggtgtctgtgggcgtggtgaagccagccatctggatctttgcctggagcgagcacgtggtgtgcagcatcggcatgctgcgctttgtgaacctgctcttctctgtgggcaacttctacctgctgtacctgctcttccacaaggtgcagcccaggaacaaggccgccagcagcatccagagggtgctgagcaccctgaccctggccgtgttccccaccctgtacttcttcaacttcctgtactacacagaggccggctccatgttcttcaccctgtttgcctacctgatgtgcctgtatggcaaccacaagaccagcgccttcctgggcttctgtggcttcatgttccggcagaccaacatcatctgggccgtgttctgtgctggaaatgtgattgcccagaagctgacagaggcctggaagacagagctgcagaagaaggaggaccggctgccccccatcaagggcccctttgctgagttcaggaagatcctgcagttcctgctggcctacagcatgtccttcaagaacctgtccatgctgttctgcctgacctggccctacatcctgctgggcttcctgttctgtgcctttgtggtggtgaatggaggcatcgtcatcggggacaggagcagccatgaggcctgcctgcacttcccccagctgttctacttcttctccttcaccctcttcttctccttcccccacctgctgagccccagcaagatcaagaccttcctgagcctggtgtggaagcacggcatcctcttcctggtggtgaccctggtgtctgtgttcctggtgtggaagttcacctacgcccacaagtacctgctggccgacaacagacactacaccttctacgtgtggaagagggtcttccagagatatgccatcctgaagtacctgctggtgcctgcctacatctttgctggctggagcattgctgacagcctgaagagcaagcccatcttctggaacctgatgttcttcatctgcctcttcatcgtgattgtgccccagaagctgctggagttccgctacttcatcctgccctacgtgatctaccgcctgaacatcaccctgccccccaccagccggctggtgtgtgagctgagctgctacgccatcgtgaacttcatcaccttctacatcttcctgaacaagaccttccagtggcccaacagccaggacatccagcgcttcatgtggtag

SEQ ID NO: 25643 - DNA, 1422 bp, Artificial Sequence
  derived and/or modified sequence
atggcccagctggagggctactgcttcagcgccgccctgagctgcaccttcctcgtttcatgtttgcttttctcagcgttcagccgcgcactcagggagccctatatggacgaaatttttcacttgccacaggcccagcgttattgtgaaggtcatttctctctatcccagtgggatccaatgattaccacgttgccaggcttatatctggtgtccgtgggcgtggtgaagccagcaatctggattttcgcttggagcgagcacgtagtctgcagtataggaatgttgcggtttgtaaacctcctgttctcagttgggaatttttatctgctatacctgcttttccacaaggtgcagccgcgcaataaggcagcttcttctatccaacgggtgctgagcaccttaacgctggcagtgtttcccacactgtacttcttcaacttcctctattacacggaagccggctctatgttctttactctctttgcttacctgatgtgcttatacgggaatcataaaaccagcgcgtttttggggttttgcggttttatgttccggcaaacgaacattatttgggccgtgttttgcgctgggaacgttatagctcaaaaactgaccgaagcctggaaaaccgaacttcagaaaaaggaagatcgcttgccgccaataaaagggcctttcgcagagttcaggaagattttgcagttcctgctcgcctacagcatgtcatttaaaaatttgtcgatgttgttttgtctgacttggccttacattttactgggttttctcttctgtgcctttgttgtagtgaatggcggcatcgtcatcggcgacagatcttcacacgaggcctgtcttcacttcccccagctgttttacttcttcagtttcactttgtttttttccttcccccaccttcttagtccctcgaagatcaaaacattcttatcactcgtgtggaagcacggaatattgttcttggtggtgacattggtgtccgtgttcttggtgtggaaattcacttacgcacacaaatatctgctggccgacaaccggcactataccttttatgtgtggaagagggtcttccaacggtacgccatcctgaagtacctcctcgttccggcttacatctttgccggctggtccatcgccgatagcctgaaatccaaacccatcttttggaacctgatgttcttcatttgcctattcatcgttatcgtgccacagaagctgctcgagttccgatatttcatcttgccttacgtgatttaccggcttaatattaccctacctcccacttcaaggctcgtttgcgagctctcatgctatgccatcgtgaatttcattactttctatattttcctaaataagacattccagtggcccaattcccaggatatccagcgctttatgtggtag

SEQ ID NO: 25644 - DNA, 3111 bp, Artificial Sequence
  derived and/or modified sequence
aagcagcaagccacgcccctcccgcgctcgcgaaatccgagacccgccctttccggaagttttgacactgtgcgccccgagtaatgtgatggagagggtaatcatccggtccgttatctaaacccgtcactccaggaaacagcgacccgctgttttccggatccgcgctctcccagcatcctttgccttccggtatgtggccccgtctggctagtcctgtctagcgcgcccatttcgagcccaagtttccagctcgggtttccgggctcagaattttccaggagtgggttcttgggcagtggctgtgggagcaggaatggcgcagctagagggttactgtttctcggccgccttgagctgtacctttttagtgtcctgcctcctcttctccgccttcagccgggcgctgcgagagccctacatggacgagatcttccacctgcctcaggcgcagcgctactgtgagggccatttctccctttcccagtgggatcccatgattactacattacctggcttgtacctggtgtcagttggagtggtcaaacctgccatttggatctttgcatggtctgaacatgttgtctgctccattgggatgctcagatttgttaatcttctcttcagtgttggcaacttctatttactatatttgcttttccacaaggtacaacccagaaacaaggctgcctcaagtatccagagagtcttgtcaacattaacactagcagtatttccaacactttatttttttaacttcctttattatacagaagcaggatctatgttttttactctttttgcatatttgatgtgtctttatggaaatcataaaacttcagccttccttggattttgtggcttcatgtttcggcaaacaaatatcatctgggctgtcttctgtgcagggaatgtcattgcacaaaagttaactgaggcttggaaaactgagctacaaaagaaggaagacagacttccacctattaaaggaccatttgcagaattcagaaaaattcttcagtttcttttggcttattccatgtcctttaaaaacttgagtatgcttttctgtttgacttggccctacatccttctgggatttctgttttgtgcttttgtagtagttaatggtggaattgttattggcgatcggagtagtcatgaagcctgtcttcattttcctcaactattctactttttttcatttactctctttttttcttttcctcatctcctgtctcctagcaaaattaagacttttctttccttagtttggaaacatggaattctgtttttggtggttaccttagtctctgtgtttttagtttggaaattcacttatgctcataaatacttgctagcagacaatagacattatactttctatgtgtggaaaagagtttttcaaagatatgcaattctgaaatatttgttagttccagcctatatatttgctggttggagtatagctgactcattgaaatcaaagccaattttttggaatttaatgtttttcatatgcttgttcattgttatagttcctcagaaactgctggaatttcgttacttcattttaccttatgtcatttataggcttaacataactctgcctcccacatccagacttgtttgtgaactgagttgctatgcaattgttaatttcataactttttacatctttctgaacaagacttttcagtggccaaatagtcaggacattcaaaggtttatgtggtaatatcagtgatattttgaactgtaaaaatggacttaataattagaccatttctacaaagaacaactgaataggtggaaaacatggaatttcttttaggtgcagtggtggtcctcaaattacattagtttttttaatatatattttaaacatatgtaagaaattaagtggcaaagaactgggaaagcttaagacctgcttcaaaagcctgaataatgggaaaataaaattgttttcagatatctcatatcgctctcgtaatgttggcccctcacaaagcttgggaatgttttgtatgtataagtttattaaaactgggtatgcttcatattactagaactaatttattctcttcagagagaactattaggttagtgcaaaagtaattgtggtttttgccattgaaagtaatggcaaaaccacaattacttttgtaccaacctaataacaatgtgttagcaaatatttacaaatggtcaggtgatattcttgactgaaaagttccttaacatttcagtaaatataattttaattctaagtcaaaatagaaatgcatagatagtaaatgataaagtagagactcatatatgtctgtctaggcatcaaattgttggttattgtttacaatccagaaatgatgaagctctttcactaattcctaatatgaaatgtatgatggccaaagacaaattgtgttgattataatcctttaaaagggggatttcctttatgaaatacatattgtattagcttcccagggctgccataacaaatgaccacaaacttgggtgcttacaacaattttcctcacagtctggaggccagaagtctaaaatcaaagtgtcagcagagttggttccttctggaggctctaaggaagaatccattctatgtctgtttcctaatatcttgtggctgtctgcaattcttggagttctttggcttatgggcatatcttgtctaagtattgcagacagcaatcttcactccagtctctgcctctgcgttcacacggcctttccctctgtcttttcattaccttttaaggacagtgtctttgaatgtagggcccaccctgatctagggtgattgtgtctggagacccttaattatgtttacaaagacccatgttccaagtaagtttgtattcacatgttctgagtagacattgtctcttcatgggatacttttcagtccatgacagttactaaaggacattttaggataatcctcatatgattgttaggagactacctttaaaaattttttattatatatcaaattatagttgtatatacttatgaggtacgaagtggcattatgatttttgaatataatgtgggatgattaaataaagctaatctatccatcacctc

SEQ ID NO: 25645 - DNA, 1422 bp, Artificial Sequence
  derived and/or modified sequence
atggcacagctggaagggtactgtttctctgcggctctttcctgcaccttcctggtgtcttgtctgctctttagtgccttctcgagagccctgcgagaaccatacatggacgaaatctttcacctgccccaggcccagagatactgcgagggccacttctcactgtcccaatgggatcctatgatcaccactctgcctgggttgtatctcgtgagcgtgggagtagttaagcccgcaatatggatcttcgcctggtccgaacatgttgtttgttccattgggatgctgcggttcgttaacctgctgttctccgtggggaacttctatctgctttacctcttatttcacaaagtgcagccacgcaacaaagcggcatcttccatccagcgcgttttgtctaccctcacactggccgtcttcccaaccttatacttttttaatttcctgtactacaccgaagccggatccatgttcttcactctcttcgcctacctgatgtgtctctacggtaaccacaagacatccgcctttctgggattttgcgggttcatgtttaggcagacaaatattatatgggctgtgttctgcgctggcaacgtgatcgcccagaaactcacggaggcgtggaagactgaattacaaaaaaaggaggacaggctcccaccgatcaaggggccatttgcagaatttcgcaagatactgcagtttctgctagcctactcaatgagctttaagaatctgagcatgttattctgtctgacgtggccttatatccttttaggcttccttttctgtgctttcgtagtggtgaacgggggtattgtcattggggatagaagttctcatgaggcctgcttgcattttcctcaattattctatttcttttctttcactttgtttttttccttcccccacttgctgagtccgagcaagataaaaactttcctttcccttgtctggaagcatgggatcctctttctcgtcgtcacattagtcagtgttttcctcgtttggaaattcacgtatgcgcacaagtatttgttagctgacaatcgccattacacattttacgtctggaagcgagtattccaacgctacgcgatacttaagtacttgctcgttcctgcctatatttttgccggttggagtattgccgatagccttaagtctaaaccgatcttttggaacctgatgttctttatttgcttgttcatcgtgattgtgccacagaaacttctcgaattcaggtacttcatcctgccatacgtgatctacagactgaacattactctccctcccacgagccggctggtgtgcgagctatcttgctacgccatcgtgaatttcattacattctacatctttctaaacaagacttttcagtggccgaactcccaggacatacaaagattcatgtggtag

SEQ ID NO: 25646 - protein, 222 aa, Artificial Sequence
  derived and/or modified sequence
MAGAEPFLADGNQELFPCEVCGRRFAADVLERHGPICKKLFNRKRKPFSSLKQRLQGTDIPTVKKTPQSKSPPVRKSNWRQQHEDFINAIRSAKQCMLAIKEGRPLPPPPPPSLNPDYIQRPYCMRRFNESAAERHTNFCKDQSSRRVFNPAQTAAKLASRAQGRAQMGPKKEPTVTSAVGALLQNRVLVATNEVPTKSGLAMDPASGAKLRQGFSKSSKKD

SEQ ID NO: 25647 - protein, 154 aa, Artificial Sequence
  derived and/or modified sequence
  misc_feature (1)..(1): Xaa can be any naturally occurring amino acid
XGNQELFPCEVCGRRFAADVLERHGPICKKLFNRKRKPFSSLKQRLQGTDIPTVKKTPQSKSPPVRKSNWRQQHEDFINAIRSAKQCMLAIKEGRPLPPPPPPSLNPDYIQRPYCMRRFNESAAERHTNFCKDQSSRRVFNPAQTAAKLASRAQ

SEQ ID NO: 25648 - protein, 115 aa, Artificial Sequence
  derived and/or modified sequence
PPPPPSLNPDYIQRPYCMRRFNESAAERHTNFCKDQSSRRVFNPAQTAAKLASRAQGRAQMGPKKEPTVTSAVGALLQNRVLVATNEVPTKSGLAMDPASGAKLRQGFSKSSKKD

SEQ ID NO: 25649 - protein, 126 aa, Artificial Sequence
  derived and/or modified sequence
MLAIKEGRPLPPPPPPSLNPDYIQRPYCMRRFNESAAERHTNFCKDQSSRRVFNPAQTAAKLASRAQGRAQMGPKKEPTVTSAVGALLQNRVLVATNEVPTKSGLAMDPASGAKLRQGFSKSSKKD

SEQ ID NO: 25650 - DNA, 669 bp, Artificial Sequence
  derived and/or modified sequence
atggccggcgccgagcccttcctggccgacggcaaccaggagctgttcccctgcgaggtgtgcggcagaagattcgccgccgacgtgctggagagacacggccccatctgcaagaagctgttcaacagaaagagaaagcccttcagcagcctgaagcagagactgcagggcaccgacatccccaccgtgaagaagaccccccagagcaagagcccccccgtgagaaagagcaactggagacagcagcacgaggacttcatcaacgccatcagaagcgccaagcagtgcatgctggccatcaaggagggcagacccctgccccccccccccccccccagcctgaaccccgactacatccagagaccctactgcatgagaagattcaacgagagcgccgccgagagacacaccaacttctgcaaggaccagagcagcagaagagtgttcaaccccgcccagaccgccgccaagctggccagcagagcccagggcagagcccagatgggccccaagaaggagcccaccgtgaccagcgccgtgggcgccctgctgcagaacagagtgctggtggccaccaacgaggtgcccaccaagagcggcctggccatggaccccgccagcggcgccaagctgagacagggcttcagcaagagcagcaagaaggactag

SEQ ID NO: 25651 - DNA, 465 bp, Artificial Sequence
  derived and/or modified sequence
tgaggcaaccaggagctgttcccctgcgaggtgtgcggcagaagattcgccgccgacgtgctggagagacacggccccatctgcaagaagctgttcaacagaaagagaaagcccttcagcagcctgaagcagagactgcagggcaccgacatccccaccgtgaagaagaccccccagagcaagagcccccccgtgagaaagagcaactggagacagcagcacgaggacttcatcaacgccatcagaagcgccaagcagtgcatgctggccatcaaggagggcagacccctgccccccccccccccccccagcctgaaccccgactacatccagagaccctactgcatgagaagattcaacgagagcgccgccgagagacacaccaacttctgcaaggaccagagcagcagaagagtgttcaaccccgcccagaccgccgccaagctggccagcagagcccagtag

SEQ ID NO: 25652 - DNA, 348 bp, Artificial Sequence
  derived and/or modified sequence
cccccccccccccccagcctgaaccccgactacatccagagaccctactgcatgagaagattcaacgagagcgccgccgagagacacaccaacttctgcaaggaccagagcagcagaagagtgttcaaccccgcccagaccgccgccaagctggccagcagagcccagggcagagcccagatgggccccaagaaggagcccaccgtgaccagcgccgtgggcgccctgctgcagaacagagtgctggtggccaccaacgaggtgcccaccaagagcggcctggccatggaccccgccagcggcgccaagctgagacagggcttcagcaagagcagcaagaaggactag

SEQ ID NO: 25653 - DNA, 381 bp, Artificial Sequence
  derived and/or modified sequence
atgctggccatcaaggagggcagacccctgccccccccccccccccccagcctgaaccccgactacatccagagaccctactgcatgagaagattcaacgagagcgccgccgagagacacaccaacttctgcaaggaccagagcagcagaagagtgttcaaccccgcccagaccgccgccaagctggccagcagagcccagggcagagcccagatgggccccaagaaggagcccaccgtgaccagcgccgtgggcgccctgctgcagaacagagtgctggtggccaccaacgaggtgcccaccaagagcggcctggccatggaccccgccagcggcgccaagctgagacagggcttcagcaagagcagcaagaaggactag

SEQ ID NO: 25654 - DNA, 992 bp, Artificial Sequence
  derived and/or modified sequence
ttgcaacagattagtggtcctggtttatgttcttgactagtatgatgttatctggactgggctgtaaaaatctgtgaacactgttgctctgagttaggaacagaatggctggggcagaaccatttttggcagatggcaatcaggaattgtttccctgtgaagtctgtggaagacgttttgcagcagatgttctggaaaggcatggaccaatatgtaagaaactcttcaacagaaagcgtaaacctttcagttctttgaagcaaagattacagggcactgacattcctactgtgaagaagactccacaatccaagtctccacctgtgaggaagtctaactggagacaacaacatgaagactttattaatgcaatccgatcagcaaagcagtgtatgctagccattaaagaaggccgacccctcccacctccaccccctccatccttgaacccagattatattcaacgtccatattgtatgagaaggtttaatgaaagcgcagctgagcgacatactaatttctgcaaggatcagtcttctcgccgagtctttaatccagctcagacagcagccaaattggcatccagagctcagggtagggctcagatgggtccaaaaaaagaaccaactgttaccagtgctgtgggagctttgctgcagaacagggtcctggtggccacgaatgaagtcccaaccaagtcaggattagctatggaccctgcttctggagcaaaactcagacaaggatttagtaaatcttctaaaaaagattaactcctagaagccagactgcctccctgaaacccatcagcctggatggttgcgtacccgagaatgccacctaaggggaaggaacggtagatgtgatgtctgtttttacacccttgattcttcttgaagcatcacttagaacaagtaaaacttgcttcagatttttatttactccctttgaagttttcaaaacaaaagcattaaacacatcaacctgtataa

SEQ ID NO: 25655 - DNA, 461 bp, Artificial Sequence
  derived and/or modified sequence
atggcaatcaggaattgtttccctgtgaagtctgtggaagacgttttgcagcagatgttctggaaaggcatggaccaatatgtaagaaactcttcaacagaaagcgtaaacctttcagttctttgaagcaaagattacagggcactgacattcctactgtgaagaagactccacaatccaagtctccacctgtgaggaagtctaactggagacaacaacatgaagactttattaatgcaatccgatcagcaaagcagtgtatgctagccattaaagaaggccgacccctcccacctccaccccctccatccttgaacccagattatattcaacgtccatattgtatgagaaggtttaatgaaagcgcagctgagcgacatactaatttctgcaaggatcagtcttctcgccgagtctttaatccagctcagacagcagccaaattggcatccagagctcag

SEQ ID NO: 25656 - DNA, 567 bp, Artificial Sequence
  derived and/or modified sequence
cctccaccccctccatccttgaacccagattatattcaacgtccatattgtatgagaaggtttaatgaaagcgcagctgagcgacatactaatttctgcaaggatcagtcttctcgccgagtctttaatccagctcagacagcagccaaattggcatccagagctcagggtagggctcagatgggtccaaaaaaagaaccaactgttaccagtgctgtgggagctttgctgcagaacagggtcctggtggccacgaatgaagtcccaaccaagtcaggattagctatggaccctgcttctggagcaaaactcagacaaggatttagtaaatcttctaaaaaagattaactcctagaagccagactgcctccctgaaacccatcagcctggatggttgcgtacccgagaatgccacctaaggggaaggaacggtagatgtgatgtctgtttttacacccttgattcttcttgaagcatcacttagaacaagtaaaacttgcttcagatttttatttactccctttgaagttttcaaaacaaaagcattaaacacatcaacctgtataa

SEQ ID NO: 25657 - DNA, 930 bp, Artificial Sequence
  derived and/or modified sequence
ttgcaacagattagtggtcctggtttatgttcttgactagtatgatgttatctggactgggctgtaaaaatctgtgaacactgttgctctgagttaggaacagaatggctggggcagaaccatttttggcagcaatcacatattccatgtgattcaatacacagaaacaaacactgcagaccacattgatctccctgtttgattcagctggctagatggcaatcaggaattgtttccctgtgaagtctgtggaagacgttttgcagcagatgttctggaaaggcatggaccaatatgtaagaaactcttcaacagaaagcgtaaacctttcagttctttgaagcaaagattacagggcactgacattcctactgtgaagaagactccacaatccaagtctccacctgtgaggaagtctaactggagacaacaacatgaagactttattaatgcaatccgatcagcaaagcagtgtatgctagccattaaagaaggccgacccctcccacctccaccccctccatccttgaacccagattatattcaacgtccatattgtatgagaaggtttaatgaaagcgcagctgagcgacatactaatttctgcaaggatcagtcttctcgccgagtctttaatccagctcagacagcagccaaattggcatccagagctcagggtagggctcagatgggtccaaaaaaagaaccaactgttaccagtgctgtgggagctttgctgcagaacagggtcctggtggccacgaatgaagtcccaaccaagtcaggattagctatggaccctgcttctggagcaaaactcagacaaggatttagtaaatcttctaaaaaagattaactcctagaagccagactgcctccctgaaacccatcagcctggatggttgcgtacccgagaatgccacctaaggg

SEQ ID NO: 25658 - DNA, 669 bp, Artificial Sequence
  derived and/or modified sequence
atggccggcgctgagccattcttagcagatggcaaccaggagctttttccttgtgaggtgtgtggaaggcggttcgcggccgatgtgctggagcgacacggacctatctgtaagaaactgttcaaccgaaaacgcaaacctttctcgtcacttaaacagcggcttcagggcactgacattcctaccgtcaagaaaactccacagagcaaatcccctccagtgagaaagtctaattggcgccagcaacacgaagacttcattaatgcaatcaggtccgctaaacagtgtatgctggcaattaaagaggggagaccactcccaccccctcccccccccagcttaaatcccgactatatccagaggccttattgtatgcgaaggttcaacgaatccgccgccgagagacataccaacttttgtaaagaccagtcatctcgtcgcgtgttcaatccagcccagaccgctgcaaaacttgctagccgtgcacaagggagggcccagatgggcccgaagaaggagcccacggtcacctctgcggtaggtgcactcctgcagaatcgagtcctggtcgcgaccaatgaggtgccaactaagtcggggctggcaatggaccctgcgtcgggagctaagttaaggcaaggcttctcgaagtccagcaaaaaggactag

SEQ ID NO: 25659 - DNA, 465 bp, Artificial Sequence
  derived and/or modified sequence
tgaggaaaccaggagctattcccttgcgaggtgtgtggcaggcgctttgcagccgacgtgctggaacgacacggaccaatttgtaagaaattgttcaaccgaaagcggaaacccttttctagtctcaagcaacggctgcagggcactgacattcctaccgtgaagaagaccccccaatcaaagtcccctccggtgagaaaatccaattggagacaacaacatgaggactttattaacgcaattagatcggccaagcagtgcatgttggctatcaaggaaggccgtccgcttcccccaccgcctccacccagtctcaatccagattatattcagcggccatattgtatgaggagattcaacgagtcagccgccgagcgacacactaacttctgcaaggaccaatcttcacggagggtcttcaatcctgcccagacggccgccaagcttgcctcccgggctcagtag

SEQ ID NO: 25660 - DNA, 348 bp, Artificial Sequence
  derived and/or modified sequence
cctcctccaccccccagcctgaacccagactatattcagcgtccctattgtatgcggcgcttcaatgaatctgcagcggagagacacactaacttctgtaaggaccaaagctccagacgtgtctttaatcctgcccagactgccgccaaactagcttcacgggcccagggaagagcccagatggggccaaagaaggagcccaccgtgaccagcgccgttggtgcgctccttcagaaccgcgtgctggtcgccacaaacgaagtccccacaaagtccggactggccatggacccagcttccggggccaagctgcggcaaggatttagcaagtcgagtaagaaggactag

SEQ ID NO: 25661 - DNA, 381 bp, Artificial Sequence
  derived and/or modified sequence
atgctagccatcaaggagggtcggcctctacccccgcctccacctcctagcttgaacccagattatatccagaggccatactgcatgcgccgctttaacgagtcggcagcagagcgccacacaaatttttgcaaagatcagagttcacgtcgtgtatttaaccctgcacagactgccgctaagctcgcgagccgcgcccagggccgagcccagatggggccgaagaaagagcctactgtcacttcagcagttggcgccctgctccagaatcgcgtgctggtggcgaccaatgaagtccctactaagtccggcctagccatggaccctgccagcggtgccaaactacggcaaggattttccaagagtagtaagaaggattag

SEQ ID NO: 25662 - DNA, 669 bp, Artificial Sequence
  derived and/or modified sequence
atggccggggctgagcccttcctggctgatggcaaccaggagctgttcccctgtgaggtgtgtggcagaagatttgctgctgatgtgctggagagacatggccccatctgcaagaagctgttcaacaggaagaggaagcccttcagcagcctgaagcagaggctgcagggcacagacatccccaccgtgaagaagaccccccagagcaagagcccccctgtgaggaagagcaactggaggcagcagcacgaggacttcatcaatgccatccgcagcgccaagcagtgcatgctggccatcaaggagggccggcccctgcccccacctcctccacccagcctgaacccagactacatccagaggccctactgcatgaggcgcttcaatgaatctgctgctgagcggcacaccaacttctgcaaggaccagagcagccggcgggtcttcaacccagcccagacagctgccaagctggccagccgggcccagggccgggcccagatgggccccaagaaggagcccaccgtgaccagcgctgtgggcgccctgctgcagaacagagtgctggtggccaccaatgaggtgcccaccaagagcggcctggccatggaccctgccagcggggccaagctgcggcagggcttcagcaagagcagcaagaaggactag

SEQ ID NO: 25663 - DNA, 465 bp, Artificial Sequence
  derived and/or modified sequence
tgaggaaaccaggagctgttcccctgtgaggtgtgtggccgccgctttgctgctgatgtgctggagcggcacggccccatctgcaagaagctgttcaacaggaagaggaagcccttcagcagcctgaagcagaggctgcagggcacagacatccccaccgtgaagaagaccccccagagcaagagcccccctgtgaggaagagcaactggaggcagcagcacgaggacttcatcaatgccatccgcagcgccaagcagtgcatgctggccatcaaggagggccggcccctgcccccacctcctccacccagcctgaacccagactacatccagaggccctactgcatgaggcgcttcaatgaatctgctgctgagcggcacaccaacttctgcaaggaccagagcagcagaagagtcttcaacccagcccagacagctgccaagctggccagccgggcccagtag

SEQ ID NO: 25664 - DNA, 348 bp, Artificial Sequence
  derived and/or modified sequence
cctcctcctccacccagcctgaacccagactacatccagaggccctactgcatgaggcgcttcaatgaatctgctgctgagcggcacaccaacttctgcaaggaccagagcagcagaagagtcttcaacccagcccagacagctgccaagctggccagccgggcccagggccgggcccagatgggccccaagaaggagcccaccgtgaccagcgctgtgggcgccctgctgcagaacagagtgctggtggccaccaatgaggtgcccaccaagagcggcctggccatggaccctgccagcggggccaagctgcggcagggcttcagcaagagcagcaagaaggactag

SEQ ID NO: 25665 - DNA, 381 bp, Artificial Sequence
  derived and/or modified sequence
atgctggccatcaaggagggccggcccctgcccccacctcctccacccagcctgaacccagactacatccagaggccctactgcatgaggcgcttcaatgaatctgctgctgagcggcacaccaacttctgcaaggaccagagcagccggcgggtcttcaacccagcccagacagctgccaagctggccagccgggcccagggccgggcccagatgggccccaagaaggagcccaccgtgaccagcgctgtgggcgccctgctgcagaacagagtgctggtggccaccaatgaggtgcccaccaagagcggcctggccatggaccctgccagcggggccaagctgcggcagggcttcagcaagagcagcaagaaggactag

SEQ ID NO: 25666 - DNA, 669 bp, Artificial Sequence
  derived and/or modified sequence
atggccggcgccgagcccttcctggccgacggcaaccaggagctgttcccgtgcgaggtctgcggcagaagattcgccgccgacgttttggaaaggcatggtcccatctgcaagaaactgtttaacagaaagaggaagcccttctcaagcctcaagcagcgactccaagggacagatatcccaaccgtcaaaaaaacccctcaaagcaaatccccacccgtgcgtaaaagcaactggcgccagcaacatgaggattttattaacgccattcgatctgcaaaacagtgtatgttagcgattaaggagggccggcccctgcctcccccacccccgcccagcctcaaccccgactatatccaaagaccctattgtatgagacgcttcaacgagagcgcagccgaaaggcacaccaatttctgtaaagatcagtcttctaggcgtgtgttcaatccagcccagactgccgcgaagctggcgtcccgggctcagggccgggctcagatggggccaaaaaaggagccgactgtaacatccgcggtgggggcactcctgcagaacagagtgttggttgcaacaaacgaggtcccgacaaaatccggactcgctatggaccccgcaagcggcgctaagctccgccaggggttttccaaatctagcaaaaaagattag

SEQ ID NO: 25667 - DNA, 465 bp, Artificial Sequence
  derived and/or modified sequence
tgaggcaaccaggagctgttcccctgcgaggtgtgcggccggcggtttgctgccgatgtcctcgaaagacacggtcccatctgtaaaaagctctttaacagaaaaagaaagccattcagcagcttgaagcagagattgcaaggcacagacataccgacggtgaagaagacgccccagagcaagtcgcccccagtgcggaagagcaactggcgtcagcagcacgaggacttcattaacgctatccgtagtgcgaaacagtgtatgctggccattaaggagggaaggccactgcctcccccaccacccccctctctgaatcctgactatatccagcggccgtattgtatgcgaagattcaacgaaagtgcagccgaacggcatactaacttctgtaaagatcagagtagccgtagagtcttcaatccggctcagaccgcggccaagctggcctcaagggctcaatag

SEQ ID NO: 25668 - DNA, 348 bp, Artificial Sequence
  derived and/or modified sequence
cccccccccccccccagcctgaaccccgactacatccagcggccctactgtatgcggagatttaacgaaagcgccgcagagcggcataccaacttctgtaaggaccagtcctctcggagagtgttcaaccctgctcagactgcagccaaacttgctagcagggcccaaggcagggcccagatgggtccgaaaaaggagccaacagtgacatctgccgttggcgccctcttgcaaaatcgggttcttgtggcaacgaacgaagtgcctactaaatccggactggcgatggatcccgcctcaggagcaaagctgagacagggttttagtaaatcctcaaagaaagactag

SEQ ID NO: 25669 - DNA, 381 bp, Artificial Sequence
  derived and/or modified sequence
atgctggccatcaaggagggccggcccctgcccccccccccccccccgtctctgaaccctgattatatccagagaccttactgcatgcgccgcttcaatgaaagtgccgccgaaagacacacgaatttctgtaaggaccagtcttccaggcgggtctttaatccagctcagacagctgcgaaactggcctcccgagcgcagggtcgagcacagatggggcccaagaaagagccgactgtaacaagcgccgttggtgcacttctccagaatcgcgtcctcgtggcgacaaacgaagtccctacaaagagcggcctggccatggatcccgcgagtggtgctaaattgaggcaggggttctcaaagagctccaagaaggattag

SEQ ID NO: 25670 - DNA, 669 bp, Artificial Sequence
  derived and/or modified sequence
atggctggcgctgaaccattcctcgctgacggtaaccaagaactattcccctgcgaagtgtgtgggaggcgattcgccgctgatgtgctggaaagacacggccctatttgcaagaaactgttcaataggaaacgaaagcccttttctagtctcaaacaaaggctgcaggggaccgacatccccaccgtgaagaagacgccacagtcaaaaagcccacccgtccgcaaatctaattggcgccagcagcacgaggattttatcaacgctatcaggagtgccaagcagtgcatgttggccattaaggagggcagaccactgccacctcctccccctccgtctctcaaccccgattatatccagcgtccgtactgtatgcggcgattcaacgaatcagctgcagaacggcacacaaatttttgtaaggaccagtcaagccgtagagtcttcaacccagcccagacggccgcaaagctggcgtctagagctcagggcagggcccaaatgggacctaagaaggaaccaaccgtgacatctgctgtaggcgctctgctgcagaatcgagtgctggtcgcgactaacgaggtgccaaccaaaagcggactggctatggatccagcgtctggcgctaagttgcggcagggattctctaagagctccaagaaagactag

SEQ ID NO: 25671 - DNA, 465 bp, Artificial Sequence
  derived and/or modified sequence
tagggcaaccaggaattgtttccctgcgaggtgtgtggcaggcggtttgctgcagatgtgttagaaaggcatgggccaatttgtaagaagctcttcaatagaaagaggaagccattctcaagtctgaagcaaagacttcaaggaaccgacattccgacagtgaaaaaaacccctcagtcaaaatcgccgccagtacggaaatccaactggcgacagcaacacgaagactttattaacgcaatcaggtccgccaagcaatgcatgcttgccatcaaggaaggtagacccctacctcctcccccacctccaagcctaaatcctgactacatacagcgtccatattgcatgagacgttttaacgaatccgctgcagaaagacacacaaacttctgcaaagaccagagtagtagacgcgtctttaatcccgcacaaacagccgctaaactggcctcccgtgctcagtag

SEQ ID NO: 25672 - DNA, 348 bp, Artificial Sequence
  derived and/or modified sequence
ccgccaccgcctccaagtctgaatcccgactacatccagcggccttactgcatgcgcaggtttaacgaatccgcggctgagaggcacacaaacttctgcaaagaccaatcatctcggagagtttttaaccccgctcagaccgcagcaaagctcgcttcgagagctcagggaagggcccagatgggtccgaagaaggagcccaccgtgacttccgctgtaggtgctctgttgcagaacagggtgctagtcgcaactaatgaggtgcccaccaaatccgggcttgccatggatccggcttccggcgcaaagttgagacaagggttttccaaaagttctaaaaaggattag

SEQ ID NO: 25673 - DNA, 381 bp, Artificial Sequence
  derived and/or modified sequence
atgcttgctataaaagagggtagaccactcccacctccgccacctccatctctgaaccccgattacattcaaaggccatactgcatgcggaggtttaacgaaagcgctgcagagcgccataccaatttttgcaaagaccagagttcccgacgagttttcaatcctgctcaaacagccgcaaaactagcttcaagagctcagggcagggctcaaatgggccctaaaaaggaaccaacagtcacatccgcagtcggcgctctgctccagaatagagtcctggtcgccactaacgaagtgccgaccaaatccggcctagctatggaccccgcttccggggctaagctgcgccagggtttttctaagtctagtaaaaaagactag

SEQ ID NO: 25674 - protein, 177 aa, Artificial Sequence
  derived and/or modified sequence
MATNYSANQYEKAFSSKYLQNWSPTKPTKESISSHEGYTQIIANDRGHLLPSVPRSKANPWGSFMGTWQMPLKIPPARVTLTSRTTAGAASLTKWIQKNPDLLKASNGLCPEILGKPHDPDSQKKLRKKSITKTVQQARSPTIIPSSPAANLNSPDELQSSHPSAGHTPGPQRPAKS

SEQ ID NO: 25675 - DNA, 534 bp, Artificial Sequence
  derived and/or modified sequence
atggccaccaactacagcgccaaccagtacgagaaggccttcagcagcaagtacctgcagaactggagccccaccaagcccaccaaggagagcatcagcagccacgagggctacacccagatcatcgccaacgacagaggccacctgctgcccagcgtgcccagaagcaaggccaacccctggggcagcttcatgggcacctggcagatgcccctgaagatcccccccgccagagtgaccctgaccagcagaaccaccgccggcgccgccagcctgaccaagtggatccagaagaaccccgacctgctgaaggccagcaacggcctgtgccccgagatcctgggcaagccccacgaccccgacagccagaagaagctgagaaagaagagcatcaccaagaccgtgcagcaggccagaagccccaccatcatccccagcagccccgccgccaacctgaacagccccgacgagctgcagagcagccaccccagcgccggccacacccccggcccccagagacccgccaagagctag

SEQ ID NO: 25676 - DNA, 534 bp, Artificial Sequence
  derived and/or modified sequence
atggccaccaactattccgctaatcaatatgagaaagccttttccagcaaatacctgcagaattggtccccaactaaacctaccaaggaaagcatttcctctcacgaaggctacactcagataattgctaatgaccgcggacacctgctgccctccgtcccccgatccaaggccaacccctggggtagcttcatgggtacatggcaaatgcccctcaaaatcccacccgctagggtgacactgacgagcaggactacagcaggagctgccagcctgaccaagtggatccagaagaacccggacctgctgaaggcctctaacggactttgtccagaaatcctgggcaagccacatgacccagactctcagaagaaactccggaagaaaagcataaccaagactgtgcaacaggctagatcgcccactatcattccatcaagccctgcagccaatctcaactctcctgatgagctgcagtcttctcacccgtctgccggccacacaccaggacctcagcgacccgctaaatcctag

SEQ ID NO: 25677 - DNA, 534 bp, Artificial Sequence
  derived and/or modified sequence
atggccaccaactacagcgccaaccagtatgagaaggccttcagcagcaagtacctgcagaactggagccccaccaagcccaccaaggagagcatcagcagccatgagggctacacccagatcatcgccaatgaccggggccacctgctgcccagcgtgcccaggagcaaggccaacccctggggcagcttcatgggcacctggcagatgcccctgaagatccccccagcccgggtgaccctgaccagcaggaccacagctggagctgccagcctgaccaagtggatccagaagaacccagacctgctgaaggccagcaatggcctgtgcccagagatcctgggcaagccccatgaccctgacagccagaagaagctgaggaagaagagcatcaccaagacagtgcagcaggcccggagccccaccatcatccccagcagccctgctgccaacctgaacagcccagatgagctgcagagcagccaccccagcgctggccacaccccaggcccccagaggcctgccaagagctag

SEQ ID NO: 25678 - DNA, 534 bp, Artificial Sequence
  derived and/or modified sequence
atggccaccaactacagcgccaaccagtacgagaaggccttcagcagcaaatacctccagaactggagccccactaaaccaacaaaagaatcaatttcctctcacgagggatacacgcagatcatcgcaaatgatagagggcacctgttgccctccgtgccccggtccaaggctaatccatggggctcatttatgggcacctggcagatgcctctgaagattccccctgctcgagttacccttacctctcgaaccacggccggcgccgcatccttgactaagtggattcaaaagaatcccgacctactgaaggcaagcaacggtctgtgcccagagattcttggaaaaccccacgaccctgactctcaaaagaagctgagaaaaaagagtatcaccaagaccgtacaacaggccaggagtcccacaattattccatcctctcctgccgcaaaccttaatagccccgatgagttacagtccagtcaccccagtgccggccacacgccaggcccgcagcgtcctgcaaaaagctag

SEQ ID NO: 25679 - DNA, 534 bp, Artificial Sequence
  derived and/or modified sequence
atggcaacgaattattctgccaaccagtacgaaaaggcatttagcagtaaatacctgcagaactggagcccgaccaaaccaacaaaggaatctatcagttcccacgaggggtacacgcagatcatcgcaaacgaccgcggtcatcttctaccttctgtgcctcgaagtaaggcaaatccttggggatcttttatgggaacgtggcagatgccactgaagatacccccagctagagttacattgacctcgaggacgaccgccggtgctgcctcacttactaagtggatccagaaaaatcctgaccttctgaaggcctcaaatggcctttgtcccgagatcctagggaaaccccatgatcccgacagccagaagaagctgcgtaaaaagtcgatcacaaaaacagtgcagcaggcacggtcaccgaccatcattcctagtagtcccgcagccaatctgaacagccccgacgaactacagagcagccacccgagtgcgggtcacacgcccggtcctcagagacctgcaaagagctag

SEQ ID NO: 25680 - DNA, 774 bp, Artificial Sequence
  derived and/or modified sequence
aagatcatggccactaactacagtgccaaccagtatgaaaaggctttctcatccaagtatctgcagaactggtctcccactaagccaacaaaagagagcatctcttctcatgaaggctacactcaaattattgccaacgatcgtggtcatctactgccttctgtgccccgttccaaggcaaatccttggggttccttcatgggcacctggcaaatgcctctgaagataccccctgctcgggtgaccctgacctcccgtacaactgctggtgctgcctccctcaccaaatggatacagaaaaatcctgatttactcaaggcctccaatgggctgtgtcctgaaatcttaggcaagccccatgatccagacagtcagaagaaactcagaaagaagtctatcacaaagactgtacaacaagcacgaagtccaaccataattccaagctccccagctgccaacctcaattccccagatgaactccaaagctcacacccctctgcaggtcatactccaggtccccaaagaccagccaaatcctaagagcccacctggaagtccacgtatgctagaactctgggcagggcctaatctagctgaggtccagaaatacaaacctggaacttcatatggaccaagtggccacacactgaaaaacccgtatagcgactcagtgaaataaacaagagcccccagtcagaactgtgaaacagggaaattttggggtgggagtaaaagcaaatttggaaaataaacttttttttgttgaatctttta

SEQ ID NO: 25681 - protein, 228 aa, Artificial Sequence
  derived and/or modified sequence
MVRLTLDLIARNSNLKPRKEETISQCLKKITHINFSDKNIDAIEDLSLCKNLSVLYLYDNCISQITNLNYATNLTHLYLQNNCISCIENLRSLKKLEKLYLGGNYIAVIEGLEGLGELRELHVENQRLPLGEKLLFDPRTLHSLAKSLCILNISNNNIDDITDLELLENLNQLIAVDNQLLHVKDLEFLLNKLMKLWKIDLNGNPVCLKPKYRDRLILVSKSLGTYLY

SEQ ID NO: 25682 - protein, 355 aa, Artificial Sequence
  derived and/or modified sequence
MVRLTLDLIARNSNLKPRKEETISQCLKKITHINFSDKNIDAIEDLSLCKNLSVLYLYDNCISQITNLNYATNLTHLYLQNNCISCIENLRSLKKLEKLYLGGNYIAVIEGLEGLGELRELHVENQRLPLGEKLLFDPRTLHSLAKSLCILNISNNNIDDITDLELLENLNQLIAVDNQLLHVKDLEFLLNKLMKLWKIDLNGNPVCLKPKYRDRLILVSKSLEFLDGKEIKNIERQFLMNWKASKDAKKISKKRSSKNEDASNSLISNFKTMHHIVPVYYPQVGKPKLAFFSEIQRYPVNANASPESSCPFWPNIERKNLSLKQSESLLTKNDVHEPHLFHNPEEKENLFVENE

SEQ ID NO: 25683 - protein, 309 aa, Artificial Sequence
  derived and/or modified sequence
MVRLTLDLIARNSNLKPRKEETISQCLKKITHINFSDKNIDAIEDLSLCKNLSVLYLYDNCISQITNLNYATNLTHLYLQNNCISCIENLRSLKKLEKLYLGGNYIAVIEGLEGLGELRELHVENQRLPLGEKLLFDPRTLHSLAKSLCILNISNNNIDDITDLELLENLNQLIAVDNQLLHVKDLEFLLNKLMKLWKIDLNGNPVCLKPKYRDRLILVSKSLEFLDGKEIKNIERQFLMNWKASKDAKKISKKRSSKNEDASNSLISNFKTMHHIVPVYYPQVGKPKLAFFSEIQRYPVNANASPESS

SEQ ID NO: 25684 - DNA, 687 bp, Artificial Sequence
  derived and/or modified sequence
atggtgagactgaccctggacctgatcgccagaaacagcaacctgaagcccagaaaggaggagaccatcagccagtgcctgaagaagatcacccacatcaacttcagcgacaagaacatcgacgccatcgaggacctgagcctgtgcaagaacctgagcgtgctgtacctgtacgacaactgcatcagccagatcaccaacctgaactacgccaccaacctgacccacctgtacctgcagaacaactgcatcagctgcatcgagaacctgagaagcctgaagaagctggagaagctgtacctgggcggcaactacatcgccgtgatcgagggcctggagggcctgggcgagctgagagagctgcacgtggagaaccagagactgcccctgggcgagaagctgctgttcgaccccagaaccctgcacagcctggccaagagcctgtgcatcctgaacatcagcaacaacaacatcgacgacatcaccgacctggagctgctggagaacctgaaccagctgatcgccgtggacaaccagctgctgcacgtgaaggacctggagttcctgctgaacaagctgatgaagctgtggaagatcgacctgaacggcaaccccgtgtgcctgaagcccaagtacagagacagactgatcctggtgagcaagagcctgggcacctacctgtactag

SEQ ID NO: 25685 - DNA, 1068 bp, Artificial Sequence
  derived and/or modified sequence
atggtgagactgaccctggacctgatcgccagaaacagcaacctgaagcccagaaaggaggagaccatcagccagtgcctgaagaagatcacccacatcaacttcagcgacaagaacatcgacgccatcgaggacctgagcctgtgcaagaacctgagcgtgctgtacctgtacgacaactgcatcagccagatcaccaacctgaactacgccaccaacctgacccacctgtacctgcagaacaactgcatcagctgcatcgagaacctgagaagcctgaagaagctggagaagctgtacctgggcggcaactacatcgccgtgatcgagggcctggagggcctgggcgagctgagagagctgcacgtggagaaccagagactgcccctgggcgagaagctgctgttcgaccccagaaccctgcacagcctggccaagagcctgtgcatcctgaacatcagcaacaacaacatcgacgacatcaccgacctggagctgctggagaacctgaaccagctgatcgccgtggacaaccagctgctgcacgtgaaggacctggagttcctgctgaacaagctgatgaagctgtggaagatcgacctgaacggcaaccccgtgtgcctgaagcccaagtacagagacagactgatcctggtgagcaagagcctggagttcctggacggcaaggagatcaagaacatcgagagacagttcctgatgaactggaaggccagcaaggacgccaagaagatcagcaagaagagaagcagcaagaacgaggacgccagcaacagcctgatcagcaacttcaagaccatgcaccacatcgtgcccgtgtactacccccaggtgggcaagcccaagctggccttcttcagcgagatccagagataccccgtgaacgccaacgccagccccgagagcagctgccccttctggcccaacatcgagagaaagaacctgagcctgaagcagagcgagagcctgctgaccaagaacgacgtgcacgagccccacctgttccacaaccccgaggagaaggagaacctgttcgtggagaacgagtag

SEQ ID NO: 25686 - DNA, 930 bp, Artificial Sequence
  derived and/or modified sequence
atggtgagactgaccctggacctgatcgccagaaacagcaacctgaagcccagaaaggaggagaccatcagccagtgcctgaagaagatcacccacatcaacttcagcgacaagaacatcgacgccatcgaggacctgagcctgtgcaagaacctgagcgtgctgtacctgtacgacaactgcatcagccagatcaccaacctgaactacgccaccaacctgacccacctgtacctgcagaacaactgcatcagctgcatcgagaacctgagaagcctgaagaagctggagaagctgtacctgggcggcaactacatcgccgtgatcgagggcctggagggcctgggcgagctgagagagctgcacgtggagaaccagagactgcccctgggcgagaagctgctgttcgaccccagaaccctgcacagcctggccaagagcctgtgcatcctgaacatcagcaacaacaacatcgacgacatcaccgacctggagctgctggagaacctgaaccagctgatcgccgtggacaaccagctgctgcacgtgaaggacctggagttcctgctgaacaagctgatgaagctgtggaagatcgacctgaacggcaaccccgtgtgcctgaagcccaagtacagagacagactgatcctggtgagcaagagcctggagttcctggacggcaaggagatcaagaacatcgagagacagttcctgatgaactggaaggccagcaaggacgccaagaagatcagcaagaagagaagcagcaagaacgaggacgccagcaacagcctgatcagcaacttcaagaccatgcaccacatcgtgcccgtgtactacccccaggtgggcaagcccaagctggccttcttcagcgagatccagagataccccgtgaacgccaacgccagccccgagagcagctag

SEQ ID NO: 25687 - DNA, 687 bp, Artificial Sequence
  derived and/or modified sequence
atggtaagacttaccctggatcttatcgctcgcaactcgaatttaaaaccccgcaaggaggaaacaatttctcagtgtctgaagaaaatcacacacattaacttctccgacaagaatattgacgccatcgaggacctttccctgtgcaagaatctctccgtgttgtacctctacgacaattgtatttcccaaattacaaacctgaattatgcaacaaaccttacccacctctatctgcagaataattgtatttcttgcattgagaacctgcggagcttgaagaagctggagaaactttacctgggggggaactatatcgcagtgatcgaaggcctcgagggcctaggggagttgagggagttacacgtggaaaatcaacgactgcctctaggcgagaaactcttgttcgatccaagaactctgcattccctcgccaagagcttgtgtattttgaatattagcaacaataatattgatgacattactgaccttgaactgctggaaaatctgaaccagttaatcgcagtggataaccaactacttcacgtaaaggatctcgaatttctgctgaataagctgatgaagttatggaaaatcgacctcaacggcaatcccgtgtgcctcaagccaaaataccgtgatcgtctgattctggtttccaagagtcttgggacatacctgtattag

SEQ ID NO: 25688 - DNA, 1068 bp, Artificial Sequence
  derived and/or modified sequence
atggtacgcctcactctggatctaatagctaggaactctaacctcaagccaagaaaagaggagactatttcacagtgcctgaaaaaaatcacacatatcaatttctctgacaagaatatcgatgcaatagaggatctgagcctgtgcaagaacctgtcagttttatacctgtatgataactgcatcagtcaaatcacgaaccttaactacgctaccaatttgacacacctgtacttgcagaataactgcatatcatgcatcgagaacttgagatctctgaagaagctggagaaactttatcttggagggaattacatcgctgtcattgaaggcttagagggcctgggagagctgcgggaactgcatgtagagaatcagcggcttcccctgggcgagaagcttctgttcgacccccggaccctccacagtctggccaaatccttgtgcatactcaatatcagtaataacaatattgacgacatcaccgacttggagctcctcgagaacctcaatcaacttatagcagtagataatcaactgctccacgtcaaagatttggaatttctcttaaacaagctcatgaaactgtggaagattgatttaaacggaaatcccgtctgcttaaaacccaagtaccgcgatcgcctgattctcgtgtccaagagcctagagttcctggacgggaaggagatcaaaaatattgaacggcaatttcttatgaactggaaagcctctaaagacgccaagaaaatatccaagaaaagaagtagcaaaaacgaggatgcctcaaattctctgatctctaactttaaaactatgcaccatatagtgcccgtctactatcctcaagtgggcaagcccaaactggccttcttttccgagattcaacgatatccagtgaacgccaatgcctcgccagagagtagttgtcctttctggccaaatattgagcgaaagaatcttagccttaaacaatctgagtcactcttgacaaaaaacgacgttcatgaacctcatctattccacaaccctgaagaaaaagaaaatttgtttgtggaaaatgagtag

SEQ ID NO: 25689 - DNA, 930 bp, Artificial Sequence
  derived and/or modified sequence
atggttcgcttgaccctggatctcatagcacgaaactccaacctcaaacctcgcaaagaagagacaatatcccaatgtcttaagaaaatcacccacataaacttttctgacaagaacatcgatgcgatcgaagatctgagtctgtgcaagaacctgagcgtactatacttgtacgacaattgtatttcacagatcacaaacttgaactacgctactaaccttacacacctctatttgcagaataattgtatatcctgtatcgaaaacctcagaagtctaaaaaaactggagaaactgtatttgggcggcaactacattgctgtcatcgaaggcctggaagggcttggagaattacgcgagctccacgttgaaaaccagagattgccgttgggtgaaaaactgctcttcgaccctcggactctgcactccctggccaagtccctctgtatcttgaacatttccaacaacaatatcgatgatatcacagatttggaactgctggagaatctgaaccagcttattgcagttgataatcaactgctccacgtgaaagatctggagttcctactgaacaagcttatgaaactttggaaaattgacttgaatggaaatccagtgtgtctgaaacccaaatatagagacagactgatactggttagcaagagcttggagttcctggacggaaaggaaattaagaatattgagaggcagttcctcatgaattggaaagctagtaaagacgcaaaaaaaatttctaagaagagatcctccaaaaacgaagacgcttcaaatagcctgattagcaacttcaaaaccatgcatcacatagtcccagtgtactatcctcaggtagggaagcctaaacttgcattcttctctgaaatacaaagataccctgtcaatgctaacgcgagccccgaaagctcttag

SEQ ID NO: 25690 - DNA, 687 bp, Artificial Sequence
  derived and/or modified sequence
atggtgcggctgaccctggacctgattgccaggaacagcaacctgaagcccaggaaggaggagaccatcagccagtgcctgaagaagatcacccacatcaacttcagtgacaagaacattgatgccatcgaggacctgagcctgtgcaagaacctgtctgtgctgtacctgtatgacaactgcatcagccagatcaccaacctgaactatgccaccaacctgacccacctgtacctgcagaacaactgcatcagctgcatcgagaacctgcggagcctgaagaagctggagaagctgtacctgggcggcaactacatcgctgtgattgagggcctggagggcctgggggagctgcgggagctgcacgtggagaaccagaggctgcccctgggggagaagctgctgtttgaccccaggaccctgcacagcctggccaagagcctgtgcatcctgaacatcagcaacaacaacattgatgacatcacagacctggagctgctggagaacctgaaccagctgattgctgtggacaaccagctgctgcacgtgaaggacctggagttcctgctgaacaagctgatgaagctgtggaagattgacctgaatggaaatcctgtgtgcctgaagcccaagtacagagacaggctcatcctggtgtccaagagcctgggcacctacctgtactag

SEQ ID NO: 25691 - DNA, 1068 bp, Artificial Sequence
  derived and/or modified sequence
atggtgcggctgaccctggacctgattgccaggaacagcaacctgaagcccaggaaggaggagaccatcagccagtgcctgaagaagatcacccacatcaacttcagtgacaagaacattgatgccatcgaggacctgagcctgtgcaagaacctgtctgtgctgtacctgtatgacaactgcatcagccagatcaccaacctgaactatgccaccaacctgacccacctgtacctgcagaacaactgcatcagctgcatcgagaacctgcggagcctgaagaagctggagaagctgtacctgggcggcaactacatcgctgtgattgagggcctggagggcctgggggagctgcgggagctgcacgtggagaaccagaggctgcccctgggggagaagctgctgtttgaccccaggaccctgcacagcctggccaagagcctgtgcatcctgaacatcagcaacaacaacattgatgacatcacagacctggagctgctggagaacctgaaccagctgattgctgtggacaaccagctgctgcacgtgaaggacctggagttcctgctgaacaagctgatgaagctgtggaagattgacctgaatggaaatcctgtgtgcctgaagcccaagtacagagacaggctcatcctggtgtccaagagcctggagttcctggatggcaaggagatcaagaacatcgagcggcagttcctgatgaactggaaggccagcaaggatgccaagaagatcagcaagaagaggagcagcaagaatgaagatgccagcaacagcctcatcagcaacttcaagaccatgcaccacatcgtgcctgtgtactacccccaggtgggcaagcccaagctggccttcttcagcgagatccagcgctaccctgtgaatgccaatgccagccctgagagcagctgccccttctggcccaacatcgagaggaagaacctgagcctgaagcagagcgagagcctgctgaccaagaatgatgtgcatgagccccacctgttccacaaccctgaggagaaggagaacctgtttgtggagaatgaatag

SEQ ID NO: 25692 - DNA, 930 bp, Artificial Sequence
  derived and/or modified sequence
atggtgcggctgaccctggacctgattgccaggaacagcaacctgaagcccaggaaggaggagaccatcagccagtgcctgaagaagatcacccacatcaacttcagtgacaagaacattgatgccatcgaggacctgagcctgtgcaagaacctgtctgtgctgtacctgtatgacaactgcatcagccagatcaccaacctgaactatgccaccaacctgacccacctgtacctgcagaacaactgcatcagctgcatcgagaacctgcggagcctgaagaagctggagaagctgtacctgggcggcaactacatcgctgtgattgagggcctggagggcctgggggagctgcgggagctgcacgtggagaaccagaggctgcccctgggggagaagctgctgtttgaccccaggaccctgcacagcctggccaagagcctgtgcatcctgaacatcagcaacaacaacattgatgacatcacagacctggagctgctggagaacctgaaccagctgattgctgtggacaaccagctgctgcacgtgaaggacctggagttcctgctgaacaagctgatgaagctgtggaagattgacctgaatggaaatcctgtgtgcctgaagcccaagtacagagacaggctcatcctggtgtccaagagcctggagttcctggatggcaaggagatcaagaacatcgagcggcagttcctgatgaactggaaggccagcaaggatgccaagaagatcagcaagaagaggagcagcaagaatgaagatgccagcaacagcctcatcagcaacttcaagaccatgcaccacatcgtgcctgtgtactacccccaggtgggcaagcccaagctggccttcttcagcgagatccagcgctaccctgtgaatgccaatgccagccctgagagcagctag

SEQ ID NO: 25693 - DNA, 687 bp, Artificial Sequence
  derived and/or modified sequence
atggtgcggctgaccctggacctgatcgcccggaacagcaacctgaagcccaggaaggaggaaacaatttcacagtgtctgaagaaaataacacacattaacttcagcgacaagaatattgatgccattgaagaccttagcctttgcaaaaacttaagcgtactgtatttgtatgataattgtatttcccagattacgaaccttaattatgcgactaatctcacccatctttacctccagaacaactgcatctcctgcattgagaacctgcgttcccttaaaaagctggagaaactgtatttgggggggaactacatagcagttattgagggattggaggggttgggcgagctcagagagttgcatgtcgagaaccagagactgccactcggggagaaactgctgttcgacccccgcacgctgcactcacttgcaaagtccttgtgcatcctgaatatcagcaataacaatatagacgatataaccgatctcgagctgctggagaacctgaatcagttgatcgcagtggacaatcagctgttgcatgtaaaagatctggagttcctgcttaataaattgatgaaactgtggaagatcgacctgaatggcaatcccgtgtgtcttaagcccaaatatagagatagactcatactcgtcagcaaatcccttggaacatacctatattag

SEQ ID NO: 25694 - DNA, 1068 bp, Artificial Sequence
  derived and/or modified sequence
atggtgcggctgaccctggacctgatcgcccggaacagcaacctgaagcccaggaaagaagaaaccattagccagtgtctcaagaagattacgcacattaactttagtgacaaaaacatcgacgcaatcgaggatctctctctctgcaaaaacctctccgtgttgtacctgtacgacaactgtatcagtcagataactaatttgaattacgcaacgaatctgacccacctgtacttgcagaataactgcatcagctgcatagaaaacctaaggtctctgaagaagttggagaaactgtacctcgggggcaactatattgccgtcatagaaggcctcgagggtctgggcgaactgagggaattgcacgtagagaatcagagattgccacttggcgaaaagctactgttcgacccaaggacactgcacagcttagctaaaagtctctgtattttgaatatctccaacaataatattgatgatatcactgatttggaactgttggaaaacctaaaccaactgatcgccgtggacaaccagctccttcacgtaaaggacctggaatttctgctgaataaactcatgaagctttggaaaatcgatctcaatggaaatcccgtctgcttgaaacccaagtatcgcgatcgcctgattttagtttcaaagtccctggaatttctggatggaaaagagattaagaacatcgagaggcagttcctgatgaattggaaggccagcaaggatgcaaagaaaatcagtaagaaacgcagctcaaagaacgaggatgcctccaactccttgatctctaattttaaaacaatgcaccacattgtacctgtctactatcctcaggtcgggaagccaaaacttgctttcttttccgagatccaacggtatcccgtgaatgcaaacgcttcaccggaatctagttgtccattctggcccaacattgagcgcaaaaatcttagcttgaagcaaagcgagtccctgttgactaaaaacgatgtccacgagccacatctgttccacaatcccgaagagaaggaaaatctgttcgtggagaatgagtag

SEQ ID NO: 25695 - DNA, 930 bp, Artificial Sequence
  derived and/or modified sequence
atggtgcggctgaccctggacctgatcgcccggaacagcaacctgaaacctcggaaagaggagacgatatcccaatgcctgaagaagataacccatatcaacttctccgacaagaacattgatgctattgaggatttaagtctgtgcaagaatctgagtgtcctgtacctctacgacaattgtatctcccaaatcaccaatttgaactacgcgactaacctgactcacctatacctgcagaataactgcatctcatgcatcgagaatttaaggtcactcaaaaagctggaaaaattgtatctgggtgggaactatatcgctgtcatcgaaggactagaaggcctcggggaacttagagagctgcatgtcgagaaccagagacttcctctgggtgaaaaacttctgtttgacccacgtactctccacagtcttgccaaatccctgtgtattttaaatatctcgaacaataatatcgatgatatcaccgacttagaattactcgaaaatctgaatcagcttatcgctgtggacaaccagctgctccacgtgaaggatctcgagtttctcctgaataaactgatgaagctgtggaagattgacctgaatgggaatcccgtttgcctgaagcctaagtaccgagaccggttgatcctggtgagcaagagccttgagttcctggatggtaaagaaataaagaatatcgagcggcagtttttgatgaactggaaagcatccaaggacgcaaagaaaattagtaaaaaaaggagtagcaagaacgaggatgctagtaacagtctgatcagtaacttcaagacaatgcaccatatcgtccccgtttattatccccaagtgggcaaacccaagctggccttcttctctgaaatccagcggtatccggtgaacgctaacgctagcccggagtctagttag

SEQ ID NO: 25696 - DNA, 687 bp, Artificial Sequence
  derived and/or modified sequence
atggtgcgactgacacttgacctgattgcgcgaaatagtaacctgaagccacgcaaggaagagactattagccagtgtttaaagaagatcacgcatattaatttttcggataaaaacatcgacgccattgaagatcttagtctttgcaagaatctgagcgtcctctacctctacgataattgcattagtcagatcacaaacctcaactatgcaactaatctcactcatctgtacttacaaaacaattgtattagttgtatagaaaacttaaggtccctgaaaaagcttgagaagctctacctgggaggaaattacatcgctgtgatcgagggattagaggggctgggtgagctcagagagctgcacgtggaaaatcagcgtttaccacttggtgagaaacttctgttcgacccgaggactctccattcactagcaaagtccctctgtatactcaacatctctaataataatatcgacgatatcacagacctggaactgctagagaatttgaaccaactgattgccgtggacaaccaattgcttcacgtgaaggatctggagttcctgttaaacaaactcatgaagctgtggaagatagatcttaacggtaatcctgtgtgtttgaagcctaagtaccgggatcgacttattcttgtttctaagtctctggggacgtacctctattag

SEQ ID NO: 25697 - DNA, 1068 bp, Artificial Sequence
  derived and/or modified sequence
atggtcagactcacactggacttgatcgccaggaacagcaatctgaagcccagaaaggaggagactatctctcagtgtttgaaaaagattacccacatcaattttagcgacaaaaacatcgacgctatcgaggacctgtctttatgcaagaacttgtcggtactctatctatacgataattgtatctctcaaattactaaccttaactacgccactaatcttacacatctgtacttgcaaaacaattgcatctcatgcatagaaaatctgcgtagtctgaagaagttggagaaactctatctggggggaaattacatcgcagttatcgagggattggaggggcttggcgagctcagggagctgcacgtcgaaaaccagagactccctctgggcgagaaactcctattcgatccgaggacgttacactcgctggccaagagcctctgcattctaaatatttccaacaacaatattgacgatatcacagatctagagctcctggagaaccttaaccaactgatcgctgtggataatcagctgctacacgtcaaagatcttgaatttctgctgaacaaactcatgaaattgtggaagatcgacttgaacggcaatccagtctgtctgaaaccaaagtatcgggataggctaatcctggtatctaaatccctcgaattcctcgacgggaaagagatcaagaatattgagaggcagtttctcatgaattggaaagcctccaaggacgcgaagaaaatttcaaagaagcgctccagtaagaatgaggatgcctcaaactccctcatctcaaattttaaaacaatgcatcacattgtacctgtttactatccacaagtgggcaagcccaagttggcctttttttccgagattcaacggtatcccgttaacgcaaacgctagtccagagtcaagctgccctttttggcctaatatagaaagaaaaaatctgagcttaaaacagtcggagagtttgcttactaagaatgatgtgcacgagcctcatctatttcataatccagaagaaaaggagaatttattcgtcgaaaacgagtag

SEQ ID NO: 25698 - DNA, 930 bp, Artificial Sequence
  derived and/or modified sequence
atggttagactgaccttggatctcatagcgaggaattcaaatctgaaaccaaggaaagaggaaacaatttcccagtgcctaaaaaaaattacgcacatcaatttctccgataagaacattgatgcaatcgaagaccttagcctctgcaagaatctcagtgtgttgtatctctatgataattgcatttcccaaattaccaatctgaattacgcaaccaatctgacccacttgtaccttcagaacaattgtatcagttgtatcgagaacctcagaagtctcaagaaactcgagaaattgtacttaggtgggaactatatcgctgtcattgaagggctggaggggttgggtgagctgcgggagttgcacgtggagaatcagaggttgcccctcggagaaaaactgctgtttgatcctaggaccttgcatagcctggctaaaagcctttgtatactcaacatctctaacaacaatatcgacgacattacggatcttgagttactggaaaaccttaaccaattaattgcagttgacaatcagctgctgcacgtcaaagatctggagtttctgctgaacaaactcatgaaactctggaaaatcgacttaaatggaaaccccgtgtgtctgaagccaaaataccgtgacagacttatccttgtgagtaagtcgctcgaatttctagacggaaaggagatcaaaaacattgaacggcagttcctgatgaattggaaagcatctaaagacgccaaaaagatctcgaagaaacgatcatcaaagaatgaggatgcctctaacagtcttatctcgaacttcaaaactatgcatcacatagtgcctgtttattaccctcaggtcggaaaaccaaagctggcattcttctcagaaatacaaaggtatcctgtaaacgctaatgcatcccctgaatcttcctag

SEQ ID NO: 25699 - DNA, 1084 bp, Artificial Sequence
  derived and/or modified sequence
gggacccggcgccgatgaaaccgaccaaactggagttagctaccggactgtcccgcgagcgaaagttggaaataatacctaaacctacttcttgacatggtgtcaaaacagagcttttgctgagagtttgatttataaagaaattatggttcgactgaccttggatctaattgccagaaacagcaatcttaaaccccgaaaagaagaaaccatttcacagtgcctgaagaaaataactcatataaatttttcagacaaaaatatagatgcaattgaagacctctctctttgcaaaaatcttagtgttttatatttatatgataattgtattagtcaaatcactaacctgaattatgccacaaatctgacccacttgtacctacaaaacaattgtatttcatgtatagagaacctcaggtcattaaagaaactggaaaaactgtatctgggaggcaattacattgctgtcatagaaggtttagaaggattaggagaactaagagagcttcatgttgagaatcagaggcttccccttggggaaaagcttctgtttgatccaagaactcttcattctctggcaaaatccctctgtatattgaatatcagcaataataatattgatgacattacagacttagaactactagagaatcttaatcagctcatagccgttgacaaccaacttctgcatgtgaaggatttggagtttttactgaacaagttgatgaagctgtggaaaattgatctaaatggaaatcctgtttgtctcaaaccaaaatacagggacagactgatattggtgtccaaatcactgggtacatatttatattaatataatttttaagagaatgacacctagttaactttttggttattttaccagcaagctttcagaaatataaatctgacatctggatctgtgaaaattgtcaactttaaattcaatattttgaataagagcaaaagttaaaattgacaaataaagcatgaaaaacatctgctgttcagaagtaattaaagcacctgatacttattccttaaggaggatattttgctattaccaataaaaatggttagtcataaa

SEQ ID NO: 25700 - DNA, 1213 bp, Artificial Sequence
  derived and/or modified sequence
gggacccggcgccgatgaaaccgaccaaactggagttagctaccggactgtcccgcgagcgaaagttggaaataatacctaaacctacttcttgacatggtgtcaaaacagagcttttgctgagagtttgatttataaagaaattatggttcgactgaccttggatctaattgccagaaacagcaatcttaaaccccgaaaagaagaaaccatttcacagtgcctgaagaaaataactcatataaatttttcagacaaaaatatagatgcaattgaagacctctctctttgcaaaaatcttagtgttttatatttatatgataattgtattagtcaaatcactaacctgaattatgccacaaatctgacccacttgtacctacaaaacaattgtatttcatgtatagagaacctcaggtcattaaagaaactggaaaaactgtatctgggaggcaattacattgctgtcatagaaggtttagaaggattaggagaactaagagagcttcatgttgagaatcagaggcttccccttggggaaaagcttctgtttgatccaagaactcttcattctctggcaaaatccctctgtatattgaatatcagcaataataatattgatgacattacagacttagaactactagagaatcttaatcagctcatagccgttgacaaccaacttctgcatgtgaaggatttggagtttttactgaacaagttgatgaagctgtggaaaattgatctaaatggaaatcctgtttgtctcaaaccaaaatacagggacagactgatattggtgtccaaatcactggaatttcttgatggaaaagaaattaaaaatatagaaagacaattcctaatgaattggaaagcatccaaagatgccaagaaaatcagcaaaaaaaggagcagtaaaaatgaggatgcaagcaattcactcataagtaacttcaaaacaatgcatcatatagttcctgtttattacccacaggtgggtaagccaaaattagcctttttctctgaaatacagagataccctgtaaatgcaaatgcatctccagaaagttcctgtcctttttggccaaacatagaaagaaagaatctctctttgaagcaatctgaaagcttgctgacaaaaaatgatgtgcatgaacctcacctcttccataacccagaagaaaaagaaaatttgtttgtggaaaatgagtaa

SEQ ID NO: 25701 - DNA, 1282 bp, Artificial Sequence
  derived and/or modified sequence
ggctgtactttgcattttgaagagtctaagaatacattccatatcttcaaatattttattgtgggcaatttataataacatagcctgggtaatgccaatgtaaagttggaaataatacctaaacctacttcttgacatggtgtcaaaacagagcttttgctgagagtttgatttataaagaaattatggttcgactgaccttggatctaattgccagaaacagcaatcttaaaccccgaaaagaagaaaccatttcacagtgcctgaagaaaataactcatataaatttttcagacaaaaatatagatgcaattgaagacctctctctttgcaaaaatcttagtgttttatatttatatgataattgtattagtcaaatcactaacctgaattatgccacaaatctgacccacttgtacctacaaaacaattgtatttcatgtatagagaacctcaggtcattaaagaaactggaaaaactgtatctgggaggcaattacattgctgtcatagaaggtttagaaggattaggagaactaagagagcttcatgttgagaatcagaggcttccccttggggaaaagcttctgtttgatccaagaactcttcattctctggcaaaatccctctgtatattgaatatcagcaataataatattgatgacattacagacttagaactactagagaatcttaatcagctcatagccgttgacaaccaacttctgcatgtgaaggatttggagtttttactgaacaagttgatgaagctgtggaaaattgatctaaatggaaatcctgtttgtctcaaaccaaaatacagggacagactgatattggtgtccaaatcactggaatttcttgatggaaaagaaattaaaaatatagaaagacaattcctaatgaattggaaagcatccaaagatgccaagaaaatcagcaaaaaaaggagcagtaaaaatgaggatgcaagcaattcactcataagtaacttcaaaacaatgcatcatatagttcctgtttattacccacaggtgggtaagccaaaattagcctttttctctgaaatacagagataccctgtaaatgcaaatgcatctccagaaagttcctgagaagattacactaaaattatttaagagatggggaatctctctttgaagcaatctgaaagcttgctgacaaaaaatgatgtgcatgaacctcacctcttccataacccagaagaaaaagaaaatttgtttgtggaaaatgagtaaattcagcctcaagtgacaggaaa

SEQ ID NO: 25702 - protein, 334 aa, Artificial Sequence
  derived and/or modified sequence
MRGPSWSRPRPLLLLLLLLSPWPVWAQVSATASPSGSLGAPDCPEVCTCVPGGLASCSALSLPAVPPGLSLRLRALLLDHNRVRALPPGAFAGAGALQRLDLRENGLHSVHVRAFWGLGALQLLDLSANQLEALAPGTFAPLRALRNLSLAGNRLARLEPAALGALPLLRSLSLQDNELAALAPGLLGRLPALDALHLRGNPWGCGCALRPLCAWLRRHPLPASEAETVLCVWPGRLTLSPLTAFSDAAFSHCAQPLALRDLAVVYTLGPASFLVSLASCLALGSGLTACRARRRRLRTAALRPPRPPDPNPDPDPHGCASPADPGSPAAAAQA

SEQ ID NO: 25703 - DNA, 1005 bp, Artificial Sequence
  derived and/or modified sequence
atgagaggacctagctggagcagaccacgccctcttctgctcttacttcttctcctgtcaccttggcccgtatgggctcaggtctctgcgactgcatcaccttccggttccctgggcgcccccgactgtcccgaggtgtgtacgtgtgtgccgggcggtcttgcctcctgctcagcactgtcgctgcctgccgtgccccccggcctctctcttcgtttgcgagccctgctgctggaccacaacagagtcagggccttaccaccgggcgcctttgcaggtgctggggccctccagcgactggacttgagagaaaatgggctgcatagtgtgcatgttcgcgcattttgggggctcggcgctttacagctcctggatctctcggctaaccagctagaagccctagcccccggaaccttcgcacctcttcgggccttaagaaacctgtcacttgcaggaaacaggttagctcggctagagcctgcagcacttggggcacttcctttactccgttcactaagcctgcaggataatgaattagcggccctggcgcctggactacttgggcggctgcctgccttggacgctctgcatctgagagggaacccatggggctgtggctgcgccttgcgtcccctttgtgcttggttaaggcgacatccgttacctgccagcgaagcggagacagttctgtgcgtctggcctgggaggcttactctctctcccctgaccgctttctctgacgccgccttcagtcattgtgcccaacctctggcgctgcgagatctggccgttgtgtacacactggggccagcctcattcctggtctcactcgcatcctgtctcgcccttggaagcgggctaaccgcctgtcgggcacgcagaaggcgcctgcggacagcagccttgaggccaccaagaccgccagatcctaatccagaccctgatccccatggatgtgcgtcccctgccgacccaggttctcctgcagcagcagcacaagcttag

SEQ ID NO: 25704 - DNA, 1005 bp, Artificial Sequence
  derived and/or modified sequence
atgaggggccccagctggagccggccccggcccctgctgctgctgctgctgctgctgagcccctggcctgtgtgggcccaggtgtctgccacagccagccccagcggcagcctgggcgccccagactgcccagaggtgtgcacctgtgtgcctgggggcctggccagctgcagcgccctgagcctgcctgctgtgcccccaggcctgagcctgcggctgcgggccctgctgctggaccacaacagagtgcgggccctgcccccaggggcctttgctggggccggggccctgcagaggctggacctgcgggagaatggcctgcacagcgtgcacgtgcgggccttctggggcctgggcgccctgcagctgctggacctgagcgccaaccagctggaggccctggcccctggcacctttgcccccctgcgggccctgaggaacctgagcctggccggcaaccggctggcccggctggagcctgctgccctgggcgccctgcccctgctgcggagcctgagcctgcaggacaatgagctggccgccctggcccctggcctgctgggccgcctgcctgccctggatgccctgcacctgcggggcaacccctggggctgcggctgtgccctgcggcccctgtgtgcctggctgcggcggcaccccctgcctgccagcgaggccgagaccgtgctgtgtgtgtggccaggccgcctgaccctgagccccctgacagccttcagtgatgctgccttcagccactgtgcccagcccctggccctgcgggacctggccgtggtgtacaccctgggccctgccagcttcctggtgtccctggccagctgcctggccctgggcagcggcctgacagcctgccgggccaggagaagaaggctgaggacagctgccctgcggcccccccggcccccagaccccaacccagaccctgacccccacggctgtgccagccctgctgaccccggcagccctgctgctgctgcccaggcctag

SEQ ID NO: 25705 - DNA, 1209 bp, Artificial Sequence
  derived and/or modified sequence
aatatttgtgcaggcgccgcaggaacgggctccgcggacgacgggctccagggacgcacaggcagcgggcctcccaccgcgggtgccgggggcgggggggctgcccccatgcggggcccttcctggtcgcggcctcggccgctgctgctgctgttgctgctgctgtcgccttggcctgtctgggcccaggtgtcggccacggcctcgccctcggggtccctgggcgccccggactgccccgaggtgtgcacgtgcgtgccgggaggcctggccagctgctcggcactctcgctgcccgccgtgcccccgggcctgagcctgcgcctgcgcgcgctgctgctggaccacaaccgcgtccgtgcgctgccgccaggtgccttcgcgggagcgggcgcgctacagcgcctggacctgcgcgagaacgggctgcactcggtgcatgtgcgagccttctggggcctgggcgcgctgcagctgctggacctgagcgccaaccagctggaagcactggcaccagggactttcgcgccgctgcgcgcgctgcgcaacctctcattggccggcaaccggctggcgcgcctggagcccgcggcgctaggcgcgctcccgctgctgcgctcactcagcctgcaggacaacgagctggcggcactcgcgccggggctgctgggccgcctgcccgctctagacgcgctgcacctgcgcggcaacccttggggctgcgggtgcgcgctgcgcccgctctgcgcctggctgcgccggcacccgctgcccgcgtcagaggccgagacggtgctctgcgtgtggccgggacgcctgacgctcagccccctgactgccttttccgacgccgcctttagccattgcgcgcagccgctcgccctgcgggacctggccgtggtttacacgctcgggccggcctccttcctcgtcagcctggcttcctgcctggcgctgggctctgggctcaccgcctgccgtgcgcgccgccgccgcctccgcaccgccgccctccgcccgccgagaccgccagacccgaaccccgatcccgacccccacggctgtgcctcgcccgcggacccggggagccccgccgctgccgcccaagcctgagcggccgcggccgcctggagcgctcgaagcttcccccatgcctttgccctccctttacactgtctgccggcgtcaacaagcgacacagaccgaaaa

SEQ ID NO: 25706 - DNA, 1005 bp, Artificial Sequence
  derived and/or modified sequence
atgcggggccccagctggagccggccccggcccctgctgctgctgctcctcctcttatcaccctggcccgtttgggctcaggtaagtgctacagcctctcccagcggtagcctgggcgcccccgattgtcccgaggtttgcacatgtgtcccgggaggtctcgctagttgtagcgctctgtccctccctgccgtgccacccggactctcgctgagactgcgggcgcttctgcttgatcacaaccgggtacgcgctcttccgcctggcgcattcgccggagcgggtgcgttacaacggttagacctccgggagaacggcctccatagcgtccacgtccgagcgttttggggcctcggcgccctgcagttgcttgacctctctgctaaccagctcgaagctctcgcccctggaacttttgctccgcttagagcactgcggaacctgtccctggctggcaaccgccttgccaggctcgagccagcggctctcggcgcgctgcccctcttgcgttctttgtccctccaggataacgaacttgccgccctggctcctgggctgctgggcaggcttccagcactggatgcacttcacctgcgagggaacccttggggttgtggttgcgccctgcgccctctctgcgcatggctacggaggcaccctctccctgcgagcgaggccgagacagtgctttgcgtgtggcctggacggctcaccctatctcccctaaccgctttcagcgatgccgccttttcgcactgtgctcagccccttgcactgcgcgacttggctgtggtgtacaccctgggccctgccagctttctggtatccctagcctcatgtctggccctgggaagcggattgacggcttgtcgagcccggagacgaaggcttaggaccgccgcccttcggccaccccggccaccagaccctaacccggaccctgatcctcacgggtgtgcctctcctgccgatccgggttccccagctgctgcggcgcaggcctag

SEQ ID NO: 25707 - DNA, 1005 bp, Artificial Sequence
  derived and/or modified sequence
atgagagggccatcttggagcagaccgagaccactgctgttactgctcttactgctgtctccctggcccgtctgggcccaggtatccgccaccgcctctccttcaggctccctgggggctcccgactgccctgaagtgtgtacatgtgtaccaggtgggctggcttcatgctccgctctgtccttgcctgccgttccccctggactctcactgcgcctgagggcgctgctgctcgaccataatagagtaagggctctccccccaggagcatttgccggtgcaggagctctgcagaggcttgacctccgggagaatggcctccattccgtgcacgtaagggccttctgggggctgggtgcactacagctgctggaccttagtgctaaccagctggaagctttggccccagggacttttgccccattgcgggcattgcgaaacctttcgctcgcagggaaccgccttgcccgactcgaaccagcagcactgggcgctctcccattgctgcggagcctctccttgcaggacaacgaactcgccgctcttgcacctggtctgctgggcagattgcctgcactcgacgcgctgcacctaaggggcaatccttgggggtgtgggtgcgctctgaggccattgtgtgcctggctccgaagacacccccttcctgccagcgaagcagaaacagtgctgtgcgtctggcccggacgtctcaccttgtcacccttaaccgctttttctgatgctgccttctctcattgcgctcagcctttggccttgagggaccttgcagtggtatacacactgggtcctgcctccttccttgtttctctggcatcctgtctggctctggggagcggcctgacagcatgcagggcccgacgtaggcggctgaggaccgcggcattgcgtccacctcgacctcctgatccaaatccagaccctgatccccacggctgcgcctcaccagccgatcctggcagcccggcagctgcggctcaggcctag

SEQ ID NO: 25708 - DNA, 1005 bp, Artificial Sequence
  derived and/or modified sequence
atgagaggccccagctggagcagacccagacccctgctgctgctgctgctgctgctgagcccctggcccgtgtgggcccaggtgagcgccaccgccagccccagcggcagcctgggcgcccccgactgccccgaggtgtgcacctgcgtgcccggcggcctggccagctgcagcgccctgagcctgcccgccgtgccccccggcctgagcctgagactgagagccctgctgctggaccacaacagagtgagagccctgccccccggcgccttcgccggcgccggcgccctgcagagactggacctgagagagaacggcctgcacagcgtgcacgtgagagccttctggggcctgggcgccctgcagctgctggacctgagcgccaaccagctggaggccctggcccccggcaccttcgcccccctgagagccctgagaaacctgagcctggccggcaacagactggccagactggagcccgccgccctgggcgccctgcccctgctgagaagcctgagcctgcaggacaacgagctggccgccctggcccccggcctgctgggcagactgcccgccctggacgccctgcacctgagaggcaacccctggggctgcggctgcgccctgagacccctgtgcgcctggctgagaagacaccccctgcccgccagcgaggccgagaccgtgctgtgcgtgtggcccggcagactgaccctgagccccctgaccgccttcagcgacgccgccttcagccactgcgcccagcccctggccctgagagacctggccgtggtgtacaccctgggccccgccagcttcctggtgagcctggccagctgcctggccctgggcagcggcctgaccgcctgcagagccagaagaagaagactgagaaccgccgccctgagaccccccagaccccccgaccccaaccccgaccccgacccccacggctgcgccagccccgccgaccccggcagccccgccgccgccgcccaggcctag

SEQ ID NO: 25709 - protein, 140 aa, Artificial Sequence
  derived and/or modified sequence
MHRGVGPAFRVVRKMAASGAEPQVLVQYLVLRKDLSQAPFSWPAGALVAQACHAATAALHTHRDHPHTAAYLQELGRMRKVVLEAPDETTLKELAETLQQKNIDHMLWLEQPENIATCIALRPYPKEEVGQYLKKFRLFK

SEQ ID NO: 25710 - DNA, 423 bp, Artificial Sequence
  derived and/or modified sequence
atgcacagaggcgtgggccccgccttcagagtggtgagaaagatggccgccagcggcgccgagccccaggtgctggtgcagtacctggtgctgagaaaggacctgagccaggcccccttcagctggcccgccggcgccctggtggcccaggcctgccacgccgccaccgccgccctgcacacccacagagaccacccccacaccgccgcctacctgcaggagctgggcagaatgagaaaggtggtgctggaggcccccgacgagaccaccctgaaggagctggccgagaccctgcagcagaagaacatcgaccacatgctgtggctggagcagcccgagaacatcgccacctgcatcgccctgagaccctaccccaaggaggaggtgggccagtacctgaagaagttcagactgttcaagtag

SEQ ID NO: 25711 - DNA, 423 bp, Artificial Sequence
  derived and/or modified sequence
atgcacaggggggtgggcccggcttttcgggtagttcgtaagatggctgcgtctggtgcggagccccaggtgctggttcaatacctcgttctgcgaaaagatctaagtcaggcacccttttcatggcctgccggagctctagtggcacaggcctgccatgcagccacagccgccctgcacacccaccgggaccatcctcacaccgcggcttatctgcaggagctggggaggatgaggaaggtcgtgctggaagcccccgatgaaacaacactgaaggagttggcagagactctccagcaaaagaacattgaccacatgctttggctagagcaacctgagaacattgctacatgcattgccttgaggccctatcccaaggaggaggtgggacagtatctaaaaaagtttcgtcttttcaagtag

SEQ ID NO: 25712 - DNA, 423 bp, Artificial Sequence
  derived and/or modified sequence
atgcaccggggcgtgggccctgccttccgggtggtgaggaagatggccgccagcggggctgagccccaggtgctggtgcagtacctggtgctgaggaaggacctgagccaggcccccttctcctggccagctggggccctggtggcccaggcctgccacgccgccacagctgccctgcacacccaccgggaccacccccacacagctgcctacctgcaggagctgggccgcatgaggaaggtggtgctggaggccccagatgagaccaccctgaaggagctggccgagaccctgcagcagaagaacatcgaccacatgctgtggctggagcagccagaaaatattgccacctgcatcgccctgcggccctaccccaaggaggaggtgggccagtacctgaagaagttccgcctcttcaagtag

SEQ ID NO: 25713 - DNA, 423 bp, Artificial Sequence
  derived and/or modified sequence
atgcaccggggcgtgggccccgccttccgggtggtgcggaagatggccgcatcaggcgccgaaccacaggtgctggtgcagtatctggtcttacgaaaggacctctcccaagccccgttttcatggcccgccggagcactggtggctcaggcctgccacgccgctacagcagcactacatacgcacagggaccacccgcatactgccgcctacctccaggagctcgggcgcatgcggaaggtggtgcttgaggctccagacgagaccacactaaaggagttagcagaaactctgcaacagaagaatattgatcatatgctttggttggagcagcctgagaacatcgcaacttgcatcgccctcaggccctatcctaaggaagaagtcgggcagtatctgaagaaatttcggctttttaagtag

SEQ ID NO: 25714 - DNA, 853 bp, Artificial Sequence
  derived and/or modified sequence
ccaagatgcaccggggagtaggtccggcctttcgggtggtcaggaagatggcggcctctggggcggagccgcaggtcctggtacaatacttggtgttacgaaaggatctatcacaagctccgttctcctggccggcgggcgcactggtagcgcaggcttgtcacgcggccaccgcggccttgcacactcaccgcgaccacccgcacacagccgcttacctccaagagctggggcgcatgcgcaaagtggtcctcgaggccccagatgagaccaccctaaaggagctggccgagaccctgcaacagaagaacattgaccacatgctgtggcttgagcaaccagagaatatcgccacttgtattgctctccggccctaccccaaggaagaagtgggccagtatttgaagaagttccgattgttcaagtaactgctgctttgatgtgtttgaatacgcaggccacccattccaaagcatcatgtgttccttgcagtgtcagcttgctcccgtctttcagttgtgacaatttcttgagggttaagcacatgttcatattaaagttgtcattaataactacttcctcttattaataagttcaagtggggaaggtgggagagcagtattgtctggggatcattgctcaaatagaagatttggttagactctcctgtggggctcaaggaaactcccttccagtcactcgggtttgaaactttgcttttgaattccttcttattcacatccagttatcatatttcattgaatctaagataacatcaactttaagatgcggtagtattttatgtattgttaaaaaatatgccggcaaattaaacacttgtatttcaataaca

SEQ ID NO: 25715 - DNA, 423 bp, Artificial Sequence
  derived and/or modified sequence
atgcaccgcggagtaggtcctgccttccgtgtggtcaggaaaatggcggcttcaggggcagagccccaagtgttagtccagtacctcgtgttgcggaaggacctctcacaggctccgttcagctggccggcaggagcgctcgtggcacaggcttgccatgccgcaactgccgcactgcacacccacagggatcatccacatacagctgcatacttgcaggaattggggagaatgcgcaaagtggtgctcgaagcccctgacgagactaccctgaaggagttggccgaaacactacagcaaaagaatattgaccatatgctttggctggagcagcctgagaacatcgctacttgtatcgctctccgcccataccctaaagaagaagtgggccaatatctgaaaaaattccgattgttcaagtag

SEQ ID NO: 25716 - protein, 1649 aa, Artificial Sequence
  derived and/or modified sequence
MAGGRGAPGRGRDEPPESYPQRQDHELQALEAIYGADFQDLRPDACGPVKEPPEINLVLYPQGLTGEEVYVKVDLRVKCPPTYPDVVPEIELKNAKGLSNESVNLLKSRLEELAKKHCGEVMIFELAYHVQSFLSEHNKPPPKSFHEEMLERRAQEEQQRLLEAKRKEEQEQREILHEIQRRKEEIKEEKKRKEMAKQERLEIASLSNQDHTSKKDPGGHRTAAILHGGSPDFVGNGKHRANSSGRSRRERQYSVCNSEDSPGSCEILYFNMGSPDQLMVHKGKCIGSDEQLGKLVYNALETATGGFVLLYEWVLQWQKKMGPFLTSQEKEKIDKCKKQIQGTETEFNSLVKLSHPNVVRYLAMNLKEQDDSIVVDILVEHISGVSLAAHLSHSGPIPVHQLRRYTAQLLSGLDYLHSNSVVHKVLSASNVLVDAEGTVKITDYSISKRLADICKEDVFEQTRVRFSDNALPYKTGKKGDVWRLGLLLLSLSQGQECGEYPVTIPSDLPADFQDFLKKCVCLDDKERWSPQQLLKHSFINPQPKMPLVEQSPEDSEGQDYVETVIPSNRLPSAAFFSETQRQFSRYFIEFEELQLLGKGAFGAVIKVQNKLDGCCYAVKRIPINPASRQFRRIKGEVTLLSRLHHENIVRYYNAWIERHERPAGPGTPPPDSGPLAKDDRAARGQPASDTDGLDSVEAAAPPPILSSSVEWSTSGERSASARFPATGPGSSDDEDDDEDEHGGVFSQSFLPASDSESDIIFDNEDENSKSQNQDEDCNEKNGCHESEPSVTTEAVHYLYIQMEYCEKSTLRDTIDQGLYRDTVRLWRLFREILDGLAYIHEKGMIHRDLKPVNIFLDSDDHVKIGDFGLATDHLAFSADSKQDDQTGDLIKSDPSGHLTGMVGTALYVSPEVQGSTKSAYNQKVDLFSLGIIFFEMSYHPMVTASERIFVLNQLRDPTSPKFPEDFDDGEHAKQKSVISWLLNHDPAKRPTATELLKSELLPPPQMEESELHEVLHHTLTNVDGKAYRTMMAQIFSQRISPAIDYTYDSDILKGNFSIRTAKMQQHVCETIIRIFKRHGAVQLCTPLLLPRNRQIYEHNEAALFMDHSGMLVMLPFDLRIPFARYVARNNILNLKRYCIERVFRPRKLDRFHPKELLECAFDIVTSTTNSFLPTAEIIYTIYEIIQEFPALQERNYSIYLNHTMLLKAILLHCGIPEDKLSQVYIILYDAVTEKLTRREVEAKFCNLSLSSNSLCRLYKFIEQKGDLQDLMPTINSLIKQKTGIAQLVKYGLKDLEEVVGLLKKLGIKLQVLINLGLVYKVQQHNGIIFQFVAFIKRRQRAVPEILAAGGRYDLLIPQFRGPQALGPVPTAIGVSIAIDKISAAVLNMEESVTISSCDLLVVSVGQMSMSRAINLTQKLWTAGITAEIMYDWSQSQEELQEYCRHHEITYVALVSDKEGSHVKVKSFEKERQTEKRVLETELVDHVLQKLRTKVTDERNGREASDNLAVQNLKGSFSNASGLFEIHGATVVPIVSVLAPEKLSASTRRRYETQVQTRLQTSLANLHQKSSEIEILAVDLPKETILQFLSLEWDADEQAFNTTVKQLLSRLPKQRYLKLVCDEIYNIKVEKKVSVLFLYSYRDDYYRILF

SEQ ID NO: 25717 - protein, 1621 aa, Artificial Sequence
  derived and/or modified sequence
MAGGRGAPGRGRDEPPESYPQRQDHELQALEAIYGADFQDLRPDACGPVKEPPEINLVLYPQGLTGEEVYVKVDLRVKCPPTYPDVVPEIELKNAKGLSNESVNLLKSRLEELAKKHCGEVMIFELAYHVQSFLSEHNKPPPKSFHEEMLERRAQEEQQRLLEAKRKEEQEQREILHEIQRRKEEIKEEKKRKEMAKQERLEIASLSNQDHTSKKDPGGHRTAAILHGGSPDFVGNGKHRANSSGRSRRERQYSVCNSEDSPGSCEILYFNMGSPDQLMVHKGKCIGSDEQLGKLVYNALETATGGFVLLYEWVLQWQKKMGPFLTSQEKEKIDKCKKQIQGTETEFNSLVKLSHPNVVRYLAMNLKEQDDSIVVDILVEHISGVSLAAHLSHSGPIPVHQLRRYTAQLLSGLDYLHSNSVVHKVLSASNVLVDAEGTVKITDYSISKRLADICKEDVFEQTRVRFSDNALPYKTGKKGDVWRLGLLLLSLSQGQECGEYPVTIPSDLPADFQDFLKKCVCLDDKERWSPQQLLKHSFINPQPKMPLVEQSPEDSEGQDYVETVIPSNRLPSAAFFSETQRQFSRYFIEFEELQLLGKGAFGAVIKVQNKLDGCCYAVKRIPINPASRQFRRIKGEVTLLSRLHHENIVRYYNAWIERHERPAGPGTPPPDSGPLAKDDRAARGQPASDTDGLDSVEAAAPPPILSSSVEWSTSGERSASARFPATGPGSSDDEDDDEDEHGGVFSQSFLPASDSESDIIFDNEDENSKSQNQMEYCEKSTLRDTIDQGLYRDTVRLWRLFREILDGLAYIHEKGMIHRDLKPVNIFLDSDDHVKIGDFGLATDHLAFSADSKQDDQTGDLIKSDPSGHLTGMVGTALYVSPEVQGSTKSAYNQKVDLFSLGIIFFEMSYHPMVTASERIFVLNQLRDPTSPKFPEDFDDGEHAKQKSVISWLLNHDPAKRPTATELLKSELLPPPQMEESELHEVLHHTLTNVDGKAYRTMMAQIFSQRISPAIDYTYDSDILKGNFSIRTAKMQQHVCETIIRIFKRHGAVQLCTPLLLPRNRQIYEHNEAALFMDHSGMLVMLPFDLRIPFARYVARNNILNLKRYCIERVFRPRKLDRFHPKELLECAFDIVTSTTNSFLPTAEIIYTIYEIIQEFPALQERNYSIYLNHTMLLKAILLHCGIPEDKLSQVYIILYDAVTEKLTRREVEAKFCNLSLSSNSLCRLYKFIEQKGDLQDLMPTINSLIKQKTGIAQLVKYGLKDLEEVVGLLKKLGIKLQVLINLGLVYKVQQHNGIIFQFVAFIKRRQRAVPEILAAGGRYDLLIPQFRGPQALGPVPTAIGVSIAIDKISAAVLNMEESVTISSCDLLVVSVGQMSMSRAINLTQKLWTAGITAEIMYDWSQSQEELQEYCRHHEITYVALVSDKEGSHVKVKSFEKERQTEKRVLETELVDHVLQKLRTKVTDERNGREASDNLAVQNLKGSFSNASGLFEIHGATVVPIVSVLAPEKLSASTRRRYETQVQTRLQTSLANLHQKSSEIEILAVDLPKETILQFLSLEWDADEQAFNTTVKQLLSRLPKQRYLKLVCDEIYNIKVEKKVSVLFLYSYRDDYYRILF

SEQ ID NO: 25718 - protein, 1427 aa, Artificial Sequence
  derived and/or modified sequence
  misc_feature (1)..(1): Xaa can be any naturally occurring amino acid
XAKQERLEIASLSNQDHTSKKDPGGHRTAAILHGGSPDFVGNGKHRANSSGRSRRERQYSVCNSEDSPGSCEILYFNMGSPDQLMVHKGKCIGSDEQLGKLVYNALETATGGFVLLYEWVLQWQKKMGPFLTSQEKEKIDKCKKQIQGTETEFNSLVKLSHPNVVRYLAMNLKEQDDSIVVDILVEHISGVSLAAHLSHSGPIPVHQLRRYTAQLLSGLDYLHSNSVVHKVLSASNVLVDAEGTVKITDYSISKRLADICKEDVFEQTRVRFSDNALPYKTGKKGDVWRLGLLLLSLSQGQECGEYPVTIPSDLPADFQDFLKKCVCLDDKERWSPQQLLKHSFINPQPKMPLVEQSPEDSEGQDYVETVIPSNRLPSAAFFSETQRQFSRYFIEFEELQLLGKGAFGAVIKVQNKLDGCCYAVKRIPINPASRQFRRIKGEVTLLSRLHHENIVRYYNAWIERHERPAGPGTPPPDSGPLAKDDRAARGQPASDTDGLDSVEAAAPPPILSSSVEWSTSGERSASARFPATGPGSSDDEDDDEDEHGGVFSQSFLPASDSESDIIFDNEDENSKSQNQMEYCEKSTLRDTIDQGLYRDTVRLWRLFREILDGLAYIHEKGMIHRDLKPVNIFLDSDDHVKIGDFGLATDHLAFSADSKQDDQTGDLIKSDPSGHLTGMVGTALYVSPEVQGSTKSAYNQKVDLFSLGIIFFEMSYHPMVTASERIFVLNQLRDPTSPKFPEDFDDGEHAKQKSVISWLLNHDPAKRPTATELLKSELLPPPQMEESELHEVLHHTLTNVDGKAYRTMMAQIFSQRISPAIDYTYDSDILKGNFSIRTAKMQQHVCETIIRIFKRHGAVQLCTPLLLPRNRQIYEHNEAALFMDHSGMLVMLPFDLRIPFARYVARNNILNLKRYCIERVFRPRKLDRFHPKELLECAFDIVTSTTNSFLPTAEIIYTIYEIIQEFPALQERNYSIYLNHTMLLKAILLHCGIPEDKLSQVYIILYDAVTEKLTRREVEAKFCNLSLSSNSLCRLYKFIEQKGDLQDLMPTINSLIKQKTGIAQLVKYGLKDLEEVVGLLKKLGIKLQVLINLGLVYKVQQHNGIIFQFVAFIKRRQRAVPEILAAGGRYDLLIPQFRGPQALGPVPTAIGVSIAIDKISAAVLNMEESVTISSCDLLVVSVGQMSMSRAINLTQKLWTAGITAEIMYDWSQSQEELQEYCRHHEITYVALVSDKEGSHVKVKSFEKERQTEKRVLETELVDHVLQKLRTKVTDERNGREASDNLAVQNLKGSFSNASGLFEIHGATVVPIVSVLAPEKLSASTRRRYETQVQTRLQTSLANLHQKSSEIEILAVDLPKETILQFLSLEWDADEQAFNTTVKQLLSRLPKQRYLKLVCDEIYNIKVEKKVSVLFLYSYRDDYYRILF

SEQ ID NO: 25719 - DNA, 4866 bp, Artificial Sequence
  derived and/or modified sequence
atggccggcggcagaggcgcccccggcagaggcagagacgagccccccgagagctacccccagagacaggaccacgagctgcaggccctggaggccatctacggcgccgacttccaggacctgagacccgacgcctgcggccccgtgaaggagccccccgagatcaacctggtgctgtacccccagggcctgaccggcgaggaggtgtacgtgaaggtggacctgagagtgaagtgcccccccacctaccccgacgtggtgcccgagatcgagctgaagaacgccaagggcctgagcaacgagagcgtgaacctgctgaagagcagactggaggagctggccaagaagcactgcggcgaggtgatgatcttcgagctggcctaccacgtgcagagcttcctgagcgagcacaacaagcccccccccaagagcttccacgaggagatgctggagagaagagcccaggaggagcagcagagactgctggaggccaagagaaaggaggagcaggagcagagagagatcctgcacgagatccagagaagaaaggaggagatcaaggaggagaagaagagaaaggagatggccaagcaggagagactggagatcgccagcctgagcaaccaggaccacaccagcaagaaggaccccggcggccacagaaccgccgccatcctgcacggcggcagccccgacttcgtgggcaacggcaagcacagagccaacagcagcggcagaagcagaagagagagacagtacagcgtgtgcaacagcgaggacagccccggcagctgcgagatcctgtacttcaacatgggcagccccgaccagctgatggtgcacaagggcaagtgcatcggcagcgacgagcagctgggcaagctggtgtacaacgccctggagaccgccaccggcggcttcgtgctgctgtacgagtgggtgctgcagtggcagaagaagatgggccccttcctgaccagccaggagaaggagaagatcgacaagtgcaagaagcagatccagggcaccgagaccgagttcaacagcctggtgaagctgagccaccccaacgtggtgagatacctggccatgaacctgaaggagcaggacgacagcatcgtggtggacatcctggtggagcacatcagcggcgtgagcctggccgcccacctgagccacagcggccccatccccgtgcaccagctgagaagatacaccgcccagctgctgagcggcctggactacctgcacagcaacagcgtggtgcacaaggtgctgagcgccagcaacgtgctggtggacgccgagggcaccgtgaagatcaccgactacagcatcagcaagagactggccgacatctgcaaggaggacgtgttcgagcagaccagagtgagattcagcgacaacgccctgccctacaagaccggcaagaagggcgacgtgtggagactgggcctgctgctgctgagcctgagccagggccaggagtgcggcgagtaccccgtgaccatccccagcgacctgcccgccgacttccaggacttcctgaagaagtgcgtgtgcctggacgacaaggagagatggagcccccagcagctgctgaagcacagcttcatcaacccccagcccaagatgcccctggtggagcagagccccgaggacagcgagggccaggactacgtggagaccgtgatccccagcaacagactgcccagcgccgccttcttcagcgagacccagagacagttcagcagatacttcatcgagttcgaggagctgcagctgctgggcaagggcgccttcggcgccgtgatcaaggtgcagaacaagctggacggctgctgctacgccgtgaagagaatccccatcaaccccgccagcagacagttcagaagaatcaagggcgaggtgaccctgctgagcagactgcaccacgagaacatcgtgagatactacaacgcctggatcgagagacacgagagacccgccggccccggcacccccccccccgacagcggccccctggccaaggacgacagagccgccagaggccagcccgccagcgacaccgacggcctggacagcgtggaggccgccgcccccccccccatcctgagcagcagcgtggagtggagcaccagcggcgagagaagcgccagcgccagattccccgccaccggccccggcagcagcgacgacgaggacgacgacgaggacgagcacggcggcgtgttcagccagagcttcctgcccgccagcgacagcgagagcgacatcatcttcgacaacgaggacgagaacagcaagagccagaaccagatggagtactgcgagaagagcaccctgagagacaccatcgaccagggcctgtacagagacaccgtgagactgtggagactgttcagagagatcctggacggcctggcctacatccacgagaagggcatgatccacagagacctgaagcccgtgaacatcttcctggacagcgacgaccacgtgaagatcggcgacttcggcctggccaccgaccacctggccttcagcgccgacagcaagcaggacgaccagaccggcgacctgatcaagagcgaccccagcggccacctgaccggcatggtgggcaccgccctgtacgtgagccccgaggtgcagggcagcaccaagagcgcctacaaccagaaggtggacctgttcagcctgggcatcatcttcttcgagatgagctaccaccccatggtgaccgccagcgagagaatcttcgtgctgaaccagctgagagaccccaccagccccaagttccccgaggacttcgacgacggcgagcacgccaagcagaagagcgtgatcagctggctgctgaaccacgaccccgccaagagacccaccgccaccgagctgctgaagagcgagctgctgccccccccccagatggaggagagcgagctgcacgaggtgctgcaccacaccctgaccaacgtggacggcaaggcctacagaaccatgatggcccagatcttcagccagagaatcagccccgccatcgactacacctacgacagcgacatcctgaagggcaacttcagcatcagaaccgccaagatgcagcagcacgtgtgcgagaccatcatcagaatcttcaagagacacggcgccgtgcagctgtgcacccccctgctgctgcccagaaacagacagatctacgagcacaacgaggccgccctgttcatggaccacagcggcatgctggtgatgctgcccttcgacctgagaatccccttcgccagatacgtggccagaaacaacatcctgaacctgaagagatactgcatcgagagagtgttcagacccagaaagctggacagattccaccccaaggagctgctggagtgcgccttcgacatcgtgaccagcaccaccaacagcttcctgcccaccgccgagatcatctacaccatctacgagatcatccaggagttccccgccctgcaggagagaaactacagcatctacctgaaccacaccatgctgctgaaggccatcctgctgcactgcggcatccccgaggacaagctgagccaggtgtacatcatcctgtacgacgccgtgaccgagaagctgaccagaagagaggtggaggccaagttctgcaacctgagcctgagcagcaacagcctgtgcagactgtacaagttcatcgagcagaagggcgacctgcaggacctgatgcccaccatcaacagcctgatcaagcagaagaccggcatcgcccagctggtgaagtacggcctgaaggacctggaggaggtggtgggcctgctgaagaagctgggcatcaagctgcaggtgctgatcaacctgggcctggtgtacaaggtgcagcagcacaacggcatcatcttccagttcgtggccttcatcaagagaagacagagagccgtgcccgagatcctggccgccggcggcagatacgacctgctgatcccccagttcagaggcccccaggccctgggccccgtgcccaccgccatcggcgtgagcatcgccatcgacaagatcagcgccgccgtgctgaacatggaggagagcgtgaccatcagcagctgcgacctgctggtggtgagcgtgggccagatgagcatgagcagagccatcaacctgacccagaagctgtggaccgccggcatcaccgccgagatcatgtacgactggagccagagccaggaggagctgcaggagtactgcagacaccacgagatcacctacgtggccctggtgagcgacaaggagggcagccacgtgaaggtgaagagcttcgagaaggagagacagaccgagaagagagtgctggagaccgagctggtggaccacgtgctgcagaagctgagaaccaaggtgaccgacgagagaaacggcagagaggccagcgacaacctggccgtgcagaacctgaagggcagcttcagcaacgccagcggcctgttcgagatccacggcgccaccgtggtgcccatcgtgagcgtgctggcccccgagaagctgagcgccagcaccagaagaagatacgagacccaggtgcagaccagactgcagaccagcctggccaacctgcaccagaagagcagcgagatcgagatcctggccgtggacctgcccaaggagaccatcctgcagttcctgagcctggagtgggacgccgacgagcaggccttcaacaccaccgtgaagcagctgctgagcagactgcccaagcagagatacctgaagctggtgtgcgacgagatctacaacatcaaggtggagaagaaggtgagcgtgctgttcctgtacagctacagagacgactactacagaatcctgttctag

SEQ ID NO: 25720 - DNA, 4284 bp, Artificial Sequence
  derived and/or modified sequence
tgagccaagcaggagagactggagatcgccagcctgagcaaccaggaccacaccagcaagaaggaccccggcggccacagaaccgccgccatcctgcacggcggcagccccgacttcgtgggcaacggcaagcacagagccaacagcagcggcagaagcagaagagagagacagtacagcgtgtgcaacagcgaggacagccccggcagctgcgagatcctgtacttcaacatgggcagccccgaccagctgatggtgcacaagggcaagtgcatcggcagcgacgagcagctgggcaagctggtgtacaacgccctggagaccgccaccggcggcttcgtgctgctgtacgagtgggtgctgcagtggcagaagaagatgggccccttcctgaccagccaggagaaggagaagatcgacaagtgcaagaagcagatccagggcaccgagaccgagttcaacagcctggtgaagctgagccaccccaacgtggtgagatacctggccatgaacctgaaggagcaggacgacagcatcgtggtggacatcctggtggagcacatcagcggcgtgagcctggccgcccacctgagccacagcggccccatccccgtgcaccagctgagaagatacaccgcccagctgctgagcggcctggactacctgcacagcaacagcgtggtgcacaaggtgctgagcgccagcaacgtgctggtggacgccgagggcaccgtgaagatcaccgactacagcatcagcaagagactggccgacatctgcaaggaggacgtgttcgagcagaccagagtgagattcagcgacaacgccctgccctacaagaccggcaagaagggcgacgtgtggagactgggcctgctgctgctgagcctgagccagggccaggagtgcggcgagtaccccgtgaccatccccagcgacctgcccgccgacttccaggacttcctgaagaagtgcgtgtgcctggacgacaaggagagatggagcccccagcagctgctgaagcacagcttcatcaacccccagcccaagatgcccctggtggagcagagccccgaggacagcgagggccaggactacgtggagaccgtgatccccagcaacagactgcccagcgccgccttcttcagcgagacccagagacagttcagcagatacttcatcgagttcgaggagctgcagctgctgggcaagggcgccttcggcgccgtgatcaaggtgcagaacaagctggacggctgctgctacgccgtgaagagaatccccatcaaccccgccagcagacagttcagaagaatcaagggcgaggtgaccctgctgagcagactgcaccacgagaacatcgtgagatactacaacgcctggatcgagagacacgagagacccgccggccccggcacccccccccccgacagcggccccctggccaaggacgacagagccgccagaggccagcccgccagcgacaccgacggcctggacagcgtggaggccgccgcccccccccccatcctgagcagcagcgtggagtggagcaccagcggcgagagaagcgccagcgccagattccccgccaccggccccggcagcagcgacgacgaggacgacgacgaggacgagcacggcggcgtgttcagccagagcttcctgcccgccagcgacagcgagagcgacatcatcttcgacaacgaggacgagaacagcaagagccagaaccagatggagtactgcgagaagagcaccctgagagacaccatcgaccagggcctgtacagagacaccgtgagactgtggagactgttcagagagatcctggacggcctggcctacatccacgagaagggcatgatccacagagacctgaagcccgtgaacatcttcctggacagcgacgaccacgtgaagatcggcgacttcggcctggccaccgaccacctggccttcagcgccgacagcaagcaggacgaccagaccggcgacctgatcaagagcgaccccagcggccacctgaccggcatggtgggcaccgccctgtacgtgagccccgaggtgcagggcagcaccaagagcgcctacaaccagaaggtggacctgttcagcctgggcatcatcttcttcgagatgagctaccaccccatggtgaccgccagcgagagaatcttcgtgctgaaccagctgagagaccccaccagccccaagttccccgaggacttcgacgacggcgagcacgccaagcagaagagcgtgatcagctggctgctgaaccacgaccccgccaagagacccaccgccaccgagctgctgaagagcgagctgctgccccccccccagatggaggagagcgagctgcacgaggtgctgcaccacaccctgaccaacgtggacggcaaggcctacagaaccatgatggcccagatcttcagccagagaatcagccccgccatcgactacacctacgacagcgacatcctgaagggcaacttcagcatcagaaccgccaagatgcagcagcacgtgtgcgagaccatcatcagaatcttcaagagacacggcgccgtgcagctgtgcacccccctgctgctgcccagaaacagacagatctacgagcacaacgaggccgccctgttcatggaccacagcggcatgctggtgatgctgcccttcgacctgagaatccccttcgccagatacgtggccagaaacaacatcctgaacctgaagagatactgcatcgagagagtgttcagacccagaaagctggacagattccaccccaaggagctgctggagtgcgccttcgacatcgtgaccagcaccaccaacagcttcctgcccaccgccgagatcatctacaccatctacgagatcatccaggagttccccgccctgcaggagagaaactacagcatctacctgaaccacaccatgctgctgaaggccatcctgctgcactgcggcatccccgaggacaagctgagccaggtgtacatcatcctgtacgacgccgtgaccgagaagctgaccagaagagaggtggaggccaagttctgcaacctgagcctgagcagcaacagcctgtgcagactgtacaagttcatcgagcagaagggcgacctgcaggacctgatgcccaccatcaacagcctgatcaagcagaagaccggcatcgcccagctggtgaagtacggcctgaaggacctggaggaggtggtgggcctgctgaagaagctgggcatcaagctgcaggtgctgatcaacctgggcctggtgtacaaggtgcagcagcacaacggcatcatcttccagttcgtggccttcatcaagagaagacagagagccgtgcccgagatcctggccgccggcggcagatacgacctgctgatcccccagttcagaggcccccaggccctgggccccgtgcccaccgccatcggcgtgagcatcgccatcgacaagatcagcgccgccgtgctgaacatggaggagagcgtgaccatcagcagctgcgacctgctggtggtgagcgtgggccagatgagcatgagcagagccatcaacctgacccagaagctgtggaccgccggcatcaccgccgagatcatgtacgactggagccagagccaggaggagctgcaggagtactgcagacaccacgagatcacctacgtggccctggtgagcgacaaggagggcagccacgtgaaggtgaagagcttcgagaaggagagacagaccgagaagagagtgctggagaccgagctggtggaccacgtgctgcagaagctgagaaccaaggtgaccgacgagagaaacggcagagaggccagcgacaacctggccgtgcagaacctgaagggcagcttcagcaacgccagcggcctgttcgagatccacggcgccaccgtggtgcccatcgtgagcgtgctggcccccgagaagctgagcgccagcaccagaagaagatacgagacccaggtgcagaccagactgcagaccagcctggccaacctgcaccagaagagcagcgagatcgagatcctggccgtggacctgcccaaggagaccatcctgcagttcctgagcctggagtgggacgccgacgagcaggccttcaacaccaccgtgaagcagctgctgagcagactgcccaagcagagatacctgaagctggtgtgcgacgagatctacaacatcaaggtggagaagaaggtgagcgtgctgttcctgtacagctacagagacgactactacagaatcctgttctag

SEQ ID NO: 25721 - DNA, 4950 bp, Artificial Sequence
  derived and/or modified sequence
atggctggtggccggggagctcccgggaggggccgtgacgagcccccagaatcatatccccagcggcaggaccacgagctgcaagccttggaggcaatttacggtgcagacttccaagatctgcgccctgacgcgtgcggcccagtcaaagaacctcctgaaatcaaccttgtactgtacccacagggcctgacaggcgaagaagtctacgtgaaggtggacctgcgcgtgaagtgtcctcctacataccctgacgtggtccctgagatcgaactgaagaatgcaaaaggactcagtaatgagagcgtcaacctgttaaaaagtcgattggaggaattagctaagaaacactgcggggaagtcatgatttttgaactagcttaccacgtgcagtcattccttagtgaacacaataaaccccctccaaaatccttccacgaggagatgcttgaaagacgcgcgcaggaagagcagcaacgcttactggaggccaagcgcaaggaagaacaggaacagagagaaatcctccacgagattcagcgtaggaaggaggagatcaaggaagaaaaaaaacgcaaggagatggcaaaacaagaacggcttgagattgcgagtctgtcaaaccaggatcacacaagcaaaaaggatccgggggggcacaggaccgctgccatcttacatgggggatcccctgatttcgtggggaacggcaaacacagggcgaactcgtcaggacgcagcagaagggaacggcagtacagcgtctgcaactccgaggacagccctgggtcttgcgagatcctgtattttaatatgggatctccagaccagctcatggtgcacaagggaaagtgtatcggcagtgacgagcagctggggaagctggtttataatgctcttgaaacagccactggaggcttcgtcctgctctacgagtgggtgctccagtggcagaagaaaatgggaccctttctgacctcccaggagaaagagaaaattgataagtgtaagaaacagatccaggggactgaaacggaattcaatagtctggtgaagctgtctcatcctaatgtcgttcggtatctcgcgatgaacctcaaggagcaagatgattcaatagttgtggatatccttgtggagcacatctctggcgttagtcttgctgcacatttatctcactccggccctattcccgtccatcaactgagaagatatactgcacagctcctgagcggtttagattatctgcacagcaattcagtggtgcacaaggtgctttctgcaagcaacgttcttgtggatgctgaaggaactgtgaagatcactgattatagcatttccaagagactggccgatatctgcaaagaggacgtgttcgagcagactcgtgtgcggttctcagataacgcactaccctacaaaaccgggaagaagggggacgtgtggagactgggtctgttactgctcagcttgagtcaagggcaggaatgcggcgaatatcccgtgactatcccatcagatctccccgccgatttccaggactttctcaagaagtgtgtgtgtttagacgataaggaaaggtggagtcctcaacagttgttgaagcattctttcatcaatccccagcctaaaatgcctctggtcgagcagtcccccgaggattccgagggtcaggattacgttgaaaccgtgattccttccaataggctgccctccgctgcatttttcagcgagacccaaaggcaattctccaggtattttattgagtttgaagagcttcagctgctgggtaaaggggctttcggcgctgtcatcaaagtgcagaacaagctagatggatgctgttacgccgtgaagagaattcccatcaacccagcttctcgtcagttccggcgaatcaaaggcgaggtcacgctccttagcaggctccatcacgaaaatatagtaagatactataacgcctggatcgagagacacgaaagaccggcaggtccggggacacctcctcccgactcagggcctctggccaaggacgatagggcagcccggggccagcccgcctccgatacagatgggcttgacagtgtcgaggccgctgctcctccaccaatcctgtctagcagcgtagaatggagcacctctggggaacgctctgcttcagctagattcccggctacggggcccggatccagtgatgatgaagatgacgatgaggacgagcatggtggagttttctcccagtccttcctccccgcctctgactccgaaagtgatataattttcgacaacgaggacgaaaactctaagagccagaaccaggatgaagactgtaatgagaaaaacggctgccatgaatccgagccatccgtgactaccgaagccgtacactatctgtatatccagatggaatactgcgagaagtcaaccttgcgggatacaatagaccagggcctgtacagggatacagtgcgattatggcgcctgttccgtgagatcttagatgggctcgcatacattcacgagaagggcatgatccatcgggacttgaaaccagtgaatattttcctggacagcgatgatcacgtgaaaattggcgacttcgggctagcgacggaccatctggcatttagtgcagactctaaacaggatgaccagacaggcgacttgatcaaaagtgacccgtctggacacttgacgggtatggtaggcacagctctgtatgtttcacctgaggtgcaaggctctacaaaaagtgcttataatcagaaggtagatctctttagtttggggattatctttttcgaaatgtcatatcatccaatggtcactgcgtctgaacgtattttcgttctgaatcagctgcgcgaccctaccagccccaaatttccggaggatttcgacgacggggaacatgcaaagcagaagtcagtaatatcctggttactgaatcacgatccggctaagcgtcccaccgcaaccgagttgctgaagtccgagctgctcccacctccccagatggaggagagcgaactgcatgaggtgctgcaccacaccctgaccaatgtcgacggtaaagcttatagaaccatgatggcacagatcttctcccagcggataagccccgcaatagattacacctatgattctgacatactcaaggggaattttagtatcagaacggccaaaatgcagcagcacgtgtgtgaaactattataaggatctttaaacgacatggagctgtgcaattgtgcacaccactcttattgcccagaaatagacaaatatacgaacacaacgaggctgctctgttcatggaccactccggcatgctcgttatgcttcctttcgatctcaggatccccttcgctaggtacgtcgctcggaataatatcctgaacctgaagagatattgcattgaacgcgtgttccggcctcggaaacttgaccggtttcaccccaaagagttactggagtgtgcctttgacatcgtaacctctactactaacagtttcttgccaaccgcagagattatttatactatttacgagatcatccaggagtttccagccctgcaggagagaaattactcaatatatctgaaccacacaatgttactgaaggcaatactccttcattgcggcattcccgaagataagttgtcccaagtgtatattatcctctatgatgcagtcactgagaaacttacacgtagggaagtcgaggccaagttctgcaacttatccctgtcatccaactctctctgtcgactttataagtttatcgaacagaagggcgatctacaggacctaatgcctactattaacagccttattaagcagaagacaggcatcgctcaattggtgaagtacggcttgaaagacctggaggaggttgtgggcctgttaaaaaaactgggaattaaacttcaggtgctgataaatctcggtctcgtttacaaggtccagcaacataatggtatcatattccagtttgtggcattcatcaagcgccggcagcgggccgtaccagaaatcttggccgccggcgggcgctacgatctgctgataccccagttccgtggaccccaagctttgggccctgtacccacggccattggggtatccatcgccatcgataagatctcagccgccgtgctcaacatggaagagtcggtgaccattagttcttgcgatctgcttgtggtcagtgtcggtcagatgagtatgagccgcgcaataaacttgacacaaaaattgtggactgccggaatcactgccgagataatgtatgattggagtcagtcccaagaagaacttcaagagtactgcaggcatcacgagatcacctacgtggccctggtgagcgataaggaaggctcccatgtgaaggtgaagtctttcgaaaaggagaggcaaactgagaagcgcgtgcttgagacagaactggtggaccacgtgctccagaagctgcgcaccaaagtaacggacgaaaggaacgggagggaggcttctgacaacctggccgtgcagaatctaaagggatccttcagtaatgcctcaggtctcttcgaaattcacggagcaacggtcgttcctattgtctcggtgcttgcacccgagaagctgtcagcctcaacaagacgccgttacgaaacgcaggttcaaacacggctccaaacttccctggccaacctccaccagaaaagctctgaaatagaaatcctagccgtagatctgcctaaggagactatcctccagttcctgagcctggagtgggacgccgacgagcaggccttcaatactactgttaaacagctgctctcccggctgcctaaacagagatacttaaaattggtgtgcgacgaaatttacaacatcaaagttgagaagaaagtatccgtgctctttttgtattcatatagagatgactactaccgaattctcttctag

SEQ ID NO: 25722 - DNA, 4866 bp, Artificial Sequence
  derived and/or modified sequence
atggcaggcgggagaggagccccaggtagagggcgcgatgaacctccggagtcatacccgcagcgccaggatcatgaactgcaggcactggaagccatttatggggccgattttcaggacctgagacctgacgcttgcgggccagtgaaagagccgcccgagataaaccttgtcctataccctcagggcctcaccggcgaagaggtgtatgtcaaagtagatctgagagtaaagtgccctccaacctaccctgacgtcgttcctgaaatcgaactgaaaaatgctaaaggcctgtcaaacgaaagcgtgaacctcctgaaatccaggctcgaggaactggccaaaaagcactgtggcgaagtgatgatcttcgagctcgcctaccacgtgcaatctttccttagtgaacataacaagcctcctcctaagagtttccatgaagagatgttggaaagaagggctcaggaggagcagcagcgtctcctagaggcaaaacggaaggaggagcaggagcagcgagaaattctccatgaaatccagcgccgtaaggaggaaataaaagaggaaaaaaaacgaaaggagatggccaaacaggagaggttggagatcgcctctctgtccaaccaggatcacacttccaaaaaggacccaggcggtcacagaactgctgcaatcctgcacggcggcagtcctgatttcgttggcaatggtaaacatagggccaactccagtggaagaagtcggagagagcgacagtatagtgtgtgtaactctgaggacagccccggcagctgtgagatactatatttcaacatggggagccctgaccagctgatggtgcataaagggaagtgcattggcagtgatgagcagttggggaagctcgtctataacgccctggaaaccgctaccgggggctttgtgctgctatacgagtgggtcctgcagtggcagaaaaaaatgggcccatttttgaccagtcaggagaaggaaaaaattgacaaatgcaagaaacagatacagggaaccgaaacagagttcaactctctcgtgaagctgagtcaccctaatgtcgtccgctacttggccatgaatctgaaagagcaggacgacagcattgtggttgacattctggtggagcacatcagtggagtctcactggctgcgcacttgtcccactccggtccaatacctgtgcaccaattaaggcgctataccgcccagcttctgagtgggcttgattacctccacagcaatagcgtcgtccacaaagtcctgagcgcttccaatgtgctggtggatgcggaaggaaccgtgaagattactgattactctatcagcaagagattagccgatatctgcaaagaggacgtttttgaacagaccagagtccggttcagtgacaatgcactgccatacaaaactggcaagaaaggagacgtgtggcgacttgggctcttgctcctgagcctctcccagggacaagagtgcggcgaataccctgttaccattccgtcagatcttccagctgattttcaggactttctcaaaaagtgtgtttgcctagacgataaggagagatggagcccacaacagctgctgaaacatagcttcattaaccctcaaccaaaaatgccactcgtggagcagagtccggaggacagtgaaggtcaggactacgtggagactgtgatcccgtcaaacagactccccagcgccgctttcttctctgagacacagcgtcaattcagtcggtatttcattgaattcgaggaactccagctgttaggcaagggtgctttcggggccgttattaaggtccagaataagcttgatgggtgctgttacgctgtcaagagaattccgataaatcctgctagcaggcagttccgtcgcataaagggggaggttaccctgttgagtcgcttgcatcatgaaaacattgtacgctactacaatgcttggattgagcgccacgagaggccagccgggcccggaacgcctcccccagactcaggccctctagcgaaggatgacagggccgcccggggccagcctgccagcgatactgacggcttggacagcgtggaagcagctgctccgccaccaatcctctccagctccgtggagtggtccacctccggggagaggagcgcttccgctagattccctgctaccggaccagggtcgtctgatgatgaggatgatgatgaggatgagcatggcggggtgttcagtcagtcatttcttccagcctccgactccgagagcgatattatttttgacaacgaagacgaaaattccaagtcacagaaccagatggaatattgtgagaaaagtacactcagggataccatcgatcagggtctgtatagagataccgtcaggctatggcgcctctttagagagattcttgacggactcgcctatatacacgaaaagggcatgatacacagggaccttaagcccgtaaacatctttctggattctgacgatcacgtaaagatcggtgactttggcctcgcaaccgatcacttggccttctctgcagacagtaaacaagatgatcagaccggcgacctcattaaatctgacccatcaggacacctcacaggaatggtggggacagctctgtacgtatccccggaagtgcaggggagcacgaagtcggcctacaatcagaaggtcgaccttttttccctgggtattatctttttcgaaatgagctatcaccctatggtcacagcgagtgaaaggatttttgttctgaaccaactgcgagatcccacatcgcccaaattcccggaggattttgacgatggtgagcacgccaaacagaaatctgtcatctcgtggcttctgaaccacgacccagccaagcggccgacagctaccgagttgctcaaatcagaactactgccccctccacagatggaagagtccgagcttcatgaggttctgcaccataccctgaccaatgtagacggcaaagcctaccggactatgatggctcagatcttcagccagcgcatatcccctgccattgattacacatatgattctgatatcttaaaggggaacttcagtatacggacagccaaaatgcagcaacatgtgtgtgagaccattattaggatctttaaacgacacggcgccgttcaactatgtacccctcttctcctgccccgaaaccggcaaatatacgagcataatgaggcggcgctgtttatggaccattcgggcatgctggtgatgctcccttttgacctgcgtatcccttttgcaaggtatgtagcacggaataatattctgaaccttaaacgttactgtatcgagcgggtttttcgaccacggaaactagacaggttccatcccaaggaattgttggaatgcgctttcgatatcgtgacttcaactacgaacagtttcctgccaacggctgagatcatctacacaatctatgagattatccaggagtttccggcgctgcaggagcgcaattactctatctatttgaaccacaccatgttgctgaaggcgattctgcttcattgtggtattcctgaggacaagctatcacaagtatacattatactttacgatgccgtgaccgagaagctcacaaggcgggaggtggaagccaaattttgcaacctgagtctcagctctaattctctatgtcggctttacaagtttatcgagcagaagggtgatctgcaggacctgatgccgacaattaattccttaatcaaacaaaagaccggcatcgcacagctcgtgaagtacggtctgaaggacctggaggaagtcgttggtcttttgaagaaactcggaatcaaactgcaggtcctgatcaacctgggcctcgtctataaggtacagcagcacaatggaattatcttccagtttgtggcctttatcaaacgtcgccaaagggctgtcccggagatattggctgcgggcgggcgctacgatctgctaatccctcagttcaggggaccccaggcactgggtccagtgcccactgccattggtgtatctatcgctattgataaaatctctgccgccgtactgaatatggaagagagcgtaacaatctcctcatgtgacctgcttgtggtgagcgtgggacagatgtctatgtccagagctataaacctgactcagaaactctggacagccgggattacagcggagataatgtacgactggtcgcaatcacaggaggagctccaggagtactgtagacaccacgaaataacttacgtggcattagtgtctgacaaagaaggatcacatgtgaaggtcaagtctttcgagaaggaacgacagactgagaaaagggtgctggagaccgagctcgtagatcacgtattacaaaagctacgtaccaaagtgactgatgagcgtaatggacgggaggcctcagacaacctcgcagtacagaatctgaagggaagcttttccaacgcctccggcttgttcgaaatccacggagctactgtggtgccaattgtttcagtgcttgctcccgagaagctttcagccagtacacgccgtaggtatgaaacacaggtgcaaacacgtctgcagacgagcctagccaacttgcaccagaagtcatctgagattgagattttggccgtcgatctgcccaaggagactattctgcagttcttatccctcgaatgggatgctgacgagcaggcgttcaacaccactgtgaagcagctgctaagccggctaccaaagcagcgctacctgaagcttgtctgtgatgagatatataatatcaaagtggaaaagaaggtgtctgtgctctttttgtactcatatcgggacgactactaccgcatactcttttag

SEQ ID NO: 25723 - DNA, 4284 bp, Artificial Sequence
  derived and/or modified sequence
taagcaaagcaggagcgtcttgaaatagcttctctaagtaatcaggatcacacaagtaaaaaagaccctggcggccacaggaccgctgccattttgcacggtggcagcccagacttcgtgggtaacggcaaacatagagccaactccagcggacgaagcaggagggagcggcaatactcagtgtgtaacagcgaggacagcccaggctcttgtgaaattctctatttcaatatgggtagtccagaccagttgatggtgcataaggggaaatgcattgggtcggatgagcagctcggtaaactggtgtataacgctctggagacagccactgggggattcgttttgctgtacgagtgggtattacagtggcagaaaaagatgggtccctttctcacctcccaggagaaggagaaaatagataagtgtaaaaaacagatccagggaaccgagacagagtttaacagtctcgtgaagctaagccatcctaacgtagtccgttacctggcaatgaatcttaaggagcaagatgactctatcgtggtcgatatcctcgtagaacatatttcgggcgtttcactggcagctcacctaagccatagcggacccatccccgtacatcagttaagacgttatacagctcagctgctctcaggcctcgactatttgcatagcaatagcgtcgttcataaagtgctcagcgcgtctaatgtgctggtggacgcagaggggacagtgaaaattactgactattcaatttctaagaggctcgccgacatttgtaaggaagatgtattcgagcagactcgggtgcgctttagtgataatgcgttgccctacaaaacaggcaagaaaggagatgtgtggcgattggggttgctactgctgagcctctctcagggccaggaatgtggcgagtatcctgtcacaattcctagcgacttacccgcagattttcaagattttcttaagaagtgtgtatgcctggatgacaaagaacggtggagtcctcagcagcttcttaagcatagcttcataaacccacagcccaagatgcccctcgtggagcagtcacctgaggactccgaaggccaagattatgttgagaccgtgatccccagcaatcgcctccctagtgcggctttttttagtgagacgcagcggcagttcagtagatactttatcgagttcgaggaactacagctgctgggcaaaggggccttcggcgccgtgatcaaggtacagaataaactggacggatgctgctacgccgtcaaacggattcctattaacccagcctctaggcagttcagacggattaaaggcgaagtgacccttctgtcacgactccatcacgagaacatcgtgcgatattacaatgcttggatcgagcggcacgaaaggcccgcaggccctggcactccccctcccgacagcgggccactggcaaaagatgaccgcgccgctagagggcagcccgcatctgatactgacggcctcgattccgttgaagcagcagccccgcccccgattctgtccagttctgtggaatggagtactagtggggaacggagcgcgagtgcaaggttccccgcgactggccccggaagttctgatgatgaggatgatgacgaagacgaacacggtggcgtgttttctcagagctttctgccagcttccgattcggaaagtgacatcatctttgacaacgaggatgaaaatagcaagagccagaatcaaatggagtattgcgagaaatctaccctcagagatacgatcgaccagggcctgtatcgggatacagtccgcctctggaggctgttcagggaaattctggatggcttagcctacattcatgagaaaggcatgatacatagggatctcaagcccgtgaacattttccttgattcggatgaccacgtgaaaatcggggactttgggctcgcgaccgatcacttggcctttagtgccgattcaaaacaggacgaccagaccggcgatttgatcaaatccgacccgtccgggcacctgaccggtatggttgggaccgcactgtacgtgtccccggaggtgcaggggtctaccaagtctgcctacaaccagaaggtagatctattttctcttggtatcattttcttcgagatgtcctatcatccaatggtgaccgcgagcgaaaggatctttgtcctcaatcagctgagagaccccacaagcccaaagtttcccgaggactttgatgacggggaacatgctaaacagaaaagtgtgatcagctggttgctcaaccacgacccggcaaaacgtcccacggccacggagctgctgaaaagcgagttgctgcctccacctcaaatggaggagtcagagcttcatgaagtcctgcatcatacactgaccaacgttgatggaaaggcataccgcaccatgatggctcagatctttagccaacgcatctctccagccattgattatacttacgattccgacattctgaaaggcaacttctctatccgaacagcaaagatgcagcagcacgtgtgcgagaccattattcgcatattcaaaaggcacggcgccgttcagctttgcaccccgctgctgctaccgcggaaccgccagatatatgaacacaatgaagccgccctctttatggatcacagcgggatgctcgtgatgctgccattcgacctgaggatcccctttgccaggtacgtggcacgtaacaacatcctgaacctgaaacggtactgcattgagcgggtatttagaccgaggaagctggatcggtttcacccgaaagaactcttagaatgcgcattcgacatagtgacgagcacaacaaactctttcctccccaccgccgagataatctataccatttatgagattattcaagaatttcctgccctgcaggaaaggaattattccatttacctgaatcacacaatgctacttaaagctatccttctgcattgtggcattcctgaggataagctgtctcaagtgtacatcatcctgtacgacgctgtgacagaaaagctgacgcgccgagaagtagaagcaaagttctgcaatcttagcctctcaagtaacagcctttgtcggttgtacaaattcattgaacagaaaggcgatctccaggacctcatgccaacaataaacagtctaatcaagcagaagacaggaatcgctcagctggtcaagtacggattgaaggacttggaggaggttgtgggactgctcaagaaacttggcatcaaactgcaggttcttatcaacttggggctggtatataaggtccagcaacacaacgggattattttccaatttgtggcatttatcaagagacggcagcgggccgtcccagagatccttgctgcagggggtcggtacgatttgcttatcccccagttccgcgggccacaagcattaggtcccgtaccgaccgccattggcgtctcgatagccatagataaaatctccgcggctgtgctgaacatggaagagtcagtcactatctcctcctgcgacctgctagtcgtttccgtgggccaaatgtccatgagtcgagccataaacttaacgcagaagctttggacagctggaataacggcagaaataatgtatgactggagccagtcccaagaggagcttcaagagtattgcaggcatcatgagattacttatgtggccctggtgtcagacaaggaaggctctcacgtgaaggtgaaatcctttgagaaagaacggcagacagagaagagagtgcttgaaacggaactagtggatcacgtgctccagaagttgaggaccaaggtgaccgacgaacggaacggccgggaggcctcggataatttggccgttcagaacctcaaggggagttttagtaacgcttctgggcttttcgagatccatggagccaccgtggttcctatcgtcagtgtattagctccggagaaactgagcgctagcacccgaagaagatacgagacacaagtgcagaccagactgcagacatcgctcgctaacctacatcaaaaaagtagtgagatcgagattctggctgtggatctgcccaaggagactatattgcagttcttgagtttagaatgggacgcagatgaacaggcattcaacacaactgtaaaacagctactttctcggctgccaaagcagagatacctcaagctggtgtgcgacgagatatataacatcaaggtggagaagaaggtgtcagtacttttcttgtactcttaccgcgacgattactatagaatactattctag

SEQ ID NO: 25724 - DNA, 4950 bp, Artificial Sequence
  derived and/or modified sequence
atggccggcggccgcggggcccctggccggggcagagatgagcccccagagagctacccccagaggcaggaccacgagctgcaggccctggaggccatctacggggctgacttccaggacctgcggccagatgcctgtggccctgtgaaggagcccccagagatcaacctggtgctgtacccccagggcctgactggagaggaggtgtatgtgaaggtggacctgcgggtgaagtgcccccccacctacccagatgtggtgcctgagattgagctgaagaatgccaagggcctgagcaatgaatctgtgaacctgctgaagagccggctggaggagctggccaagaagcactgtggggaggtgatgatctttgagctggcctaccacgtgcagagcttcctgtctgagcacaacaagcccccacccaagagcttccacgaggagatgctggagcggcgggcccaggaggagcagcagaggctgctggaggccaagaggaaggaggagcaggagcagcgggagatcctgcacgagatccagaggaggaaggaggagatcaaggaggagaagaagaggaaggagatggccaagcaggagcggctggagatcgccagcctgagcaaccaggaccacaccagcaagaaggaccccggcggccacaggacagctgccatcctgcatggaggcagcccagactttgtgggcaatggcaagcaccgggccaacagcagcggccgcagccggcgggagcggcagtacagcgtgtgcaacagcgaggacagccctggcagctgtgagatcctgtacttcaacatgggcagcccagaccagctgatggtgcacaagggcaagtgcatcggcagtgatgagcagctgggcaagctggtgtacaatgccctggagacagccaccggcggctttgtgctgctgtatgagtgggtgctgcagtggcagaagaagatgggccccttcctgaccagccaggagaaggagaagattgacaagtgcaagaagcagatccagggcacagaaacagagttcaacagcctggtgaagctgagccaccccaacgtggtgcgctacctggccatgaacctgaaggagcaggatgacagcatcgtggtggacatcctggtggagcacatctctggagtgtccctggccgcccacctgagccacagcggccccatccctgtgcaccagctgcggcgctacacagcccagctgctgagcggcctggactacctgcacagcaacagcgtggtgcacaaggtgctgagcgccagcaatgtgctggtggatgctgagggcaccgtgaagatcacagactacagcatcagcaagaggctggccgacatctgcaaggaggatgtgtttgagcagaccagggtgcgcttcagtgacaatgccctgccctacaagacaggcaagaagggagatgtgtggaggctgggcctgctgctgctgagcctgagccagggccaggagtgtggggagtaccctgtgaccatccccagcgacctgcctgctgacttccaggacttcctgaagaagtgtgtgtgcctggatgacaaggagcgctggagcccccagcagctgctgaagcacagcttcatcaacccccagcccaagatgcccctggtggagcagagcccagaagattctgagggccaggactatgtggagaccgtcatccccagcaaccggctgcccagcgctgccttcttcagcgagacccagaggcagttcagccgctacttcatcgagtttgaggagctgcagctgctgggcaagggggcctttggagctgtgatcaaggtgcagaacaagctggatggctgctgctatgctgtgaagaggatccccatcaacccagccagccggcagttccgccgcatcaagggggaggtgaccctgctgagccggctgcaccacgagaacatcgtgcgctactacaatgcctggattgaaagacatgagaggcctgctggccctggcaccccacctccagacagcggccccctggccaaggatgacagagctgcccggggccagcctgccagtgacacagatggcctggacagcgtggaggccgccgcccccccacccatcctgagcagctctgtggagtggagcaccagcggggagaggtctgccagcgcccgcttccctgccaccggccctggcagcagtgatgatgaagatgatgatgaagatgaacatggaggagtcttcagccagagcttcctgcctgccagtgacagcgagagtgacatcatctttgacaatgaagatgagaacagcaagagccagaaccaggatgaggactgcaatgagaagaatggctgccacgagagcgagcccagcgtgaccacagaggccgtgcactacctgtacatccagatggagtactgtgagaagagcaccctgcgggacaccatcgaccagggcctgtacagagacacagtgcggctgtggaggctcttccgggagatcctggatggcctggcctacatccacgagaagggcatgatccaccgggacctgaagcctgtgaacatcttcctggacagtgatgaccacgtgaagatcggggactttggcctggccacagaccacctggccttctctgctgacagcaagcaggatgaccagacaggagacctgatcaagagtgaccccagcggccacctgaccggcatggtgggcacagccctgtatgtgtccccagaggtgcagggcagcaccaagagcgcctacaaccagaaggtggacctcttcagcctgggcatcatcttctttgagatgagctaccaccccatggtgacagccagcgagcgcatctttgtgctgaaccagctgcgggaccccaccagccccaagtttcctgaggactttgatgatggagaacatgccaagcagaagagcgtcatctcctggctgctgaaccacgaccctgccaagaggcccacagccacagagctgctgaagtctgagctgctgcccccaccccagatggaggagagcgagctgcacgaggtgctgcaccacaccctgaccaacgtggatggcaaggcctaccgcaccatgatggcccagatcttcagccagaggatcagccctgccatcgactacacctatgacagcgacatcctgaagggcaacttcagcatcagaacagccaagatgcagcagcacgtgtgtgagaccatcatccgcatcttcaagagacatggagctgtgcagctgtgcacccccctgctgctgcccaggaaccggcagatctatgagcacaatgaagctgccctcttcatggaccacagcggcatgctggtgatgctgccctttgacctgcgcatcccctttgcccgctacgtggccaggaacaacatcctgaacctgaagcgctactgcatcgagagggtcttccggcccaggaagctggaccgcttccaccccaaggagctgctggagtgtgcctttgatattgtgaccagcaccaccaacagcttcctgcccacagctgagatcatctacaccatctatgagatcatccaggagttccctgccctgcaggagaggaactacagcatctacctgaaccacaccatgctgctgaaggccatcctgctgcactgcggcatccctgaggacaagctgagccaggtgtacatcatcctgtatgatgctgtgacagagaagctgacccggcgggaggtggaggccaagttctgcaacctgagcctgagcagcaacagcctgtgccgcctgtacaagttcatcgagcagaagggggacctgcaggacctgatgcccaccatcaacagcctcatcaagcagaagacaggcatcgcccagctggtgaagtatggcctgaaggacctggaggaggtggtgggcctgctgaagaagctgggcatcaagctgcaggtgctgatcaacctgggcctggtgtacaaggtgcagcagcacaacggcatcatcttccagtttgtggccttcatcaagaggcggcagagagctgtgcctgagatcctggccgccggcggccgctatgacctgctgatcccccagttccggggcccccaggccctgggccctgtgcccacagccatcggcgtgtccatcgccatcgacaagatctctgctgctgtgctgaacatggaggagagcgtgaccatcagcagctgtgacctgctggtggtgtctgtgggccagatgtccatgagccgggccatcaacctgacccagaagctgtggacagctggcatcacagctgagatcatgtatgactggagccagagccaggaggagctgcaggagtactgccgccaccacgagatcacctacgtggccctggtgtctgacaaggagggcagccacgtgaaggtgaagagctttgagaaggagcggcagacagagaagagggtgctggagacagagctggtggaccacgtgctgcagaagctgcggaccaaggtgacagatgaaagaaatggccgggaggccagtgacaacctggccgtgcagaacctgaagggcagcttcagcaatgccagcggcctgtttgagatccacggggccaccgtggtgcccatcgtgtctgtgctggcccctgagaagctgagcgccagcacccggcggcgctatgagacccaggtgcagacccggctgcagaccagcctggccaacctgcaccagaagagcagcgagattgagatcctggccgtggacctgcccaaggagaccatcctgcagttcctgagcctggagtgggatgctgatgagcaggccttcaacaccaccgtgaagcagctgctgagccggctgcccaagcagcgctacctgaagctggtgtgtgatgagatctacaacatcaaggtggagaagaaggtgtctgtgctcttcctgtacagctacagagatgactactaccgcatcctcttctag

SEQ ID NO: 25725 - DNA, 4866 bp, Artificial Sequence
  derived and/or modified sequence
atggccggcggccgcggggcccctggccggggcagagatgagcccccagagagctacccccagaggcaggaccacgagctgcaggccctggaggccatctacggggctgacttccaggacctgcggccagatgcctgtggccctgtgaaggagcccccagagatcaacctggtgctgtacccccagggcctgactggagaggaggtgtatgtgaaggtggacctgcgggtgaagtgcccccccacctacccagatgtggtgcctgagattgagctgaagaatgccaagggcctgagcaatgaatctgtgaacctgctgaagagccggctggaggagctggccaagaagcactgtggggaggtgatgatctttgagctggcctaccacgtgcagagcttcctgtctgagcacaacaagcccccacccaagagcttccacgaggagatgctggagcggcgggcccaggaggagcagcagaggctgctggaggccaagaggaaggaggagcaggagcagcgggagatcctgcacgagatccagaggaggaaggaggagatcaaggaggagaagaagaggaaggagatggccaagcaggagcggctggagatcgccagcctgagcaaccaggaccacaccagcaagaaggaccccggcggccacaggacagctgccatcctgcatggaggcagcccagactttgtgggcaatggcaagcaccgggccaacagcagcggccgcagccggcgggagcggcagtacagcgtgtgcaacagcgaggacagccctggcagctgtgagatcctgtacttcaacatgggcagcccagaccagctgatggtgcacaagggcaagtgcatcggcagtgatgagcagctgggcaagctggtgtacaatgccctggagacagccaccggcggctttgtgctgctgtatgagtgggtgctgcagtggcagaagaagatgggccccttcctgaccagccaggagaaggagaagattgacaagtgcaagaagcagatccagggcacagaaacagagttcaacagcctggtgaagctgagccaccccaacgtggtgcgctacctggccatgaacctgaaggagcaggatgacagcatcgtggtggacatcctggtggagcacatctctggagtgtccctggccgcccacctgagccacagcggccccatccctgtgcaccagctgcggcgctacacagcccagctgctgagcggcctggactacctgcacagcaacagcgtggtgcacaaggtgctgagcgccagcaatgtgctggtggatgctgagggcaccgtgaagatcacagactacagcatcagcaagaggctggccgacatctgcaaggaggatgtgtttgagcagaccagggtgcgcttcagtgacaatgccctgccctacaagacaggcaagaagggagatgtgtggaggctgggcctgctgctgctgagcctgagccagggccaggagtgtggggagtaccctgtgaccatccccagcgacctgcctgctgacttccaggacttcctgaagaagtgtgtgtgcctggatgacaaggagcgctggagcccccagcagctgctgaagcacagcttcatcaacccccagcccaagatgcccctggtggagcagagcccagaagattctgagggccaggactatgtggagaccgtcatccccagcaaccggctgcccagcgctgccttcttcagcgagacccagaggcagttcagccgctacttcatcgagtttgaggagctgcagctgctgggcaagggggcctttggagctgtgatcaaggtgcagaacaagctggatggctgctgctatgctgtgaagaggatccccatcaacccagccagccggcagttccgccgcatcaagggggaggtgaccctgctgagccggctgcaccacgagaacatcgtgcgctactacaatgcctggattgaaagacatgagaggcctgctggccctggcaccccacctccagacagcggccccctggccaaggatgacagagctgcccggggccagcctgccagtgacacagatggcctggacagcgtggaggccgccgcccccccacccatcctgagcagctctgtggagtggagcaccagcggggagaggtctgccagcgcccgcttccctgccaccggccctggcagcagtgatgatgaagatgatgatgaagatgaacatggaggagtcttcagccagagcttcctgcctgccagtgacagcgagagtgacatcatctttgacaatgaagatgagaacagcaagagccagaaccagatggagtactgtgagaagagcaccctgcgggacaccatcgaccagggcctgtacagagacacagtgcggctgtggaggctcttccgggagatcctggatggcctggcctacatccacgagaagggcatgatccaccgggacctgaagcctgtgaacatcttcctggacagtgatgaccacgtgaagatcggggactttggcctggccacagaccacctggccttctctgctgacagcaagcaggatgaccagacaggagacctgatcaagagtgaccccagcggccacctgaccggcatggtgggcacagccctgtatgtgtccccagaggtgcagggcagcaccaagagcgcctacaaccagaaggtggacctcttcagcctgggcatcatcttctttgagatgagctaccaccccatggtgacagccagcgagcgcatctttgtgctgaaccagctgcgggaccccaccagccccaagtttcctgaggactttgatgatggagaacatgccaagcagaagagcgtcatctcctggctgctgaaccacgaccctgccaagaggcccacagccacagagctgctgaagtctgagctgctgcccccaccccagatggaggagagcgagctgcacgaggtgctgcaccacaccctgaccaacgtggatggcaaggcctaccgcaccatgatggcccagatcttcagccagaggatcagccctgccatcgactacacctatgacagcgacatcctgaagggcaacttcagcatcagaacagccaagatgcagcagcacgtgtgtgagaccatcatccgcatcttcaagagacatggagctgtgcagctgtgcacccccctgctgctgcccaggaaccggcagatctatgagcacaatgaagctgccctcttcatggaccacagcggcatgctggtgatgctgccctttgacctgcgcatcccctttgcccgctacgtggccaggaacaacatcctgaacctgaagcgctactgcatcgagagggtcttccggcccaggaagctggaccgcttccaccccaaggagctgctggagtgtgcctttgatattgtgaccagcaccaccaacagcttcctgcccacagctgagatcatctacaccatctatgagatcatccaggagttccctgccctgcaggagaggaactacagcatctacctgaaccacaccatgctgctgaaggccatcctgctgcactgcggcatccctgaggacaagctgagccaggtgtacatcatcctgtatgatgctgtgacagagaagctgacccggcgggaggtggaggccaagttctgcaacctgagcctgagcagcaacagcctgtgccgcctgtacaagttcatcgagcagaagggggacctgcaggacctgatgcccaccatcaacagcctcatcaagcagaagacaggcatcgcccagctggtgaagtatggcctgaaggacctggaggaggtggtgggcctgctgaagaagctgggcatcaagctgcaggtgctgatcaacctgggcctggtgtacaaggtgcagcagcacaacggcatcatcttccagtttgtggccttcatcaagaggcggcagagagctgtgcctgagatcctggccgccggcggccgctatgacctgctgatcccccagttccggggcccccaggccctgggccctgtgcccacagccatcggcgtgtccatcgccatcgacaagatctctgctgctgtgctgaacatggaggagagcgtgaccatcagcagctgtgacctgctggtggtgtctgtgggccagatgtccatgagccgggccatcaacctgacccagaagctgtggacagctggcatcacagctgagatcatgtatgactggagccagagccaggaggagctgcaggagtactgccgccaccacgagatcacctacgtggccctggtgtctgacaaggagggcagccacgtgaaggtgaagagctttgagaaggagcggcagacagagaagagggtgctggagacagagctggtggaccacgtgctgcagaagctgcggaccaaggtgacagatgaaagaaatggccgggaggccagtgacaacctggccgtgcagaacctgaagggcagcttcagcaatgccagcggcctgtttgagatccacggggccaccgtggtgcccatcgtgtctgtgctggcccctgagaagctgagcgccagcacccggcggcgctatgagacccaggtgcagacccggctgcagaccagcctggccaacctgcaccagaagagcagcgagattgagatcctggccgtggacctgcccaaggagaccatcctgcagttcctgagcctggagtgggatgctgatgagcaggccttcaacaccaccgtgaagcagctgctgagccggctgcccaagcagcgctacctgaagctggtgtgtgatgagatctacaacatcaaggtggagaagaaggtgtctgtgctcttcctgtacagctacagagatgactactaccgcatcctcttctag

SEQ ID NO: 25726 - DNA, 5428 bp, Artificial Sequence
  derived and/or modified sequence
ggcccaccgccgcccaggcaaggccgccctgccttgggcgcagcgctgccatggctgggggccgtggggcccccgggcgcggccgggacgagcctccggagagctacccgcaacgacaggaccacgagctacaggccctggaggccatttacggcgcggacttccaagacctgcggccggacgcttgcggaccggtcaaagagccccctgaaatcaatttagttttgtaccctcaaggcctaactggtgaagaagtatatgtaaaagtggatttgagggttaaatgcccacctacctatccagatgtagttcctgaaatagagttaaaaaatgccaaaggtctatcaaatgaaagtgtcaatttgttaaaatctcgcctagaagaactggccaagaaacactgtggggaggtgatgatctttgaactggcttaccacgtgcagtcatttctcagcgagcataacaagccccctcccaagtcttttcatgaagaaatgctggaaaggcgggctcaggaggagcagcagaggctgttggaggccaagcggaaagaagagcaggagcaacgtgaaatcctgcatgagattcagagaaggaaagaagagataaaagaagagaaaaaaaggaaagaaatggctaagcaggaacgtttggaaattgctagtttgtcaaaccaagatcatacctctaagaaggacccaggaggacacagaacggctgccattctacatggaggctctcctgactttgtaggaaatggtaaacatcgggcaaactcctcaggaaggtctaggcgagaacgtcagtattctgtatgtaatagtgaagattctcctggctcttgtgaaattctgtatttcaatatggggagtcctgatcagctcatggtgcacaaagggaaatgtattggcagtgatgaacaacttggaaaattagtctacaatgctttggaaacagccactggtggctttgtcttgttgtatgagtgggtccttcagtggcagaaaaaaatgggtccattccttaccagtcaagaaaaagagaagattgataagtgcaaaaagcagattcaaggaacagaaacagaattcaactcactggtaaaattgagccatccaaatgtagtacgctaccttgcaatgaatctcaaagagcaagacgactccatcgtggtggacattttagtggagcacattagtggggtctctcttgctgcacacctgagccactcaggccccatccctgtgcatcagcttcgcaggtacacagctcagctcctgtcaggccttgattatctgcacagcaattctgtggtgcataaggtcctgagtgcatctaatgtcttggtggatgcagaaggcaccgtcaagattacggactatagcatttctaagcgcctcgcagacatttgcaaggaggatgtgtttgagcaaacccgagttcgttttagtgacaatgctctgccttataaaacggggaagaaaggagatgtttggcgtcttggccttctgctgctgtccctcagccaaggacaggaatgtggagagtaccctgtgaccatccctagtgacttaccagctgactttcaagattttctaaagaaatgtgtgtgcttggatgacaaggaaagatggagtccccagcagttgttgaaacacagctttataaatccccagccaaaaatgcctctagtggaacaaagtcctgaagattctgaaggacaagattatgttgagactgttattcctagcaaccggctacccagtgctgccttctttagtgagacacagagacagttttcccgatacttcattgagtttgaagaattacaacttcttggtaaaggagcttttggagctgtcatcaaggtgcagaacaagttggacggctgctgctacgcagtgaagcgcatccccatcaacccggccagccggcagttccgcaggatcaagggcgaagtgacactgctgtcacggctgcaccatgagaacattgtgcgctactacaacgcctggatcgagcggcacgagcggccggcgggaccggggacgccgcccccggactccgggcccctggccaaggatgaccgagctgcacgcgggcagccggcgagcgacacagacggcctggacagcgtagaggccgccgcgccgccacccatcctcagcagctcggtggagtggagcacttcgggcgagcgctcggccagtgcccgtttccccgccaccggcccgggctccagcgatgacgaggacgacgacgaggacgagcacggtggcgtcttctcccagtccttcctgcctgcttcagattctgaaagtgatattatctttgacaatgaagatgagaacagtaaaagtcagaatcagatggagtactgtgagaagagcactttacgagacaccattgaccagggactgtatcgagacaccgtcagactctggaggctttttcgagagattctggatggattagcttatatccatgagaaaggaatgattcaccgggatttgaagcctgtcaacatttttttggattctgatgaccatgtgaaaataggtgattttggtttggcgacagaccatctagccttttctgctgacagcaaacaagacgatcagacaggagacttgattaagtcagacccttcaggtcacttaactgggatggttggcactgctctctatgtaagcccagaggtccaaggaagcaccaaatctgcatacaaccagaaagtggatctcttcagcctgggaattatcttctttgagatgtcctatcaccccatggtcacggcttcagaaaggatctttgttctcaaccaactcagagatcccacttcgcctaagtttccagaagactttgacgatggagagcatgcaaagcagaaatcagtcatctcctggctgttgaaccacgatccagcaaaacggcccacagccacagaactgctcaagagtgagctgctgcccccaccccagatggaggagtcagagctgcatgaagtgctgcaccacacgctgaccaacgtggatgggaaggcctaccgcaccatgatggcccagatcttctcgcagcgcatctcccctgccatcgattacacctatgacagcgacatactgaagggcaacttctcaatccgtacagccaagatgcagcagcatgtgtgtgaaaccatcatccgcatctttaaaagacatggagctgttcagttgtgtactccactactgcttccccgaaacagacaaatatatgagcacaacgaagctgccctattcatggaccacagcgggatgctggtgatgcttccttttgacctgcggatcccttttgcaagatatgtggcaagaaataatatattgaatttaaaacgatactgcatagaacgtgtgttcaggccgcgcaagttagatcgatttcatcccaaagaacttctggagtgtgcatttgatattgtcacttctaccaccaacagctttctgcccactgctgaaattatctacactatctatgaaatcatccaagagtttccagcacttcaggaaagaaattacagtatttatttgaaccataccatgttattgaaagcaatactcttacactgtgggatcccagaagataaactcagtcaagtctacattattctgtatgatgctgtgacagagaagctgacgaggagagaagtggaagctaaattttgtaatctgtctttgtcttctaatagtctgtgtcgactctacaagtttattgaacagaagggagatttgcaagatcttatgccaacaataaattcattaataaaacagaaaacaggtattgcacagttggtgaagtatggcttaaaagacctagaggaggttgttggactgttgaagaaactcggcatcaagttacaggtcttgatcaatttgggcttggtttacaaggtgcagcagcacaatggaatcatcttccagtttgtggctttcatcaaacgaaggcaaagggctgtacctgaaatcctcgcagctggaggcagatatgacctgctgattccccagtttagagggccacaagctctggggccagttcccactgccattggggtcagcatagctatagacaagatatctgctgctgtcctcaacatggaggaatctgttacaataagctcttgtgacctcctggttgtaagtgttggccagatgtctatgtccagggccatcaacctaacccagaaactctggacagcaggcatcacagcagaaatcatgtacgactggtcacagtcccaagaggaattacaagagtactgcagacatcatgaaatcacctatgtggcccttgtctcggataaagaaggaagccatgtcaaggttaagtctttcgagaaggaaaggcagacagagaagcgtgtgctggagactgaacttgtggaccatgtactgcagaaactgaggactaaagtcactgatgaaaggaatggcagagaagcttccgataatcttgcagtgcaaaatctgaaggggtcattttctaatgcttcaggtttgtttgaaatccatggagcaacagtggttcccattgtgagtgtgctagccccggagaagctgtcagccagcactaggaggcgctatgaaactcaggtacaaactcgacttcagacctcccttgccaacttacatcagaaaagcagtgaaattgaaattctggctgtggatctacccaaagaaacaatattacagtttttatcattagagtgggatgctgatgaacaggcatttaacacaactgtgaagcagctgctgtcacgcctgccaaagcaaagatacctcaaattagtctgtgatgaaatttataacatcaaagtagaaaaaaaggtgtctgtgctatttctgtacagctatagagatgactactacagaatcttattttaaccctaaagaactgtcgttaacctcattcaaacagacagaggcttatactggaataatggaatgttgtacattcatcataatttaaaattaaattctaagaagaggctgggtgcagtggctcacacctttaatcccagcactttgggaagccaaggcaggaagactgcttgaaaccaggagtttgagaccagcctgagcaacaaagcaagaccccatctctataaaaactaaaaaaattagttgggcatggtggcacatgcctgtagtcccagctactccagaggctgagatggatcatctgagcctcaggaggttgaggctgcagtgagctgtgactgcgccactgcactccagtctgggacaacagagcaagaccctgtcttaaaaaaaaaaagaaaaaaaaaatttttttctaagaagctgtcctacaaagttgagctttgttagtttttcatgtgtaatatattataaatttatcttttgggatataataaatgctttcatatacctgc

SEQ ID NO: 25727 - DNA, 4284 bp, Artificial Sequence
  derived and/or modified sequence
tgagccaagcaggagcggctggagatcgccagcctgagcaaccaggaccacaccagcaagaaggaccccggcggccacaggacagctgccatcctgcatggaggcagcccagactttgtgggcaatggcaagcaccgggccaacagcagcggccgcagccggcgggagcggcagtacagcgtgtgcaacagcgaggacagccctggcagctgtgagatcctgtacttcaacatgggcagcccagaccagctgatggtgcacaagggcaagtgcatcggcagtgatgagcagctgggcaagctggtgtacaatgccctggagacagccaccggcggctttgtgctgctgtatgagtgggtgctgcagtggcagaagaagatgggccccttcctgaccagccaggagaaggagaagattgacaagtgcaagaagcagatccagggcacagaaacagagttcaacagcctggtgaagctgagccaccccaacgtggtgcgctacctggccatgaacctgaaggagcaggatgacagcatcgtggtggacatcctggtggagcacatctctggagtgtccctggccgcccacctgagccacagcggccccatccctgtgcaccagctgcggcgctacacagcccagctgctgagcggcctggactacctgcacagcaacagcgtggtgcacaaggtgctgagcgccagcaatgtgctggtggatgctgagggcaccgtgaagatcacagactacagcatcagcaagaggctggccgacatctgcaaggaggatgtgtttgagcagaccagggtgcgcttcagtgacaatgccctgccctacaagacaggcaagaagggagatgtgtggaggctgggcctgctgctgctgagcctgagccagggccaggagtgtggggagtaccctgtgaccatccccagcgacctgcctgctgacttccaggacttcctgaagaagtgtgtgtgcctggatgacaaggagcgctggagcccccagcagctgctgaagcacagcttcatcaacccccagcccaagatgcccctggtggagcagagcccagaagattctgagggccaggactatgtggagaccgtcatccccagcaaccggctgcccagcgctgccttcttcagcgagacccagaggcagttcagccgctacttcatcgagtttgaggagctgcagctgctgggcaagggggcctttggagctgtgatcaaggtgcagaacaagctggatggctgctgctatgctgtgaagaggatccccatcaacccagccagccggcagttccgccgcatcaagggggaggtgaccctgctgagccggctgcaccacgagaacatcgtgcgctactacaatgcctggattgaaagacatgagaggcctgctggccctggcaccccacctccagacagcggccccctggccaaggatgacagagctgcccggggccagcctgccagtgacacagatggcctggacagcgtggaggccgccgcccccccacccatcctgagcagctctgtggagtggagcaccagcggggagaggtctgccagcgcccgcttccctgccaccggccctggcagcagtgatgatgaagatgatgatgaagatgaacatggaggagtcttcagccagagcttcctgcctgccagtgacagcgagagtgacatcatctttgacaatgaagatgagaacagcaagagccagaaccagatggagtactgtgagaagagcaccctgcgggacaccatcgaccagggcctgtacagagacacagtgcggctgtggaggctcttccgggagatcctggatggcctggcctacatccacgagaagggcatgatccaccgggacctgaagcctgtgaacatcttcctggacagtgatgaccacgtgaagatcggggactttggcctggccacagaccacctggccttctctgctgacagcaagcaggatgaccagacaggagacctgatcaagagtgaccccagcggccacctgaccggcatggtgggcacagccctgtatgtgtccccagaggtgcagggcagcaccaagagcgcctacaaccagaaggtggacctcttcagcctgggcatcatcttctttgagatgagctaccaccccatggtgacagccagcgagcgcatctttgtgctgaaccagctgcgggaccccaccagccccaagtttcctgaggactttgatgatggagaacatgccaagcagaagagcgtcatctcctggctgctgaaccacgaccctgccaagaggcccacagccacagagctgctgaagtctgagctgctgcccccaccccagatggaggagagcgagctgcacgaggtgctgcaccacaccctgaccaacgtggatggcaaggcctaccgcaccatgatggcccagatcttcagccagaggatcagccctgccatcgactacacctatgacagcgacatcctgaagggcaacttcagcatcagaacagccaagatgcagcagcacgtgtgtgagaccatcatccgcatcttcaagagacatggagctgtgcagctgtgcacccccctgctgctgcccaggaaccggcagatctatgagcacaatgaagctgccctcttcatggaccacagcggcatgctggtgatgctgccctttgacctgcgcatcccctttgcccgctacgtggccaggaacaacatcctgaacctgaagcgctactgcatcgagagggtcttccggcccaggaagctggaccgcttccaccccaaggagctgctggagtgtgcctttgatattgtgaccagcaccaccaacagcttcctgcccacagctgagatcatctacaccatctatgagatcatccaggagttccctgccctgcaggagaggaactacagcatctacctgaaccacaccatgctgctgaaggccatcctgctgcactgcggcatccctgaggacaagctgagccaggtgtacatcatcctgtatgatgctgtgacagagaagctgacccggcgggaggtggaggccaagttctgcaacctgagcctgagcagcaacagcctgtgccgcctgtacaagttcatcgagcagaagggggacctgcaggacctgatgcccaccatcaacagcctcatcaagcagaagacaggcatcgcccagctggtgaagtatggcctgaaggacctggaggaggtggtgggcctgctgaagaagctgggcatcaagctgcaggtgctgatcaacctgggcctggtgtacaaggtgcagcagcacaacggcatcatcttccagtttgtggccttcatcaagaggcggcagagagctgtgcctgagatcctggccgccggcggccgctatgacctgctgatcccccagttccggggcccccaggccctgggccctgtgcccacagccatcggcgtgtccatcgccatcgacaagatctctgctgctgtgctgaacatggaggagagcgtgaccatcagcagctgtgacctgctggtggtgtctgtgggccagatgtccatgagccgggccatcaacctgacccagaagctgtggacagctggcatcacagctgagatcatgtatgactggagccagagccaggaggagctgcaggagtactgccgccaccacgagatcacctacgtggccctggtgtctgacaaggagggcagccacgtgaaggtgaagagctttgagaaggagcggcagacagagaagagggtgctggagacagagctggtggaccacgtgctgcagaagctgcggaccaaggtgacagatgaaagaaatggccgggaggccagtgacaacctggccgtgcagaacctgaagggcagcttcagcaatgccagcggcctgtttgagatccacggggccaccgtggtgcccatcgtgtctgtgctggcccctgagaagctgagcgccagcacccggcggcgctatgagacccaggtgcagacccggctgcagaccagcctggccaacctgcaccagaagagcagcgagattgagatcctggccgtggacctgcccaaggagaccatcctgcagttcctgagcctggagtgggatgctgatgagcaggccttcaacaccaccgtgaagcagctgctgagccggctgcccaagcagcgctacctgaagctggtgtgtgatgagatctacaacatcaaggtggagaagaaggtgtctgtgctcttcctgtacagctacagagatgactactaccgcatcctcttctag

SEQ ID NO: 25728 - DNA, 4950 bp, Artificial Sequence
  derived and/or modified sequence
atggccggcggccggggcgcccccggccggggccgggacgagcccccagagtcttacccccaacgacaagaccatgaactccaggctttggaagctatatatggagctgacttccaagatctgcgccctgatgcctgtggcccagtgaaagagccgcctgagatcaatctggtgttgtatccccaggggctcacaggggaggaggtttatgtgaaggtggatttgcgcgtcaaatgtcctcctacctaccccgacgttgtacccgaaatcgagctgaagaacgccaaaggcctctctaacgagagcgtgaatctcctgaagtcgcgcctggaagaacttgctaagaagcattgtggcgaggtcatgatcttcgagcttgcgtaccacgtgcagagttttcttagtgagcacaacaagcctccacctaagtccttccatgaagaaatgctggagaggagagcgcaggaggaacagcaaagactgctggaggctaaacgtaaggaggagcaggaacaaagggagattttgcacgaaattcagagaaggaaggaagagattaaggaggaaaagaagcggaaggaaatggctaagcaggagcgcctggaaattgcctccctgtccaaccaggatcacacatccaagaaagatccaggcgggcataggacagccgccatactgcatgggggatcacctgacttcgtgggaaacggcaaacaccgcgcaaatagcagtgggagatcacgtagagagcgtcagtacagtgtgtgcaatagcgaggatagtcccgggtcatgcgaaatcttatatttcaatatgggtagcccagaccaactgatggtgcacaagggcaagtgtatcggcagcgacgaacaacttggaaaactggtctataacgccctggagactgctacaggcggattcgtcctgttatacgagtgggtgctacagtggcagaaaaaaatgggaccgtttcttaccagccaggagaaagaaaaaatagataagtgcaagaaacagattcagggtactgagaccgaattcaacagtttagtgaaactgtcgcatcctaatgtagtacgttacctggctatgaatctgaaggagcaggatgattctatcgtggtcgatatattagtcgagcacattagcggagtgagtctggctgcccatctgtcccactccgggcctattcccgtacatcaattgaggagatacactgcacaactcttaagtggcctggattacctccattccaactccgtcgttcacaaagtcctgtctgccagcaacgtgctggtcgacgctgaaggaaccgtgaagattaccgactacagcatttccaagaggctggcagacatttgcaaggaggatgtttttgaacagaccagggtccgcttcagtgacaacgccctgccatacaagactggtaagaagggggacgtttggagactcgggctcctgctcctgtcactgagtcagggccaggagtgtggtgagtatccggtcacaattcccagcgacctcccagctgacttccaagactttcttaaaaagtgcgtttgtcttgacgataaggagagatggagcccacagcaactgcttaagcactcatttattaatccgcagccaaagatgccccttgtggaacagagccctgaggacagcgaggggcaagactatgtcgagactgtgattccaagcaatagactgccctctgccgcctttttctcggagacccaaagacagttcagcagatattttatcgagttcgaagagttacagttgctgggaaaaggcgcctttggcgccgtgattaaggtgcaaaacaaactggatggatgttgctatgctgtgaagcggatccctattaaccctgccagtagacagttccgtcggattaaaggcgaagtcactctgctgagccggttgcaccatgaaaatattgtccggtattacaatgcttggatagaacggcacgagcgtcctgcgggaccggggacccccccacccgactctgggccccttgccaaggacgatagggctgcacgcggccaacccgcttcagataccgatggcctggatagcgttgaggcggctgcccccccccccatcctttcctctagcgtggagtggagcacttccggcgaacgctcagcctctgcgcgcttccccgctactgggccaggctcaagtgatgatgaggacgacgacgaagacgagcatgggggtgtgttcagccagagcttcctgcccgcctctgactccgaaagtgacatcatattcgacaatgaggacgaaaactccaaatcacagaatcaggatgaggattgtaatgaaaaaaatgggtgccatgaatcagaaccaagcgttacaactgaagccgtgcactatttatacatacagatggaatattgtgagaaatccaccttgcgggacaccatagatcaggggctctaccgtgacacagtcaggctgtggagactgtttcgcgaaattctcgacggactagcctacatccacgagaaaggcatgatccaccgggatctcaagccagtgaacatttttctggactcagacgatcacgtgaaaatcggggacttcggcttggcaaccgaccatctggctttttcagctgacagtaaacaggatgaccagactggagacctgattaagagcgatccgtctgggcatctcacaggcatggtcgggacggccctctacgtttcaccagaagttcagggatccaccaagagcgcatacaaccagaaagtggacctcttttctctgggaatcattttctttgaaatgtcctatcacccgatggtgaccgcctctgaaaggatcttcgttctgaatcagctgcgggatcccacttctccaaaattccccgaggacttcgacgacggagaacatgccaaacagaagtccgtgatttcctggttattgaatcatgaccctgcaaaacgtcccacagccacggaacttctgaagagcgaactcttgccccctccccagatggaggaaagcgagctgcacgaagttctccatcacactctgaccaacgtggacgggaaggcctacaggactatgatggctcagattttttctcagaggatctctccagccattgactatacctacgactctgacattctaaagggtaattttagtatccgtacggccaagatgcagcagcatgtctgcgaaaccattatacgtatcttcaagcggcacggtgctgtccagctgtgtaccccactgttgcttcctcggaaccgacagatttacgagcataacgaagccgcactgtttatggatcactcaggaatgctcgttatgctcccttttgatctgcggatcccgttcgcacgctacgttgcacgaaataacatcctcaacttgaaaagatactgtatagaacgggtgttccgtccaagaaagctggacaggttccaccccaaggaattgctggaatgcgcattcgatatagtgacgagcacaaccaacagcttcctgccgaccgcagaaattatttacacaatctatgagatcatccaggaatttccagcgctgcaggaacgtaactattcaatatacctaaaccataccatgctgctgaaggccattctgcttcactgcgggattcccgaggacaagctttcccaggtgtatataatcctgtacgatgccgtgacagaaaagcttacaagacgggaggttgaagcgaaattttgtaacttgtcactctcatcaaatagcctgtgcagattgtacaagttcatcgagcagaaaggagatcttcaggacctgatgcccaccattaatagcctgattaaacaaaagactggcatcgcccaactggtgaaatacggactcaaggatctggaggaggtcgtcggcctgcttaagaaattggggattaagctgcaagttctgattaatctcggcctcgtttacaaggtacaacagcacaacggaatcatcttccagttcgtagcatttataaagcgtaggcagcgggccgtgcctgagattttagctgcgggcggccgatacgatttgctgataccgcagttccggggtccgcaggcactcggcccggtgcctaccgcaatcggcgtctcgattgcgatagataagatatcagcggccgtgctcaacatggaagagagcgtcaccatcagctcatgtgacttactggtggtctcagtgggccagatgagcatgtcacgggctatcaacctcacccagaagctctggactgcaggaattacggccgaaattatgtacgactggtcacaaagccaggaagagctgcaggagtactgtagacaccatgaaattacgtacgtggccctggtgagcgataaggagggctcgcatgtaaaagtgaagtcatttgaaaaggaacggcaaaccgagaagagagtgctcgagaccgaattggtggatcatgtccttcagaaactgcggactaaagtgacggacgaaaggaacggacgcgaagctagtgacaatttagccgtacagaacttgaaaggcagcttctccaatgcatccgggctgttcgagatacacggtgctaccgtggttcccatcgtttcggtgttggccccggagaaattatccgcatccactcgccggcggtacgagactcaagtacagacccgtcttcagaccagcctggctaaccttcatcagaagtctagtgagattgaaatcctcgcagttgatctgccaaaggaaacgatcctgcagtttttatccctggaatgggacgccgacgagcaggcttttaatacaactgtcaagcaactgcttagccggcttcccaagcagagatacctcaagctggtatgcgacgagatctacaacatcaaggttgagaaaaaggtgagtgtgttatttctttattcctatcgggacgattactatcgaatcctcttctag

SEQ ID NO: 25729 - DNA, 4866 bp, Artificial Sequence
  derived and/or modified sequence
atggccggcggccggggcgcccccggccggggccgggacgagccccccgagagctaccctcagagacaggaccatgagctccaggccttagaagccatatatggcgccgattttcaggatctgcgccccgacgcatgcgggcctgtgaaggagcccccagaaattaacctggtgctctaccctcaagggctcacaggcgaggaggtctacgtgaaagtagacctgcgtgtaaaatgccctcctacgtaccccgacgtggtgcctgagatcgagttaaagaatgccaaggggctgagtaatgagtccgtgaatttgttgaagtctaggctggaggagctggccaagaagcattgcggtgaggttatgatcttcgaactcgcctatcacgtgcaaagcttcctctctgaacataacaaaccacccccaaagagctttcatgaagagatgttagagagaagagcacaggaggaacagcaaaggttactggaagctaagcggaaggaggagcaggagcagcgcgagattcttcacgaaattcagcgtcgaaaggaggagatcaaggaggagaaaaagcgaaaagagatggctaagcaggagcgtctagaaatagcaagtctttcgaatcaggaccacacttcaaagaaggaccccggtggccatagaactgcagcaatattgcacgggggatctcccgacttcgtcggcaacgggaaacacagggccaactcatcaggccggtcccgtcgagaaagacagtattccgtctgcaatagcgaggattctcccggatcctgtgaaattctgtactttaacatgggctccccagaccagttaatggttcacaaaggaaaatgcataggatctgacgaacagctggggaagctagtgtataatgcccttgaaaccgcaaccgggggatttgtgctgctgtacgaatgggtgctccagtggcaaaagaagatggggccgttcttaacctcccaggaaaaagaaaagatcgacaagtgcaagaaacagattcaaggtaccgaaactgagtttaatagtctcgttaaactgagccacccaaacgtcgtgcggtatcttgcaatgaatttaaaagaacaggacgatagcatcgttgtggacatcttagtcgaacacatcagcggcgtgtctttggcagcccacctgtctcactcaggtcctattcctgtgcaccagctcagacgctataccgcccagttgttaagtggccttgactacctgcactctaattccgtcgtgcataaagttctgtccgcgagcaacgttctggtcgatgcggaggggactgttaaaattacagattacagcattagtaagagactggctgacatctgtaaagaggacgtgtttgaacagacacgggttaggttctctgataatgctctgccttacaaaactgggaaaaagggtgacgtgtggcgtctgggtctcttactgctgtccctctcacagggccaagaatgcggcgagtacccagtgactatcccgagcgatttgcccgcggatttccaagacttcctcaagaaatgtgtttgcttagatgacaaggagcgctggtcccctcagcaactgctgaaacatagcttcattaatccccagccgaaaatgccactcgtggagcagtctccggaagatagcgaggggcaggactacgtggagactgttattccatctaacagactcccatccgccgctttcttctctgagacacagagacagttctctcgctattttatagagttcgaggagcttcagctgctcggcaagggcgcctttggggcagtgatcaaggtgcagaataagcttgatggttgttgttatgccgtgaagcgtattccaataaaccctgcttcacgccagtttagacgtatcaagggtgaagtgaccctgctttctcgactgcatcatgagaatattgtgcggtattataacgcctggatagaaagacacgagagaccagccggtccaggtacacccccgcccgactcaggtcctcttgcaaaggacgacagagctgcccggggccagcctgcctccgacacggacggtctagactccgtggaggctgccgcacctcctccgatactgagctctagcgtagagtggtccacctcaggcgagcggagcgcgagtgcccggttccctgcgacagggcccggtagctcggatgatgaagacgacgatgaggatgagcacggcggcgtcttctctcagagcttcctgcccgcgtcagactctgagagcgatatcatattcgataacgaagatgagaatagtaagagccagaatcagatggagtattgcgagaaatctacgctcagagacactatcgatcagggcctctaccgtgacaccgtgcggttgtggaggcttttcagggagatactagatggcctggcttatattcacgaaaaaggaatgatacaccgcgatctgaaaccagtcaatatatttctggattcagatgaccatgtgaaaattggcgattttggcttggcaaccgatcatttggccttcagcgctgactctaaacaggacgaccagaccggcgatctgatcaagtccgatccgtctggccacttgacgggaatggtaggcaccgccctgtacgtgtcccctgaagttcaggggagcacaaaatcggcctacaatcaaaaggtcgacttgtttagcttgggcattatcttctttgagatgtcttaccaccctatggttactgcctctgagcggatctttgtccttaatcaactgcgagaccctacaagtcctaagttccctgaagacttcgacgatggtgagcatgctaagcaaaagtcagttatatcttggctgttgaaccatgatcccgcaaaaaggccaaccgccacggaactcctgaagtccgaactattgcctccacctcaaatggaggaaagtgagctgcacgaagtgctccaccacaccttgacaaatgtagatggcaaggcctatcggacaatgatggcacagatcttttcccagaggatttctcccgctattgactacacgtatgactcagatatcttgaaagggaacttctccattaggactgcaaagatgcagcagcacgtgtgcgagacaattatcaggatattcaagcgacacggggcggtgcagctttgtacacccctgttgctgccacggaacaggcagatttatgagcacaacgaagctgccctgttcatggaccactctggaatgctggttatgctgccttttgacttaagaattcctttcgcacgatacgtcgcaagaaataatatattgaacttaaaacgatactgtatcgaaagagtcttccggccccgcaagttggacaggtttcaccctaaagagctgctcgaatgcgcctttgacattgtcacctcaactactaattcctttctgcctaccgctgagattatatacacaatctacgagataatacaggaatttccagccctccaggaaaggaactacagcatttaccttaatcacacaatgttactcaaggctattctactgcactgcggcatccctgaggacaaattgtcacaggtttatatcattctttacgacgccgtgacagagaaactgactcgcagggaagtggaggcaaagttttgcaacctatccctatcctccaacagcctctgccggctgtacaagtttatagaacagaagggagatctgcaggacctgatgcccaccattaattccctaatcaaacagaagacgggaatagcccagcttgttaaatatggtctgaaggaccttgaggaagtggtgggactgttgaagaagctgggaataaaactccaggtgcttattaatctcggtcttgtgtacaaggtccagcagcacaatggtattattttccaattcgtagccttcatcaaacgacgccaaagagcggtcccggaaattctcgccgctggggggcggtatgatctcttgatcccccagtttcgaggtccccaggcacttggaccggttcctaccgctataggcgtgtcaatagcaatcgataagatttccgccgcagtgctgaacatggaggagtcggtgaccatctcgagctgcgatctccttgtggtgtctgtgggtcaaatgtcaatgagccgcgctatcaatctgactcagaaactatggaccgccggcataacagccgagataatgtacgactggtcccagagccaggaggagttgcaggaatactgtcggcaccacgaaattacatacgtcgcattagtttccgataaagagggcagccacgttaaagtgaagagctttgagaaggagaggcagacagagaagagagtcttggagaccgaattagtggaccatgtgctccaaaagctgagaaccaaggttaccgatgagaggaatggacgcgaggccagcgataatcttgctgtgcagaatttgaagggcagtttctctaacgcttcagggctgtttgagatccacggggctaccgtggttccaatcgtctcagtcctagctcccgaaaagttatcagcaagtacccgcaggcgatacgaaacgcaggtccagacgagactccagacaagcctggcaaatttgcatcagaaatctagcgagatagaaatcctggccgttgatctcccaaaggagaccatcctccagttcctgagcctagaatgggatgccgacgagcaggctttcaacacaacggtgaaacagctcttgtctcgactgcctaaacagcggtatctcaagctggtatgtgacgaaatctacaatatcaaagtggaaaaaaaggtgtcagtgttatttctatactcttacagagacgactattaccggatactgttttag

SEQ ID NO: 25730 - DNA, 4284 bp, Artificial Sequence
  derived and/or modified sequence
tgagccaagcaggagcggctggagatcgccagcctgagcaaccaggaccacacatctaagaaggaccctgggggtcaccggaccgccgctatcctgcacgggggctcacccgacttcgtcggaaatggtaagcatagagctaattcctctggaaggtcccgacgagaacgccagtattccgtatgcaatagtgaggacagccctggttcatgcgagatactgtatttcaacatggggtcaccagatcagctcatggtgcataaaggaaaatgcatcggatctgatgaacagcttggcaaactcgtgtacaacgccctcgagacagccacaggtggcttcgtgctcctgtatgagtgggtgctgcagtggcagaaaaaaatgggtccattccttacttctcaggaaaaggaaaagattgataagtgtaaaaaacagatccagggtaccgaaactgaatttaatagcctagttaagctgtctcaccctaacgtggtgagatatctggccatgaacctgaaggagcaggacgatagcattgttgtcgatatcctagtggagcatatcagtggggtttctctcgccgcccatctgtctcactcggggccaattcctgtgcaccaactgaggcgatacacagcgcagctgctgtccgggctggactatctgcattcaaatagcgtggttcacaaggtgttgtctgctagcaacgtcctagttgatgcggagggcactgtgaagattacggactactccataagcaaaagactggccgacatatgtaaggaagacgtgttcgagcaaaccagggtaagattttctgacaatgccctaccgtacaaaactggcaagaaaggcgacgtttggaggctggggcttctgctactctctctctcccaaggccaggaatgcggagagtatcccgttacaataccctccgatctccccgctgacttccaggactttttgaagaaatgtgtctgcctggatgacaaagaaagatggagccctcagcagctgctgaaacattcttttatcaacccacagcccaagatgccactcgtagagcagagcccggaagatagcgagggacaagactacgttgaaacagtcattccttcaaaccgcttgccttctgccgcgttcttctcggaaacccagcgccagttctccagatattttattgaattcgaggaactgcagctcttgggtaaaggcgccttcggcgcggtgatcaaagtgcaaaataagctcgacggctgctgttatgctgttaagaggattcccatcaatcctgcttcccgccagtttcgccgcattaaaggcgaagtgaccttgctcagccgcctgcaccacgagaacattgtgcggtactacaatgcatggattgagagacatgagcggcccgccggacctggaacaccgccaccagattccggcccactcgccaaagatgaccgcgcggccagaggccagccggcctctgacaccgacggactggatagtgttgaagccgctgctcctccccccatcctgagctcatccgtagagtggagcaccagtggcgaaaggtctgctagcgcccggtttccggcaaccggaccaggctcctctgacgacgaagatgatgacgaagatgagcacgggggagtgttctcccagagctttctgcctgcctctgattctgagagcgatattatcttcgataacgaggatgagaattccaaaagccagaatcagatggagtactgcgaaaagtctactctgagggacactattgaccaaggcctgtatcgggacacggtgcgcttatggagactcttcagggaaatccttgacgggctcgcctacatacacgaaaaaggcatgatacaccgggaccttaagccggtaaatattttcttggatagtgacgaccacgtgaaaattggcgactttggtctggcaaccgaccacctggccttcagtgccgacagcaaacaagacgaccaaacaggcgatctcattaagtccgaccccagtggccatttaaccggcatggtcggtaccgcactttacgttagccctgaggtgcaggggagtacaaagtcagcctacaaccagaaagtggatttattctccctcgggatcatcttctttgaaatgagctatcaccccatggtgacggcctccgaacggatctttgtgttgaatcagctgcgagacccaacttctccaaaattccctgaagacttcgacgatggggaacacgccaaacagaaatctgtgatcagttggctgctgaatcacgacccagccaagaggcccacagcaaccgagttactgaagtccgagctgttgccacctccccaaatggaggaatctgagctgcacgaggttcttcatcacacgctgacgaacgtggatggcaaggcttatcgaaccatgatggcccagatcttctctcagaggatcagcccggctatcgactatacatatgattccgatatccttaaaggaaacttctctatcagaaccgccaaaatgcaacagcacgtatgcgaaaccatcattcggattttcaagcgccacggcgccgttcagctctgtactcccctactcttgcctaggaatcggcaaatctacgaacacaatgaggcggccctctttatggatcattccgggatgctagtgatgttaccttttgacctgcgaattcccttcgcccgatacgtagctcgcaacaacatcttaaatctcaaacggtactgtatcgaaagggtgtttaggccccggaaactggataggttccatccaaaggagttgctggaatgcgcattcgatattgttactagcacaaccaactctttccttccaaccgccgaaatcatctatacgatttatgagattattcaggagttccccgctcttcaggagcgcaactatagcatctaccttaaccatacaatgctgctgaaggctatactcttgcactgtggaatccctgaggacaagttgtcacaagtatacatcatcctgtatgatgccgttactgaaaaacttaccaggcgggaagtggaagctaaattctgtaacctctctttgtcgagtaactctctttgcaggttgtataagttcatagaacaaaaaggggatctgcaggatctaatgccaaccattaacagtttgataaagcaaaagaccggcatagcacagcttgtcaaatacggcctgaaggacttggaggaagtggtggggctgctaaaaaagctcggcataaagttacaagtcttgatcaatctcgggcttgtctacaaagtgcaacagcacaatgggattatttttcaattcgttgctttcatcaaacggcgccagcgcgccgtccctgagatcttggcagcaggaggtaggtatgacctcctcattccacagttcaggggccctcaggccctaggccccgtgcccactgctattggggtgtcaatcgccattgacaagatctccgctgcagttctcaacatggaagagtcagtgacgatcagctcatgcgatctactggtcgtctcagttggtcagatgtccatgtctcgcgctattaatctcactcaaaagctctggaccgctggcatcaccgccgaaattatgtatgactggagccagtcccaggaggaactgcaggaatattgccggcatcatgagatcacatacgtagctctggtgtccgataaggaaggttcacatgttaaggtcaagtccttcgaaaaggagaggcaaacagaaaagagggtactcgaaacagaactcgtggaccatgtgcttcagaagctacgtaccaaggtgacagatgagaggaatggccgcgaggcaagtgataacctcgcggttcagaatctcaagggaagctttagtaacgctagtggtctcttcgaaattcacggggcaactgtagtacccatcgtatccgtgttagctcctgaaaagcttagcgcctcaacccgccgacgatatgagactcaagtgcagactaggctgcagacaagcctcgcaaatttacaccagaagtcaagcgagatcgagatcctcgcagtggatttacccaaggagaccatcctgcaattcctgagcctcgaatgggacgctgacgaacaagcctttaacacaactgtgaaacagctgctgagtcggctacctaaacaacggtatttaaaactggtctgtgacgaaatttataacataaaggttgaaaaaaaggtgagtgttctgttcctgtattcatatcgcgacgactactaccggattctgttctag

SEQ ID NO: 25731 - DNA, 4950 bp, Artificial Sequence
  derived and/or modified sequence
atggctgggggtaggggcgctcccggaaggggtcgcgacgagcctcccgaaagttatccccagcgccaggatcacgaacttcaagcactggaagctatttatggtgcagactttcaggacttacgcccagatgcgtgtggccctgtgaaagagccgcctgagattaatctggtcctctatcctcagggcctgacgggagaagaggtgtacgtaaaggttgatctgcgggtgaaatgccccccaacttaccccgatgtggttcccgagattgaactgaagaatgccaagggactctcaaacgagagcgtcaacctgctgaagagtcgactggaagaattagctaagaagcattgtggtgaggtgatgatctttgaactggcctatcacgttcaatctttcctctcagaacataacaagccccctccaaagagctttcatgaagaaatgctagagcgcagagcacaggaagagcagcaacgcctgcttgaggcaaagaggaaggaggagcaggaacagcgggaaattctgcacgaaattcagcggaggaaagaagaaatcaaagaagagaagaagcgaaaggagatggcgaaacaagaaagacttgaaattgctagtctgtccaaccaggaccacacaagcaagaaagatcccggaggccaccgaaccgcagcaatcttgcatggcggttcacccgatttcgttgggaacgggaagcatcgcgctaacagctctgggagaagtaggcgcgagcgccagtacagcgtgtgcaacagtgaagacagtcccggatcctgcgagattttatattttaatatgggctctcccgaccagctgatggtgcataagggaaagtgcattggaagtgatgaacagctgggaaaattggtgtataatgctctggagacagcgacagggggattcgttttgctttacgagtgggttctacaatggcagaagaaaatgggacccttcctaactagccaggaaaaagagaaaatcgataaatgcaaaaaacagattcaaggtacagagacagaatttaattccctggtcaagctatcccacccaaacgtcgtgcgctatttggcaatgaatcttaaggagcaggatgattctatagttgtggatatcctcgtggagcacatttctggcgtctcgctggccgcacacctgtcacactccgggcctataccagtgcaccaactgagacggtatactgctcaactgctgagcgggctggattatctccatagcaatagtgttgttcataaggtgctctctgcttctaatgtgctcgtggacgccgaaggtaccgtaaaaattactgactacagcatctccaaaaggcttgccgacatttgcaaggaggacgtttttgaacagacaagggtcaggttttccgacaacgccctcccatataagacgggtaagaagggcgatgtgtggcggttgggcctgcttctgctttcgctgtctcagggacaggagtgcggggagtacccagtgacgattccttccgatctgcccgcagatttccaggacttcttgaaaaagtgtgtgtgcctggacgacaaggagcgatggagtccacagcagctgcttaaacactcttttataaacccccaaccgaaaatgcccttagtcgagcagtctccggaagactccgaggggcaggattatgtggaaactgtgatcccaagcaatcggctgcccagcgctgcttttttcagcgagacacagaggcagtttagccggtattttattgagtttgaggagttgcagctgctgggaaagggcgcttttggagctgtgatcaaagtgcagaataaacttgacggatgctgctatgccgtgaagaggattccaattaatccagccagcagacagttcagaaggatcaagggggaggtgacgcttctgagccgactccatcacgagaatatcgttcgttactacaacgcatggatcgaacgacacgaaaggccagcagggcctggcaccccaccgcctgatagtgggccactggcaaaggatgatcgagctgcgaggggtcagcctgcatccgacaccgacggcctcgattcagttgaggcagccgcaccccctcctattctttcgtcgagtgtcgaatggagcaccagtggcgaaaggtccgcctccgcccgatttcccgcaacagggccagggtcctcagacgatgaagacgacgacgaagacgaacatggtggcgtgttcagccagagctttttgcccgcatccgactcagaatcagatatcatcttcgataacgaggacgagaactcaaagagtcagaatcaggacgaggattgcaacgaaaagaatgggtgccatgaaagtgagcctagtgtgacgacggaggcagtgcactacctgtacatccagatggagtattgcgaaaagtccactctgagggacacaattgaccagggtctgtaccgtgataccgttcgcctgtggcggcttttcagagaaattctggacggtctggcctatatccacgaaaaagggatgatccatcgagatctgaaacccgtgaacatcttcttagactctgacgatcatgttaaaatcggcgacttcgggctggccacagatcacctggccttttccgctgacagcaaacaagatgaccagaccggagacctcataaaatcagatccgtctgggcacctgaccgggatggtgggtaccgcactgtacgtttccccagaagtgcagggatcaaccaaatccgcctataatcaaaaggtggacctgtttagtctcgggattatattcttcgagatgtcttatcacccgatggtgaccgcctcagaaagaatttttgtattgaaccaactgagggaccctactagtccaaaattcccagaggatttcgatgacggggaacatgccaaacagaagtctgtcatcagctggctgctaaatcatgacccagccaagcgacctacagccaccgaacttttgaagtccgagctgctccctcccccacagatggaggagtcagagcttcatgaggtgctgcaccacacattgaccaatgttgacgggaaggcttaccgtacaatgatggctcagattttttctcaaaggataagccctgccatagattatacttacgactctgacatcttaaaaggaaacttctcaatccggaccgccaagatgcagcagcacgtctgcgaaacgatcatccggatttttaagagacacggggctgttcagctttgcactcctctgctgttgcctcgaaaccgccagatctacgagcataacgaggctgccctgttcatggatcacagcggcatgctcgtgatgctccccttcgatctgcgaatcccgttcgccagatatgtggcaagaaacaatatcctgaacctaaaacgctactgtatagagcgtgtgttccgtccaaggaaattagatagatttcacccaaaagagctcctcgaatgcgcgttcgatatcgttacatcgaccacaaacagcttcttaccgacagcagagatcatctacactatctacgaaatcatccaggagtttccagcactgcaggaaaggaattacagtatttacctgaatcacacaatgttgctgaaagccatacttttacattgcggcatcccagaagacaagctgagtcaggtttatataatcctgtacgacgcagtaaccgaaaagctcaccagacgcgaagtggaggcaaaattctgtaatttgtcattaagcagtaattcgctgtgccgcctgtacaaatttatcgagcagaaaggagatcttcaggacttgatgccgacaataaatagcctgataaagcaaaagaccggaatcgcacagctggttaagtacggactgaaggatcttgaagaggtggtcggattactgaagaaactaggaattaagctgcaggtactcatcaacctgggtcttgtgtataaagtccagcaacataacggaattatctttcagtttgtagccttcattaaacggcgacagagggccgtgcccgaaatcttagcagcagggggaagatatgaccttctgatcccacagttccggggtccccaggctcttggccctgtccctacagcaatcggcgtgtctatagccattgataagatctctgccgcagttctcaacatggaggagtccgtgaccattagttcttgtgatcttctggtcgtgagtgttggccagatgtccatgagccgcgctattaatttgacccaaaagctgtggacagccggaattaccgccgagataatgtacgattggtcgcagtcacaggaggaactgcaggagtattgtcgacatcacgagatcacatacgtggctcttgtgtctgataaagagggaagccatgtgaaggtaaagagttttgagaaggagcgacagacggaaaaacgcgtccttgaaactgagttggttgaccacgtgctccaaaaactccggactaaagttacggatgagcggaatggtcgagaggcatcagataacctcgcagtacagaatctaaagggtagctttagtaacgcttctggactgttcgaaatccacggtgcgactgtggtgccaattgtgtctgtgttagctcccgagaaactgagtgccagtacccgcagaagatacgaaacccaggtgcagactaggctccagacttctctagctaacttacaccagaagtcctccgaaattgagatcctggctgttgacttgccaaaggagaccattctgcagttcctctcgcttgagtgggatgctgatgaacaggcattcaataccactgtgaaacagcttctgtcccggttgcctaaacagcgttacctcaagttggtctgtgatgaaatatataatatcaaggtggagaaaaaggtcagtgttttatttctctacagctaccgcgatgattactaccgaatccttttctag

SEQ ID NO: 25732 - DNA, 4866 bp, Artificial Sequence
  derived and/or modified sequence
atggccggaggtagaggggctcccggtagaggaagggatgaaccaccggaatcatacccacagaggcaggaccacgagctgcaggcactcgaggcgatctacggtgcggactttcaagatctgcgccctgatgcctgtggaccggtaaaggagccacccgagatcaacctggtcctgtatcctcaaggcctgactggagaagaagtgtacgtcaaggttgatctgagagtcaaatgccctcctacatacccggatgtggtgcctgaaattgagctgaagaacgccaaaggtttgagcaacgagtccgtgaatctgctgaagtccaggctggaggaactggccaaaaagcattgcggtgaagtcatgatcttcgaattggcttatcacgtccagtcatttctgtccgagcacaacaagccacctcctaaatcatttcacgaagagatgctcgagcggagagcccaagaagaacagcagagactgctggaagccaaacgcaaagaagagcaggaacagagagagattcttcacgagattcagagacggaaggaggagattaaagaggagaaaaagcgcaaggagatggctaaacaggaaagacttgagatcgcttctctctcgaaccaggatcacacctccaaaaaagatccagggggacaccgaactgctgccatcctgcatggaggatcaccggacttcgtgggaaacggtaagcatcgtgcaaacagttccgggagatccaggcgggaaaggcagtattccgtgtgtaattcggaagacagtccaggcagttgcgagatactgtactttaacatggggagccctgatcagctgatggtacataagggcaaatgcataggttcagacgagcaactggggaaattagtctataacgccctggaaacagccactggaggtttcgtattattgtacgaatgggtactgcaatggcagaagaagatgggccctttcctgaccagccaggaaaaagagaagattgacaaatgcaaaaaacagattcaaggaaccgaaaccgagtttaacagcctagtgaagctgtcccatcccaatgtggtacgttatctcgccatgaatttgaaggagcaagacgacagcattgtggttgacatactagtcgagcatatttccggagtgtcactggctgctcatttgtctcatagcggcccaattcccgtccatcagctgcggaggtataccgcccagttgctgagcggactggactacctgcactctaattcggtcgtgcataaggtgctgtccgcctccaatgtcctggttgacgccgagggaaccgtgaaaatcacggactacagcatctctaagcgcctggctgatatctgcaaagaagacgtgttcgagcagacccgtgttagattctcagacaatgccttgccctacaagaccggaaaaaagggagatgtgtggaggctcgggcttcttttgctgagcctgtcccagggccaagaatgtggcgagtacccggtgacaattccaagcgacctgcctgccgacttccaggattttttaaaaaaatgcgtctgcttggatgacaaggagagatggtctcctcagcaattgctgaaacactcatttatcaatccccagcctaagatgccactcgtagagcagtcgcctgaggatagcgagggacaagactacgtagaaacagtgataccgtcaaatcggcttccttccgccgctttctttagtgagacacagcggcagttcagcagatatttcatcgaatttgaagaactgcaattattgggtaagggcgcatttggcgctgtcatcaaggtgcagaacaagctggacgggtgctgttacgctgtaaagcgaatcccaatcaatccagccagccggcagttccgtaggattaaaggcgaggttaccttgctgagtcgcctgcaccatgaaaacattgtcaggtactataacgcctggatcgagaggcatgagcgcccagctgggccaggcacacctccgcctgattccggtccactagccaaggatgatagagcggcacggggacagccagcttccgacacagacggattggacagcgtggaggctgcagcccctcctcctatcctgtccagttccgtggaatggagtacctcaggcgagcggtctgcatccgctagattcccggctaccggccctggcagctccgatgatgaggatgatgacgaggacgagcacggcggagtgttctctcagtcatttcttcccgcatccgactccgagtccgacattatctttgacaatgaggatgagaactccaagtcgcaaaaccagatggaatactgcgagaaatccacccttcgagacactattgaccagggactgtaccgcgatacagttcgactgtggcgattgttcagagagattttggatgggctggcctatatccatgaaaagggtatgatccaccgcgaccttaagccggtaaacatattcctagatagcgacgatcacgtgaagatcggcgatttcggcctggccacggaccatttagccttcagtgctgattccaaacaggatgaccaaaccggtgatctgatcaaatcagacccttcaggtcacctgacaggcatggtcgggacggcgctttatgtgagtccagaggtgcaggggagcacaaagagtgcatacaatcaaaaggtggacctcttctctctcggcattattttctttgaaatgagttatcatcccatggtgaccgccagtgagaggatttttgtcctgaatcagttgcgggaccccacctctcctaagtttcctgaggattttgatgacggagaacacgcgaagcaaaagtcggtcatctcctggcttctcaatcacgaccctgctaaaagacccaccgcaaccgagctcttgaaaagtgagttgctgcctccacctcagatggaagagagtgaactgcacgaggtcctccaccacacattgactaacgtggacggtaaggcgtaccgcacgatgatggcccagatctttagccaacgcatttcgccggctatcgattacacgtatgacagcgacatccttaaaggaaatttttctattcggaccgccaagatgcaacagcacgtctgcgaaaccatcatcagaatatttaaaaggcacggcgctgtgcaattgtgcacacctcttcttttacccaggaacaggcaaatttacgagcataatgaagcagccttgttcatggaccactcgggcatgctggtcatgctgcccttcgatctgagaattccctttgcgagatacgtcgctcgtaacaacatcctcaacttgaagagatattgtatagaaagagtcttcagacctcgcaaactcgatcggttccaccccaaagagcttctcgagtgtgcctttgacattgtgacctcaacaacaaatagcttcctgcccaccgcagagataatttacacaatttatgagattatccaggaatttccggcactgcaggaacggaattactctatctacctgaatcacactatgctgttgaaggctattctgcttcactgtgggattcccgaggataagctgagccaggtgtatatcatcctatatgacgccgtaaccgagaaattgacccggcgagaagtggaggccaagttttgtaacctcagcttaagcagcaacagcctctgcaggctctataagtttatagagcagaagggggacctccaagacctgatgccgaccatcaacagtttaatcaagcagaagactggcatcgctcaattggtgaagtacgggctgaaagatctagaagaagttgtcggcctactaaagaaactcggcatcaagctgcaagtactgattaacctcggcttagtatataaagtgcagcagcacaacggtatcatcttccagtttgtcgcgtttatcaagaggagacagcgcgctgttccggagatattagctgccggaggcaggtatgacttgctgattccccagttccggggaccccaggccctggggccagtccctactgccatcggcgtttccattgccatcgataagatttccgccgcagtacttaacatggaagaaagcgtgacgatctcgtcctgcgatttgctcgtggtgtctgttggacagatgtcaatgagtcgggcaataaatctgactcaaaagctctggacagccggaattacagccgagatcatgtacgattggtcacagagccaggaagaactgcaggagtattgtcgacatcacgagatcacatatgtagctctggtgtccgataaagagggaagccacgtcaaggtgaagagcttcgaaaaggaacgccagacagagaagcgggttcttgagacagagcttgtcgaccacgtattgcaaaaactgaggacgaaagttacagacgagaggaatggacgcgaggcatccgataaccttgcagtgcagaacctgaaggggagcttttctaacgcttcaggcctgttcgagattcatggtgccaccgtggtgcctatcgtgtcagtactggcccctgagaagttgagcgccagcactcggaggcggtacgaaacgcaggtgcagacccggctccagacctcacttgcgaacctacatcagaagagctcggaaatcgaaattctcgccgtggacctgcccaaggagaccatcctgcagtttctaagtttggaatgggacgctgatgaacaggccttcaacacaactgtgaaacagctcctttcccggctccccaagcaaaggtatctgaagctcgtatgtgacgaaatatataacatcaaagttgaaaagaaagtctccgtgttgttcttgtactcatacagggatgactactatcggatcctgttctag

SEQ ID NO: 25733 - DNA, 4284 bp, Artificial Sequence
  derived and/or modified sequence
tgagcaaagcaagaacggctggaaatcgccagtctgtccaaccaggatcacacttctaagaaggaccccggtggccaccggacggctgcaattttacacgggggatctccagactttgttggcaatggcaaacacagagcaaactcctctggtcggagccggagagagcgacagtattcagtgtgcaattctgaggacagccccggatcttgcgagatactctattttaatatggggtcgccagatcagttaatggtccacaagggcaagtgtatcggctcagatgagcaattaggcaaattggtctacaacgcactagaaactgccacaggaggatttgttctgctctacgagtgggtgctgcagtggcagaaaaaaatggggcctttcctgacaagccaggaaaaggaaaaaatcgataagtgtaaaaaacagatacagggcaccgagactgagttcaatagtctggtaaaactgtcgcatcctaacgtagtccgttacctggccatgaacctgaaagagcaggatgactccattgtggtggatatcctggttgaacacatctctggcgttagtctagctgcccaccttagccattcaggtcctatccccgtgcaccagttaagacgctataccgctcagttattgagcggtctggactatttgcactcaaactctgtggtacacaaggtgctgtccgccagcaatgtcctagttgacgccgagggcaccgtgaaaattactgactattcgatcagtaagaggctggccgatatttgcaaagaggacgtattcgagcaaaccagggtccgatttagtgataatgctctaccctataagactggcaaaaagggtgacgtatggaggctgggattgcttcttctgagcctgtcacaaggccaggagtgcggagagtatcctgtgaccataccatctgacctcccagcggacttccaggacttcctgaaaaaatgcgtgtgtctggatgataaggagcggtggtctccacagcagctgttgaaacacagctttattaatcctcagcctaaaatgccgctagtggagcagtctcctgaagactcggaggggcaagactatgttgagaccgtcatcccgtcaaacagactcccaagcgccgctttcttcagcgagacccaacgacagttttctaggtactttattgaattcgaagaactacaactcctagggaagggcgcttttggcgcagtgatcaaagtgcagaataaacttgacgggtgttgttacgcagttaagcgaatacctatcaaccccgcttcccgccagtttcgccgaattaagggggaagtgactctcctgtctcgcctgcatcacgagaacattgttcggtactataacgcctggattgagaggcacgaaaggcccgcaggcccaggcaccccgcctccagatagtgggccactggccaaggatgaccgagctgccagaggccagcctgcttccgatacggacggcctggactctgtggaggcagctgcccctccacccatcctgagctcttctgtggaatggtcaactagcggcgaaaggtctgccagcgctcgattcccagctacggggcctgggtcaagtgatgacgaagacgacgatgaggatgaacatggaggggttttttcccaaagctttctgcccgctagcgatagtgaatccgatatcatctttgataacgaggatgaaaacagcaagtcccagaatcaaatggagtactgcgaaaagagtaccctcagggatactattgatcaaggactgtatagggacaccgtcagactgtggaggcttttccgtgagatcctggacggcctagcctatatacacgagaaaggcatgattcatcgagacctcaaaccagtcaacatttttctggactccgatgatcacgtgaagatcggagactttggattggcaacagaccacttagccttttctgccgactcgaagcaagatgatcaaaccggggacctgattaaatccgatccaagcgggcatttgaccggcatggtcggtacagccctgtacgtgagtcctgaggtccagggcagcaccaagagcgcttataaccagaaggtcgatctcttctctttgggtatcatcttcttcgaaatgagctaccaccccatggtcaccgcttccgaacggatattcgtgctgaatcagttgcgtgatcctaccagtcccaagtttcccgaggacttcgacgatggagaacatgccaaacaaaaaagtgttattagctggctgctgaatcatgacccagctaaacgcccaacagccactgaactactaaaatctgaactgctgccacctccacagatggaggagagcgagttacacgaagttctgcaccatactctgacaaatgtggacggcaaggcctacagaacaatgatggcccagatcttttctcagcgtatcagccccgctatcgactacacatatgattccgatatcctgaagggcaacttcagcattcgaactgcgaagatgcagcaacatgtgtgtgagaccatcattagaatctttaaaagacacggggctgtacagctctgtacacccctgctgctccctcgtaacaggcagatttacgaacacaacgaggcagccctcttcatggaccattctggcatgctggtgatgctcccatttgaccttcgtatccctttcgccaggtacgtcgcccgtaacaatatcctgaacctcaaacgatactgcatcgagagggtttttcggccaagaaagttggacagatttcacccaaaagagctgctggaatgcgcgtttgacatcgtaacaagcacaacaaattctttcctcccaacagccgaaattatctacaccatctacgagataatccaggagttccctgctcttcaagaacggaactatagcatttatctgaaccatacaatgctacttaaggctattttgctgcactgcgggatccctgaagataaactgagccaggtctatataatactctacgatgccgtgaccgaaaagttgacccgacgtgaggtggaggccaagttttgcaacctgtccctgagcagcaattccctatgcagattgtacaaattcattgaacaaaaaggggatttgcaggacctaatgccaactatcaacagtctcatcaagcaaaagactggcatcgctcagctggtaaaatatggcctgaaggacctggaagaagtcgtggggctgttgaaaaaactcggtatcaaattacaggtgttgatcaacctcggtttagtgtataaagtacagcaacacaacgggataattttccaatttgtggccttcatcaagaggcggcagagagccgtccccgaaatcctggcagctggaggaagatacgacctgttgattcctcagttccggggaccgcaggctctgggtcccgtgcccacggccattggcgtgagcattgcaattgataaaattagcgccgcagtgctgaatatggaggagtccgtgactattagtagctgtgacctgctcgttgtctcagtgggccagatgagcatgtccagagccattaacctgacacagaagctgtggacggcaggtataaccgcagagatcatgtacgattggagtcagtctcaggaagagctgcaggaatactgccgccaccatgaaataacttacgttgccctggtatcagacaaagagggatcccacgtgaaggttaaatcgttcgagaaagagagacagacagagaagcgcgtcctggagactgagctggtggaccatgtgctgcaaaaacttaggacaaaagtgacagacgagagaaacggaagagaagccagtgataacttagctgtgcaaaatctcaagggaagtttctccaacgcatccggcctgttcgaaatccacggggctacagtggtccctattgtgtcagttctggctccagaaaagctctcagcgagtacccgtagaaggtacgagacacaagtgcagactaggctccagactagtttggccaacctgcatcaaaaatcttctgagattgagatcctggcagtggacctgcctaaggagactattctacagtttctatccttagagtgggacgcagatgagcaagcttttaataccacagtgaagcaattactgtcgagactgccaaagcagagatatctcaaattggtttgcgatgagatctataatattaaagtggagaaaaaagtgagcgtgctattcctctacagctaccgtgatgattactacaggatcctcttttag

SEQ ID NO: 25734 - DNA, 5499 bp, Artificial Sequence
  derived and/or modified sequence
cgccgcccaggcaaggccgccctgccttgggcgcagcgctgccatggctgggggccgtggggcccccgggcgcggccgggacgagcctccggagagctacccgcaacgacaggaccacgagctacaggccctggaggccatttacggcgcggacttccaagacctgcggccggacgcttgcggaccggtcaaagagccccctgaaatcaatttagttttgtaccctcaaggcctaactggtgaagaagtatatgtaaaagtggatttgagggttaaatgcccacctacctatccagatgtagttcctgaaatagagttaaaaaatgccaaaggtctatcaaatgaaagtgtcaatttgttaaaatctcgcctagaagaactggccaagaaacactgtggggaggtgatgatctttgaactggcttaccacgtgcagtcatttctcagcgagcataacaagccccctcccaagtcttttcatgaagaaatgctggaaaggcgggctcaggaggagcagcagaggctgttggaggccaagcggaaagaagagcaggagcaacgtgaaatcctgcatgagattcagagaaggaaagaagagataaaagaagagaaaaaaaggaaagaaatggctaagcaggaacgtttggaaattgctagtttgtcaaaccaagatcatacctctaagaaggacccaggaggacacagaacggctgccattctacatggaggctctcctgactttgtaggaaatggtaaacatcgggcaaactcctcaggaaggtctaggcgagaacgtcagtattctgtatgtaatagtgaagattctcctggctcttgtgaaattctgtatttcaatatggggagtcctgatcagctcatggtgcacaaagggaaatgtattggcagtgatgaacaacttggaaaattagtctacaatgctttggaaacagccactggtggctttgtcttgttgtatgagtgggtccttcagtggcagaaaaaaatgggtccattccttaccagtcaagaaaaagagaagattgataagtgcaaaaagcagattcaaggaacagaaacagaattcaactcactggtaaaattgagccatccaaatgtagtacgctaccttgcaatgaatctcaaagagcaagacgactccatcgtggtggacattttagtggagcacattagtggggtctctcttgctgcacacctgagccactcaggccccatccctgtgcatcagcttcgcaggtacacagctcagctcctgtcaggccttgattatctgcacagcaattctgtggtgcataaggtcctgagtgcatctaatgtcttggtggatgcagaaggcaccgtcaagattacggactatagcatttctaagcgcctcgcagacatttgcaaggaggatgtgtttgagcaaacccgagttcgttttagtgacaatgctctgccttataaaacggggaagaaaggagatgtttggcgtcttggccttctgctgctgtccctcagccaaggacaggaatgtggagagtaccctgtgaccatccctagtgacttaccagctgactttcaagattttctaaagaaatgtgtgtgcttggatgacaaggaaagatggagtccccagcagttgttgaaacacagctttataaatccccagccaaaaatgcctctagtggaacaaagtcctgaagattctgaaggacaagattatgttgagactgttattcctagcaaccggctacccagtgctgccttctttagtgagacacagagacagttttcccgatacttcattgagtttgaagaattacaacttcttggtaaaggagcttttggagctgtcatcaaggtgcagaacaagttggacggctgctgctacgcagtgaagcgcatccccatcaacccggccagccggcagttccgcaggatcaagggcgaagtgacactgctgtcacggctgcaccatgagaacattgtgcgctactacaacgcctggatcgagcggcacgagcggccggcgggaccggggacgccgcccccggactccgggcccctggccaaggatgaccgagctgcacgcgggcagccggcgagcgacacagacggcctggacagcgtagaggccgccgcgccgccacccatcctcagcagctcggtggagtggagcacttcgggcgagcgctcggccagtgcccgtttccccgccaccggcccgggctccagcgatgacgaggacgacgacgaggacgagcacggtggcgtcttctcccagtccttcctgcctgcttcagattctgaaagtgatattatctttgacaatgaagatgagaacagtaaaagtcagaatcaggatgaagattgcaatgaaaagaatggctgccatgaaagtgagccatcagtgacgactgaggctgtgcactacctatacatccagatggagtactgtgagaagagcactttacgagacaccattgaccagggactgtatcgagacaccgtcagactctggaggctttttcgagagattctggatggattagcttatatccatgagaaaggaatgattcaccgggatttgaagcctgtcaacatttttttggattctgatgaccatgtgaaaataggtgattttggtttggcgacagaccatctagccttttctgctgacagcaaacaagacgatcagacaggagacttgattaagtcagacccttcaggtcacttaactgggatggttggcactgctctctatgtaagcccagaggtccaaggaagcaccaaatctgcatacaaccagaaagtggatctcttcagcctgggaattatcttctttgagatgtcctatcaccccatggtcacggcttcagaaaggatctttgttctcaaccaactcagagatcccacttcgcctaagtttccagaagactttgacgatggagagcatgcaaagcagaaatcagtcatctcctggctgttgaaccacgatccagcaaaacggcccacagccacagaactgctcaagagtgagctgctgcccccaccccagatggaggagtcagagctgcatgaagtgctgcaccacacgctgaccaacgtggatgggaaggcctaccgcaccatgatggcccagatcttctcgcagcgcatctcccctgccatcgattacacctatgacagcgacatactgaagggcaacttctcaatccgtacagccaagatgcagcagcatgtgtgtgaaaccatcatccgcatctttaaaagacatggagctgttcagttgtgtactccactactgcttccccgaaacagacaaatatatgagcacaacgaagctgccctattcatggaccacagcgggatgctggtgatgcttccttttgacctgcggatcccttttgcaagatatgtggcaagaaataatatattgaatttaaaacgatactgcatagaacgtgtgttcaggccgcgcaagttagatcgatttcatcccaaagaacttctggagtgtgcatttgatattgtcacttctaccaccaacagctttctgcccactgctgaaattatctacactatctatgaaatcatccaagagtttccagcacttcaggaaagaaattacagtatttatttgaaccataccatgttattgaaagcaatactcttacactgtgggatcccagaagataaactcagtcaagtctacattattctgtatgatgctgtgacagagaagctgacgaggagagaagtggaagctaaattttgtaatctgtctttgtcttctaatagtctgtgtcgactctacaagtttattgaacagaagggagatttgcaagatcttatgccaacaataaattcattaataaaacagaaaacaggtattgcacagttggtgaagtatggcttaaaagacctagaggaggttgttggactgttgaagaaactcggcatcaagttacaggtcttgatcaatttgggcttggtttacaaggtgcagcagcacaatggaatcatcttccagtttgtggctttcatcaaacgaaggcaaagggctgtacctgaaatcctcgcagctggaggcagatatgacctgctgattccccagtttagagggccacaagctctggggccagttcccactgccattggggtcagcatagctatagacaagatatctgctgctgtcctcaacatggaggaatctgttacaataagctcttgtgacctcctggttgtaagtgttggccagatgtctatgtccagggccatcaacctaacccagaaactctggacagcaggcatcacagcagaaatcatgtacgactggtcacagtcccaagaggaattacaagagtactgcagacatcatgaaatcacctatgtggcccttgtctcggataaagaaggaagccatgtcaaggttaagtctttcgagaaggaaaggcagacagagaagcgtgtgctggagactgaacttgtggaccatgtactgcagaaactgaggactaaagtcactgatgaaaggaatggcagagaagcttccgataatcttgcagtgcaaaatctgaaggggtcattttctaatgcttcaggtttgtttgaaatccatggagcaacagtggttcccattgtgagtgtgctagccccggagaagctgtcagccagcactaggaggcgctatgaaactcaggtacaaactcgacttcagacctcccttgccaacttacatcagaaaagcagtgaaattgaaattctggctgtggatctacccaaagaaacaatattacagtttttatcattagagtgggatgctgatgaacaggcatttaacacaactgtgaagcagctgctgtcacgcctgccaaagcaaagatacctcaaattagtctgtgatgaaatttataacatcaaagtagaaaaaaaggtgtctgtgctatttctgtacagctatagagatgactactacagaatcttattttaaccctaaagaactgtcgttaacctcattcaaacagacagaggcttatactggaataatggaatgttgtacattcatcataatttaaaattaaattctaagaagaggctgggtgcagtggctcacacctttaatcccagcactttgggaagccaaggcaggaagactgcttgaaaccaggagtttgagaccagcctgagcaacaaagcaagaccccatctctataaaaactaaaaaaattagttgggcatggtggcacatgcctgtagtcccagctactccagaggctgagatggatcatctgagcctcaggaggttgaggctgcagtgagctgtgactgcgccactgcactccagtctgggacaacagagcaagaccctgtcttaaaaaaaaaaagaaaaaaaaaatttttttctaagaagctgtcctacaaagttgagctttgttagtttttcatgtgtaatatattataaatttatcttttgggatataataaatgctttcatat

SEQ ID NO: 25735 - DNA, 4789 bp, Artificial Sequence
  derived and/or modified sequence
ggctaagcaggaacgtttggaaattgctagtttgtcaaaccaagatcatacctctaagaaggacccaggaggacacagaacggctgccattctacatggaggctctcctgactttgtaggaaatggtaaacatcgggcaaactcctcaggaaggtctaggcgagaacgtcagtattctgtatgtaatagtgaagattctcctggctcttgtgaaattctgtatttcaatatggggagtcctgatcagctcatggtgcacaaagggaaatgtattggcagtgatgaacaacttggaaaattagtctacaatgctttggaaacagccactggtggctttgtcttgttgtatgagtgggtccttcagtggcagaaaaaaatgggtccattccttaccagtcaagaaaaagagaagattgataagtgcaaaaagcagattcaaggaacagaaacagaattcaactcactggtaaaattgagccatccaaatgtagtacgctaccttgcaatgaatctcaaagagcaagacgactccatcgtggtggacattttagtggagcacattagtggggtctctcttgctgcacacctgagccactcaggccccatccctgtgcatcagcttcgcaggtacacagctcagctcctgtcaggccttgattatctgcacagcaattctgtggtgcataaggtcctgagtgcatctaatgtcttggtggatgcagaaggcaccgtcaagattacggactatagcatttctaagcgcctcgcagacatttgcaaggaggatgtgtttgagcaaacccgagttcgttttagtgacaatgctctgccttataaaacggggaagaaaggagatgtttggcgtcttggccttctgctgctgtccctcagccaaggacaggaatgtggagagtaccctgtgaccatccctagtgacttaccagctgactttcaagattttctaaagaaatgtgtgtgcttggatgacaaggaaagatggagtccccagcagttgttgaaacacagctttataaatccccagccaaaaatgcctctagtggaacaaagtcctgaagattctgaaggacaagattatgttgagactgttattcctagcaaccggctacccagtgctgccttctttagtgagacacagagacagttttcccgatacttcattgagtttgaagaattacaacttcttggtaaaggagcttttggagctgtcatcaaggtgcagaacaagttggacggctgctgctacgcagtgaagcgcatccccatcaacccggccagccggcagttccgcaggatcaagggcgaagtgacactgctgtcacggctgcaccatgagaacattgtgcgctactacaacgcctggatcgagcggcacgagcggccggcgggaccggggacgccgcccccggactccgggcccctggccaaggatgaccgagctgcacgcgggcagccggcgagcgacacagacggcctggacagcgtagaggccgccgcgccgccacccatcctcagcagctcggtggagtggagcacttcgggcgagcgctcggccagtgcccgtttccccgccaccggcccgggctccagcgatgacgaggacgacgacgaggacgagcacggtggcgtcttctcccagtccttcctgcctgcttcagattctgaaagtgatattatctttgacaatgaagatgagaacagtaaaagtcagaatcagatggagtactgtgagaagagcactttacgagacaccattgaccagggactgtatcgagacaccgtcagactctggaggctttttcgagagattctggatggattagcttatatccatgagaaaggaatgattcaccgggatttgaagcctgtcaacatttttttggattctgatgaccatgtgaaaataggtgattttggtttggcgacagaccatctagccttttctgctgacagcaaacaagacgatcagacaggagacttgattaagtcagacccttcaggtcacttaactgggatggttggcactgctctctatgtaagcccagaggtccaaggaagcaccaaatctgcatacaaccagaaagtggatctcttcagcctgggaattatcttctttgagatgtcctatcaccccatggtcacggcttcagaaaggatctttgttctcaaccaactcagagatcccacttcgcctaagtttccagaagactttgacgatggagagcatgcaaagcagaaatcagtcatctcctggctgttgaaccacgatccagcaaaacggcccacagccacagaactgctcaagagtgagctgctgcccccaccccagatggaggagtcagagctgcatgaagtgctgcaccacacgctgaccaacgtggatgggaaggcctaccgcaccatgatggcccagatcttctcgcagcgcatctcccctgccatcgattacacctatgacagcgacatactgaagggcaacttctcaatccgtacagccaagatgcagcagcatgtgtgtgaaaccatcatccgcatctttaaaagacatggagctgttcagttgtgtactccactactgcttccccgaaacagacaaatatatgagcacaacgaagctgccctattcatggaccacagcgggatgctggtgatgcttccttttgacctgcggatcccttttgcaagatatgtggcaagaaataatatattgaatttaaaacgatactgcatagaacgtgtgttcaggccgcgcaagttagatcgatttcatcccaaagaacttctggagtgtgcatttgatattgtcacttctaccaccaacagctttctgcccactgctgaaattatctacactatctatgaaatcatccaagagtttccagcacttcaggaaagaaattacagtatttatttgaaccataccatgttattgaaagcaatactcttacactgtgggatcccagaagataaactcagtcaagtctacattattctgtatgatgctgtgacagagaagctgacgaggagagaagtggaagctaaattttgtaatctgtctttgtcttctaatagtctgtgtcgactctacaagtttattgaacagaagggagatttgcaagatcttatgccaacaataaattcattaataaaacagaaaacaggtattgcacagttggtgaagtatggcttaaaagacctagaggaggttgttggactgttgaagaaactcggcatcaagttacaggtcttgatcaatttgggcttggtttacaaggtgcagcagcacaatggaatcatcttccagtttgtggctttcatcaaacgaaggcaaagggctgtacctgaaatcctcgcagctggaggcagatatgacctgctgattccccagtttagagggccacaagctctggggccagttcccactgccattggggtcagcatagctatagacaagatatctgctgctgtcctcaacatggaggaatctgttacaataagctcttgtgacctcctggttgtaagtgttggccagatgtctatgtccagggccatcaacctaacccagaaactctggacagcaggcatcacagcagaaatcatgtacgactggtcacagtcccaagaggaattacaagagtactgcagacatcatgaaatcacctatgtggcccttgtctcggataaagaaggaagccatgtcaaggttaagtctttcgagaaggaaaggcagacagagaagcgtgtgctggagactgaacttgtggaccatgtactgcagaaactgaggactaaagtcactgatgaaaggaatggcagagaagcttccgataatcttgcagtgcaaaatctgaaggggtcattttctaatgcttcaggtttgtttgaaatccatggagcaacagtggttcccattgtgagtgtgctagccccggagaagctgtcagccagcactaggaggcgctatgaaactcaggtacaaactcgacttcagacctcccttgccaacttacatcagaaaagcagtgaaattgaaattctggctgtggatctacccaaagaaacaatattacagtttttatcattagagtgggatgctgatgaacaggcatttaacacaactgtgaagcagctgctgtcacgcctgccaaagcaaagatacctcaaattagtctgtgatgaaatttataacatcaaagtagaaaaaaaggtgtctgtgctatttctgtacagctatagagatgactactacagaatcttattttaaccctaaagaactgtcgttaacctcattcaaacagacagaggcttatactggaataatggaatgttgtacattcatcataatttaaaattaaattctaagaagaggctgggtgcagtggctcacacctttaatcccagcactttgggaagccaaggcaggaagactgcttgaaaccaggagtttgagaccagcctgagcaacaaagcaagaccccatctctataaaaactaaaaaaattagttgggcatggtggcacatgcctgtagtcccagctactccagaggctgagatggatcatctgagcctcaggaggttgaggctgcagtgagctgtgactgcgccactgcactccagtctgggacaacagagcaagaccctgtcttaaaaaaaaaaagaaaaaaaaaatttttttctaagaagctgtcctacaaagttgagctttgttagtttttcatgtgtaatatattataaatttatcttttgggatataataaatgctttcatata

SEQ ID NO: 25736 - DNA, 4950 bp, Artificial Sequence
  derived and/or modified sequence
atggccggcggcagaggcgcccccggcagaggcagagacgagccccccgagagctacccccagagacaggaccacgagctgcaggccctggaggccatctacggcgccgacttccaggacctgagacccgacgcctgcggccccgtgaaggagccccccgagatcaacctggtgctgtacccccagggcctgaccggcgaggaggtgtacgtgaaggtggacctgagagtgaagtgcccccccacctaccccgacgtggtgcccgagatcgagctgaagaacgccaagggcctgagcaacgagagcgtgaacctgctgaagagcagactggaggagctggccaagaagcactgcggcgaggtgatgatcttcgagctggcctaccacgtgcagagcttcctgagcgagcacaacaagcccccccccaagagcttccacgaggagatgctggagagaagagcccaggaggagcagcagagactgctggaggccaagagaaaggaggagcaggagcagagagagatcctgcacgagatccagagaagaaaggaggagatcaaggaggagaagaagagaaaggagatggccaagcaggagagactggagatcgccagcctgagcaaccaggaccacaccagcaagaaggaccccggcggccacagaaccgccgccatcctgcacggcggcagccccgacttcgtgggcaacggcaagcacagagccaacagcagcggcagaagcagaagagagagacagtacagcgtgtgcaacagcgaggacagccccggcagctgcgagatcctgtacttcaacatgggcagccccgaccagctgatggtgcacaagggcaagtgcatcggcagcgacgagcagctgggcaagctggtgtacaacgccctggagaccgccaccggcggcttcgtgctgctgtacgagtgggtgctgcagtggcagaagaagatgggccccttcctgaccagccaggagaaggagaagatcgacaagtgcaagaagcagatccagggcaccgagaccgagttcaacagcctggtgaagctgagccaccccaacgtggtgagatacctggccatgaacctgaaggagcaggacgacagcatcgtggtggacatcctggtggagcacatcagcggcgtgagcctggccgcccacctgagccacagcggccccatccccgtgcaccagctgagaagatacaccgcccagctgctgagcggcctggactacctgcacagcaacagcgtggtgcacaaggtgctgagcgccagcaacgtgctggtggacgccgagggcaccgtgaagatcaccgactacagcatcagcaagagactggccgacatctgcaaggaggacgtgttcgagcagaccagagtgagattcagcgacaacgccctgccctacaagaccggcaagaagggcgacgtgtggagactgggcctgctgctgctgagcctgagccagggccaggagtgcggcgagtaccccgtgaccatccccagcgacctgcccgccgacttccaggacttcctgaagaagtgcgtgtgcctggacgacaaggagagatggagcccccagcagctgctgaagcacagcttcatcaacccccagcccaagatgcccctggtggagcagagccccgaggacagcgagggccaggactacgtggagaccgtgatccccagcaacagactgcccagcgccgccttcttcagcgagacccagagacagttcagcagatacttcatcgagttcgaggagctgcagctgctgggcaagggcgccttcggcgccgtgatcaaggtgcagaacaagctggacggctgctgctacgccgtgaagagaatccccatcaaccccgccagcagacagttcagaagaatcaagggcgaggtgaccctgctgagcagactgcaccacgagaacatcgtgagatactacaacgcctggatcgagagacacgagagacccgccggccccggcacccccccccccgacagcggccccctggccaaggacgacagagccgccagaggccagcccgccagcgacaccgacggcctggacagcgtggaggccgccgcccccccccccatcctgagcagcagcgtggagtggagcaccagcggcgagagaagcgccagcgccagattccccgccaccggccccggcagcagcgacgacgaggacgacgacgaggacgagcacggcggcgtgttcagccagagcttcctgcccgccagcgacagcgagagcgacatcatcttcgacaacgaggacgagaacagcaagagccagaaccaggacgaggactgcaacgagaagaacggctgccacgagagcgagcccagcgtgaccaccgaggccgtgcactacctgtacatccagatggagtactgcgagaagagcaccctgagagacaccatcgaccagggcctgtacagagacaccgtgagactgtggagactgttcagagagatcctggacggcctggcctacatccacgagaagggcatgatccacagagacctgaagcccgtgaacatcttcctggacagcgacgaccacgtgaagatcggcgacttcggcctggccaccgaccacctggccttcagcgccgacagcaagcaggacgaccagaccggcgacctgatcaagagcgaccccagcggccacctgaccggcatggtgggcaccgccctgtacgtgagccccgaggtgcagggcagcaccaagagcgcctacaaccagaaggtggacctgttcagcctgggcatcatcttcttcgagatgagctaccaccccatggtgaccgccagcgagagaatcttcgtgctgaaccagctgagagaccccaccagccccaagttccccgaggacttcgacgacggcgagcacgccaagcagaagagcgtgatcagctggctgctgaaccacgaccccgccaagagacccaccgccaccgagctgctgaagagcgagctgctgccccccccccagatggaggagagcgagctgcacgaggtgctgcaccacaccctgaccaacgtggacggcaaggcctacagaaccatgatggcccagatcttcagccagagaatcagccccgccatcgactacacctacgacagcgacatcctgaagggcaacttcagcatcagaaccgccaagatgcagcagcacgtgtgcgagaccatcatcagaatcttcaagagacacggcgccgtgcagctgtgcacccccctgctgctgcccagaaacagacagatctacgagcacaacgaggccgccctgttcatggaccacagcggcatgctggtgatgctgcccttcgacctgagaatccccttcgccagatacgtggccagaaacaacatcctgaacctgaagagatactgcatcgagagagtgttcagacccagaaagctggacagattccaccccaaggagctgctggagtgcgccttcgacatcgtgaccagcaccaccaacagcttcctgcccaccgccgagatcatctacaccatctacgagatcatccaggagttccccgccctgcaggagagaaactacagcatctacctgaaccacaccatgctgctgaaggccatcctgctgcactgcggcatccccgaggacaagctgagccaggtgtacatcatcctgtacgacgccgtgaccgagaagctgaccagaagagaggtggaggccaagttctgcaacctgagcctgagcagcaacagcctgtgcagactgtacaagttcatcgagcagaagggcgacctgcaggacctgatgcccaccatcaacagcctgatcaagcagaagaccggcatcgcccagctggtgaagtacggcctgaaggacctggaggaggtggtgggcctgctgaagaagctgggcatcaagctgcaggtgctgatcaacctgggcctggtgtacaaggtgcagcagcacaacggcatcatcttccagttcgtggccttcatcaagagaagacagagagccgtgcccgagatcctggccgccggcggcagatacgacctgctgatcccccagttcagaggcccccaggccctgggccccgtgcccaccgccatcggcgtgagcatcgccatcgacaagatcagcgccgccgtgctgaacatggaggagagcgtgaccatcagcagctgcgacctgctggtggtgagcgtgggccagatgagcatgagcagagccatcaacctgacccagaagctgtggaccgccggcatcaccgccgagatcatgtacgactggagccagagccaggaggagctgcaggagtactgcagacaccacgagatcacctacgtggccctggtgagcgacaaggagggcagccacgtgaaggtgaagagcttcgagaaggagagacagaccgagaagagagtgctggagaccgagctggtggaccacgtgctgcagaagctgagaaccaaggtgaccgacgagagaaacggcagagaggccagcgacaacctggccgtgcagaacctgaagggcagcttcagcaacgccagcggcctgttcgagatccacggcgccaccgtggtgcccatcgtgagcgtgctggcccccgagaagctgagcgccagcaccagaagaagatacgagacccaggtgcagaccagactgcagaccagcctggccaacctgcaccagaagagcagcgagatcgagatcctggccgtggacctgcccaaggagaccatcctgcagttcctgagcctggagtgggacgccgacgagcaggccttcaacaccaccgtgaagcagctgctgagcagactgcccaagcagagatacctgaagctggtgtgcgacgagatctacaacatcaaggtggagaagaaggtgagcgtgctgttcctgtacagctacagagacgactactacagaatcctgttctag

SEQ ID NO: 25737 - protein, 463 aa, Artificial Sequence
  derived and/or modified sequence
MSEEEAAQIPRSSVWEQDQQNVVQRVVALPLVRATCTAVCDVYSAAKDRHPLLGSACRLAENCVCGLTTRALDHAQPLLEHLQPQLATMNSLACRGLDKLEEKLPFLQQPSETVVTSAKDVVASSVTGVVDLARRGRRWSVELKRSVSHAVDVVLEKSEELVDHFLPMTEEELAALAAEAEGPEVGSVEDQRRQQGYFVRLGSLSARIRHLAYEHSVGKLRQSKHRAQDTLAQLQETLELIDHMQCGVTPTAPACPGKVHELWGEWGQRPPESRRRSQAELETLVLSRSLTQELQGTVEALESSVRGLPAGAQEKVAEVRRSVDALQTAFADARCFRDVPAAALAEGRGRVAHAHACVDELLELVVQAVPLPWLVGPFAPILVERPEPLPDLADLVDEVIGGPDPRWAHLDWPAQQRAWEAEHRDGSGNGDGDRMGVAGDICEQEPETPSCPVKHTLMPELDF

SEQ ID NO: 25738 - DNA, 1392 bp, Artificial Sequence
  derived and/or modified sequence
atgtcagaggaagaagcagcccagattccacgaagctctgtttgggagcaagaccagcagaacgtggttcaacgtgttgttgccctgccactcgtacgagccacttgcacggccgtgtgcgacgtctattccgccgccaaggatcgccatccactgctcggatctgcctgccgattagccgagaattgcgtctgtggattgacgacaagggccctggatcacgcccagcctcttctggagcatctgcaaccccagctcgctactatgaattctctagcctgcagagggctcgacaagctcgaagaaaagctcccctttctgcagcagcccagcgaaaccgttgtgacctcggcaaaggatgtggtcgcaagtagtgtgaccggtgtggtcgacctcgccaggcgcggtcggcggtggagcgtggagctcaaacggagcgtgtcccacgcagtagacgtggttctggagaaatccgaggagttagttgatcattttttgcccatgacagaagaagaactggccgcattggccgccgaggccgagggtcccgaggtggggagtgtggaagaccagaggcgccagcaaggatatttcgtgcgtttgggatccttgtccgccaggattagacacctcgcatatgagcattccgtgggaaaacttaggcagtccaagcacagggcccaggacacattggcccagctccaagaaactctggagttgatcgatcatatgcaatgcggcgtgacccccaccgctcccgcatgtccgggcaaggtgcatgagctatggggcgaatgggggcagaggcccccagaaagcagacgacgttcacaggctgagctcgaaaccctggtcctgtcccgaagcctgactcaagagttacaggggaccgtggaagccctggagagttctgtgcgggggctgcctgccggagcacaggagaaggttgccgaagtacgcagaagcgttgacgcactacagaccgcctttgctgacgcaaggtgctttcgggacgtgcccgccgccgccctggcggaaggcaggggaagggtggctcacgcacatgcctgcgtagacgagttgcttgaactggttgttcaggctgttccgctgccatggctggtcggtcctttcgcccccatacttgttgagagacccgaaccactcccagatctagcagacttagtagatgaggtgattggtggccccgatccgcggtgggcacacctggactggccagcccagcagcgcgcctgggaagcagagcacagggatgggagcggaaacggtgatggcgataggatgggtgtggccggcgacatctgcgaacaggaacccgagaccccctcctgccccgtgaaacataccttgatgccagaattagacttctag

SEQ ID NO: 25739 - DNA, 1392 bp, Artificial Sequence
  derived and/or modified sequence
atgtctgaggaggaggccgcccagatccccaggagctctgtgtgggagcaggaccagcagaatgtggtgcagagggtggtggccctgcccctggtgcgggccacctgcacagctgtgtgtgatgtgtacagcgctgccaaggacagacaccccctgctgggcagcgcctgccgcctggccgagaactgtgtgtgtggcctgaccacccgggccctggaccacgcccagcccctgctggagcacctgcagccccagctggccaccatgaacagcctggcctgccggggcctggacaagctggaggagaagctgcccttcctgcagcagcccagcgagaccgtggtgaccagcgccaaggatgtggtggccagctctgtgactggagtggtggacctggcccggcggggccgccgctggagcgtggagctgaagaggtctgtgtcccatgctgtggatgtggtgctggagaagtctgaggagctggtggaccacttcctgcccatgacagaggaggagctggccgccctggccgctgaggccgagggccctgaggtgggctctgtggaggaccagaggcggcagcagggctactttgtgcggctgggcagcctgagcgcccgcatccgccacctggcctatgagcacagcgtgggcaagctgcggcagagcaagcaccgggcccaggacaccctggcccagctgcaggagaccctggagctgattgaccacatgcagtgtggggtgacccccacagccccagcctgccctgggaaggtgcatgagctgtggggcgagtggggccagaggcctcctgagagcagaagaagaagccaggccgagctggagaccctggtgctgagccgcagcctgacccaggagctgcagggcaccgtggaggccctggagagctctgtgcggggcctgcctgctggggcccaggagaaggtggccgaggtgcggcgctctgtggatgccctgcagacagcctttgctgatgcccgctgcttcagagatgtgcctgctgctgccctggccgagggccggggccgggtggcccacgcccacgcctgtgtggatgagctgctggagctggtggtgcaggccgtgcccctgccctggctggtgggcccctttgcccccatcctggtggagaggcctgagcccctgcctgacctggccgacctggtggatgaagtcatcggcggccctgacccccgctgggcccacctggactggccagcccagcagagggcctgggaggccgagcacagagatggcagcggaaatggagatggagacaggatgggcgtggccggggacatctgtgagcaggagcctgagacccccagctgccctgtgaagcacaccctgatgcctgagctggacttctag

SEQ ID NO: 25740 - DNA, 1392 bp, Artificial Sequence
  derived and/or modified sequence
atgagcgaggaggaggccgcccagatcccccggagcagcgtgtgggagcaggaccagcaaaacgtggtgcagagggtcgtcgccctcccgctggtgagagctacctgtactgcggtctgcgatgtgtatagcgccgcaaaggaccgccaccctttactcggctcagcttgccgcttggccgagaattgtgtgtgcggcctgactacccgtgccttagaccatgcgcagcctttgctggaacatcttcagcctcaactggccacaatgaacagtctcgcatgtcgcggactcgataaactcgaggagaaacttccatttttacagcagccctccgaaaccgtggttacttcagccaaagacgtggtggctagctctgtgacaggggtcgtcgacctcgccaggcgcggccgccgttggagtgtcgagctaaaaaggtccgtgtcgcatgctgtcgatgttgtgctggagaagtccgaggaactggttgaccattttctcccgatgaccgaggaggaattagccgcactggcggccgaggccgaaggcccagaagtcggtagtgtcgaagaccagaggcgtcaacaaggctacttcgtgcgcctggggtctctctctgcacgaatcagacacctcgcctatgaacactccgttgggaagctgcgacagagtaagcaccgcgctcaagacacgctcgcgcaactccaggagaccctcgaactgatcgaccatatgcagtgcggagtgaccccgacggccccagcttgtcccggtaaggtgcacgaactgtggggcgaatggggtcagcgccctccagaatctaggcgccggtcgcaggccgaactggagacactggtccttagcagatcattgactcaggagctgcagggcaccgtggaggctctcgagtcttcagtgcgtggactgcccgccggcgcccaggagaaagtggccgaagtgaggaggtccgtggacgcccttcaaacagccttcgctgacgcacgatgttttagggacgttcctgcggctgccctggctgaaggtcgagggagggtggcccatgcacatgcctgtgttgacgagctcctcgagcttgtggtccaggcggtgcctttgccatggctggtgggccctttcgctcccattttggtcgagcgtccagagcccctgccagatttagccgacctagtcgatgaggtcattgggggccctgacccacggtgggcccacttagattggcccgctcagcaacgggcctgggaagccgaacacagagacgggagcggtaatggcgatggagatagaatgggcgtggcgggcgatatttgtgagcaggaacccgaaacccctagctgcccggttaagcacacacttatgcccgaactggacttttag

SEQ ID NO: 25741 - DNA, 2439 bp, Artificial Sequence
  derived and/or modified sequence
gacagctggtgtctgaagccgctcgcgcccagggtgaccctgtttgcagcacgatgtctgaagaagaggcggctcagatccccagatccagtgtgtgggagcaggaccagcagaacgtggtgcagcgtgtggtggctctgcccctggtcagggccacgtgcaccgcggtctgcgatgtttacagtgcagccaaggacaggcacccgctgctgggctccgcctgccgcctggctgagaactgcgtgtgcggcctgaccacccgtgccctggaccacgcccagccgctgctcgagcacctgcagccccagctggccactatgaacagcctcgcctgcaggggcctggacaagctggaagagaagcttccctttctccagcaaccttcggagacggtggtgacctcagccaaggacgtggtggccagcagtgtcacgggtgtggtggacctggcccggaggggccggcgctggagcgtggagctgaagcgctccgtgagccatgctgtggatgttgtactggaaaaatcagaggagctggtggatcacttcctgcccatgacggaggaagagctcgcggcactggcggctgaggctgaaggccctgaagtgggttcggtggaggatcagaggagacagcagggctactttgtgcgcctcggctccctgtcagcacggatccgccacctggcctacgagcactctgtggggaaactgaggcagagcaaacaccgtgcccaggacaccctggcccagctgcaggagacgctggagctgatagaccacatgcagtgtggggtgacccccaccgccccggcctgccctgggaaggtgcacgagctgtggggggaatggggccagcgccctccggagagccgccgccggagccaggcagagctggagacgctggtgctgtcccgcagcctgacccaggagctgcagggcacggtagaggctctggagtccagcgtgcggggcctgcccgccggcgcccaggagaaggtggctgaggtgcggcgcagtgtggatgccctgcagaccgccttcgctgatgcccgctgcttcagggacgtgccagcggccgcgctggccgagggccggggtcgcgtggcccacgcgcacgcctgcgtggacgagctgctggagctggtggtgcaggccgtgccgctgccctggctggtgggacccttcgcgcccatccttgtggagcgacccgagcccctgcccgacctggcggacctggtggacgaggtcatcgggggccctgacccccgctgggcgcacctggactggccggcccagcagagagcctgggaggcagagcacagggacgggagtgggaatggggatggggacaggatgggtgttgccggggacatctgcgagcaggaacccgagacccccagctgcccggtcaagcacaccctgatgcccgagctggacttctgacccatgggccagtggaggcggggaggaaaggccacctgcacaccccgatccctgctgccccctggtggccacacgtaagctcgaggccttggccttgacccttctttggaatcaggcccaactccggatctctgaccacctttttggtattggactctcccattttttccttgaacacatggacaaagaggcccgggggagcagggcctcgaaccctattcaggccaacttgagccacaagctgggttcttcacctatgtcctgctccctggctccatgaagcgaatccaaatctttccaagaggctgggcacagtggctcacgcctgtaatcccagcactttgggagtctgaggcaggtggatcatctgaagtcaggagttcgggatcatcctggccaacatgatgaaaccctgtctctacttagaaagaaagaaaaaaaaaaaaaaagccaggtgtggtggtgtgcacctgtagtcccagctagttgtgaggctgacgcagaagaattgcttaaacccgagaggcgcggagcttgcagtgagcagagatcgcgccactgcacaccagcctgggtgacagagcgagactccatctaacaaaaaataatagtaacagcctcccgaagaaatacacattttgcccaatgccttctgtttggggctttgaaaagtgagccctgactgggtgtggtggttgacacctgttatcacagcactttgggaggccaaggtgggaggactgcttgagcccaggagttggaggctgcagtgagccatgatcttgcccctgcgctctcgcctgggtgacagagcaagactctatctcaaaaatgtttttaaaaaatacttcctagggaaacacacattttgccctatttggaactttgaaaagtgagccctcctctgcccatgggccgtgctgctcagcctgccatactcgcttgctttgctgtttgggatttgcctccagaataaaggtcctttttgttgttg

SEQ ID NO: 25742 - DNA, 1392 bp, Artificial Sequence
  derived and/or modified sequence
atgagcgaggaagaagccgctcagatcccacggtcatcagtgtgggagcaggaccagcagaacgttgtgcagcgagtcgtcgccctccctctggttcgagccacttgcaccgcagtgtgtgacgtgtatagcgccgctaaggaccgccaccccttgcttggatcagcctgccgcctcgcagagaactgcgtatgtggactgacaaccagagctctggatcatgctcagcccttgctcgagcacctccagccacagctggctacgatgaactcactggcctgtcggggactggacaaacttgaggaaaagctgccctttttacagcagccgtcagagactgtggttacctccgccaaggatgtggtggcatcttctgtaactggcgtggtggatttggctcgcagagggcgtcggtggtctgtggagctcaaacgttccgtctcacacgctgtagacgtcgttttggagaagagtgaggagctggttgatcactttctacctatgacagaggaggagctcgccgctctggcagctgaagctgagggccctgaagtaggcagcgtggaagaccagagaagacagcagggctactttgtgaggcttggctccctcagtgccagaataaggcatctagcttacgagcactcagttggaaagctgagacagtccaagcacagagcacaagatacgttggcacaactacaggaaacactcgagttaattgatcacatgcagtgcggcgtaacccccacggctcccgcttgccccggaaaggtgcacgaactgtggggggaatggggtcagaggccacctgaatctcggaggcgcagtcaggcagaactggaaactctggtgctgtccaggagcttgacccaggagctccagggcacagtggaagcactggagtctagcgttcgcggactgccagccggagcccaggagaaggtcgccgaggtaagacgcagtgtggatgccctccagactgcctttgccgacgcaagatgctttagggacgtgcctgctgctgcactggccgagggcagaggaagagtcgctcacgctcacgcttgcgtggatgagttgctcgagcttgtcgttcaggccgtcccccttccttggctggttggccctttcgcaccaatactggtggaacgaccggagcctctgccagatcttgcagatctggtcgacgaggtgatcgggggtcccgatcctcgttgggcccacctcgactggcctgcccagcagagggcatgggaagcagaacatagggatggaagcggcaacggcgacggagatagaatgggcgtagccggagacatttgcgagcaggagcctgagacaccctcctgccctgtaaaacatactctcatgcctgagctcgatttctag

SEQ ID NO: 25743 - DNA, 1392 bp, Artificial Sequence
  derived and/or modified sequence
atgagcgaggaggaggccgcccagatccccagaagcagcgtgtgggagcaggaccagcagaacgtggtgcagagagtggtggccctgcccctggtgagagccacctgcaccgccgtgtgcgacgtgtacagcgccgccaaggacagacaccccctgctgggcagcgcctgcagactggccgagaactgcgtgtgcggcctgaccaccagagccctggaccacgcccagcccctgctggagcacctgcagccccagctggccaccatgaacagcctggcctgcagaggcctggacaagctggaggagaagctgcccttcctgcagcagcccagcgagaccgtggtgaccagcgccaaggacgtggtggccagcagcgtgaccggcgtggtggacctggccagaagaggcagaagatggagcgtggagctgaagagaagcgtgagccacgccgtggacgtggtgctggagaagagcgaggagctggtggaccacttcctgcccatgaccgaggaggagctggccgccctggccgccgaggccgagggccccgaggtgggcagcgtggaggaccagagaagacagcagggctacttcgtgagactgggcagcctgagcgccagaatcagacacctggcctacgagcacagcgtgggcaagctgagacagagcaagcacagagcccaggacaccctggcccagctgcaggagaccctggagctgatcgaccacatgcagtgcggcgtgacccccaccgcccccgcctgccccggcaaggtgcacgagctgtggggcgagtggggccagagaccccccgagagcagaagaagaagccaggccgagctggagaccctggtgctgagcagaagcctgacccaggagctgcagggcaccgtggaggccctggagagcagcgtgagaggcctgcccgccggcgcccaggagaaggtggccgaggtgagaagaagcgtggacgccctgcagaccgccttcgccgacgccagatgcttcagagacgtgcccgccgccgccctggccgagggcagaggcagagtggcccacgcccacgcctgcgtggacgagctgctggagctggtggtgcaggccgtgcccctgccctggctggtgggccccttcgcccccatcctggtggagagacccgagcccctgcccgacctggccgacctggtggacgaggtgatcggcggccccgaccccagatgggcccacctggactggcccgcccagcagagagcctgggaggccgagcacagagacggcagcggcaacggcgacggcgacagaatgggcgtggccggcgacatctgcgagcaggagcccgagacccccagctgccccgtgaagcacaccctgatgcccgagctggacttctag

SEQ ID NO: 25744 - protein, 846 aa, Artificial Sequence
  derived and/or modified sequence
MCFLRRPGAPASWIWWRMLRQVLRRGLQSFCHRLGLCVSRHPVFFLTVPAVLTITFGLSALNRFQPEGDLERLVAPSHSLAKIERSLASSLFPLDQSKSQLYSDLHTPGRYGRVILLSPTGDNILLQAEGILQTHRAVLEMKDGRNSFIGHQLGGVVEVPNSKDQRVKSARAIQITYYLQTYGSATQDLIGEKWENEFCKLIRKLQEEHQELQLYSLASFSLWRDFHKTSILARSKVLVSLVLILTTATLSSSMKDCLRSKPFLGLLGVLTVCISIITAAGIFFITDGKYNSTLLGIPFFAMGHGTKGVFELLSGWRRTKENLPFKDRIADAYSDVMVTYTMTSSLYFITFGMGASPFTNIEAVKVFCQNMCVSILLNYFYIFSFFGSCLVFAGQLEQNRYHSIFCCKIPSAEYLDRKPVWFQTVMSDGHQQTSHHETNPYQHHFIQHFLREHYNEWITNIYVKPFVVILYLIYASFSFMGCLQISDGANIINLLASDSPSVSYAMVQQKYFSNYSPVIGFYVYEPLEYWNSSVQDDLRRLCSGFTAVSWVEQYYQFLKVSNVSANNKSDFISVLQSSFLKKPEFQHFRNDIIFSKAGDESNIIASRLYLVARTSRDKQKEITEVLEKLRPLSLSKSIRFIVFNPSFVFMDHYSLSVTVPVLIAGFGVLLVLILTFFLVIHPLGNFWLILSVTSIELGVLGLMTLWNVDMDCISILCLIYTLNFAIDHCAPLLFTFVLATEHTRTQCIKSSLQDHGTAILQNVTSFLIGLVPLLFVPSNLTFTLFKCLLLTGGCTLLHCFVILPVFLTFFPPSKKHHKKKKRAKRKEREEIECIEIQENPDHVTTV

SEQ ID NO: 25745 - DNA, 2850 bp, Artificial Sequence
  derived and/or modified sequence
gagaacggggtagcccggcgcttacacatgtcacatgtgctttttaagacggccgggagcgcctgcgagctggatctggtggaggatgctgcggcaggtgcttcgcagagggctccagtcgttctgccacaggctgggtttgtgcgtgagccggcacccggtctttttcctcaccgtgcccgcagtcctgacaatcaccttcggcctcagcgcgctcaaccgcttccagcccgagggcgacctggagcgcctggtcgctcccagccacagcctggccaagatcgagcgcagcctggccagcagccttttccccctggaccagtccaaaagccagctctattcggacttacacacccctgggaggtatggcagggtgatcctcctctccccaaccggggacaatattttgctccaggctgaggggatcctgcagacccaccgagccgtgctggaaatgaaggatgggaggaacagttttattggacaccaactgggcggggtagtggaagtgccaaacagcaaagatcagcgggtcaagtcagccagagccattcaaatcacctactacctccagacctatggctctgccacccaagacctcataggggagaagtgggagaatgagttctgtaagcttataaggaagctccaggaggagcatcaagaactccagctctactctttagcatcctttagcctctggagggactttcataagaccagcatcctggccagaagcaaggtcctggtgagcctcgtgctgatcctgaccacagccaccctctccagctccatgaaggactgcttgcgcagtaagcccttcctgggcctcctgggggtgctcacagtatgcatctccatcatcacagcagcagggatcttcttcatcaccgatggaaagtacaactccaccctgctgggaatcccgttcttcgccatgggtcatggaactaaaggagtgtttgagcttctgtccggatggcggagaaccaaagagaacttgcccttcaaagacaggatagcagatgcctattctgatgtgatggtcacctataccatgaccagctccctgtacttcatcacttttggcatgggtgccagcccattcacaaacatagaggctgtgaaggtcttctgtcaaaacatgtgtgtctctattctgttgaactacttctacattttctccttctttggctcctgtctggtctttgctggccaactagagcaaaaccgctaccacagcatcttttgctgtaagatcccttctgcagaatacctggatcgcaaacctgtgtggttccagacagtgatgagtgatgggcatcaacagacgtcccatcatgagacgaacccctaccagcaccacttcattcagcacttcctccgtgaacattataatgaatggattaccaatatatatgtgaagccatttgttgtcatcctctatctcatttatgcctccttctccttcatggggtgcttacagatcagtgacggagccaacatcatcaatctactagccagtgattcgccaagtgtttcctatgccatggttcagcagaaatatttcagcaactatagccctgtgataggattctacgtctatgagcccctagagtactggaacagcagcgtccaggatgacctaagaagactctgtagtggattcactgcagtgtcctgggtggagcagtactaccagttcctgaaagtcagcaacgtcagtgccaataacaaaagtgacttcatcagtgtcctgcaaagctcatttttaaaaaagccagaattccagcattttcgaaatgatatcatcttctccaaggcaggggatgaaagcaatatcattgcttctcgcttgtatctggtggccaggactagcagagacaagcagaaagaaatcacagaagtgttggaaaagctgaggcccctatccctctcaaagagcatccgattcatcgtgttcaacccctcctttgtcttcatggaccattacagcttgtctgtcacagtgcctgttctgattgcaggctttggtgttctcctggtgttaatcctgacttttttcctagtgatccaccctctgggaaacttctggctaattcttagcgtcacctcaattgagctgggcgttctgggcttaatgacattatggaacgtcgacatggattgcatttctatcttgtgccttatctacaccttgaatttcgccattgaccactgtgcaccactgcttttcacatttgtattagcaactgagcacacccgaacacaatgtataaaaagctccttgcaagaccatgggacagccattttgcaaaatgttacttcttttcttattgggttagtcccccttctatttgtgccttcgaacctgaccttcacactgttcaaatgcttgctgctcactgggggttgcacacttctgcactgttttgttattttacctgtgttcctaacgtttttccccccttccaaaaagcaccacaagaaaaagaaacgtgccaagcgaaaggagagagaggaaattgaatgcatagaaattcaagagaacccggatcacgtcaccacagtatgaggggtatagaccagtggattatttttcttttccagtattgcacaatgatgcagggcaagtaaagctcagacctcagctgcttgggctggccaggggtaacaaggcaagtcagatcaagagtgcattattcatgacacttcaaggtgcctgcttcttggggggaagagggaataaaaaaagaggaaaaagttatttgcaaccttgttctcctctaaaaacaagtttctggatgtaatctgagagctcttccaaggaatggatgaatcaatggagtg

SEQ ID NO: 25746 - DNA, 2541 bp, Artificial Sequence
  derived and/or modified sequence
atgtgcttcctgagaagacccggcgcccccgccagctggatctggtggagaatgctgagacaggtgctgagaagaggcctgcagagcttctgccacagactgggcctgtgcgtgagcagacaccccgtgttcttcctgaccgtgcccgccgtgctgaccatcaccttcggcctgagcgccctgaacagattccagcccgagggcgacctggagagactggtggcccccagccacagcctggccaagatcgagagaagcctggccagcagcctgttccccctggaccagagcaagagccagctgtacagcgacctgcacacccccggcagatacggcagagtgatcctgctgagccccaccggcgacaacatcctgctgcaggccgagggcatcctgcagacccacagagccgtgctggagatgaaggacggcagaaacagcttcatcggccaccagctgggcggcgtggtggaggtgcccaacagcaaggaccagagagtgaagagcgccagagccatccagatcacctactacctgcagacctacggcagcgccacccaggacctgatcggcgagaagtgggagaacgagttctgcaagctgatcagaaagctgcaggaggagcaccaggagctgcagctgtacagcctggccagcttcagcctgtggagagacttccacaagaccagcatcctggccagaagcaaggtgctggtgagcctggtgctgatcctgaccaccgccaccctgagcagcagcatgaaggactgcctgagaagcaagcccttcctgggcctgctgggcgtgctgaccgtgtgcatcagcatcatcaccgccgccggcatcttcttcatcaccgacggcaagtacaacagcaccctgctgggcatccccttcttcgccatgggccacggcaccaagggcgtgttcgagctgctgagcggctggagaagaaccaaggagaacctgcccttcaaggacagaatcgccgacgcctacagcgacgtgatggtgacctacaccatgaccagcagcctgtacttcatcaccttcggcatgggcgccagccccttcaccaacatcgaggccgtgaaggtgttctgccagaacatgtgcgtgagcatcctgctgaactacttctacatcttcagcttcttcggcagctgcctggtgttcgccggccagctggagcagaacagataccacagcatcttctgctgcaagatccccagcgccgagtacctggacagaaagcccgtgtggttccagaccgtgatgagcgacggccaccagcagaccagccaccacgagaccaacccctaccagcaccacttcatccagcacttcctgagagagcactacaacgagtggatcaccaacatctacgtgaagcccttcgtggtgatcctgtacctgatctacgccagcttcagcttcatgggctgcctgcagatcagcgacggcgccaacatcatcaacctgctggccagcgacagccccagcgtgagctacgccatggtgcagcagaagtacttcagcaactacagccccgtgatcggcttctacgtgtacgagcccctggagtactggaacagcagcgtgcaggacgacctgagaagactgtgcagcggcttcaccgccgtgagctgggtggagcagtactaccagttcctgaaggtgagcaacgtgagcgccaacaacaagagcgacttcatcagcgtgctgcagagcagcttcctgaagaagcccgagttccagcacttcagaaacgacatcatcttcagcaaggccggcgacgagagcaacatcatcgccagcagactgtacctggtggccagaaccagcagagacaagcagaaggagatcaccgaggtgctggagaagctgagacccctgagcctgagcaagagcatcagattcatcgtgttcaaccccagcttcgtgttcatggaccactacagcctgagcgtgaccgtgcccgtgctgatcgccggcttcggcgtgctgctggtgctgatcctgaccttcttcctggtgatccaccccctgggcaacttctggctgatcctgagcgtgaccagcatcgagctgggcgtgctgggcctgatgaccctgtggaacgtggacatggactgcatcagcatcctgtgcctgatctacaccctgaacttcgccatcgaccactgcgcccccctgctgttcaccttcgtgctggccaccgagcacaccagaacccagtgcatcaagagcagcctgcaggaccacggcaccgccatcctgcagaacgtgaccagcttcctgatcggcctggtgcccctgctgttcgtgcccagcaacctgaccttcaccctgttcaagtgcctgctgctgaccggcggctgcaccctgctgcactgcttcgtgatcctgcccgtgttcctgaccttcttcccccccagcaagaagcaccacaagaagaagaagagagccaagagaaaggagagagaggagatcgagtgcatcgagatccaggagaaccccgaccacgtgaccaccgtgtag

SEQ ID NO: 25747 - DNA, 2541 bp, Artificial Sequence
  derived and/or modified sequence
atgtgcttcttacggaggccaggcgcacccgcatcttggatttggtggcggatgttacgccaggtcctgcggcgcggcttgcaatctttttgccacagattgggtctttgtgttagccggcaccctgtgttttttctaactgtccccgcagtgctcacaataacatttggcctgagtgctctgaacaggtttcagccagaaggtgatcttgagaggctggttgctccgtcacatagcctggccaagatcgaacgctccctggcttcaagcctgtttcctctggatcagagtaagtctcagctgtatagcgaccttcacacaccaggtagatatggacgggttatcctgttgtctcccactggggacaatattctgctgcaggctgaggggattcttcagacacatagggctgtgcttgagatgaaagatgggagaaactcctttattggccaccagttgggcggggtcgtcgaggtgcccaattccaaggaccaacgagtaaagtcagcccgcgctattcagataacatactacctccagacctacggctcggcaacccaggacttaatcggagagaagtgggagaatgagttttgcaagttgattcggaaactacaggaagagcaccaggagctgcagctttactctctggccagctttagcctctggcgggatttccacaaaaccagcatccttgctcgcagcaaggtgctggtcagtttggtgctcatccttaccaccgccacactaagctccagtatgaaggactgcttacggtccaagccgtttctcggtcttctcggcgtcctaaccgtctgcatctccatcattacagctgccggcatcttcttcattaccgatgggaaatataactctaccctgcttggaattccttttttcgcaatggggcatggaaccaagggggtgttcgagcttctgagcggctggcggagaactaaggagaatttgcctttcaaggatcgaattgctgatgcctatagtgatgttatggtaacttatacaatgacttcgagcttatatttcataacattcgggatgggagcctccccttttaccaatattgaggctgtgaaagttttttgccagaatatgtgcgtgtcaatccttttgaattatttctatattttctctttcttcgggtcttgtctggtcttcgccggacagctggaacaaaatagataccattcaatattctgttgtaaaattccgagtgcagagtacctcgacagaaagccagtttggttccagacagttatgtcagatggtcatcagcagacaagtcaccatgaaactaatccatatcaacatcacttcatccagcattttctgcgcgaacactacaacgaatggatcacaaacatttacgtgaaacctttcgtcgtaattctgtacttgatttacgctagcttctcctttatgggatgcttacagatcagcgacggggccaatatcataaatcttcttgccagtgactcgcctagcgtgtcttatgccatggtccagcagaaatacttttcaaattatagcccagtcatcggcttctatgtctacgagccgctcgaatactggaattcctccgtccaggatgacctgagaagattgtgctcgggttttacggccgtgtcctgggttgaacagtactaccagttcttaaaagtctcgaatgtgagtgccaacaacaagagtgacttcatctctgttctacagtccagcttcttgaaaaagccagagttccagcactttcgcaatgacatcattttctctaaggccggagacgagtctaacataattgccagcaggttgtacctggttgcaagaactagcagagacaagcaaaaggaaataacggaggtcttggagaagcttcgcccactttccctgtccaagtccattcgtttcatagtgtttaatccctccttcgtgtttatggaccattattccctgtctgtgactgtgcccgtcttgatagccggcttcggcgttctcttggttctgattctcaccttcttcctagtgatccatcccttggggaatttttggctcattctttctgtgacgagcattgaactgggggtactgggtctcatgaccctgtggaacgtggacatggattgtattagcatactgtgccttatctatacactcaattttgccattgaccattgcgcccctctgctctttacctttgttctggcaactgaacatacccggactcagtgcatcaagagctctctgcaggatcacggcactgctattctgcaaaatgtgacgagctttctgatcggcttggtcccactacttttcgtcccttccaatctgacattcacactgttcaaatgcctcctcctaacagggggatgcacgctgcttcattgtttcgtgattttgcctgtgttcttgacattctttcctcccagtaaaaagcaccacaagaagaagaagagagcaaagcgtaaggaacgcgaggaaattgagtgtattgaaattcaggagaatcccgatcacgtaacgactgtgtag

SEQ ID NO: 25748 - DNA, 2541 bp, Artificial Sequence
  derived and/or modified sequence
atgtgcttcctgcggcggcctggggccccagcctcctggatctggtggaggatgctgcggcaggtgctgcggcggggcctgcagagcttctgccaccggctgggcctgtgtgtgagccgccaccctgtgttcttcctgactgtgcctgctgtgctgaccatcaccttcggcctgagcgccctgaaccgcttccagcctgagggggacctggagcggctggtggcccccagccacagcctggccaagattgaaagaagcctggccagcagcctcttccccctggaccagagcaagagccagctgtacagcgacctgcacaccccaggccgctatggccgggtcatcctgctgagccccaccggggacaacatcctgctgcaggccgagggcatcctgcagacccacagagctgtgctggagatgaaggatggaagaaattccttcatcggccaccagctgggcggcgtggtggaggtgcccaacagcaaggaccagagggtgaagagcgcccgggccatccagatcacctactacctgcagacctacggcagcgccacccaggacctgattggagagaagtgggagaatgagttctgcaagctgatcaggaagctgcaggaggagcaccaggagctgcagctgtacagcctggccagcttcagcctgtggagggacttccacaagaccagcatcctggcccggagcaaggtgctggtgtccctggtgctgatcctgaccacagccaccctgagcagctccatgaaggactgcctgcggagcaagcccttcctgggcctgctgggcgtgctgactgtgtgcatcagcatcatcacagctgctggcatcttcttcatcacagatggcaagtacaacagcaccctgctgggcatccccttctttgccatgggccacggcaccaagggcgtgtttgagctgctgagcggctggaggaggaccaaggagaacctgcccttcaaggacagaattgctgatgcctacagtgatgtgatggtgacctacaccatgaccagcagcctgtacttcatcaccttcggcatgggcgccagccccttcaccaacattgaagctgtgaaggtgttctgccagaacatgtgtgtgtccatcctgctgaactacttctacatcttctccttcttcggcagctgcctggtgtttgctggccagctggagcagaaccgctaccacagcatcttctgctgcaagatccccagcgctgagtacctggacaggaagcctgtgtggttccagacagtgatgtctgatggccaccagcagaccagccaccacgagaccaacccctaccagcaccacttcatccagcacttcctgcgggagcactacaatgagtggatcaccaacatctacgtgaagccctttgtggtgatcctgtacctgatctatgccagcttctccttcatgggctgcctgcagatcagtgatggagccaacatcatcaacctgctggccagtgacagccccagcgtgtcctatgccatggtgcagcagaagtacttcagcaactacagccctgtgattggcttctacgtgtatgagcccctggagtactggaacagctctgtgcaggatgacctgcggcggctgtgcagcggcttcaccgctgtgtcctgggtggagcagtactaccagttcctgaaggtgtccaatgtgtctgccaacaacaagagtgacttcatctctgtgctgcagagcagcttcctgaagaagccagagttccagcacttcagaaatgacatcatcttcagcaaggctggagatgagagcaacatcatcgccagccggctgtacctggtggcccggaccagccgggacaagcagaaggagatcacagaggtgctggagaagctgcggcccctgagcctgagcaagagcatccgcttcatcgtgttcaaccccagctttgtgttcatggaccactacagcctgtctgtgacagtgcctgtgctgattgctggcttcggcgtgctgctggtgctgatcctgaccttcttcctggtgatccaccccctgggcaacttctggctgatcctgtctgtgaccagcattgagctgggcgtgctgggcctgatgaccctgtggaatgtggacatggactgcatcagcatcctgtgcctgatctacaccctgaactttgccatcgaccactgtgcccccctgctcttcacctttgtgctggccacagagcacaccaggacccagtgcatcaagagcagcctgcaggaccatggaacagccatcctgcagaatgtgaccagcttcctgattggcctggtgcccctgctgtttgtgcccagcaacctgaccttcaccctcttcaagtgcctgctgctgactggaggctgcaccctgctgcactgcttcgtcatcctgcccgtcttcctgaccttcttcccccccagcaagaagcaccacaagaagaagaagagggccaagaggaaggagcgggaggagattgagtgcatcgagatccaggagaacccagaccacgtgaccaccgtgtag

SEQ ID NO: 25749 - DNA, 2541 bp, Artificial Sequence
  derived and/or modified sequence
atgtgcttcctgcggcggcccggcgcccccgccagctggatctggtggaggatgcttcgacaggtcctgcgaagagggcttcagtccttttgtcacagactggggctttgcgtgtcacgccacccggttttctttctgactgtccccgctgtcctcaccatcacatttgggctgagtgccctgaacagatttcagccagaaggtgaccttgagagactagtggccccgtctcactctttagctaaaattgaaagaagtctcgccagctccctctttcctctggaccagtccaaatcacagctttattccgaccttcacacccctggcaggtatggcagggtcatccttctatcaccaactggcgacaacatactgctccaagccgaaggtattctccagacacatagggcggtactcgaaatgaaagatggccggaacagtttcataggccaccagttaggcggtgttgtcgaggtgccaaactccaaagatcagagggtgaaatcagctagggccattcagataacatactatctgcagacatacgggtcagctacgcaggacttgattggcgagaagtgggagaatgagttctgcaagcttatcagaaagctccaagaggagcaccaggagctccagctctactcccttgcatctttctcgctttggcgggacttccacaagacttccattttggcgaggtctaaggtcttggtgagtctggtgcttatcctcactacagcaaccctgtccagctctatgaaagactgtttgcgctctaagcctttcttaggattgttaggcgtactgactgtctgcatttctattattactgccgctgggatttttttcataaccgatggaaagtacaacagcactctgttgggcatcccattcttcgccatgggtcacgggactaagggagtgtttgagctactatctggttggagaagaactaaggagaaccttcctttcaaagataggatcgccgatgcgtattccgacgtgatggtcacatacactatgaccagctccctgtatttcattacttttggcatgggcgcttctcccttcacgaacattgaggcagtgaaagtgttctgccaaaacatgtgcgtctccatcctgttgaattatttctacattttctcattcttcggtagttgtctggtttttgccggccagttagagcagaaccgctaccattcgatcttctgttgtaaaatcccatctgcagagtacctggacagaaagcctgtttggttccaaacagtaatgagtgatggtcatcagcagacaagccatcacgagaccaacccctatcagcaccattttatccaacatttcttgcgagagcactataatgaatggattacaaacatctacgttaagccattcgtagtgattctctatcttatctacgcttctttcagtttcatgggctgcctgcagataagtgatggagctaacatcattaacctcctagcatctgattcgccgtccgtgagttacgccatggtccagcaaaagtattttagcaattacagccctgtgattggcttctatgtttatgaaccactggaatactggaattcgagcgttcaggatgatctgaggcgcctgtgtagcgggtttaccgctgtgagctgggtggagcagtattaccagttcctgaaagtgtcaaatgtttcagccaacaacaagtccgattttatatctgtacttcagagttcgtttctgaagaagcctgaatttcagcacttcaggaatgacatcattttctctaaagctggcgacgagagcaatattatcgccagcagactatacctggtggcacgtacgagccgcgacaaacagaaggaaataacagaggtgttggagaagctgcggcctctcagcctgtcaaaatcgatcagatttattgtcttcaatcccagctttgtctttatggatcactattccctctctgtaaccgtgcctgtcctcattgcagggttcggcgtgctgcttgtgcttatcctcaccttctttttagtgatccatccattgggaaacttctggctcatcctcagcgtgacttcaatcgaactaggggtcttgggattgatgactctctggaatgtcgatatggactgtatctccatcctgtgtctcatttatacactgaacttcgcaatagatcactgcgcgccgctactgtttacgtttgtgcttgccacagaacatactaggacccagtgcatcaaatcctccctgcaggatcacggtactgcaatcctgcagaatgttaccagcttcctgatcgggcttgtccctctactgtttgtcccatcaaacctgacctttaccctgtttaagtgcctccttctgactggtggttgcaccttattgcactgcttcgtgattttgcctgttttccttacatttttcccaccttccaagaaacatcataaaaagaaaaaacgcgctaagcgtaaagagcgtgaagaaattgagtgcattgagatccaagaaaacccagaccacgtcactactgtatag

SEQ ID NO: 25750 - DNA, 2541 bp, Artificial Sequence
  derived and/or modified sequence
atgtgttttctccggaggcccggagcacctgccagctggatctggtggaggatgttgaggcaggtcctccgaaggggactgcagagtttttgccaccggctgggactgtgcgttagtagacatcccgtcttctttctcaccgtacccgctgtgctgactatcacctttgggcttagcgccctcaatagatttcagcccgagggagatttagaacgtttggtcgctccgtctcatagtctcgctaagatcgaacggtcattggcctcctccctttttccattagaccagagcaagtcccaactttattcggaccttcacacccccggtagatacggacgcgttattttactatcaccaactggggacaacattcttttgcaagccgagggaatactccaaacccaccgcgctgttctcgagatgaaagatggcagaaattcctttataggacatcaattgggcggtgtggtggaggttcctaactccaaagaccagagagtaaaatctgctcgcgcaattcagattacatactatttgcagacatacggctccgcaacacaggatctgatcggcgaaaaatgggaaaacgaattttgcaagctcatccggaagttgcaagaagagcatcaggagttacagttgtattcactggccagtttttctctttggagggactttcataaaacatccatcctagctagatccaaagtattagtatctttagtcctgatcttgaccaccgctacactgtctagttctatgaaagactgtttacgctccaaacccttcctgggcctgctcggcgtgctgaccgtgtgtatttcaatcattacagctgccggaatcttcttcattacagatggaaagtacaatagtactctcctcgggatcccattctttgctatgggccatggcacaaaaggcgtcttcgagcttttgagcggttggcggagaaccaaggaaaaccttcccttcaaggaccgaatcgcagacgcatacagcgatgtgatggtgacctatactatgacctccagcttgtacttcataaccttcggcatgggggcatcccccttcaccaatattgaagccgtcaaagtgttttgtcagaatatgtgtgtgtctatcctcctgaattacttttacatcttcagcttcttcggcagttgcttggtatttgcaggtcagctggagcagaacaggtaccacagtatcttttgttgcaagattcccagtgctgagtatttagacagaaagcccgtttggttccagaccgttatgagcgatggacatcaacaaacaagccaccacgagaccaatccgtaccaacatcattttatccagcattttctccgagaacattataacgaatggatcactaacatctacgtgaagccctttgtggttatactttaccttatctatgcaagctttagcttcatgggctgcctacagatctctgatggagctaatatcatcaatttgctggccagcgatagtcctagcgtatcttatgcaatggtccaacagaagtacttctcaaactattcgccagtgattggattttacgtttacgagccactcgagtactggaattcttcggtacaggacgaccttcgaaggctgtgctccgggtttaccgcagtgtcgtgggttgagcagtattaccagtttctgaaagtgtcaaacgtgtctgccaacaataagtccgacttcatctcagttctgcagagttccttcctgaaaaagcctgagttccagcattttcgaaacgacatcattttctccaaggcaggcgacgagtcaaacattatcgcctcaaggctttacctggtggcccgaacctcgagggacaaacagaaggaaatcaccgaggtcctcgagaagttacggccactgtcactaagcaagtcaataaggttcatcgtcttcaatccctcgtttgtttttatggaccactactctttaagcgttacggtgccagtgctcatcgccggattcggggttctgctggtactgattttaacattcttcctggtgattcaccctctgggaaacttttggttgatactatcagtgacatcaatagagctgggcgttctgggactgatgaccttatggaacgtggacatggattgtatctccatcctgtgccttatatacacgttgaactttgcaattgaccactgcgcacctcttctgtttacattcgtgctagccaccgaacacacccgtacacaatgcataaagtccagcctccaagatcatgggactgcgattctgcagaacgtgacttcatttttgatcggactcgtcccacttctgtttgtgccatctaatctcacattcacacttttcaagtgcctattgcttacaggcggatgtactctattgcattgtttcgttatcctgcctgtctttctgacttttttccccccatcaaagaagcatcacaagaagaaaaaaagagctaagcgcaaagagagggaggagatcgagtgtatcgaaatccaggaaaatcctgaccatgttactacagtgtag

SEQ ID NO: 25751 - protein, 1271 aa, Artificial Sequence
  derived and/or modified sequence
MDRGAAAAQGTAPPQDGEQPAESPEPPPPWPPPPPPPAPPPAPPLLSEASPEPIPEPCPELAPGPCPEATSESATELYTEPTPEPATEPASEPAPEPATEPAPEPATEPAPEPAPEPATESAPEPTPEPALESVPEPAPELTPEVAPELAPEPTPEPVTELAPEFCPEAAPEFRPSPAPCLLQCPVDTRERGLKTSPSPSPSPSPRTPMSWSRIKKILKEGPMLKNCNSFKRWKLRYFLVQGQKLYFAHHPAFAHFETIDLSQATVAESSCRNLCHSFCVITPQRKITLAAPNRKDMEEWINIIKTIQQGEIYKIPAAENNPFLVGMHCWYSSYSHRTQHCNVCRESIPALSRDAIICEVCKVKSHRLCALRASKDCKWNTLSITDDLLLPADEVNMPHQWVEGNMPVSSQCAVCHESCGSYQRLQDFRCLWCNSTVHDDCRRRFSKECCFRSHRSSVIPPTALSDPKGDGQLVVSSDFWNLDWSSACSCPLLIFINSKSGDHQGIVFLRKFKQYLNPSQVFDLLKGGPEAGLSMFKNFARFRILVCGGDGSVSWVLSLIDAFGLHEKCQLAVIPLGTGNDLARVLGWGAFWNKSKSPLDILNRVEQASVRILDRWSVMIRETPRQTPLLKGQVEMDVPRFEAAAIQHLESAATELNKILKAKYPTEMIIATRFLCSAVEDFVVDIVKAWGQIKQNNTAIVSVILKSDLMYDRLSVLIDVLAEEAAATSAEKSATEYADSSKADRKPFIPQIDHIAKCKLELATKAQSLQKSLKLIIFQVEQALDEESRQTISVKNFSSTFFLEDDPEDINQTSPRRRSRRGTLSSISSLKSEDLDNLNLDHLHFTPESIRFKEKCVMNNYFGIGLDAKISLDFNTRRDEHPGQYNSRLKNKMWYGLLGTKELLQRSYRKLEERVHLECDGETISLPNLQGIVVLNITSYAGGINFWGSNTATTEYEAPAIDDGKLEVVAIFGSVQMAMSRIINLHHHRIAQCHEVMITIDGEEGIPVQVDGEAWIQRPGLIKIRYKNAAQMLTRDRDFENSMKMWEYKHTEIQAAPQPQLDFQDSQESLSDEEYAQMQHLARLAENLISKLNDLSKIHQHVSVLMGSVNASANILNDIFYGQDSGNEMGAASCIPIETLSRNDAVDVTFSLKGLYDDTTAFLDEKLLRSAEDETALQSALDAMNKEFKKLSEIDWMNPIFVPEEKSSDTDSRSLRLKIKFPKLGKKKVEEERKPKSGQSVQSFIGNLWHRRHREDEAEGDDPLTPSRSQL

SEQ ID NO: 25752 - DNA, 309 bp, Artificial Sequence
  derived and/or modified sequence
atgagatatggctttgtgaggaagaagcaccggggcctcttcctgaccaccgtggccgccctgcccatctggaaccccatcagcgagtttgtgaagtggtacaagagccacaagctgagccagcactgcatccgcatctgtggccacctgtgccagaagcacctggacatgttcctgagcgtcatcggccagcgctggcccattgatgtgttcagctctgtgtttgaccaccaggtgtctgccatcggcagtgacatcatctggtggttcctgaagctgttcctggtgtccttcttcttcttcttctag

SEQ ID NO: 25753 - DNA, 3816 bp, Artificial Sequence
  derived and/or modified sequence
atggacagaggcgccgccgccgcccagggcaccgcccccccccaggacggcgagcagcccgccgagagccccgagcccccccccccctggcccccccccccccccccccccgcccccccccccgccccccccctgctgagcgaggccagccccgagcccatccccgagccctgccccgagctggcccccggcccctgccccgaggccaccagcgagagcgccaccgagctgtacaccgagcccacccccgagcccgccaccgagcccgccagcgagcccgcccccgagcccgccaccgagcccgcccccgagcccgccaccgagcccgcccccgagcccgcccccgagcccgccaccgagagcgcccccgagcccacccccgagcccgccctggagagcgtgcccgagcccgcccccgagctgacccccgaggtggcccccgagctggcccccgagcccacccccgagcccgtgaccgagctggcccccgagttctgccccgaggccgcccccgagttcagacccagccccgccccctgcctgctgcagtgccccgtggacaccagagagagaggcctgaagaccagccccagccccagccccagccccagccccagaacccccatgagctggagcagaatcaagaagatcctgaaggagggccccatgctgaagaactgcaacagcttcaagagatggaagctgagatacttcctggtgcagggccagaagctgtacttcgcccaccaccccgccttcgcccacttcgagaccatcgacctgagccaggccaccgtggccgagagcagctgcagaaacctgtgccacagcttctgcgtgatcaccccccagagaaagatcaccctggccgcccccaacagaaaggacatggaggagtggatcaacatcatcaagaccatccagcagggcgagatctacaagatccccgccgccgagaacaaccccttcctggtgggcatgcactgctggtacagcagctacagccacagaacccagcactgcaacgtgtgcagagagagcatccccgccctgagcagagacgccatcatctgcgaggtgtgcaaggtgaagagccacagactgtgcgccctgagagccagcaaggactgcaagtggaacaccctgagcatcaccgacgacctgctgctgcccgccgacgaggtgaacatgccccaccagtgggtggagggcaacatgcccgtgagcagccagtgcgccgtgtgccacgagagctgcggcagctaccagagactgcaggacttcagatgcctgtggtgcaacagcaccgtgcacgacgactgcagaagaagattcagcaaggagtgctgcttcagaagccacagaagcagcgtgatcccccccaccgccctgagcgaccccaagggcgacggccagctggtggtgagcagcgacttctggaacctggactggagcagcgcctgcagctgccccctgctgatcttcatcaacagcaagagcggcgaccaccagggcatcgtgttcctgagaaagttcaagcagtacctgaaccccagccaggtgttcgacctgctgaagggcggccccgaggccggcctgagcatgttcaagaacttcgccagattcagaatcctggtgtgcggcggcgacggcagcgtgagctgggtgctgagcctgatcgacgccttcggcctgcacgagaagtgccagctggccgtgatccccctgggcaccggcaacgacctggccagagtgctgggctggggcgccttctggaacaagagcaagagccccctggacatcctgaacagagtggagcaggccagcgtgagaatcctggacagatggagcgtgatgatcagagagacccccagacagacccccctgctgaagggccaggtggagatggacgtgcccagattcgaggccgccgccatccagcacctggagagcgccgccaccgagctgaacaagatcctgaaggccaagtaccccaccgagatgatcatcgccaccagattcctgtgcagcgccgtggaggacttcgtggtggacatcgtgaaggcctggggccagatcaagcagaacaacaccgccatcgtgagcgtgatcctgaagagcgacctgatgtacgacagactgagcgtgctgatcgacgtgctggccgaggaggccgccgccaccagcgccgagaagagcgccaccgagtacgccgacagcagcaaggccgacagaaagcccttcatcccccagatcgaccacatcgccaagtgcaagctggagctggccaccaaggcccagagcctgcagaagagcctgaagctgatcatcttccaggtggagcaggccctggacgaggagagcagacagaccatcagcgtgaagaacttcagcagcaccttcttcctggaggacgaccccgaggacatcaaccagaccagccccagaagaagaagcagaagaggcaccctgagcagcatcagcagcctgaagagcgaggacctggacaacctgaacctggaccacctgcacttcacccccgagagcatcagattcaaggagaagtgcgtgatgaacaactacttcggcatcggcctggacgccaagatcagcctggacttcaacaccagaagagacgagcaccccggccagtacaacagcagactgaagaacaagatgtggtacggcctgctgggcaccaaggagctgctgcagagaagctacagaaagctggaggagagagtgcacctggagtgcgacggcgagaccatcagcctgcccaacctgcagggcatcgtggtgctgaacatcaccagctacgccggcggcatcaacttctggggcagcaacaccgccaccaccgagtacgaggcccccgccatcgacgacggcaagctggaggtggtggccatcttcggcagcgtgcagatggccatgagcagaatcatcaacctgcaccaccacagaatcgcccagtgccacgaggtgatgatcaccatcgacggcgaggagggcatccccgtgcaggtggacggcgaggcctggatccagagacccggcctgatcaagatcagatacaagaacgccgcccagatgctgaccagagacagagacttcgagaacagcatgaagatgtgggagtacaagcacaccgagatccaggccgccccccagccccagctggacttccaggacagccaggagagcctgagcgacgaggagtacgcccagatgcagcacctggccagactggccgagaacctgatcagcaagctgaacgacctgagcaagatccaccagcacgtgagcgtgctgatgggcagcgtgaacgccagcgccaacatcctgaacgacatcttctacggccaggacagcggcaacgagatgggcgccgccagctgcatccccatcgagaccctgagcagaaacgacgccgtggacgtgaccttcagcctgaagggcctgtacgacgacaccaccgccttcctggacgagaagctgctgagaagcgccgaggacgagaccgccctgcagagcgccctggacgccatgaacaaggagttcaagaagctgagcgagatcgactggatgaaccccatcttcgtgcccgaggagaagagcagcgacaccgacagcagaagcctgagactgaagatcaagttccccaagctgggcaagaagaaggtggaggaggagagaaagcccaagagcggccagagcgtgcagagcttcatcggcaacctgtggcacagaagacacagagaggacgaggccgagggcgacgaccccctgacccccagcagaagccagctgtag

SEQ ID NO: 25754 - DNA, 3816 bp, Artificial Sequence
  derived and/or modified sequence
atggaccggggagccgctgctgctcaagggaccgcaccaccacaggacggagaacaacccgcagagtcaccagagcccccacctccttggccgccaccgccccccccccctgcacctccgcccgctcccccactcctgtcagaggcatctcctgaaccaatccccgaaccttgtcccgaactggccccgggcccttgtcccgaggcaactagcgaaagtgcaacagaactttacacggagcccacccctgagccggctaccgaacctgccagcgagcctgctccagaacccgctacggagccagcaccggagcctgcgactgagcctgcccccgagcccgcgcccgagccagccaccgagtcagcacccgagccgacgccggagcccgccctggagagcgtccctgaaccggcaccagaattaactccagaagtggcacccgaacttgcaccagaaccaactccagaacccgtgacagaactggctcccgaattttgtccagaggctgcccccgagttccgtccctctcccgcgccctgcctgctgcagtgccctgtggacactcgtgaacgcggcctgaagaccagtccaagccctagcccaagcccctctccacgtaccccaatgagctggagtcggatcaagaagattcttaaggagggaccgatgcttaaaaactgtaactccttcaagagatggaagttaagatacttcctcgtgcagggccagaaactgtattttgcccatcatcccgctttcgctcatttcgagacaatagatctctcacaggccaccgtagccgagtctagttgccgcaatctttgtcattcgttctgcgtgataacaccccagaggaaaattactctcgctgcgcctaatcggaaagatatggaggagtggatcaacatcatcaagaccatacagcagggggagatatacaagatccccgccgccgagaacaatccttttctggtgggcatgcattgctggtactcttcctattctcatcgcactcagcactgcaatgtttgtcgggagagcatacctgctttatcgcgcgacgcaatcatatgcgaagtttgtaaggtcaaatcccatcggctctgtgcactcagggcaagcaaagattgtaaatggaacaccttatcaattactgacgacttgctattgccagctgacgaggtgaacatgccgcaccagtgggtggaaggaaatatgccagtgagctcccagtgcgcagtttgccatgagagttgcgggtcctatcaacgtctgcaggactttaggtgcctgtggtgtaactcaacagtccatgatgattgccgccggcgattctccaaggaatgctgctttcgatctcatagatccagcgtgattccgcctactgccctatccgatccaaagggcgatggacagttagtagtcagctccgacttttggaatttggactggtcatccgcttgcagttgtcctttgctgatcttcattaatagtaagagcggggatcatcagggaatcgtgtttctgaggaagttcaagcagtatcttaatccttcccaagtattcgatctgctgaaaggcggacccgaagcgggattgagcatgttcaagaacttcgctcgatttcggatcctggtgtgcggaggcgatgggtcagtgagttgggtccttagcctcattgatgcctttggcctccatgagaagtgccagctcgctgtaataccgctcgggacaggcaacgatctcgcacgagttctcgggtggggcgcattctggaacaagtcaaaatcgcccctcgacatcttgaacagggtagagcaagcatctgtaagaattctggaccggtggtctgttatgatacgtgagaccccaaggcagacaccactccttaagggccaggtggaaatggacgtcccaaggttcgaggcagccgccatacagcacttagagagtgccgctaccgagctcaacaagatactgaaggccaaatatccaactgagatgattattgcaacccgctttctgtgctcagctgtcgaggacttcgtcgtggacatagtaaaagcttgggggcaaattaaacagaataacacagctatagttagtgtgatccttaagtctgacctgatgtatgatcggctctcagtgctaatcgatgttctagctgaagaagcagctgctactagtgcagagaagtcagccactgagtatgcggactcatctaaagcagatagaaagcctttcatccctcagattgaccatatcgctaaatgcaaactggaacttgctacaaaggcccagtccctgcagaagagtctcaagctgatcatctttcaggtggagcaggctctagacgaagagagcagacaaactatttccgtgaagaatttcagtagtaccttcttcttggaggacgacccggaagacattaaccagacgagccctcgccgcagatcgagacgcggaaccctgagctccatctcgtctctcaagagcgaagacctcgataatctcaatttagatcatttgcattttaccccagagagcatccggttcaaggagaagtgcgtcatgaataattacttcggcatcgggctcgacgctaagatttccttggattttaacacccgccgcgacgagcatccaggacagtacaactcccgcttgaagaataagatgtggtatgggctgcttggcaccaaagaactcttacaacgcagttatagaaagctagaggagagggtgcacctagaatgtgacggggagacgatcagcctccctaacctccagggcatagtggttctgaacatcacttcctacgcaggcggcatcaacttttggggctccaacactgctacaaccgagtacgaggcgcctgccattgacgatggtaagctggaagtggtcgctatctttggcagtgtgcaaatggcaatgagtcgaattattaatttgcaccatcatagaattgcccagtgccatgaggtgatgattaccattgacggcgaggaaggaatcccagttcaagtggacggagaagcatggatacagcggccgggcctcattaaaatcaggtacaagaatgctgcccagatgctcacaagagatagagactttgaaaatagcatgaagatgtgggaatataagcacacagagatacaagccgctccgcagccccaactggatttccaggactcacaagaaagcctcagtgacgaggaatacgcccagatgcaacatctagcccggcttgccgaaaacctcatcagcaaactgaacgacctctcaaagatccatcagcacgtttctgttctgatgggcagcgtcaacgcttctgcaaatattttgaacgacatattttatggccaagactcaggtaatgaaatgggcgccgcgtcctgtattcctattgaaactctgagcaggaatgacgctgtggatgtcactttctccttaaagggattgtacgatgatacgaccgcttttctggatgagaaactgctgcgctccgctgaagacgagaccgcactacagtctgcactggacgccatgaataaagagtttaagaaactatcagagattgactggatgaacccaattttcgtgcccgaagagaagtcgagcgacactgactcgcgctctctacgactaaagatcaagttcccgaaacttgggaaaaaaaaagtcgaggaagaacgcaaaccaaaatctggccaatctgtgcagtcattcataggaaatctctggcacaggcggcatagagaagacgaagctgagggggacgacccactgacccctagccggtcgcagctgtag

SEQ ID NO: 25755 - DNA, 3920 bp, Artificial Sequence
  derived and/or modified sequence
ggcttagggactcaggctgcccagacctgaagcggtgtgcggccatggaccgcggagctgccgcagcccagggcactgccccgcctcaggatggagagcagcccgctgagtctccagagcctccgccgccttggccgccgccgccaccaccaccggctccgccgccggctccgccgctgctctccgaggcttcgccagaacccataccagagccctgtccagagcttgctccaggtccctgtccagaggcgacctcagaatcagccacagaactgtacacagaaccgaccccagaaccagccacagagccggcctcagaaccggccccagaacctgccacagagccggccccagaacctgccacagagccggccccagaaccggccccagaacctgccacagagtctgccccagagccgactccagaacctgccctagagtcggtcccagagccggccccagagctgactccagaagttgccccagagctggccccagagccgaccccagaacctgtgacagagctggccccagagttctgccctgaggcggctccagagttccgtccaagtccagcaccatgtctattgcaatgtccggtggacactcgagagagaggtctaaagacctcgccatcgccatcgccatcgccatcgcccagaacgccaatgtcgtggtccagaataaagaaaatattgaaggaaggacctatgctgaagaactgtaactctttcaagagatggaagcttagatattttctggttcaaggacagaagctctactttgcacaccatcccgcgtttgcacactttgaaacgattgatctgtctcaagccactgtggcagaaagcagctgtagaaacctttgccacagtttttgtgttattacaccacaacgaaaaatcactctggctgcacccaaccggaaagacatggaagaatggattaacatcataaaaaccatccaacagggagaaatttataagatacctgcagcagaaaacaacccttttcttgttggaatgcattgttggtactccagttacagccaccggacccagcactgcaatgtttgtcgagagagcattcctgccttatctagagatgccatcatctgtgaagtgtgcaaagtgaaatctcacagattgtgtgctttgagagcaagcaaagactgcaagtggaatacattgtctatcactgatgacctccttctgcctgcagatgaagtaaacatgccccatcaatgggtagaaggaaacatgcctgtcagctctcagtgtgcagtgtgtcatgagagctgtggcagttatcaaagacttcaagacttccgctgcctgtggtgtaattctacggtgcatgatgactgtaggagacggttttccaaggaatgttgcttcagaagccatcgctcatcagtcattcctcccactgctctaagcgaccccaaaggcgatggccaattagtagtatcttcagacttctggaatcttgattggtcatcagcctgttcatgtcccttgctcatcttcatcaactccaaaagtggcgatcatcaggggatcgtcttcctccgaaaattcaagcaataccttaacccatctcaagtgttcgacttattgaagggtggacctgaagcagggctgtctatgttcaagaactttgctcgctttcgcattctggtttgtggtggagatggcagcgtgagctgggtcttatctctgattgatgcctttggattacatgaaaagtgtcagttggcagtcatcccacttggaaccggcaatgatctggctcgtgttctgggctggggtgcattctggaacaaaagcaagtcacctctggacatcctcaacagagtggagcaggctagtgtgaggatcctagacagatggagtgtgatgattcgtgagactcccagacaaaccccgctgctaaaaggacaggttgaaatggatgtaccacgatttgaggctgctgccatccaacacttagaatctgcagccaccgagttgaacaaaatcctgaaggccaagtaccccacagagatgatcatcgcaaccagattcttgtgttcagctgtggaagattttgtggttgatattgtaaaggcctggggtcagataaaacagaacaacactgcaatagtgtctgtgattttgaaaagtgacttaatgtatgataggctcagtgtcctgatcgatgtcctggctgaggaggcagcagctacttctgctgaaaaaagtgctacagaatatgcagacagcagcaaggcagataggaagcccttcattcctcaaatagaccacatagccaagtgcaagttggagctggctacaaaggcccagagtctccagaaatccttgaaactcatcatatttcaagttgaacaagctctggatgaggaaagcagacagacaatatctgttaagaactttagttcaactttcttcctggaagatgacccagaagatattaaccagacaagcccacgacgccgttctcgtcgtggcactttgtcttctatatcttctctcaaaagtgaggacctggacaaccttaacttggatcacttacattttacacctgaatctatacgcttcaaagaaaaatgtgtcatgaacaactacttcggaattggactggatgctaaaatttctctggacttcaacaccagaagagatgaacacccagggcaatacaatagccgccttaagaacaagatgtggtatggccttctgggaaccaaagaacttttgcagcgctcttacaggaaactggaagaacgagtgcatttggagtgtgatggagaaaccatctccttgccaaacctgcaaggcattgtagtgctcaacattaccagctatgctggaggtatcaacttctggggaagcaacacagcaaccacggaatatgaggctcctgcaatcgatgatgggaaactggaggtggtggcaatctttggttctgtgcagatggcaatgtcccgtatcatcaacctgcatcatcatcgcattgcccagtgccatgaggtgatgataaccattgatggtgaagaaggtatcccagtgcaggtggatggggaggcctggattcagagaccaggccttatcaaaattagatacaagaacgctgcccagatgctgacaagagatcgggactttgagaactcaatgaaaatgtgggaatacaagcatactgaaattcaagctgcccctcaaccccagctggacttccaggactctcaagagagcctctctgacgaggagtatgcccagatgcagcacttagctcggcttgcagaaaacctcatcagcaaacttaatgacctgagcaagatccaccagcatgtgtctgtcctcatgggttctgtgaatgccagcgctaacatcctgaatgatatattttacggccaagacagtggcaatgagatgggtgcagcttcctgtattcccattgaaactctaagcagaaatgatgccgtagatgttacatttagtcttaaaggtctctacgatgacaccacagctttcctggatgaaaagctgctgagaagtgctgaggatgagactgcactacaaagcgccctggatgccatgaataaggagttcaaaaagctatctgagattgactggatgaatccaatctttgttccagaggaaaaatcttcggacactgacagtagaagcctcaggctgaaaattaagttccccaaattgggaaagaaaaaggtagaagaggaacgcaagcctaaatcaggccagagtgtccagagttttattggcaatttatggcaccgcagacatcgtgaagatgaagcagagggtgatgatcctctaacaccatcgagatctcaactgtagcccttgaaagctggaagaactcacaacattgagaattctactaaaaaaactctcaaaacc

SEQ ID NO: 25756 - DNA, 3816 bp, Artificial Sequence
  derived and/or modified sequence
atggacagaggagctgctgctgcccagggcacagccccaccccaggatggagagcagcctgctgagagccctgagcccccaccaccctggcccccacctcctcctcctccagcccctcctccagccccacccctgctgtctgaggccagccctgagcccatccctgagccctgcccagagctggcccctggcccctgcccagaggccaccagcgagagcgccacagagctgtacacagagcccaccccagagcccgccacagagcccgccagcgagcccgcccctgagcccgccacagagcccgcccctgagcccgccacagagcccgcccctgagcccgcccctgagcccgccacagaaagtgcccctgagcccaccccagagcccgccctggagagcgtgcctgagcccgcccctgagctgaccccagaggtggcccctgagctggcccctgagcccaccccagagcctgtgacagagctggcccctgagttctgcccagaggccgcccctgagttccggcccagccctgccccctgcctgctgcagtgccctgtggacacccgggagcggggcctgaagaccagccccagccccagccccagccccagccccaggacccccatgtcctggagccgcatcaagaagatcctgaaggagggccccatgctgaagaactgcaacagcttcaagcgctggaagctgcgctacttcctggtgcagggccagaagctgtactttgcccaccacccagcctttgcccactttgagaccatcgacctgagccaggccaccgtggccgagagcagctgcaggaacctgtgccacagcttctgtgtgatcaccccccagaggaagatcaccctggccgcccccaacaggaaggacatggaggagtggatcaacatcatcaagaccatccagcagggcgagatctacaagatcccagctgctgagaacaaccccttcctggtgggcatgcactgctggtacagcagctacagccacaggacccagcactgcaatgtgtgccgggagagcatcccagccctgagcagagatgccatcatctgtgaggtgtgcaaggtgaagagccaccggctgtgtgccctgcgggccagcaaggactgcaagtggaacaccctgagcatcacagatgacctgctgctgcctgcagatgaggtgaacatgccccaccagtgggtggagggcaacatgcctgtgagcagccagtgtgctgtgtgccacgagagctgtggcagctaccagaggctgcaggacttccgctgcctgtggtgcaacagcacagtgcatgatgactgcagaagacgcttcagcaaggagtgctgcttccgcagccacaggagcagcgtcatccccccaacagccctgagtgaccccaagggagatggccagctggtggtgtccagtgacttctggaacctggactggagcagcgcctgcagctgccccctgctgatcttcatcaacagcaagagcggggaccaccagggcatcgtgttcctgaggaagttcaagcagtacctgaaccccagccaggtgtttgacctgctgaagggcggccctgaggccggcctgtccatgttcaagaactttgcccgcttccgcatcctggtgtgtggaggagatggctctgtgtcctgggtgctgagcctgattgatgccttcggcctgcacgagaagtgccagctggccgtcatccccctgggcactggaaatgacctggcccgggtgctgggctggggcgccttctggaacaagagcaagagccccctggacatcctgaacagagtggagcaggcctctgtgcgcatcctggaccgctggagcgtgatgatccgggagaccccccggcagacccccctgctgaagggccaggtggagatggatgtgcccaggtttgaagctgctgccatccagcacctggagagcgctgccacagagctgaacaagatcctgaaggccaagtaccccacagagatgatcatcgccacccgcttcctgtgcagcgctgtggaggactttgtggtggacatcgtgaaggcctggggccagatcaagcagaacaacacagccatcgtgtctgtcatcctgaagagtgacctgatgtatgaccggctgtctgtgctgattgatgtgctggccgaggaggccgccgccaccagcgctgagaagagcgccacagaatatgctgacagcagcaaggctgacaggaagcccttcatcccccagattgaccacatcgccaagtgcaagctggagctggccaccaaggcccagagcctgcagaagagcctgaagctgatcatcttccaggtggagcaggccctggatgaggagagccggcagaccatctctgtgaagaacttcagcagcaccttcttcctggaggatgatcctgaggacatcaaccagaccagccccaggagaagaagccggcggggcaccctgagcagcatcagcagcctgaagtctgaggacctggacaacctgaacctggaccacctgcacttcaccccagagagcatccgcttcaaggagaagtgtgtgatgaacaactacttcggcatcggcctggatgccaagatcagcctggacttcaacaccaggagagatgagcaccctggccagtacaacagccggctgaagaacaagatgtggtacggcctgctgggcaccaaggagctgctgcagaggagctacaggaagctggaggagcgggtgcacctggagtgtgatggagagaccatcagcctgcccaacctgcagggcatcgtggtgctgaacatcaccagctatgccggcggcatcaacttctggggcagcaacacagccaccacagaatatgaggccccagccattgatgatggcaagctggaggtggtggccatcttcggctctgtgcagatggccatgagccgcatcatcaacctgcaccaccaccgcatcgcccagtgccacgaggtgatgatcaccattgatggagaggagggcatccctgtgcaggtggatggagaggcctggatccagaggcctggcctcatcaagatccgctacaagaatgctgcccagatgctgacccgggaccgggactttgagaacagcatgaagatgtgggagtacaagcacacagagatccaggccgccccccagccccagctggacttccaggacagccaggagagcctgagtgatgaggagtatgcccagatgcagcacctggcccggctggccgagaacctgatcagcaagctgaatgacctgagcaagatccaccagcacgtgtctgtgctgatgggctctgtgaatgccagcgccaacatcctgaatgacatcttctacggccaggacagcggaaatgagatgggcgccgccagctgcatccccatcgagaccctgagcagaaatgatgctgtggatgtgaccttcagcctgaagggcctgtatgatgacaccacagccttcctggatgagaagctgctgcggtctgcagaagatgaaacagccctgcagagcgccctggatgccatgaacaaggagttcaagaagctgtctgaaattgactggatgaaccccatctttgtgcctgaggagaagagcagtgacacagacagccgcagcctgcggctgaagatcaagttccccaagctgggcaagaagaaggtggaggaggagaggaagcccaagagcggccagagcgtgcagagcttcatcggcaacctgtggcacagaagacacagagaagatgaggccgagggagatgaccccctgacccccagccgcagccagctgtag

SEQ ID NO: 25757 - DNA, 3816 bp, Artificial Sequence
  derived and/or modified sequence
atggaccggggcgccgccgccgcccagggcaccgcccccccccaggacggggaacagcccgctgagagtccggaaccgccccctccatggcccccaccccctcctccccccgcccccccaccagcgccccctttactgtccgaagcatctccagaaccaattcctgaaccttgcccagagctcgcacccgggccgtgccctgaggcgacatcagagtccgccaccgagttgtatacggagccaacccctgagccagcaaccgagccagccagtgaacctgcccctgaaccagctacagagcccgccccggagccagctaccgagccagcacccgaacctgcacctgaacctgcaactgagagtgcccccgaacctacacccgaacctgcccttgaatctgtccctgagcccgcccccgagctgaccccagaagtcgctcctgagctggcccccgagccgaccccagaacctgtgacggagctcgccccagagttctgcccagaggccgctcctgagttcagaccttcccctgccccgtgcctgctccaatgtcccgtcgacactcgggagaggggactgaagacctcaccctcaccatctccctccccaagccccagaacccccatgtcctggagccggattaagaaaattcttaaagagggccctatgctgaagaactgcaatagttttaagcggtggaagttgcgatattttctcgtgcaagggcagaagctgtacttcgctcaccatcctgcgttcgcccactttgaaacaatagacttgagccaagctacagtggccgaaagttcttgccgaaatctatgccattctttttgtgtgatcaccccacagcgaaagatcaccctagcagcacctaataggaaggatatggaggagtggatcaacatcataaagaccatacagcagggcgagatctacaagattccggctgcggagaataatcctttcctggtgggtatgcattgttggtattcttcttactcccacaggacacaacattgcaatgtgtgtcgggaatctattcctgctctttcccgcgatgctattatctgtgaggtgtgcaaggtgaaaagccatcggctctgcgcattgcgtgcctcaaaggactgcaagtggaacacgttgtccattaccgacgacttactgcttcccgctgatgaagtgaacatgccgcaccaatgggtcgagggaaatatgccggtgtccagtcagtgtgctgtgtgccacgagtcttgcgggagttaccagcgcctccaggacttccggtgtctgtggtgcaattccaccgtgcacgatgactgccgcagaaggttttcaaaagagtgctgctttcgcagccacaggagttccgtcatccctccaacagcactgagtgatccaaaaggtgatggccagttggtggtctcaagcgacttctggaacctcgactggagcagtgcgtgttcctgtcctctgctaattttcatcaatagtaagagcggagatcaccaaggaattgtattcctccggaagttcaaacaatatctgaaccccagtcaggtgttcgacctcttgaaaggcggccctgaagcgggcctctccatgtttaaaaattttgcccgttttaggatcttagtgtgtggcggcgatgggagcgtctcttgggttctctctttgattgacgccttcgggctgcatgaaaagtgtcagcttgctgtaatccccctaggaacaggcaacgacttggctcgggtgctgggatggggtgccttttggaacaagtccaagagccctttggatatcctcaatcgcgtggaacaggcatccgtccggatccttgatagatggagtgtgatgattagagagacccccagacagacaccactccttaagggtcaagtggaaatggatgtccctagatttgaagccgccgctattcagcacttggaaagtgctgcaacggagcttaataagatactgaaagcaaagtatccaactgagatgattattgcgactagatttctttgcagcgcagtagaggacttcgtggtggacatcgtaaaagcctggggacaaatcaagcagaacaacactgctattgtgtcagtaattctaaaatccgacctcatgtacgatagattatccgtgcttatcgatgtgctggcggaggaggcggctgcaacatccgctgaaaagtctgctaccgagtacgcggactcttctaaagctgacagaaaacccttcatacctcagatagatcacatcgccaagtgcaagctcgaactagcaacaaaggcacaatccctccagaagtccctcaaactgatcattttccaagtggaacaggccctcgatgaggaaagccggcaaaccatttccgttaagaattttagtagcacgtttttcctcgaagacgaccctgaggatattaaccaaacctcgcctcgaaggcgatcacggcgaggtaccctttcatccatcagctctttgaaatcagaagaccttgataacctgaacctggaccacctacactttacaccagaatcaatacgttttaaagaaaaatgcgtgatgaacaattatttcggaatcgggctggatgcaaaaatcagcctcgacttcaacactcggcgggatgagcaccctggacagtacaactcgcgcctcaaaaataagatgtggtacgggttgctcgggacaaaagaattattgcaaaggtcatacagaaagctagaagaacgagtgcatcttgagtgtgacggggagacaatttcactgccaaatctccagggcatagtggtgctgaacatcacatcatatgccggcgggataaatttctggggctctaatactgccaccacagagtacgaagcccccgctatcgacgacggaaagctggaggtggtcgcaatttttgggagtgtgcagatggcaatgtcccgcattattaatcttcaccatcacaggatcgctcaatgccatgaggtgatgattacaattgatggagaagaaggcatcccagtgcaagtcgacggtgaggcctggattcagcgcccaggcctgattaaaattcgatataagaacgctgcccaaatgctcaccagagacagagatttcgagaattcaatgaaaatgtgggaatacaaacacaccgagattcaggcagcccctcagcctcaactagatttccaagacagtcaggagtcattgagcgatgaggaatatgctcagatgcagcatctggccaggcttgctgaaaacttgatatctaaactgaacgacctaagcaagatccaccaacatgtctctgtcctgatgggaagcgtcaacgctagtgccaacatcctgaacgacatcttctacggacaagatagcgggaacgagatgggagctgccagctgtatacctatagagacactcagcaggaacgatgccgtggacgtcaccttctctctaaaaggactgtatgacgatacaaccgcctttctcgatgagaaacttctaagatctgctgaagatgagacagccctgcagagcgctctggacgcgatgaacaaggaatttaaaaaactttctgagattgactggatgaacccgattttcgtccccgaggagaagtcctccgatactgattccagatcactccgcctgaaaattaagttcccaaagttagggaaaaagaaggtcgaggaggagcggaaaccaaagtcagggcagtctgttcagagcttcattggcaatttgtggcacaggagacaccgtgaggatgaagcagaaggggacgatccattgactccaagcaggagtcagctgtag

SEQ ID NO: 25758 - DNA, 3816 bp, Artificial Sequence
  derived and/or modified sequence
atggacaggggcgcagcagcagctcagggcaccgcgccacctcaggatggcgaacagcctgctgagtcacctgaacccccacccccatggccacccccaccgccaccaccagcgccacctcctgctcccccactgttgagcgaagcctcacctgagcctatacccgagccctgccctgaactagcgccaggcccttgcccagaggcaacttccgagtcggccactgagttgtatactgaacctacccctgagccagccacggagccagctagtgaaccggctcccgaaccagcgaccgagccggcacctgaacctgcaaccgaacctgccccagagcctgcgccagagcccgcaaccgaatccgcaccggagcccacccccgaacccgctttggagtcggtgcccgagcccgctcctgagctcacccccgaagtcgcacccgagctcgcccctgagcctacgcctgaacctgtcacagagctggccccagaattctgtcccgaggccgcacctgaattccgcccaagccccgctccttgcttgcttcagtgtcctgtcgacactcgcgaacggggtctgaagaccagtccaagtccttctcctagtcctagtcccaggacccccatgtcttggagcaggataaagaaaatcttaaaggagggacccatgctgaaaaactgcaactcatttaagcggtggaagctaagatacttcctcgtgcagggacagaaactgtacttcgcacaccaccccgctttcgctcattttgagacaatcgacctgagtcaggctacagtcgcagagagttcttgcagaaatctgtgccactctttttgtgtgattacaccccaacggaagatcaccctcgctgccccaaaccgcaaggatatggaggagtggattaacattatcaagaccattcaacaaggcgagatctacaagatccccgctgcagagaacaatccctttctggttggaatgcattgctggtactcatcatactcacacaggacacagcactgcaacgtgtgcagggaaagcattcccgcactgagtagagatgcaattatctgtgaagtgtgcaaagttaagtcccatcgcctgtgcgcactgcgggcttctaaggactgcaagtggaatacactgagcatcactgatgatctcctccttcctgcagacgaggtgaacatgccccaccagtgggttgagggaaatatgcctgtttctagccaatgtgccgtgtgtcatgaaagttgtggctcatatcaaagactgcaggactttaggtgcctctggtgcaacagtacggtccacgatgattgtcgtcggagattttcaaaggaatgctgtttcagaagccaccggtccagtgtcattccacctacggcgttgagtgatcccaaaggagacggacagctggtggtgtcatctgacttttggaatctggactggtcctccgcttgctcctgtccgttgttaatcttcataaattcaaagtccggagatcaccaaggtatcgtttttttgcggaaattcaaacagtatttgaacccctcgcaagtttttgacctcctgaagggcggaccagaagctggacttagcatgtttaagaacttcgctcggttcaggattcttgtgtgtggcggagatggtagcgtcagctgggttctcagcctaatcgatgcctttggcttgcacgaaaagtgtcagcttgcggtaattccactcgggacaggaaatgacctcgccagggttcttggttggggggcattttggaacaagtcaaagtcgcctcttgacatattgaacagagtggagcaggcgtccgttcgcattcttgacaggtggtccgtgatgatccgagaaactcctcgccaaacacccttgctcaaaggccaggtggagatggacgtacccaggttcgaggccgcagccatccagcatctggaatccgctgcgacagagttgaacaaaatccttaaggcgaaatacccaactgaaatgattatcgccacacgcttcttgtgtagtgctgtggaagattttgttgttgacattgttaaggcgtgggggcagatcaagcagaacaatacagccatagtgagtgtaatcttgaaatcagacctgatgtacgaccgattgtccgttttgatcgatgtactggccgaagaggccgcagctactagcgccgagaagagcgcgaccgagtacgctgattcctccaaggctgacagaaaacctttcatcccacagattgatcacatcgctaaatgcaagctcgaacttgcaacaaaagcccagtctcttcagaaatctcttaagctaatcatctttcaggtggagcaggcgctagatgaggagagtcgacagaccatttccgtcaagaactttagcagcaccttctttctcgaggacgatcccgaagatattaatcagacctcccccaggcgccgtagtcggagaggaaccctttcttcgatcagctcattaaagtctgaggatctggataacctcaacctggaccatttgcactttacaccggagtccatccgatttaaagaaaagtgtgttatgaacaattactttggcataggactcgacgcaaaaatttcactcgatttcaacacgcggagggacgagcaccccggtcagtacaacagcagattgaagaacaagatgtggtacggtctcctggggacaaaagagctgctccagagaagttatagaaagctggaggagcgcgtgcacctcgagtgtgacggcgagactatatccctgccaaatctacaggggatcgttgtattaaacattacctcatatgctgggggaataaacttctggggttcaaacactgcaaccacagagtacgaggcacccgcaatcgatgatgggaagttagaggtcgttgctatatttggctccgtgcagatggcaatgtctaggatcattaatcttcatcatcatcgtattgcacaatgccatgaggtgatgataacaattgacggcgaggagggaatccccgtgcaggtggacggagaggcttggatacagcgcccaggactaataaaaattcgttacaagaatgcggctcagatgctgacccgcgacagagattttgaaaattccatgaaaatgtgggagtacaaacataccgagatccaggccgctccgcaaccacaactagactttcaggactctcaggaatctctgagtgatgaggagtatgctcaaatgcaacacctggccagactagccgagaacctcatcagcaaactcaatgacctctccaagatccaccagcacgtgtccgtcctcatgggctccgttaacgcgtcagccaacatactcaacgatatcttttatggtcaggacagtggcaacgagatgggagcagcctcctgtatcccgatcgagaccctcagcaggaatgacgcggtggacgtgactttcagcctcaaaggcctctacgacgacacaaccgctttcctggacgagaagctgctaaggtctgcagaagatgagactgcgttgcaaagcgctttggatgctatgaacaaggaattcaaaaaattgagcgagatcgattggatgaaccctatctttgtgccggaagaaaagtctagcgatacagatagtcggagcttgcgattgaagattaaatttcccaagctgggaaaaaagaaggtggaggaagaaaggaagccgaaaagcggacaaagcgtgcagtcattcattggaaacctctggcacaggcgacacagagaggatgaagccgagggcgatgatcctcttacccccagcaggtctcagctttag

SEQ ID NO: 25759 - protein, 91 aa, Artificial Sequence
  derived and/or modified sequence
MVAKPPVMSFHFAQDLWPEQNIKDSFQKVTLRRYGKCEYENLQLRKGCKHVDECTGHKGGHNTVNQCLTATPSKIFQCNKYVKVFDKFSNS

SEQ ID NO: 25760 - protein, 150 aa, Artificial Sequence
  derived and/or modified sequence
MVAKPPVMSFHFAQDLWPEQNIKDSFQKVTLRRYGKCEYENLQLRKGCKHVDECTGHKGGHNTVNQCLTATPSKIFQCNKYVKVFDKFSNSNRYKRRHTGNKHFKCKECSKSFCVLSQLTQHRRIHTRVNSYKCEECGKAIIICSDFTQH

SEQ ID NO: 25761 - DNA, 276 bp, Artificial Sequence
  derived and/or modified sequence
atggtggccaagccccccgtgatgagcttccacttcgcccaggacctgtggcccgagcagaacatcaaggacagcttccagaaggtgaccctgagaagatacggcaagtgcgagtacgagaacctgcagctgagaaagggctgcaagcacgtggacgagtgcaccggccacaagggcggccacaacaccgtgaaccagtgcctgaccgccacccccagcaagatcttccagtgcaacaagtacgtgaaggtgttcgacaagttcagcaacagctag

SEQ ID NO: 25762 - DNA, 453 bp, Artificial Sequence
  derived and/or modified sequence
atggtggccaagccccccgtgatgagcttccacttcgcccaggacctgtggcccgagcagaacatcaaggacagcttccagaaggtgaccctgagaagatacggcaagtgcgagtacgagaacctgcagctgagaaagggctgcaagcacgtggacgagtgcaccggccacaagggcggccacaacaccgtgaaccagtgcctgaccgccacccccagcaagatcttccagtgcaacaagtacgtgaaggtgttcgacaagttcagcaacagcaacagatacaagagaagacacaccggcaacaagcacttcaagtgcaaggagtgcagcaagagcttctgcgtgctgagccagctgacccagcacagaagaatccacaccagagtgaacagctacaagtgcgaggagtgcggcaaggccatcatcatctgcagcgacttcacccagcactag

SEQ ID NO: 25763 - DNA, 276 bp, Artificial Sequence
  derived and/or modified sequence
atggtcgccaagccgcccgttatgtcgttccattttgcccaggacctgtggcccgaacagaatattaaggattccttccagaaagtgacccttaggcggtatgggaagtgcgaatacgagaacctccagttacgaaaaggatgcaagcatgtggacgaatgcaccggccataagggcgggcacaataccgtaaaccagtgtctgaccgctacaccttctaagatcttccaatgtaataagtatgtgaaagttttcgacaaattcagcaactcctag

SEQ ID NO: 25764 - DNA, 453 bp, Artificial Sequence
  derived and/or modified sequence
atggtggccaagcctccggtcatgagctttcatttcgcccaggacttatggccagaacagaatatcaaggattccttccaaaaggtgacactccgtcgttacgggaaatgtgagtacgagaatctgcagctgcggaaagggtgcaaacacgtcgatgaatgtaccgggcacaagggtgggcataacaccgttaatcaatgcctcacagctacgccctcaaaaatctttcaatgtaacaagtacgttaaagtgttcgataaattttcgaactcgaataggtataagcgaaggcatacaggaaataagcacttcaaatgcaaagagtgctccaagtcattttgtgtcctgtcccagctgacacagcacagaagaatccacactcgggttaacagctacaagtgcgaggagtgcggaaaggccatcatcatctgctctgatttcacacagcattag

SEQ ID NO: 25765 - DNA, 276 bp, Artificial Sequence
  derived and/or modified sequence
atggtggccaagccccctgtgatgtccttccactttgcccaggacctgtggccagagcagaacatcaaggacagcttccagaaggtgaccctgcggcgctatggaaaatgtgaatatgagaacctgcagctgaggaagggctgcaagcacgtggatgaatgtacaggccacaagggcggccacaacacagtgaaccagtgcctgacagccacccccagcaagatcttccagtgcaacaagtatgtgaaggtgtttgacaagttcagcaacagctag

SEQ ID NO: 25766 - DNA, 453 bp, Artificial Sequence
  derived and/or modified sequence
atggtggccaagccccctgtgatgtccttccactttgcccaggacctgtggccagagcagaacatcaaggacagcttccagaaggtgaccctgcggcgctatggaaaatgtgaatatgagaacctgcagctgaggaagggctgcaagcacgtggatgaatgtacaggccacaagggcggccacaacacagtgaaccagtgcctgacagccacccccagcaagatcttccagtgcaacaagtatgtgaaggtgtttgacaagttcagcaacagcaaccgctacaagaggaggcacactggaaacaagcacttcaagtgcaaggagtgcagcaagagcttctgtgtgctgagccagctgacccagcaccggcgcatccacaccagggtgaacagctacaagtgtgaggagtgtgggaaggccatcatcatctgcagcgacttcacccagcactag

SEQ ID NO: 25767 - DNA, 276 bp, Artificial Sequence
  derived and/or modified sequence
atggtggccaagccccccgtgatgagcttccacttcgcccaggacctgtggcccgagcagaatatcaaggacagctttcagaaggtaaccctccggcgatatggcaagtgtgaatacgaaaatttgcagctcaggaaaggctgtaaacacgtggacgagtgtaccggtcataagggaggacataatacagttaaccagtgcctgacagccactccttccaagatctttcagtgcaataagtacgttaaagtgttcgacaaattcagcaattcctag

SEQ ID NO: 25768 - DNA, 453 bp, Artificial Sequence
  derived and/or modified sequence
atggtggccaagccccccgtgatgagcttccacttcgcccaggacttgtggccggagcagaatattaaagatagctttcagaaggtaacattgaggagatatggcaaatgcgaatatgagaacttgcagctgagaaaaggctgcaagcatgtcgacgaatgtacaggccacaaagggggacataatacagtaaatcagtgcctaaccgccaccccttctaaaatcttccagtgcaacaaatacgtgaaggtgtttgataaattctccaacagtaacaggtacaagcggcgtcatactgggaataaacactttaaatgcaaggagtgctctaaaagtttttgtgtcctgagccaacttacacaacacagacgcatccatacaagggtgaactcctataaatgtgaggaatgcggaaaggcaataatcatctgttccgattttacccagcattag

SEQ ID NO: 25769 - DNA, 276 bp, Artificial Sequence
  derived and/or modified sequence
atggtcgctaagccaccagtgatgagtttccacttcgctcaggacctgtggccagagcagaatatcaaagactcattccagaaagtgactctacggaggtatggtaagtgtgaatacgagaacctgcagctgagaaaaggctgcaaacacgtggatgagtgtaccgggcacaaggggggacacaacaccgtaaaccagtgcctgactgccactcccagcaaaatctttcagtgtaacaaatacgtaaaggtgtttgacaagttctcaaacagttag

SEQ ID NO: 25770 - DNA, 453 bp, Artificial Sequence
  derived and/or modified sequence
atggtggcaaaaccccctgtgatgagttttcatttcgctcaggatttatggccggaacaaaatataaaggacagcttccagaaggtcacattacgccgttacggtaaatgcgagtatgagaatctacagcttcgcaaaggctgtaagcacgtggatgagtgcacaggccataaaggaggtcacaatacggtgaaccagtgcctgacggccactccttctaaaattttccagtgtaataagtacgttaaggtcttcgataagttctcaaactctaaccggtacaagcgacggcacactggcaataagcattttaagtgcaaggaatgttctaaatctttctgtgtcctcagccagcttacacagcaccgcagaatccatacacgtgtgaattcctataagtgcgaggagtgtggaaaagctatcatcatttgttcagacttcacccagcattag

SEQ ID NO: 25771 - protein, 684 aa, Artificial Sequence
  derived and/or modified sequence
MIPPQEASARRREIEDKLKQEEETLSFIRDSLEKSDQLTKNMVSILSSFESRLMKLENSIIPVHKQTENLQRLQENVEKTLSCLDHVISYYHVASDTEKIIREGPTGRLEEYLGSMAKIQKAVEYFQDNSPDSPELNKVKLLFERGKEALESEFRSLMTRHSKVVSPVLILDLISGDDDLEAQEDVTLEHLPESVLQDVIRISRWLVEYGRNQDFMNVYYQIRSSQLDRSIKGLKEHFHKSSSSSGVPYSPAIPNKRKDTPTKKPVKRPGTIRKAQNLLKQYSQHGLDGKKGGSNLIPLEGRDDMLDVETDAYIHCVSAFVKLAQSEYQLLADIIPEHHQKKTFDSLIQDALDGLMLEGENIVSAARKAIVRHDFSTVLTVFPILRHLKQTKPEFDQVLQGTAASTKNKLPGLITSMETIGAKALEDFADNIKNDPDKEYNMPKDGTVHELTSNAILFLQQLLDFQETAGAMLASQETSSSATSYSSEFSKRLLSTYICKVLGNLQLNLLSKSKVYEDPALSAIFLHNNYNYILKSLEKSELIQLVAVTQKTAERSYREHIEQQIQTYQRSWLKVTDYIAEKNLPVFQPGVKLRDKERQIIKERFKGFNDGLEELCKIQKAWAIPDTEQRDRIRQAQKTIVKETYGAFLQKFGSVPFTKNPEKYIKYGVEQVGDMIDRLFDTSA

SEQ ID NO: 25772 - protein, 621 aa, Artificial Sequence
  derived and/or modified sequence
MVSILSSFESRLMKLENSIIPVHKQTENLQRLQENVEKTLSCLDHVISYYHVASDTEKIIREGPTGRLEEYLGSMAKIQKAVEYFQDNSPDSPELNKVKLLFERGKEALESEFRSLMTRHSKVVSPVLILDLISGDDDLEAQEDVTLEHLPESVLQDVIRISRWLVEYGRNQDFMNVYYQIRSSQLDRSIKGLKEHFHKSSSSSGVPYSPAIPNKRKDTPTKKPVKRPGTIRKAQNLLKQYSQHGLDGKKGGSNLIPLEGRDDMLDVETDAYIHCVSAFVKLAQSEYQLLADIIPEHHQKKTFDSLIQDALDGLMLEGENIVSAARKAIVRHDFSTVLTVFPILRHLKQTKPEFDQVLQGTAASTKNKLPGLITSMETIGAKALEDFADNIKNDPDKEYNMPKDGTVHELTSNAILFLQQLLDFQETAGAMLASQGKVLGNLQLNLLSKSKVYEDPALSAIFLHNNYNYILKSLEKSELIQLVAVTQKTAERSYREHIEQQIQTYQRSWLKVTDYIAEKNLPVFQPGVKLRDKERQIIKERFKGFNDGLEELCKIQKAWAIPDTEQRDRIRQAQKTIVKETYGAFLQKFGSVPFTKNPEKYIKYGVEQVGDMIDRLFDTSA

SEQ ID NO: 25773 - DNA, 2055 bp, Artificial Sequence
  derived and/or modified sequence
atgatccccccccaggaggccagcgccagaagaagagagatcgaggacaagctgaagcaggaggaggagaccctgagcttcatcagagacagcctggagaagagcgaccagctgaccaagaacatggtgagcatcctgagcagcttcgagagcagactgatgaagctggagaacagcatcatccccgtgcacaagcagaccgagaacctgcagagactgcaggagaacgtggagaagaccctgagctgcctggaccacgtgatcagctactaccacgtggccagcgacaccgagaagatcatcagagagggccccaccggcagactggaggagtacctgggcagcatggccaagatccagaaggccgtggagtacttccaggacaacagccccgacagccccgagctgaacaaggtgaagctgctgttcgagagaggcaaggaggccctggagagcgagttcagaagcctgatgaccagacacagcaaggtggtgagccccgtgctgatcctggacctgatcagcggcgacgacgacctggaggcccaggaggacgtgaccctggagcacctgcccgagagcgtgctgcaggacgtgatcagaatcagcagatggctggtggagtacggcagaaaccaggacttcatgaacgtgtactaccagatcagaagcagccagctggacagaagcatcaagggcctgaaggagcacttccacaagagcagcagcagcagcggcgtgccctacagccccgccatccccaacaagagaaaggacacccccaccaagaagcccgtgaagagacccggcaccatcagaaaggcccagaacctgctgaagcagtacagccagcacggcctggacggcaagaagggcggcagcaacctgatccccctggagggcagagacgacatgctggacgtggagaccgacgcctacatccactgcgtgagcgccttcgtgaagctggcccagagcgagtaccagctgctggccgacatcatccccgagcaccaccagaagaagaccttcgacagcctgatccaggacgccctggacggcctgatgctggagggcgagaacatcgtgagcgccgccagaaaggccatcgtgagacacgacttcagcaccgtgctgaccgtgttccccatcctgagacacctgaagcagaccaagcccgagttcgaccaggtgctgcagggcaccgccgccagcaccaagaacaagctgcccggcctgatcaccagcatggagaccatcggcgccaaggccctggaggacttcgccgacaacatcaagaacgaccccgacaaggagtacaacatgcccaaggacggcaccgtgcacgagctgaccagcaacgccatcctgttcctgcagcagctgctggacttccaggagaccgccggcgccatgctggccagccaggagaccagcagcagcgccaccagctacagcagcgagttcagcaagagactgctgagcacctacatctgcaaggtgctgggcaacctgcagctgaacctgctgagcaagagcaaggtgtacgaggaccccgccctgagcgccatcttcctgcacaacaactacaactacatcctgaagagcctggagaagagcgagctgatccagctggtggccgtgacccagaagaccgccgagagaagctacagagagcacatcgagcagcagatccagacctaccagagaagctggctgaaggtgaccgactacatcgccgagaagaacctgcccgtgttccagcccggcgtgaagctgagagacaaggagagacagatcatcaaggagagattcaagggcttcaacgacggcctggaggagctgtgcaagatccagaaggcctgggccatccccgacaccgagcagagagacagaatcagacaggcccagaagaccatcgtgaaggagacctacggcgccttcctgcagaagttcggcagcgtgcccttcaccaagaaccccgagaagtacatcaagtacggcgtggagcaggtgggcgacatgatcgacagactgttcgacaccagcgcctag

SEQ ID NO: 25774 - DNA, 1866 bp, Artificial Sequence
  derived and/or modified sequence
atggtgagcatcctgagcagcttcgagagcagactgatgaagctggagaacagcatcatccccgtgcacaagcagaccgagaacctgcagagactgcaggagaacgtggagaagaccctgagctgcctggaccacgtgatcagctactaccacgtggccagcgacaccgagaagatcatcagagagggccccaccggcagactggaggagtacctgggcagcatggccaagatccagaaggccgtggagtacttccaggacaacagccccgacagccccgagctgaacaaggtgaagctgctgttcgagagaggcaaggaggccctggagagcgagttcagaagcctgatgaccagacacagcaaggtggtgagccccgtgctgatcctggacctgatcagcggcgacgacgacctggaggcccaggaggacgtgaccctggagcacctgcccgagagcgtgctgcaggacgtgatcagaatcagcagatggctggtggagtacggcagaaaccaggacttcatgaacgtgtactaccagatcagaagcagccagctggacagaagcatcaagggcctgaaggagcacttccacaagagcagcagcagcagcggcgtgccctacagccccgccatccccaacaagagaaaggacacccccaccaagaagcccgtgaagagacccggcaccatcagaaaggcccagaacctgctgaagcagtacagccagcacggcctggacggcaagaagggcggcagcaacctgatccccctggagggcagagacgacatgctggacgtggagaccgacgcctacatccactgcgtgagcgccttcgtgaagctggcccagagcgagtaccagctgctggccgacatcatccccgagcaccaccagaagaagaccttcgacagcctgatccaggacgccctggacggcctgatgctggagggcgagaacatcgtgagcgccgccagaaaggccatcgtgagacacgacttcagcaccgtgctgaccgtgttccccatcctgagacacctgaagcagaccaagcccgagttcgaccaggtgctgcagggcaccgccgccagcaccaagaacaagctgcccggcctgatcaccagcatggagaccatcggcgccaaggccctggaggacttcgccgacaacatcaagaacgaccccgacaaggagtacaacatgcccaaggacggcaccgtgcacgagctgaccagcaacgccatcctgttcctgcagcagctgctggacttccaggagaccgccggcgccatgctggccagccagggcaaggtgctgggcaacctgcagctgaacctgctgagcaagagcaaggtgtacgaggaccccgccctgagcgccatcttcctgcacaacaactacaactacatcctgaagagcctggagaagagcgagctgatccagctggtggccgtgacccagaagaccgccgagagaagctacagagagcacatcgagcagcagatccagacctaccagagaagctggctgaaggtgaccgactacatcgccgagaagaacctgcccgtgttccagcccggcgtgaagctgagagacaaggagagacagatcatcaaggagagattcaagggcttcaacgacggcctggaggagctgtgcaagatccagaaggcctgggccatccccgacaccgagcagagagacagaatcagacaggcccagaagaccatcgtgaaggagacctacggcgccttcctgcagaagttcggcagcgtgcccttcaccaagaaccccgagaagtacatcaagtacggcgtggagcaggtgggcgacatgatcgacagactgttcgacaccagcgcctag

SEQ ID NO: 25775 - DNA, 2191 bp, Artificial Sequence
  derived and/or modified sequence
ggacgggggcccggtgggcccgcggaggaaagatactggggagtgggagccgcggggttcagagcgatgattcccccacaggaggcatccgctcgacggcgggagattgaggacaagctgaagcaggaggaggagactctgtccttcatccgagacagcctggagaagagcgaccagctcactaagaacatggtgtctatcttatcatcctttgagagccgccttatgaagctggagaactccatcatccctgtgcacaagcagacggagaatctgcagcggctgcaggagaatgttgagaagacgctgtcctgcctggaccatgtcatcagctactaccatgtggccagtgacactgagaagatcatcagagagggccccacaggtaggctggaagagtacctgggaagcatggccaagattcagaaggcagtggagtatttccaggacaacagcccagacagcccggaactcaacaaagtgaaactgctctttgagcgcgggaaggaggccctggagtccgaatttcgcagcctgatgacgcggcacagtaaggtcgtctcgcccgtgctcatcttggatctgatcagtggtgacgatgatctggaggcccaggaggacgtgaccctggagcacctgcccgagagcgtgctccaggatgtcattcgcatctcccgctggctggtggaatatggccgcaaccaagatttcatgaacgtctactaccagatacgctccagccagctggaccgctccatcaaaggactgaaggagcatttccataagagcagttcttcctctggggttccctactcccctgctatccccaacaagaggaaagacacacctaccaagaagccagtcaagcggccagggacgatccgtaaggctcagaaccttctgaaacagtattcccagcatggtctagatgggaaaaaggggggctctaacctcattcctctggaagggagagatgacatgctggacgtggagaccgatgcctacatccactgcgtcagtgccttcgtcaagctggcgcagagcgagtaccagctgctggccgacatcatccccgagcaccaccagaagaagaccttcgactccctgatacaggatgccctggatgggctgatgcttgaaggggagaacatcgtgtctgctgcccggaaggccattgtgcgacacgacttctccacggtgctcaccgtcttccccatcctgcgacacctcaagcagaccaagcctgagtttgaccaggtgctccagggcacggctgccagcacaaagaacaagctgcctggcctcatcacatccatggagaccatcggtgccaaagcgctggaggacttcgcagacaacatcaagaatgacccggacaaggagtacaacatgccgaaggacggcaccgtacacgagctcaccagcaatgccatcctcttcctgcagcagcttttggacttccaggagacggcaggcgccatgctggcctcccaagagaccagctcttcggccaccagctacagctctgagttcagcaagcggctgctaagcacctatatctgtaaagtgctgggcaacctgcagttgaacttgctgagcaagtccaaggtgtacgaggacccagctctgagcgccatcttcctgcacaacaactacaattacatcctcaagtccctggagaagtctgaactgatccagctggtggcagtgacacagaagactgctgagcgctcctaccgggagcacattgagcagcagatccagacctaccagcgcagctggttaaaggtgactgattacatcgcagagaagaatctacctgtgttccagccgggagtcaagctccgggacaaggagcggcagattatcaaggagcgttttaagggcttcaatgatggcctcgaagaactgtgcaaaatccagaaggcctgggctattccagacacagagcagagggacaggattcgccaggcccagaagaccattgtcaaggagacctacggggcctttctacagaagtttggcagcgtgcccttcaccaagaacccggagaagtacatcaagtacggggtggagcaggtgggcgacatgatcgatcgccttttcgacacctctgcctgagcctgctgctagccctgcctggttccaccagactggcgtgtcattggacagataaaccagtgttagcttg

SEQ ID NO: 25776 - DNA, 2055 bp, Artificial Sequence
  derived and/or modified sequence
atgattccgccgcaggaggcctcagctcggaggcgtgaaatcgaggacaagctgaaacaagaagaagagacccttagttttattagggattccctcgaaaaatctgatcagttgacaaaaaacatggtgtctatcttatcaagctttgaatcaaggctcatgaaacttgagaactctattatacccgtgcataagcagaccgaaaacctgcaaaggttgcaagagaatgtggagaaaaccttatcttgtctggaccacgtcatcagctattaccacgttgctagcgacacggaaaaaatcatccgggaggggcctaccggaaggctcgaggaatacctgggctctatggccaagatccagaaggcagtcgagtatttccaagacaatagccccgactcacctgagctgaataaggtgaagctactctttgaacgaggcaaggaggccctcgagtccgaatttaggagcctcatgaccagacactcaaaggtcgtctcaccggtgctcatactggatctcatttcgggcgacgacgaccttgaggcacaggaggatgttacacttgaacatctccctgaaagcgtgcttcaggatgtgattagaatatcccgctggctggtggagtacggacgaaatcaggactttatgaacgtgtattaccagattcgctcctctcagctggataggtctattaagggccttaaagagcactttcacaagagttcatctagcagcggagtgccctacagtcccgccattcccaacaaacgtaaagacactcctaccaagaagccagttaagcgaccaggaaccatcagaaaggctcagaatcttctgaaacaatactctcagcacggcctggacggtaaaaagggtggcagcaacctcatccccttggaaggacgggatgacatgttggatgtagaaactgacgcatacatacactgtgtctctgcctttgtgaagctggcgcagtcagaatatcagttgctcgccgatattattcccgagcatcatcagaaaaaaacattcgattccttgatccaggatgctctggacggtctcatgttggagggggaaaacatagtgtcagcagccaggaaagccatcgtcagacacgatttttctacggtattgacagtttttccgatccttcggcatctcaagcaaactaagcccgagtttgatcaggtcctgcagggcacggctgccagtaccaaaaataaactgcccggcctcataaccagtatggagactatcggtgcgaaagcactggaagactttgctgataatattaagaacgatcctgacaaggaatacaatatgcccaaggacggcacagtgcacgaactcacctctaatgccattctcttcctgcagcagctgttggacttccaagagacagccggcgctatgctggcttcgcaggaaaccagcagctctgctactagttactcatccgaattctccaagcgactgctcagcacatacatttgtaaggtcctcggaaatttacagttgaatttgttgagtaaatctaaggtctacgaagatccagccctgtctgcaatcttcctgcataacaactataactatattctcaagtctcttgaaaagagtgaactgattcagttagtggctgtcacacaaaagacagctgaaagaagttatcgtgaacatattgaacagcagatacagacctatcagagaagttggctaaaggtcaccgattacattgccgaaaagaatctgccagtctttcagccgggggtgaagctgcgcgacaaagagcgtcagataattaaggagagattcaaaggtttcaacgatggcctggaggaactgtgtaagattcagaaggcttgggcgattccagacactgagcagagagataggatacgccaggcccagaagacaatcgtcaaagaaacctacggcgcatttttacagaagtttggaagtgtcccatttactaagaatccagaaaaatatatcaaatacggggtagagcaggtgggagatatgatcgatagattgtttgacacttctgcttag

SEQ ID NO: 25777 - DNA, 1866 bp, Artificial Sequence
  derived and/or modified sequence
atggtaagcattctgtcatctttcgagtccaggttaatgaaactagagaacagtataataccagtgcataagcagaccgaaaatctgcagcgcctccaagaaaatgtggaaaaaacactctcttgcctggaccatgtcatctcctattaccatgtcgcctccgatacagagaaaattataagagagggacctactggccgtcttgaagagtatcttgggtctatggccaagattcaaaaagctgtcgagtacttccaggacaactcaccagacagtcccgagctcaacaaagtcaaactgttgttcgagagagggaaagaggctctggagagcgaatttcgctcactcatgacaaggcactccaaggtcgtgagtcctgttctgatcttggatttaatatccggcgacgatgatctggaggctcaggaagacgttacgcttgagcacctgcccgaatcagtgctccaggatgttatcaggatctctaggtggctggtcgagtatggtaggaatcaagactttatgaatgtgtactatcaaatcagaagctctcagttggatagatcaattaaaggcctgaaagagcattttcacaaaagctcttcctcatctggggttccatatagccccgcaatacccaataagcgtaaagacactccgaccaaaaagcctgtgaagcggccaggcacgataagaaaggctcagaacttgcttaagcagtatagccaacacggacttgatggaaaaaaggggggtagtaacctgattccgctcgagggccgagacgatatgctagatgttgaaacagatgcatatatccactgtgtgtcggcttttgtgaagttggcacaatcagagtaccaactccttgccgatattattccagaacatcatcagaaaaaaacctttgatagcctaatacaggacgcactagacgggctcatgcttgaaggggagaatatcgtatctgccgccaggaaagctatcgtgcgacatgacttctcaacggtcctgacggtcttccctatactgagacacctgaagcagacaaagcccgaattcgaccaggttctacagggtacagccgcctctaccaagaacaaactccccggccttatcacatccatggagactatcggagctaaggcgcttgaagatttcgcagacaatatcaagaatgatcccgacaaggagtacaatatgccaaaagatggtacggtgcacgaactaacttcaaatgccattctcttcttgcagcagctgcttgactttcaggagacggcgggagcaatgctcgcatcgcaggggaaggtcctgggaaacttgcagctcaatcttctgtctaagagcaaggtttatgaggaccctgccttatcagccatatttcttcataataattataactatatcctgaaaagcttagaaaagagcgagctcatccaactggtcgccgtaacacagaagactgcagagagatcttaccgtgagcacatcgagcagcaaattcagacgtaccagcggtcttggctcaaggttacagactatatcgccgagaaaaacctccctgtgtttcaaccaggagttaaactgcgagacaaagagagacagatcattaaggagagattcaagggcttcaacgatggtctcgaagagctgtgtaaaattcaaaaagcttgggccatacctgatacagagcagcgagacagaattaggcaggctcagaaaaccattgtgaaggaaacatatggagcgttcctgcaaaagttcggctcggtacctttcaccaagaaccctgagaaatacatcaaatacggtgtcgagcaggtcggagacatgattgataggctattcgatacgtcagcctag

SEQ ID NO: 25778 - DNA, 2055 bp, Artificial Sequence
  derived and/or modified sequence
atgatccccccacaggaggcctctgctcgcaggcgggaaatcgaggacaagcttaagcaagaggaggaaacgttgtcttttatccgggactcccttgagaagtcagatcaactgaccaagaatatggtaagtattctatccagcttcgagtcgcgtctgatgaaactggagaactcgatcattcccgttcacaagcagacagaaaacctgcagaggctccaagagaatgtggaaaaaaccctgagttgtcttgatcacgtcatttcttactatcacgtcgcttccgacactgagaagattatcagagagggccctacaggaaggcttgaagagtatctggggagcatggccaagatacagaaagctgtggaatactttcaggacaacagtcccgatagccccgagctgaataaggtgaagctgctctttgagagagggaaagaagccttggagtccgaatttcgatcattgatgacccggcattccaaggtagtcagtcccgtgttaattttggacttgatcagcggtgatgatgatctcgaggcccaggaggatgtcacactggagcacctccccgagtctgtactccaagacgttatccgaatttcccgttggttagtggaatatggccgcaatcaggatttcatgaacgtatattaccagatccggtcctcacagttggaccggtccatcaaggggctgaaagaacacttccacaagagcagctcttcctctggggttccttacagccccgccatccccaacaagcgcaaagacacaccaactaagaagccagtgaaacgtcccggtacgatcagaaaagcacagaaccttctgaagcagtactcccagcatggcttagatggaaagaaggggggctcaaacctgatccctttagaggggagggatgatatgttggatgtcgagaccgacgcctacatccactgtgtctccgcctttgtcaagttggcgcagtcagaataccagctgctggcagatattatcccagaacatcatcaaaaaaaaaccttcgatagcctgatccaagatgctctggatggcctgatgttagaaggcgaaaatatcgtctctgccgctcggaaagccatcgtgaggcatgatttctcaacagtgctaactgtgttccccatcctgaggcatcttaagcagactaagccggagttcgatcaggtgttacaagggaccgctgcgagcaccaaaaacaaactgcccggactgatcacgtctatggagaccattggagcaaaggctttagaagattttgctgataatattaagaatgatcctgataaggagtacaatatgccaaaggatggaacggtgcacgaactcacaagcaacgctatcctttttctgcagcagctcttggactttcaggaaacggcgggagccatgcttgcgtcccaggagacctcttccagtgctacttcctactcctccgagttttccaaacggcttcttagcacgtatatttgcaaagtccttggcaacttacagttgaatctcttgagtaagagcaaggtctacgaggacccggccttatcagccatttttttgcataacaattataactacatcctcaaaagcctcgaaaagagcgaattgatccagcttgtcgccgtgacccaaaaaacagccgagcggagttatcgggagcatatagagcagcaaatacagacctaccagagatcatggctcaaagtgaccgattacatcgcggagaaaaacctgcccgttttccaacctggtgtaaagctgcgcgacaaggagagacagattataaaagagaggtttaaaggttttaacgacggactggaggaactgtgtaaaattcaaaaagcttgggccatccctgacacggagcagcgtgatcgcatcaggcaggcccaaaagacgatagtgaaagagacttatggcgcctttctgcaaaagtttggcagcgtgccattcaccaagaacccggagaagtacattaagtacggggttgaacaggtaggagatatgatcgaccggctgtttgacacttccgcctag

SEQ ID NO: 25779 - DNA, 2055 bp, Artificial Sequence
  derived and/or modified sequence
atgatccccccccaggaggccagcgccaggagaagagaaattgaggacaagctgaagcaggaggaggagaccctgtccttcatccgggacagcctggagaagagtgaccagctgaccaagaacatggtgtccatcctgagcagctttgagagccggctgatgaagctggagaacagcatcatccctgtgcacaagcagacagagaacctgcagaggctgcaggagaatgtggagaagaccctgagctgcctggaccacgtgatctcctactaccacgtggccagtgacacagagaagatcatccgggagggccccaccggccgcctggaggagtacctgggctccatggccaagatccagaaggctgtggagtacttccaggacaacagcccagacagccctgagctgaacaaggtgaagctgctgtttgagcggggcaaggaggccctggagagcgagttccgcagcctgatgaccaggcacagcaaggtggtgtcccctgtgctgatcctggacctgatctctggagatgatgacctggaggcccaggaggatgtgaccctggagcacctgcctgagagcgtgctgcaggacgtcatccgcatcagccgctggctggtggagtatggaagaaaccaggacttcatgaatgtgtactaccagatccgcagcagccagctggacaggagcatcaagggcctgaaggagcacttccacaagagcagcagcagcagtggagtgccctacagccctgccatccccaacaagaggaaggacacccccaccaagaagcctgtgaagaggcctggcaccatcaggaaggcccagaacctgctgaagcagtacagccagcacggcctggatggcaagaagggcggcagcaacctgatccccctggagggcagagatgacatgctggatgtggagacagatgcctacatccactgtgtgtctgcctttgtgaagctggcccagagcgagtaccagctgctggccgacatcatccctgagcaccaccagaagaagacctttgacagcctcatccaggatgccctggatggcctgatgctggagggggagaacatcgtgtctgctgccaggaaggccatcgtgagacatgacttcagcacagtgctgaccgtcttccccatcctgcggcacctgaagcagaccaagccagagtttgaccaggtgctgcagggcacagctgccagcaccaagaacaagctgcccggcctcatcacctccatggagaccatcggggccaaggccctggaggactttgctgacaacatcaagaatgaccctgacaaggagtacaacatgcccaaggatggcaccgtgcatgagctgaccagcaatgccatcctcttcctgcagcagctgctggacttccaggagacagctggggccatgctggccagccaggagaccagcagcagcgccaccagctacagcagcgagttcagcaagaggctgctgagcacctacatctgcaaggtgctgggcaacctgcagctgaacctgctgagcaagagcaaggtgtatgaagatcctgccctgagcgccatcttcctgcacaacaactacaactacatcctgaagagcctggagaagtctgagctgatccagctggtggccgtgacccagaagacagctgagaggagctaccgggagcacatcgagcagcagatccagacctaccagaggtcctggctgaaggtgacagactacatcgccgagaagaacctgcctgtgttccagcccggggtgaagctgcgggacaaggagcggcagatcatcaaggagcgcttcaagggcttcaatgatggcctggaggagctgtgcaagatccagaaggcctgggccatcccagacacagagcagagggaccgcatccggcaggcccagaagaccatcgtgaaggagacctatggagccttcctgcagaagtttggatctgtgcccttcaccaagaaccctgagaagtacatcaagtatggagtggagcaggtgggggacatgattgaccggctgtttgacaccagcgcctag

SEQ ID NO: 25780 - DNA, 1866 bp, Artificial Sequence
  derived and/or modified sequence
atggtgtccatcctgagcagctttgagagccggctgatgaagctggagaacagcatcatccctgtgcacaagcagacagagaacctgcagaggctgcaggagaatgtggagaagaccctgagctgcctggaccacgtgatctcctactaccacgtggccagtgacacagagaagatcatccgggagggccccaccggccgcctggaggagtacctgggctccatggccaagatccagaaggctgtggagtacttccaggacaacagcccagacagccctgagctgaacaaggtgaagctgctgtttgagcggggcaaggaggccctggagagcgagttccgcagcctgatgaccaggcacagcaaggtggtgtcccctgtgctgatcctggacctgatctctggagatgatgacctggaggcccaggaggatgtgaccctggagcacctgcctgagagcgtgctgcaggatgtgatccgcatcagccgctggctggtggagtatggcaggaaccaggacttcatgaatgtgtactaccagatccgcagcagccagctggacaggagcatcaagggcctgaaggagcacttccacaagagcagcagcagcagcggcgtgccctacagccctgccatccccaacaagaggaaggacacccccaccaagaagcctgtgaagaggcctggcaccatcaggaaggcccagaacctgctgaagcagtacagccagcacggcctggatggcaagaagggcggcagcaacctgatccccctggagggcagagatgacatgctggatgtggagacagatgcctacatccactgtgtgtctgcctttgtgaagctggcccagagcgagtaccagctgctggccgacatcatccctgagcaccaccagaagaagacctttgacagcctcatccaggatgccctggatggcctgatgctggagggagaaaatattgtgtctgctgccaggaaggccatcgtgagacatgacttcagcacagtgctgactgtgttccccatcctgcggcacctgaagcagaccaagccagagtttgaccaggtgctgcagggcacagctgccagcaccaagaacaagctgcccggcctcatcacctccatggagaccatcggggccaaggccctggaggactttgctgacaacatcaagaatgaccctgacaaggagtacaacatgcccaaggatggcaccgtgcatgagctgaccagcaatgccatcctcttcctgcagcagctgctggacttccaggagacagctggggccatgctggccagccagggcaaggtgctgggcaacctgcagctgaacctgctgagcaagagcaaggtgtatgaggaccctgccctgagcgccatcttcctgcacaacaactacaactacatcctgaagagcctggagaagtctgagctgatccagctggtggccgtgacccagaagacagctgagaggagctaccgggagcacatcgagcagcagatccagacctaccagaggtcctggctgaaggtgacagactacatcgccgagaagaacctgcccgtcttccagcccggggtgaagctgcgggacaaggagcggcagatcatcaaggagcgcttcaagggcttcaatgatggcctggaggagctgtgcaagatccagaaggcctgggccatcccagacacagagcagagggaccgcatccggcaggcccagaagaccatcgtgaaggagacctacggggccttcctgcagaagtttggatctgtgcccttcaccaagaaccctgagaagtacatcaagtatggagtggagcaggtgggggacatgattgaccggctgtttgacaccagcgcctag

SEQ ID NO: 25781 - DNA, 2055 bp, Artificial Sequence
  derived and/or modified sequence
atgatccccccccaggaggccagcgcccggcggcgggagatcgaggacaaattgaaacaagaggaggagaccttatcctttatccgcgatagcctagagaagtctgaccagctgaccaaaaacatggtgtcaattctgagtagcttcgagtcacgtctgatgaaactggaaaacagcattattcccgtgcacaaacagaccgaaaatttacaacgcctgcaagaaaatgtcgaaaagacccttagttgccttgaccatgtgatttcatattaccatgtcgcatccgacacggagaaaattatacgggaaggcccaactgggcggttggaagagtacttgggctcgatggccaagatccagaaggccgtagaatatttccaggataactctccggattcccctgagctaaataaggtgaagctactctttgagcgggggaaagaggcactggagagcgagttccgctcattgatgacccgccattctaaggtggtttcacctgtgctcatactggacctcatctctggggatgacgatcttgaggctcaggaggatgtcaccctcgaacatttaccagagtctgtgttacaggacgttattcggattagccgctggctggtagagtatggccgaaatcaagactttatgaatgtctactatcagattagaagcagccaactggacagatcaatcaaaggccttaaggagcatttccataaaagttccagcagcagcggcgtgccatatagccctgctattcccaacaaaagaaaagacacgcccacaaagaagccagtcaaaaggccaggcactattagaaaggcacaaaacttgcttaagcagtacagccagcacggcttagacggcaaaaaagggggctctaatctgattcccctagagggcagagatgatatgttagacgtggaaaccgacgcctacatccactgcgtgtcagcctttgttaagctcgctcagtccgagtatcagctcctcgccgatatcattcccgagcatcaccagaagaaaaccttcgacagcctgattcaggacgcgctggatggcctaatgctggagggagagaacatcgtgtcggcggcccgtaaagcgatcgttaggcacgatttctccacagtgctgacagtattccctatccttcggcatctgaagcagaccaagcccgagtttgatcaagtactgcaggggacagctgcttccacgaaaaataagctcccaggactgattacaagtatggagaccattggagccaaggcccttgaagacttcgcagacaatatcaaaaatgatcccgacaaggagtacaatatgcctaaggacggaacagtccacgagcttactagcaatgctatcctgttcttgcagcaacttttggattttcaggaaaccgccggggcaatgttagcatctcaggagacgtcgagttctgctacctcttactccagcgaattttccaaaagactcctttcaacgtatatttgtaaggtcctgggcaacctacagctcaacctgttatccaagtcaaaggtatacgaggatccagctctttccgcaatctttctgcacaataactataattacatactcaagtccttagagaaatccgaattaattcagctcgtggcagtcacacagaagacagccgaacggtcctaccgcgagcatatcgaacaacagattcagacttatcagcggtcatggttaaaggtcacggactatattgctgaaaagaatctgccagtgtttcaacccggagtgaagttacgagataaggaacgtcagattattaaggagagattcaaaggatttaacgacgggctcgaggagctgtgtaaaatccagaaagcgtgggccattccagacactgaacagcgtgataggattagacaggctcagaagaccattgtaaaagaaacgtatggagcctttctgcaaaaatttggctctgtgccctttactaagaatccagagaaatatatcaagtacggcgttgaacaggtgggcgatatgatcgaccggctgttcgatacaagtgcttag

SEQ ID NO: 25782 - DNA, 1866 bp, Artificial Sequence
  derived and/or modified sequence
atggtgagcatcctgagcagcttcgagagccggctgatgaagctggagaactcgatcattccggtccacaagcagaccgaaaacctgcaacggttgcaggagaatgtggaaaaaaccctatcatgcctcgatcatgtgatttcttattatcatgtggctagcgatacagaaaagattatccgagagggccccactggacgtctggaggagtatctgggtagcatggccaaaatccaaaaggccgtggagtatttccaagataatagccccgactcacctgagctgaacaaagtcaaactgctgttcgagagagggaaggaggccctggagagtgagtttcgaagtctaatgactcgccacagcaaggtcgtgtctcccgtgctgatcctggacctgatctccggcgacgatgacctggaggcccaggaggacgtgactcttgagcacctccctgaatctgtgttgcaagatgtgattcgtattagtagatggctggtggaatatggaagaaatcaagatttcatgaatgtgtactaccagatccgcagttctcagctcgatcggagcattaagggcctcaaagagcattttcacaaatcatccagctctagtggcgtgccatactccccagcaatcccgaacaagcgcaaggatacgccaacgaagaagccggtaaaacggcccggcacaatccggaaagcgcaaaatcttctgaaacagtattcacagcacggcctggatgggaaaaaaggcggttccaacctgataccgctggaaggacgcgatgatatgctagatgtggagaccgacgcctatatacactgcgtctctgcctttgtgaagctggcgcagagcgagtaccaattgctggcagatattatccctgaacatcaccagaaaaaaacatttgattctttaatccaagacgcactggacggtctgatgttggagggagagaatatcgtctctgccgcccggaaagctattgtgcggcacgacttcagcaccgtcctcaccgttttcccgatcctccgacacctcaagcagactaagccggaatttgatcaggtgttacagggaactgcagcatcaacaaaaaataagctgcccggcctgattacatcaatggagaccattggagcgaaggccctggaggacttcgccgataacataaagaacgatcctgataaggaatataatatgccaaaggacgggacagtgcacgagttgacgagtaatgctatactgtttttgcagcaacttttagacttccaggagaccgctggcgcaatgctggcatctcaaggcaaggtgctgggtaacctccaactcaatttgctgtccaaatcgaaggtctatgaagaccccgctctgagcgcaattttcctccacaataattacaattacattctgaaatcactggagaagtccgagctaatacagctcgtggccgtgacacagaagaccgccgagcggtcttatagggaacatattgaacagcagattcagacatatcagagaagctggttgaaagttactgactacatcgccgaaaaaaatctgcccgtttttcaacctggcgtgaaactgagagataaagaacgacaaataataaaggagcgctttaaaggctttaatgatggcctcgaagaactgtgtaagattcaaaaggcttgggcaatcccagacacagagcaacgggatagaattcgccaagcccagaaaacaattgttaaggaaacatacggagccttcctgcagaagttcggctctgtccccttcaccaagaatccagagaagtacatcaagtacggtgtggagcaggtgggcgatatgattgatcgactgtttgacacctcagcctag

SEQ ID NO: 25783 - DNA, 2055 bp, Artificial Sequence
  derived and/or modified sequence
atgatccccccccaggaggccagcgcccggcggcgggagatcgaggacaaattgaaacaagaggaagagaccttgtcctttatcagggatagcctcgagaagagcgaccagctgaccaagaatatggtctcaatactctcttcctttgagtcaaggcttatgaagctggaaaactctattattcccgtgcataagcagaccgaaaatcttcagagactgcaggaaaatgttgagaagaccttgagctgcctggaccacgttatatcctattatcatgtggcgtctgacacggagaagattatacgcgaaggcccaacaggccgtctggaggaatacctcggctccatggcaaaaatacagaaggccgttgagtatttccaagacaatagtcccgactcccctgagttgaacaaggttaaactgctatttgagagaggtaaggaagctttggagtcggagttccgatcgttgatgactcgccactcaaaggtagtgagccctgttcttatcttggatctgattagcggcgatgatgacctggaagctcaggaagatgtcaccttggaacatttgcccgagagtgtgttacaggacgtgattcggatatcacgatggttggtggaatacggtcgcaaccaggacttcatgaacgtctactatcagatccgaagcagccagctggatcgctccataaagggtctgaaggaacactttcacaagtcctcttcatcctccggagtgccctattcaccagccattcctaacaagcgcaaagatacacctactaagaaacccgtgaagcgcccaggtacaattcgcaaggcccagaatctgctgaaacagtactctcagcatgggcttgacggcaagaagggaggctctaatctcattccgcttgaaggtcgagacgatatgcttgacgtagaaacagatgcctatatccattgtgtgtcagcttttgtgaagctcgctcaaagcgagtatcagcttctcgctgacatcatccctgagcaccaccagaaaaagacatttgattctttgatacaggatgctctagacggtcttatgctggaaggggagaatatagtatctgctgcacggaaggccatcgtgcgtcatgacttctccacagtactcacagttttccccatcctgcggcatttgaagcagacaaaacctgagtttgatcaggtcctgcaggggaccgccgcgtcaactaaaaacaagctgccgggattgataacgagcatggagacaattggagcgaaagcactcgaggatttcgccgacaatattaaaaatgatccagataaggaatataatatgccgaaagacggaacagtccatgagctcacatcaaacgctattctattcctgcaacaactgctcgacttccaggagaccgccggagcaatgcttgcttcccaagaaacaagttcgtcggcaactagctactccagcgaattctctaagcgattgctgagcacttacatctgtaaggttttggggaacttacagttgaatctgctgtctaaaagtaaggtctacgaagaccccgctctgagtgctattttcctgcacaacaactataattacattttgaaaagcttggaaaagagcgaacttattcagctggttgcagttactcagaagacagccgaacggtcctatagagaacacatcgaacagcagattcagacctaccagcgtagttggttgaaagtgacagactacatcgctgagaagaacctacctgtgtttcagccaggggtaaaattaagagataaggaacgacagatcatcaaggagcggtttaaaggctttaatgatggactggaagagctgtgtaaaatccaaaaggcatgggccataccagacacggaacagagggaccgaattagacaagcgcagaaaaccattgtaaaagagacatacggcgcttttcttcagaagttcggctccgttccattcactaagaatcctgagaaatatattaagtatggggtggagcaggtgggcgatatgatcgaccgactgttcgatacaagcgcttag

SEQ ID NO: 25784 - DNA, 2055 bp, Artificial Sequence
  derived and/or modified sequence
atgataccgcctcaggaggctagtgccaggcggagagaaatcgaggacaagctgaaacaagaggaggagactctttctttcattagagatagcttagagaaatctgaccagttgaccaagaacatggtttcgattcttagtagcttcgaatcgcggctcatgaaactggaaaactctatcataccagtgcataaacagactgagaatcttcaaaggcttcaagaaaatgttgagaaaaccctctcctgcctggatcacgtgatttcatattaccacgtggcctccgataccgaaaaaattatccgcgagggccctaccggtagactcgaagagtatctcgggtctatggcgaagattcagaaagccgtggagtacttccaggataattcccctgacagcccagagctgaacaaggtgaaactgttgtttgagcggggtaaagaagctctggagagtgaatttagatctcttatgactcgccactctaaggttgtatcccccgtactcatcttagatctaattagtggggatgatgacctcgaggcccaggaagatgtgaccttggagcacctgcctgagtcagtgctgcaggatgtcatccggatcagcagatggttggtggagtacggccgtaaccaggatttcatgaatgtgtactaccagattcgcagtagtcaactggataggtctatcaaagggcttaaagagcactttcacaagtcttcctcgtcatcaggcgtgccgtactcccctgcaatccctaataaaaggaaagacacaccaacaaagaagcccgtgaaacgacctggtaccattagaaaggcccagaatctactgaagcagtacagccagcacggactggacggtaagaagggcggttctaacctgattccacttgaaggccgagacgatatgcttgatgtggaaacagacgcctacatccactgcgtgtccgctttcgttaagcttgcccagagcgagtatcaactgctcgccgacatcataccagagcaccaccaaaagaaaacatttgactccctgatacaagacgctttggatggtctgatgctcgagggagagaacattgtctctgctgccaggaaagcaatagtgcggcacgatttctctacagtccttacagtttttcccatcttgcggcatctcaaacagacgaagccagagttcgaccaggtacttcagggcacagccgcatctaccaagaataagctacccggtcttattacctccatggaaaccatcggcgctaaagccttggaagattttgctgataacatcaagaatgacccagacaaggagtacaatatgcccaaggatggcactgtgcacgagctcaccagcaatgccatattatttctgcagcaacttttggactttcaggaaaccgccggtgccatgctggcaagccaggagaccagcagctctgctacttcttacagttcggagttttcaaagcgccttctttctacatacatctgtaaagtgctgggtaatcttcagctgaatttgctgtcaaagtccaaggtttatgaggacccagctctttcggctatctttctgcacaacaattacaattatatactcaaatctcttgagaagtcggaactaatccagttagtggccgttacccagaagaccgcagagcggagttacagagagcacatagaacaacagattcagacataccaaaggtcctggttaaaggtcacggactatattgccgagaaaaatctccctgtctttcagcctggtgttaagctacgcgacaaagaacgccagattattaaggaaagattcaaggggttcaatgacggcctcgaagagctgtgtaagatacagaaggcttgggccattcctgataccgaacaaagggaccgaataaggcaggctcaaaagaccatagtgaaggaaacgtacggagcttttctgcaaaaattcggctctgtgccgttcacaaaaaatccagagaagtatataaaatacggagtcgaacaggtaggcgacatgattgatcggctcttcgacacgagcgcatag

SEQ ID NO: 25785 - DNA, 2088 bp, Artificial Sequence
  derived and/or modified sequence
ggggagtgggagccgcggggttcagagcgatgattcccccacaggaggcatccgctcgacggcgggagattgaggacaagctgaagcaggaggaggagactctgtccttcatccgagacagcctggagaagagcgaccagctcactaagaacatggtgtctatcttatcatcctttgagagccgccttatgaagctggagaactccatcatccctgtgcacaagcagacggagaatctgcagcggctgcaggagaatgttgagaagacgctgtcctgcctggaccatgtcatcagctactaccatgtggccagtgacactgagaagatcatcagagagggccccacaggtaggctggaagagtacctgggaagcatggccaagattcagaaggcagtggagtatttccaggacaacagcccagacagcccggaactcaacaaagtgaaactgctctttgagcgcgggaaggaggccctggagtccgaatttcgcagcctgatgacgcggcacagtaaggtcgtctcgcccgtgctcatcttggatctgatcagtggtgacgatgatctggaggcccaggaggacgtgaccctggagcacctgcccgagagcgtgctccaggatgtcattcgcatctcccgctggctggtggaatatggccgcaaccaagatttcatgaacgtctactaccagatacgctccagccagctggaccgctccatcaaaggactgaaggagcatttccataagagcagttcttcctctggggttccctactcccctgctatccccaacaagaggaaagacacacctaccaagaagccagtcaagcggccagggacgatccgtaaggctcagaaccttctgaaacagtattcccagcatggtctagatgggaaaaaggggggctctaacctcattcctctggaagggagagatgacatgctggacgtggagaccgatgcctacatccactgcgtcagtgccttcgtcaagctggcgcagagcgagtaccagctgctggccgacatcatccccgagcaccaccagaagaagaccttcgactccctgatacaggatgccctggatgggctgatgcttgaaggggagaacatcgtgtctgctgcccggaaggccattgtgcgacacgacttctccacggtgctcaccgtcttccccatcctgcgacacctcaagcagaccaagcctgagtttgaccaggtgctccagggcacggctgccagcacaaagaacaagctgcctggcctcatcacatccatggagaccatcggtgccaaagcgctggaggacttcgcagacaacatcaagaatgacccggacaaggagtacaacatgccgaaggacggcaccgtacacgagctcaccagcaatgccatcctcttcctgcagcagcttttggacttccaggagacggcaggcgccatgctggcctcccaaggtaaagtgctgggcaacctgcagttgaacttgctgagcaagtccaaggtgtacgaggacccagctctgagcgccatcttcctgcacaacaactacaattacatcctcaagtccctggagaagtctgaactgatccagctggtggcagtgacacagaagactgctgagcgctcctaccgggagcacattgagcagcagatccagacctaccagcgcagctggttaaaggtgactgattacatcgcagagaagaatctacctgtgttccagccgggagtcaagctccgggacaaggagcggcagattatcaaggagcgttttaagggcttcaatgatggcctcgaagaactgtgcaaaatccagaaggcctgggctattccagacacagagcagagggacaggattcgccaggcccagaagaccattgtcaaggagacctacggggcctttctacagaagtttggcagcgtgcccttcaccaagaacccggagaagtacatcaagtacggggtggagcaggtgggcgacatgatcgatcgccttttcgacacctctgcctgagcctgctgctagccctgcctggttccaccagactggcgtgtcattggacagataaaccagtgttagcttg

SEQ ID NO: 25786 - DNA, 1866 bp, Artificial Sequence
  derived and/or modified sequence
atggtgtccattctgtcaagtttcgaatctagactaatgaagcttgagaattcaataatcccagttcacaagcagactgagaacctacagcggctgcaggaaaatgtggagaaaaccctgtcttgtttggatcacgtcattagctactatcacgtcgcctcagacacagaaaagataattagagagggccctacgggaaggctggaagagtatttggggagcatggccaaaattcagaaagccgtggaatacttccaggataattcgcccgattcccccgaattgaacaaggttaagctcctcttcgagcggggtaaggaggcgctggaaagcgagttccgatctctgatgactagacatagcaaagtggttagcccagttctgatacttgacctgatatccggcgacgacgacctcgaggcccaggaagatgttaccctggaacacctccccgagtcagtactccaggatgtgataaggatcagccgttggctggttgagtatggcaggaaccaggattttatgaatgtgtattaccagatccggtctagccagctggaccggagcattaaaggactcaaggagcattttcataagtcatcctccagctctggagtgccatactccccagcaatccccaataagcggaaagacacaccaactaagaaacccgttaagaggcctggtacaatacgtaaagctcagaatctgctgaagcagtacagccagcatgggttggacggcaagaagggaggatccaatctgatcccccttgaaggacgggacgatatgcttgatgtggagacagacgcttacattcattgtgttagcgcgttcgttaagcttgcccagagtgagtatcagctgctagcggatatcattccagagcatcatcaaaaaaaaacattcgacagcttgatccaggacgccttagatggcctcatgctggagggagaaaacatcgtcagcgccgctcgaaaggcgatcgtgcgacatgatttctctactgtcctgactgtgtttcccatcctccgtcacctcaaacagaccaaaccagagtttgatcaagtgcttcagggaaccgccgcaagcacaaagaacaaactcccaggactgataacatcaatggagaccatcggcgctaaggccctagaggatttcgctgacaacattaagaatgacccagacaaagagtataacatgcccaaagacggcaccgttcacgagcttacctccaacgccatcctgttcctccagcaattgcttgattttcaggaaactgctggggctatgctggcatcacaagggaaggtcctgggaaacctgcaactgaatctgttgtctaagtcaaaagtctatgaagaccctgcactgagcgctatcttccttcacaacaattataactatatcctgaaatctctggaaaaatccgagctcatccagttagtagccgtgacacagaagacagctgagcgttcttaccgagagcatatcgagcagcagatacagacctatcaacgcagctggctcaaggtgactgactatattgctgaaaaaaatctccctgtattccaacccggagtgaaacttcgcgacaaggagcgccagattatcaaggaacgctttaaaggatttaatgacggcctggaagagctgtgcaaaattcaaaaggcctgggccattccagatacagagcagagagatcgcatccgacaagcccagaaaacgatcgtaaaagagacttacggggcttttctacaaaagttcgggtccgtgccctttacgaagaaccccgagaaatatatcaaatatggcgtggaacaggttggagacatgattgacagactattcgacacttctgcctag

SEQ ID NO: 25787 - DNA, 2055 bp, Artificial Sequence
  derived and/or modified sequence
atgatccctccccaggaagcatctgccaggaggcgagaaatagaggataagcttaagcaggaagaggagaccctctcctttataagggactccctggagaagagtgaccagcttactaagaatatggttagcatcttgagttctttcgagtctcgactgatgaagctggaaaatagcattatccccgtgcataaacagactgagaacctgcagagactccaggagaatgtggagaagactctttcctgcctggaccatgtaatcagttattatcacgtagctagcgacactgaaaagatcatacgcgagggacctacaggtcgccttgaggaatacctcggctcgatggctaagatacaaaaggcagttgaatactttcaggacaattctcctgatagtccagagttgaacaaggtgaagttgcttttcgagcggggtaaggaggccctagagagtgagttccggagtcttatgaccaggcacagtaaagtggttagcccagtgctgattttagacctgatcagcggagatgacgacctggaggcacaagaggacgtgacactggaacacctgcccgaatctgtgcttcaagacgtgattagaatcagcagatggctggtcgagtatggccgtaatcaggactttatgaatgtctattatcagatccgctcaagtcaactggataggtccatcaagggcctcaaggagcatttccacaagtcttccagttcgtccggcgtgccttatagccccgcaatcccaaacaagagaaaggatacaccaaccaagaaaccagtgaagcgacctggcactattagaaaggcccagaacctactcaaacagtatagtcaacacggacttgacgggaaaaagggtggatctaacctgattccactagaaggcagggatgacatgcttgatgtcgaaacagacgcctatatccactgtgtcagcgcctttgtgaagctcgctcaatcagaatatcagctgctggccgatattatcccagagcaccatcaaaagaaaacatttgactccctgattcaggatgcccttgacggactgatgctggaaggtgaaaacatcgtttctgcagccagaaaagccatcgtgagacatgatttctccaccgttctgaccgtcttccccatcctgaggcacctcaagcagactaaaccggagttcgatcaagtcctgcaagggaccgcggcaagcacaaagaataaattaccaggcttgattacttccatggagaccataggagccaaagctctcgaggatttcgctgataatattaagaatgatcccgataaagagtacaatatgccaaaggacggtactgttcacgagctgacctccaacgcaatcctgtttctgcaacagttgctcgactttcaggagactgccggtgcgatgctcgctagccaagagaccagctctagtgccacttcttactcatccgagtttagcaagcgtctcctgagcacatatatctgtaaggtgctgggcaacctgcagctgaatctcttatccaaatctaaggtgtatgaggatcccgctttatccgccatctttctgcacaataactataactacatactaaaatctctggaaaagtctgagctgatccagctcgttgccgtgacacagaaaaccgctgagaggtcataccgcgagcatatcgagcaacagattcagacgtaccagagatcatggttgaaagtgactgactatatcgcagaaaaaaacttgccagtgtttcagcccggagtcaagctgcgcgacaaggaaagacagataattaaggagcgcttcaaaggttttaatgacggacttgaggaactgtgtaagatccagaaagcttgggcaatcccagacaccgaacagcgcgatcggatcagacaagcacagaagaccatcgtgaaggagacctatggagcttttctgcaaaaattcgggtcagtgcccttcacaaagaaccccgagaagtacatcaagtatggtgtggaacaagttggcgatatgatcgataggctgtttgatacctccgcctag

SEQ ID NO: 25788 - DNA, 4751 bp, Artificial Sequence
  derived and/or modified sequence
ggacgggggcccggtgggcccgcggaggaaagatactggggagtgggagccgcggggttcagagcgatgattcccccacaggaggcatccgctcgacggcgggagattgaggacaagctgaagcaggaggaggagactctgtccttcatccgagacagcctggagaagagcgaccagctcactaagaacatggtgtctatcttatcatcctttgagagccgccttatgaagctggagaactccatcatccctgtgcacaagcagacggagaatctgcagcggctgcaggagaatgttgagaagacgctgtcctgcctggaccatgtcatcagctactaccatgtggccagtgacactgagaagatcatcagagagggccccacaggtaggctggaagagtacctgggaagcatggccaagattcagaaggcagtggagtatttccaggacaacagcccagacagcccggaactcaacaaagtgaaactgctctttgagcgcgggaaggaggccctggagtccgaatttcgcagcctgatgacgcggcacagtaaggtcgtctcgcccgtgctcatcttggatctgatcagtggtgacgatgatctggaggcccaggaggacgtgaccctggagcacctgcccgagagcgtgctccaggatgtcattcgcatctcccgctggctggtggaatatggccgcaaccaagatttcatgaacgtctactaccagatacgctccagccagctggaccgctccatcaaaggactgaaggagcatttccataagagcagttcttcctctggggttccctactcccctgctatccccaacaagaggaaagacacacctaccaagaagccagtcaagcggccagggacgatccgtaaggctcagaaccttctgaaacagtattcccagcatggtctagatgggaaaaaggggggctctaacctcattcctctggaagggagagatgacatgctggacgtggagaccgatgcctacatccactgcgtcagtgccttcgtcaagctggcgcagagcgagtaccagctgctggccgacatcatccccgagcaccaccagaagaagaccttcgactccctgatacaggatgccctggatgggctgatgcttgaaggggagaacatcgtgtctgctgcccggaaggccattgtgcgacacgacttctccacggtgctcaccgtcttccccatcctgcgacacctcaagcagaccaagcctgagtttgaccaggtgctccagggcacggctgccagcacaaagaacaagctgcctggcctcatcacatccatggagaccatcggtgccaaagcgctggaggacttcgcagacaacatcaagaatgacccggacaaggagtacaacatgccgaaggacggcaccgtacacgagctcaccagcaatgccatcctcttcctgcagcagcttttggacttccaggagacggcaggcgccatgctggcctcccaagagaccagctcttcggccaccagctacagctctgagttcagcaagcggctgctaagcacctatatctgtaaagtgctgggcaacctgcagttgaacttgctgagcaagtccaaggtgtacgaggacccagctctgagcgccatcttcctgcacaacaactacaattacatcctcaagtccctggagaagtctgaactgatccagctggtggcagtgacacagaagactgctgagcgctcctaccgggagcacattgagcagcagatccagacctaccagcgcagctggttaaaggtgactgattacatcgcagagaagaatctacctgtgttccagccgggagtcaagctccgggacaaggagcggcagattatcaaggagcgttttaagggcttcaatgatggcctcgaagaactgtgcaaaatccagaaggcctgggctattccagacacagagcagagggacaggattcgccaggcccagaagaccattgtcaaggagacctacggggcctttctacagaagtttggcagcgtgcccttcaccaagaacccggagaagtacatcaagtacggggtggagcaggtgggcgacatgatcgatcgccttttcgacacctctgcctgagcctgctgctagccctgcctggttccaccagactggcgtgtcattggacagataaaccagtgttagcttgcctctgggctgggtgagcttgaagtcctctgggacagagacctgtctccacgcctccgggagctgtgtccctgagccccctagtcctggctcctgctttttccccacagcccgtgttcccagccgaaccagcactctcccggaagcctggggtccctccacaccttggcttttatgaccctgatggcttctgaaacaggaaaagagagaaggaagacagaggcctgtgcccactgctgctccatgtgtaccaagagcagcagggcagaagggccctccctccagcctaggtcagaggtggggacagagaactcccctacagcccagagatgtggcagggctcagagaagcagccagagctcctggaggaaaggcagtcgggactgaccccctctcttaaaacacattcccgcccgcccacaggcctgaggtctgggacctttccctcccaggagtcccctaggtggctgggggaggcaggctcactggccattttccctagagtccagcacactgcaggaggcgttcggaggaggagttccgccccaccctctacagccttcctcaggcccctgtctctggcccccagcctcagtgcctcttggcccagggccaggcagtcgtggttgcagaaggagcaattaggctgcctgcctgtgggctgggagacagggacaatggggaaaagttaaggagcaaaatgggggttggaagcaaaaaatagggccccacctatttaggacgagattgaagactgacccttgaggcacacttgcactggagatgggtttatttcacgctctgtgcttgtgtgctagcggagggagagctcagggtggcttaatccagaggccctgtcatggcccgcccccagccatgggaaagcaaacttcatcctaaggtgtgcagcccaggccctgcccctttacagtctaggccgcctgccatggggtgcagcctctccaggggctgcgtcagacttgcacgctgcccacatccagattcctgcaaagacgaattgggtgcacagcaccccaaccacatacacgaggaagaagatgcggtcagcagtctcaggccagcttctctgtgacccctttactcctctggagggctctgtggggagagatacagggaaaggagctgttcttcaaggtcccctcaacatgagcggaagagcgaaccccaggggtcatcagcctgtatcgcttcctttcttagattctcagctgatgaaaatttgggtctggcccatttcaggccatcttcagttgaagaaacaccctcttaggctgtgcaaggcatgggttatcaggggattgaggtcacctgggacttcagggaggctcagcttgctccctgccccagacctgtttcttctaagggaggaggacatggtggagaccagggacaggagagccagcagggtggatgcaaggggcctctacccacacctggacctccgtgccctcaccccagccctaggtgtgcacctaggcctcattccttaccccccagcccctgcccaccttcagcaggatgaggccctgggttgccgtgctctcgctgttcccctctcggggctgggctggggccgctcttggccccaaggttgccccgggccagcagcccagccagcagcacagtctctatggtgctgaggaagagcagcagcagcaggatggtgaagtagtaaactgggggaggcagggcacagggagatgctcaggggccagtccctgtgtctctggtgcccagcgagctgagcaccagtgggtgaccggggagaaacagggcagactgggtaagggagcagggcttactgagcagtgggttgcaggaggaggagctgggcagggcctgcaccagggaggagtggaggacgaggtaactcagcagcaatgtcaccttgtagcctatgcgctcaatggcccggaggggcagcaaccccccgcacacgtcagccaacagcagtgcctctgcaggcaccaagagagcgatgatggacttgagcgccgtgttcttcagcctcagctggaaggggaaaagtcagggccttcccggcgggggggaaggaggtgggcatcgggggcatggggcctggcctctggccgtgcatcctcactcccacccgcctccagcagccctctgtcggcctcctcccgacttgactcaccgtcacctggaagcagggcaccagctgctggggtgggacttgggtcttcagatcataaactacgtattccctcttgacactcacaatctcgttcaccacgtgggcctggaactctaactccatcgctgaggggtgggaatgagaactatgaaccaggaaggagagatcccagctgccaagtctgggggtagcagactggagcccaggggtgatggagacttttgatggcttttggcagggacagacttggacacaaaaccgatccatagaagggcttcccaaaccttgttttgcaacatcccaaattgtctccagttgaaggaaggcctttatcagattcatagatgagctttcattgtaaaaataaatgtactttgcaccactt

SEQ ID NO: 25789 - protein, 403 aa, Artificial Sequence
  derived and/or modified sequence
MASALRPPRVPKPKGVLPSHYYESFLEKKGPCDRDYKKFWAGLQGLTIYFYNSNRDFQHVEKLNLGAFEKLTDEIPWGSSRDPGTHFSLILRDQEIKFKVETLECREMWKGFILTVVELRVPTDLTLLPGHLYMMSEVLAKEEARRALETPSCFLKVSRLEAQLLLERYPECGNLLLRPSGDGADGVSVTTRQMHNGTHVVRHYKVKREGPKYVIDVEQPFSCTSLDAVVNYFVSHTKKALVPFLLDEDYEKVLGYVEADKENGENVWVAPSAPGPGPAPCTGGPKPLSPASSQDKLPPLPPLPNQEENYVTPIGDGPAVDYENQDVASSSWPVILKPKKLPKPPAKLPKPPVGPKPEPKVFNGGLGRKLPVSSAQPLFPTAGLADMTAELQKKLEKRRALEH

SEQ ID NO: 25790 - DNA, 1212 bp, Artificial Sequence
  derived and/or modified sequence
atggccagcgccctgagaccccccagagtgcccaagcccaagggcgtgctgcccagccactactacgagagcttcctggagaagaagggcccctgcgacagagactacaagaagttctgggccggcctgcagggcctgaccatctacttctacaacagcaacagagacttccagcacgtggagaagctgaacctgggcgccttcgagaagctgaccgacgagatcccctggggcagcagcagagaccccggcacccacttcagcctgatcctgagagaccaggagatcaagttcaaggtggagaccctggagtgcagagagatgtggaagggcttcatcctgaccgtggtggagctgagagtgcccaccgacctgaccctgctgcccggccacctgtacatgatgagcgaggtgctggccaaggaggaggccagaagagccctggagacccccagctgcttcctgaaggtgagcagactggaggcccagctgctgctggagagataccccgagtgcggcaacctgctgctgagacccagcggcgacggcgccgacggcgtgagcgtgaccaccagacagatgcacaacggcacccacgtggtgagacactacaaggtgaagagagagggccccaagtacgtgatcgacgtggagcagcccttcagctgcaccagcctggacgccgtggtgaactacttcgtgagccacaccaagaaggccctggtgcccttcctgctggacgaggactacgagaaggtgctgggctacgtggaggccgacaaggagaacggcgagaacgtgtgggtggcccccagcgcccccggccccggccccgccccctgcaccggcggccccaagcccctgagccccgccagcagccaggacaagctgccccccctgccccccctgcccaaccaggaggagaactacgtgacccccatcggcgacggccccgccgtggactacgagaaccaggacgtggccagcagcagctggcccgtgatcctgaagcccaagaagctgcccaagccccccgccaagctgcccaagccccccgtgggccccaagcccgagcccaaggtgttcaacggcggcctgggcagaaagctgcccgtgagcagcgcccagcccctgttccccaccgccggcctggccgacatgaccgccgagctgcagaagaagctggagaagagaagagccctggagcactag

SEQ ID NO: 25791 - DNA, 1212 bp, Artificial Sequence
  derived and/or modified sequence
atggcatccgcgctccggcctcctcgcgtgcccaaaccaaagggggtgctgccaagtcactactacgaaagttttcttgagaagaaggggccctgcgatcgcgattacaagaagttttgggccgggctgcagggtcttactatttacttttacaactccaaccgcgatttccagcatgttgagaaactgaaccttggagcctttgagaaacttacggatgagataccctggggaagttcccgggacccagggacccacttcagcttaatactacgggatcaggaaattaagttcaaggtcgaaaccctcgaatgtagagagatgtggaaagggtttattcttactgtggtggagctgcgggtgccaacagacctcactttgctgcctggccacctgtatatgatgagtgaggttttagctaaagaggaagcccggagggcactggaaactcccagttgttttctcaaggtttctcggctggaggcccagctgttacttgaacggtatccagagtgcggcaatctcctgctgaggccgtccggagatggagctgacggagtctctgtgacaacacggcaaatgcacaatgggacacatgtggtcagacactacaaagtgaagagagaaggcccaaagtacgtaattgacgtcgagcagcccttttcctgcacttctctcgatgccgtggtgaattattttgtgtcccatacaaagaaagcgctggtgccatttttactggacgaagactacgaaaaggttttgggctatgtggaagcagacaaggagaatggggagaatgtgtgggtggccccgagcgccccgggcccaggaccagccccatgtacaggcgggcctaaacctctttcgcctgcctccagtcaggataaactgccccccttgcctccccttccgaatcaggaagaaaattacgttacaccaatcggcgatggtcccgccgttgactatgagaaccaggatgtcgcatcctcgtcctggcctgtcattctcaaacctaagaagctcccgaaacccccagctaagctgcccaaaccacccgtgggaccgaaaccggagccaaaggtgtttaatggcggcctaggaaggaaactgcccgtgagcagcgctcagcccctcttcccaaccgcaggcctcgccgacatgactgccgaactgcagaagaaactggagaaaaggagagctcttgaacattag

SEQ ID NO: 25792 - DNA, 1212 bp, Artificial Sequence
  derived and/or modified sequence
atggccagcgccctgcggcccccccgggtgcccaagcccaagggcgtgctgcccagccactactatgagagcttcctggagaagaagggcccctgtgaccgggactacaagaagttctgggccggcctgcagggcctgaccatctacttctacaacagcaacagagacttccagcacgtggagaagctgaacctgggcgcctttgagaagctgacagatgagatcccctggggcagcagccgggaccccggcacccacttcagcctcatcctgcgggaccaggagatcaagttcaaggtggagaccctggagtgccgggagatgtggaagggcttcatcctgactgtggtggagctgcgggtgcccacagacctgaccctgctgcccggccacctgtacatgatgtctgaggtgctggccaaggaggaggcccggcgggccctggagacccccagctgcttcctgaaggtgtcccggctggaggcccagctgctgctggagcgctacccagaatgtggcaacctgctgctgcggcccagcggagatggagcagatggagtgtctgtgaccacccggcagatgcacaacggcacccacgtggtgcgccactacaaggtgaagcgggagggccccaagtatgtgattgatgtggagcagcccttcagctgcaccagcctggatgctgtggtgaactactttgtgagccacaccaagaaggccctggtgcccttcctgctggatgaggactatgagaaggtgctgggctacgtggaggccgacaaggaaaatggagaaaatgtgtgggtggcccccagcgcccctggccctggccctgccccctgcaccggcggccccaagcccctgagccctgccagcagccaggacaagctgccccccctgccccccctgcccaaccaggaggagaactacgtgacccccatcggagatggccctgctgtggactatgagaaccaggatgtggccagcagctcctggcctgtgatcctgaagcccaagaagctgcccaagcccccagccaagctgcccaagccccctgtgggccccaagccagagcccaaggtgttcaatggaggcctgggcaggaagctgcctgtgagcagcgcccagcccctcttccccacagctggcctggccgacatgacagctgagctgcagaagaagctggagaagaggcgggccctggagcactag

SEQ ID NO: 25793 - DNA, 1212 bp, Artificial Sequence
  derived and/or modified sequence
atggccagcgccctgcggcccccccgggtgcccaagcccaagggcgtgctgccaagccactattatgaatcattcttggaaaaaaaggggccttgcgaccgggactacaagaaattttgggccggactgcagggcttgacaatctatttctacaactctaatagagacttccagcacgtcgagaagcttaatctcggagccttcgaaaagctcactgatgaaataccttggggatcgagcagggatcccggcacccacttttctctgattctgagagaccaagaaatcaaatttaaggttgagacattagaatgtcgtgaaatgtggaaaggtttcattttgacagtggtggagctgcgggtccctaccgatctgacactgctgccagggcatctatatatgatgtcagaggtcctcgccaaggaagaagcccgtcgtgctcttgagaccccctcctgctttttaaaggtctcaaggctggaggcacagctgctgctggagagataccccgagtgtggaaatcttctcttgaggccgagcggtgacggcgctgatggcgtctccgtcactacccggcagatgcacaatggcacccatgtcgtgcggcactacaaagtgaaaagagaggggccaaagtatgtcattgacgtcgaacagccattctcttgcacatcacttgacgctgtagtgaattatttcgtgagccataccaaaaaagctctcgtcccctttttgctggatgaggattatgagaaggtgcttggctatgtggaggccgataaagagaacggtgagaatgtgtgggtagccccaagtgcgccgggccctgggcccgctccttgcaccgggggaccaaaaccgctatcccccgcgtctagccaggataagctgccacccctgccaccgctacccaaccaggaagagaactatgttacacctatcggggatggccctgctgtcgactatgaaaatcaggacgtggcctctagcagctggccggtgatactgaaaccaaagaaattaccgaagccacctgcaaagctgcctaaacccccggtaggacccaaacccgagccaaaggtttttaatggtggactgggcagaaaactgcccgtatcctctgcacagcccctatttccgacggccggactagccgatatgaccgcagagctgcagaagaagctagagaaacgcagggctctggaacattag

SEQ ID NO: 25794 - DNA, 1398 bp, Artificial Sequence
  derived and/or modified sequence
gacacaggaaactcccctgaaacctgtttctcagcttcccggcccagctggggcacccactggaaggagaggccaggcggaagaccctggctccgtcatggcctctgccctgaggccaccccgtgtccccaagcctaagggtgtcctgccttcacactactatgagagctttctagagaagaaggggccctgtgaccgggattacaagaagttctgggcaggcctgcagggtctcaccatttatttctacaatagcaatcgggacttccagcacgtggagaagctcaacttgggagcatttgagaaactcacagatgagattccctggggaagctcacgtgaccctggcacccacttcagcctgattctccgggatcaggagatcaagttcaaggtagagaccttggagtgtcgggaaatgtggaaaggcttcatcttaacggtggtggagctccgtgtcccgaccgacttgaccctgcttcctgggcacctatacatgatgtctgaagtcttggccaaagaggaggcgcgccgtgcactggagacaccctcgtgcttcctgaaggtgagccggctggaggcacaactgctcctggagcgctaccccgagtgcgggaacctgctgctgcggcccagcggggacggcgccgacggcgtgtcggtcaccacgcggcagatgcacaacgggacgcacgtggtccggcattacaaggtgaagcgggagggccccaagtacgtgatcgatgtggaacagccgttctcttgcacctccctggacgccgtggtcaactatttcgtgtcgcataccaaaaaggcgctggtgccattcctgttagacgaggactacgagaaggtgctaggctacgtggaagccgataaggagaatggcgagaatgtgtgggtggcgccctccgctccgggcccaggtcctgcaccctgcacaggtggccccaagccgctgtcacctgcgtctagccaggacaagctgcccccactgcccccactaccgaaccaggaagagaactacgtgacccccattggagatggcccagctgttgactatgagaaccaagatgtggcttcctctagttggccagtcatcctgaagccaaagaagttgccaaagcctcctgccaagcttccaaagccacccgttggacccaagccagagcccaaagtctttaatggtggcttgggcaggaagctgccagtcagttcagcccagcctctcttccccacagccgggctggcagacatgacggcagagctacagaagaagctggagaagaggcgggcactggagcactgattcggacacaccagggaccagcgggctagtcccagggcatggcccagcggccagattctttttcccaggattaaaactctgaccccagg

SEQ ID NO: 25795 - DNA, 1212 bp, Artificial Sequence
  derived and/or modified sequence
atggcgtcagcactgagaccacccagggtgcccaaaccgaaaggggttctgccttctcattactacgagagcttccttgagaagaaaggcccttgtgatcgcgactacaagaaattctgggctgggctgcaagggctcaccatctatttctacaattctaacagggacttccagcatgttgagaagctaaacctgggggcatttgagaaattgactgatgagatcccctggggctcatcccgagaccctggcactcacttttccctaattttgcgggaccaggagatcaaatttaaagttgagacattagagtgtagggaaatgtggaaggggttcatcctgaccgtagtggagctgcgcgttcccacagacctgaccctcctgcccggtcacctgtatatgatgtcagaggtgttggccaaggaagaagcgcgtcgggctctggagactccctcctgctttctcaaagtgtctcgacttgaggctcagctactcttagaaagataccctgaatgtgggaacctgcttctccgaccctctggagacggagccgatggtgtctctgttactaccagacagatgcataatggaacgcacgtagtaaggcattataaggtcaagcgcgaaggcccaaagtatgttattgacgtcgagcaaccattttcgtgtaccagtctggacgccgttgtgaactatttcgtttcacataccaagaaagcgctggtccctttcctgttagacgaagactatgaaaaggtgctggggtatgtcgaagctgacaaggagaacggtgaaaatgtgtgggtcgccccatctgccccaggcccaggacctgctccttgcactgggggacccaagcccctgagtcccgctagctctcaggataagttgccccctttaccccctttgcccaaccaggaagaaaattatgtgaccccaatcggagacggcccagccgtggactacgagaatcaagacgttgccagctcttcgtggccagttatactaaaacctaaaaaactgcccaaaccacccgctaagttaccaaaacctcccgtggggccaaaacctgaaccaaaggtgttcaatggaggcctcgggcgaaaactccccgtttcctcagcacagcccttgttcccaacagctgggctggccgatatgacagctgaattacagaaaaagctcgaaaaacgtcgcgcactggagcactag

SEQ ID NO: 25796 - protein, 100 aa, Artificial Sequence
  derived and/or modified sequence
GVITDRGGGSQHYPEERHVVERHGRDTSGPRKEWHGPPSQGPSYHDTRRMGDGRAGAGMITQHSSNASPINRIVQISGNSMPRGSGSGFKPFKGGPPRRF

SEQ ID NO: 25797 - protein, 193 aa, Artificial Sequence
  derived and/or modified sequence
MEQHFLGCVKRAWDSAEVAPEPQPPPIVSSEDRGPWPLPLYPVLGEYSLDSCDLGLLSSPCWRLPGVYWQNGLSPGVQSTLEPSTAKPTEFSWPGTQKQQEAPVEEVGQAEEPDRLRLQQLPWSSPLHPWDRQQDTEVCDSGCLLERRHPPALQPWRHLPGFSDCLEWILRVGFAAFSVLWACCSRICGAKQP

SEQ ID NO: 25798 - DNA, 2234 bp, Artificial Sequence
  derived and/or modified sequence
gggtgccccccaccatccccagcccgcagcataatcggtgaagggagcctgcggtttctccgccgcgccttcgcccgttgcgtcctgcgaagccagtggaatcggtggtcacaaggaaattatgacaggagcaacctgcaggggtttagatctgacagaaatattctaatggtaggcattgcatcgcttagccatatttgtaatttcttctttgtagggttggttctctgtaacttttgcttaccttaaaattatttttgtgtcttgctctgaggacaatgttaccgatgtgtttttcatttttacttgcatttcagactttcattattttaaattatgtattttttttttcttctaattttgagcgtctcagattcgtgcttcttgactttcattctctcaggagccggggagccgagctcggtcttagcctcgctggtatcaggttccgggttctgtctggaggctccgcttcctatgcagagctggcggttttgtatcagcacgtttgccagtggcgcccactgggcgttttctcagttgctgcacccaacgtgacatttcccgttcgcggggtccttaggttctcagtgctgtcactttttcgctcctacaaccgctagtatctcctaggaacttcctgaaccccgttttgccgtgcagaacggtgattgcaccgagccgctgttcgcactagtaattgtgtggtaccattagccggcgctttttctgtcacaacccattaaaacgggttaaaacatattaaacctatcaaacacattgaacggattaaaacacattaaatgccgcaacacatttttctggtacaacacattgaaacagagttggttcattcctccaaacaggttgtttaggtgtggaagcaccgctcttagttctaagagcatgctgtttctctttagcagcaccctttacggcgccaaaacggatatttgtttggcaataccagcgctatccgctaggtgccggcgcttgctaagttcaacgcgccagtttctcgtttgcaaggtggttagggcagagccctagcagacagttttccggtggcagcaacgctcatttcccggaaacgggtggttcttggcccttgcgcgctcttgaatacctgcgttctgtagcgctagttctcttcaagatttgcttagtgtcatttcatttcggtttcttttctcgccatgtttttctgtcggaattacggttcgttttggttctatgtactctctaaaatgttatcgtttttcatttgtctactaattttcgtgcatttgttactactgagtttcttaatatctgactggcctccgcccacgggctctgcagagcataaatactcaggctgatggtagtgcagagactctccctccttgatcagcgcaaacgttggtctgaggcttgagggatggagcaacattttcttggctgtgtgaagcgggcttgggattccgcagaggtggcgccagagccccagcctccacctattgtgagttcagaagatcgtgggccgtggcctcttcctttgtatccagtactaggagagtactcactggacagctgtgatttgggactgctttccagcccttgctggcggctgcccggagtctactggcaaaacggactctctcctggagtccagagcaccttggaaccaagtacagcgaagcccactgagttcagttggccggggacacagaagcagcaagaggcacccgtagaagaggtggggcaggcagaggaacccgacagactcaggctccagcagcttccctggagcagtcctctccatccctgggacagacagcaggacaccgaggtctgtgacagcgggtgccttttggaacgccgccatcctcctgccctccagccgtggcgccacctcccgggtttctcagactgcctggagtggattcttcgcgttggttttgccgcgttctctgtactctgggcgtgctgttcacggatctgtggagctaagcagccttagatagcagcagaaggctttttggattctcctccttgaaaagattctcagttaccaaacgtctccacctagaaaataaaaatacattaagatgtgctttcattgctggttgtcagtttttaaattctctttttcccttatgtttctttcttgtttcgcgtcgcttattactttcagtttccttgtattttaaatatttgtatttatttcattaaatatttcattcgtatctgtt

SEQ ID NO: 25799 - DNA, 582 bp, Artificial Sequence
  derived and/or modified sequence
atggagcagcacttcctgggctgcgtgaagagagcctgggacagcgccgaggtggcccccgagccccagcccccccccatcgtgagcagcgaggacagaggcccctggcccctgcccctgtaccccgtgctgggcgagtacagcctggacagctgcgacctgggcctgctgagcagcccctgctggagactgcccggcgtgtactggcagaacggcctgagccccggcgtgcagagcaccctggagcccagcaccgccaagcccaccgagttcagctggcccggcacccagaagcagcaggaggcccccgtggaggaggtgggccaggccgaggagcccgacagactgagactgcagcagctgccctggagcagccccctgcacccctgggacagacagcaggacaccgaggtgtgcgacagcggctgcctgctggagagaagacacccccccgccctgcagccctggagacacctgcccggcttcagcgactgcctggagtggatcctgagagtgggcttcgccgccttcagcgtgctgtgggcctgctgcagcagaatctgcggcgccaagcagccctag

SEQ ID NO: 25800 - DNA, 582 bp, Artificial Sequence
  derived and/or modified sequence
atggaacagcacttcttgggatgtgtgaagagagcatgggactctgctgaagtggctcccgagcctcagcccccacccattgtgagcagtgaagaccggggcccatggccactcccgctctacccagttcttggtgagtacagtctggattcatgtgacttgggcctgttatcgagcccatgctggcgccttcccggggtctactggcagaatggactatcccccggcgtccaatcaaccttagagcctagtactgctaaaccgaccgaattctcttggccaggtacccaaaagcagcaggaagcccccgtcgaggaagtcggtcaggccgaggagcccgaccggcttaggctacagcaattaccctggtcctcccccctgcacccatgggatcgccagcaggacaccgaggtctgcgattctggatgtctcctcgaaaggcgacatcccccagctctgcagccttggaggcaccttcccgggtttagtgattgcctcgagtggatccttagggttggctttgccgctttttctgtgctctgggcctgttgtagcagaatttgtggggcaaaacagccatag

SEQ ID NO: 25801 - DNA, 582 bp, Artificial Sequence
  derived and/or modified sequence
atggagcagcacttcctgggctgtgtgaagagggcctgggacagcgctgaggtggcccctgagccccagcccccacccatcgtgtccagtgaagatcggggcccctggcccctgcccctgtaccctgtgctgggggagtacagcctggacagctgtgacctgggcctgctgagcagcccctgctggaggctgcccggggtgtactggcagaatggcctgagccctggggtgcagagcaccctggagcccagcacagccaagcccacagagttctcctggccaggcacccagaagcagcaggaggcccctgtggaggaggtgggccaggccgaggagccagaccggctgcggctgcagcagctgccctggagcagccccctgcacccctgggaccggcagcaggacacagaggtgtgtgacagcggctgcctgctggagaggaggcaccccccagccctgcagccctggaggcacctgcccggcttcagtgactgcctggagtggatcctgcgggtgggctttgctgccttctctgtgctgtgggcctgctgcagccgcatctgtggggccaagcagccctag

SEQ ID NO: 25802 - DNA, 582 bp, Artificial Sequence
  derived and/or modified sequence
atggagcagcacttcctgggctgcgtgaagcgggcctgggacagcgcggaggtcgcgccggaaccccagcctccccctatcgtcagttccgaggataggggaccctggccgctgccattgtacccagtgttgggcgaatacagcctggacagctgcgacctgggcttgctcagtagcccctgctggcgcctccctggagtatattggcagaacggcctgtcacccggcgtccaatccacactggagccctccaccgctaagcctaccgaattttcttggcctggcacccagaagcagcaggaagcaccggtcgaggaggtgggacaggccgaagaaccagatcgactgagactccagcaattgccatggtcaagccccctccatccttgggaccgtcaacaggacaccgaggtttgcgacagtgggtgtttactcgaacggaggcacccacctgccctgcagccctggagacacttacccgggttttctgactgtctggaatggatacttcgtgttggtttcgctgcatttagcgtcctgtgggcatgctgttcccggatttgcggtgccaagcagccatag

SEQ ID NO: 25803 - DNA, 582 bp, Artificial Sequence
  derived and/or modified sequence
atggaacagcatttccttggttgcgtcaaaagggcttgggattcagctgaggtggcacccgaacctcagcctccacccatcgtatcttcggaggaccgcggaccttggccactgcctctgtaccctgtactcggggagtactccttggacagctgtgacctcgggctcctcagttcaccgtgctggcgtctgcccggtgtctattggcagaatggtctgtctccaggtgtacagtccactctggaaccttccaccgctaagcccaccgaattttcttggcctgggacacagaagcaacaggaagcacccgtagaggaggttgggcaagccgaggagccagataggcttcggcttcagcagttgccttggagcagcccattacacccctgggaccgtcagcaggatacggaggtttgcgactctggatgcctgcttgagcggaggcacccacccgctctgcaaccttggaggcacctgcctggcttttcagattgccttgagtggatactgcgggtcgggtttgctgccttttcggtgctttgggcatgttgctctcgcatttgcggcgcaaagcagccatag

SEQ ID NO: 25804 - protein, 779 aa, Artificial Sequence
  derived and/or modified sequence
MQQALELALDRAEYVIESARQRPPKRKYLSSGRKSVFQKLYDLYIEECEKEPEVKKLRRNVNLLEKLVMQETLSCLVVNLYPGNEGYSLMLRGKNGSDSETIRLPYEEGELLEYLDAEELPPILVDLLEKSQVNIFHCGCVIAEIRDYRQSSNMKSPGYQSRHILLRPTMQTLICDVHSITSDNHKWTQEDKLLLESQLILATAEPLCLDPSIAVTCTANRLLYNKQKMNTRPMKRCFKRYSRSSLNRQQDLSHCPPPPQLRLLDFLQKRKERKAGQHYDLKISKAGNCVDMWKRSPCNLAIPSEVDVEKYAKVEKSIKSDDSQPTVWPAHDVKDDYVFECEAGTQYQKTKLTILQSLGDPLYYGKIQPCKADEESDSQMSPSHSSTDDHSNWFIIGSKTDAERVVNQYQELVQNEAKCPVKMSHSSSGSASLSQVSPGKETDQTETVSVQSSVLGKGVKHRPPPIKLPSSSGNSSSGNYFTPQQTSSFLKSPTPPPSSKPSSIPRKSSVDLNQVSMLSPAALSPASSSQRTTATQVMANSAGLNFINVVGSVCGAQALMSGSNPMLGCNTGAITPAGINLSGLLPSGGLLPNALPSAMQAASQAGVPFGLKNTSSLRPLNLLQLPGGSLIFNTLQQQQQQLSQFTPQQPQQPTTCSPQQPGEQGSEQGSTSQEQALSAQQAAVINLTGVGSFMQSQAAVLSQLGSAENRPEQSLPQQRFQLSSAFQQQQQQIQQLRFLQHQMAMAAAAAQTAQLHHHRHTGSQSKSKMKRGTPTTPKF

SEQ ID NO: 25805 - DNA, 2739 bp, Artificial Sequence
  derived and/or modified sequence
tcggaagtgcggccgccggaactggctgttggtgggggtgcagcactgagccgccgacggggcgggtgggctttgctgccgagcaggcggcgccgtcttggggcctagcggcgaggcgacccgcacagtactgtaagattgatgttaaaggcatggtgttcaccccacttcatcagcgtacataagttatctcttcttttggacccttattttatgccataatgcaacaagctttagaactagctttggatcgtgcagagtatgtcattgaaagtgcccgacagagacctcctaaaaggaaatacctatcaagtggaagaaaatctgtatttcaaaaactttatgacttgtatattgaagaatgtgaaaaagaacctgaagttaagaaattaagaagaaatgtgaacttgttagagaagcttgttatgcaagagactttgtcatgtttagtggtcaatctatacccaggaaatgagggatattctctgatgctcaggggaaaaaacggatcagattccgagaccattcgactgccctatgaagaaggagagttgcttgaatatttggatgcagaagaattacctcctattttggttgatctcctagaaaaatctcaggttaatatttttcattgcggatgtgtcatagcagaaatacgtgactacaggcagtccagtaacatgaaatctcctggttaccaaagtcggcacattctcttacgtccaacaatgcagactttaatttgtgatgtacattcaataacaagtgataaccacaaatggacccaggaagacaaacttttgcttgagagccagctcatcctagctacagctgaaccactctgtcttgatccttctatagcagtcacctgcactgcaaacagactgctctataacaagcaaaagatgaacactcgcccaatgaaacggtgtttcaagaggtattccagatcctctctgaatcggcagcaagatctatctcattgtccacctcctcctcagctgaggttacttgatttcttacaaaaaagaaaggaaagaaaagcaggtcagcattatgacctcaaaatttctaaggcaggaaattgtgtagatatgtggaaacggagtccctgtaatttggccataccttctgaagtagatgtggagaaatatgctaaagtggaaaagtctatcaaatctgatgactcacagccaacagtctggccagcccatgatgtaaaagatgattatgtatttgaatgtgaagctggtactcagtatcagaaaacaaagctgaccatcttgcagtcgcttggagatccactttactatggtaaaatacagccatgtaaagcagatgaagaaagtgacagccagatgtctccatcacactcgtccacagatgatcattcaaattggttcattattggatcaaagaccgatgctgagagggtagtcaatcagtaccaagaattagtccagaatgaagccaaatgtccggtcaagatgtcacacagctccagtggctcagccagtctgagtcaggtttctccagggaaagaaacagatcaaactgaaaccgtgtcagttcagtcttcggtattggggaagggtgtaaaacatcgacccccaccaatcaaacttccctcaagctcaggaaatagttcctcaggtaactattttacaccacaacagacaagcagctttctcaaatctccaactcctcctccttcttctaagccatcaagtattcctcggaaatcatctgtggatctcaatcaagttagcatgctttctccagctgccctatcacctgccagctcatcacaaagaaccacggccacccaggtcatggcaaactctgctggacttaacttcatcaatgtagtgggctctgtttgtggggcccaggctttgatgagtggttcaaaccccatgctgggctgtaacactggtgccataactcctgcaggaataaacctgagcggccttctaccctcaggaggtctgctaccaaatgcactgcccagtgcaatgcaggcagcttctcaagcaggtgttccatttggtttaaaaaatacttcaagtctcaggcccttaaatctactccagcttccaggtggttcacttatttttaacactctgcagcagcagcaacagcagctctcccagtttacaccacaacaacctcagcagcccacaacttgtagtcctcaacagccaggggagcagggttctgagcaaggttcaaccagtcaagaacaggccttatctgctcagcaagctgctgttattaaccttactggagtaggaagttttatgcagtcacaggcagctgtgttgtctcagcttggctctgccgagaacagacctgagcaaagccttcctcagcagagattccagctctcctctgcctttcaacagcagcagcaacagatacaacagttgcgattcttgcagcatcaaatggctatggcagcagcagcagcacaaacagctcagctacatcatcatcggcatacaggcagccagtcaaaaagtaaaatgaagagaggcacgccaaccactccaaaattttgagtcttgcattactttttgttccttttttaaaaacacaagagcactgaatcaaaagaattgagtttctactttttgttttttttaatgtgtcagtattttacattgctagatgtacaaactttatacagaagcacaaccttatcatttttaaataaaaacagggaaatggtttaacaaa

SEQ ID NO: 25806 - DNA, 2399 bp, Artificial Sequence
  derived and/or modified sequence
gcagcactgagccgccgacggggcgggtgggctttgctgccgagcaggcggcgccgtcttggggcctagcggcgaggcgacccgcacagtactgtaagattgatgttaaaggcatggtgttcaccccacttcatcagcgtacataagttatctcttcttttggacccttattttatgccataatgcaacaagctttagaactagctttggatcgtgcagagtatgtcattgaaagtgcccgacagagacctcctaaaaggaaatacctatcaagtggaagaaaatctgtatttcaaaaactttatgacttgtatattgaagaatgtgaaaaagaacctgaagttaagaaattaagaagaaatgtgaacttgttagagaagcttgttatgcaagagactttgtcatgtttagtggtcaatctatacccaggaaatgagggatattctctgatgctcaggggaaaaaacggatcagattccgagaccattcgactgccctatgaagaaggagagttgcttgaatatttggatgcagaagaattacctcctattttggttgatctcctagaaaaatctcaggttaatatttttcattgcggatgtgtcatagcagaaatacgtgactacaggcagtccagtaacatgaaatctcctggttaccaaagtcggcacattctcttacgtccaacaatgcagactttaatttgtgatgtacattcaataacaagtgataaccacaaatggacccaggaagacaaacttttgcttgagagccagctcatcctagctacagctgaaccactctgtcttgatccttctatagcagtcacctgcactgcaaacagactgctctataacaagcaaaagatgaacactcgcccaatgaaacggtgtttcaagaggtattccagatcctctctgaatcggcagcaagatctatctcattgtccacctcctcctcagctgaggttacttgatttcttacaaaaaagaaaggaaagaaaagcaggtcagcattatgacctcaaaatttctaaggcaggaaattgtgtagatatgtggaaacggagtccctgtaatttggccataccttctgaagtagatgtggagaaatatgctaaagtggaaaagtctatcaaatctgatgactcacagccaacagtctggccagcccatgatgtaaaagatgattatgtatttgaatgtgaagctggtactcagtatcagaaaacaaagctgaccatcttgcagtcgcttggagatccactttactatggtaaaatacagccatgtaaagcagatgaagaaagtgacagccagatgtctccatcacactcgtccacagatgatcattcaaattggttcattattggatcaaagaccgatgctgagagggtagtcaatcagtaccaagaattagtccagaatgaagccaaatgtccggtcaagatgtcacacagctccagtggctcagccagtctgagtcaggtttctccagggaaagaaacagatcaaactgaaaccgtgtcagttcagtcttcggtattggggaagggtgtaaaacatcgacccccaccaatcaaacttccctcaagctcaggaaatagttcctcaggtaactattttacaccacaacagacaagcagctttctcaaatctccaactcctcctccttcttctaagccatcaagtattcctcggaaatcatctgtggatctcaatcaagttagcatgctttctccagctgccctatcacctgccagctcatcacaaagaaccacggccacccaggtcatggcaaactctgctggacttaacttcatcaatgtagtgggctctgtttgtggggcccaggctttgatgagtggttcaaaccccatgctgggctgtaacactggtgccataactcctgcaggaataaacctgagcggccttctaccctcaggaggtctgctaccaaatgcactgcccagtgcaatgcaggcagcttctcaagcaggtgttccatttggtttaaaaaatacttcaagtctcaggcccttaaatctactccagcttccaggtggttcacttatttttaacactctgcagcagcagcaacagcagctctcccagtttacaccacaacaacctcagcagcccacaacttgtagtcctcaacagccaggggagcagggttctgagcaaggttcaaccagtcaagaacaggccttatctgctcagcaagctgctgttattaaccttactggagtaggaagttttatgcagtcacaggcagctgcagttgcgattcttgcagcatcaaatggctatggcagcagcagcagcacaaacagctcagctacatcatcatcggcatacaggcagccagacacaagagcactgaatcaaaagaattga

SEQ ID NO: 25807 - DNA, 2340 bp, Artificial Sequence
  derived and/or modified sequence
atgcagcaagccctcgaactcgccctagatcgtgctgaatatgtcatcgaaagtgcaaggcaaagaccccccaaacgaaagtacttaagcagtggcagaaaatccgtgttccagaagctctatgacttatacatcgaggagtgcgagaaagagcctgaagtgaaaaagctgagacggaacgtcaaccttctggaaaaactcgtgatgcaggaaaccctgagctgtttggtggtaaacctgtacccgggcaacgaggggtactctctcatgttaagaggcaagaacggaagcgactctgagacaataagactcccctacgaggagggcgaactactagagtatcttgatgctgaggaactgccgccgatcctggttgatcttctcgagaaatcccaagtgaacatctttcactgtggctgtgtcatcgctgagataagagactatcgacagtcctccaatatgaagagccctggctaccagtcacggcatatcctccttcgacccactatgcagacactaatctgtgacgttcattcgatcactagcgataatcacaagtggacccaggaggataagctgctcctagagtcccaattaattctggcgacagctgaacccctgtgtctggaccctagtatcgccgtaacttgtaccgcgaatcgcttgctgtataacaaacaaaaaatgaacactcgccctatgaagcgctgcttcaaaaggtacagtcggtctagtctgaaccggcaacaggacctttcccactgtccaccaccaccccagctgcgtctcctggattttctccagaaaagaaaggaaaggaaagcagggcagcattacgatctgaaaatttccaaagccggcaattgtgtagatatgtggaagcgctctccttgtaaccttgccataccatctgaagtggatgtggagaaatacgccaaggtggaaaagagtatcaagtcggacgatagtcagccgaccgtgtggcctgcacacgacgtcaaggacgattacgtcttcgagtgtgaagcaggcacccagtaccagaaaactaagctcacgatcctccagtcactgggtgatcccctgtactacggaaagatccagccttgtaaggctgacgaggaaagtgactcccagatgtcgccatctcactccagcaccgatgaccacagcaactggtttattatcggctctaagactgacgcagaacgggtggtcaaccagtaccaggagctggttcagaatgaagctaagtgccccgttaaaatgtctcattccagttccggctccgcgagtctaagtcaggtgtcccctggcaaggagacagaccaaactgagaccgtgagtgtgcagtcttccgtgttgggtaaaggcgtcaagcacagacccccaccgatcaaactccccagttctagtggaaattccagcagcgggaactattttactcctcagcagacgagcagcttcctgaaatctccgactccccccccgagctctaagcccagcagtatcccacgcaaatcttcagtagatctgaatcaggtcagcatgttgtctcctgccgccctgagtcccgcatcgagctcccaacgtactactgctactcaggtgatggcgaactctgccgggctcaacttcatcaatgtggtaggttccgtatgcggggcacaggccctaatgtcaggcagtaatcctatgctgggatgtaacactggtgccataaccccagctggcatcaacttatctggcctgctcccctctggaggcctgctgcctaatgccttaccgagtgccatgcaagctgcctcccaagcaggggttccctttggactgaaaaacaccagctccctccggccattgaacctgttgcagctcccaggaggttctctgatatttaatacactgcagcagcagcagcagcagctgtcacagtttactcctcagcagccacagcagcccaccacctgttccccacaacagcccggcgagcaaggaagtgagcaagggagcacatctcaagagcaagccctgagcgcgcagcaagctgcggtaatcaatttgaccggcgtgggttcgtttatgcagtcacaggctgccgtgttgtcacagttgggcagcgccgaaaaccggcccgagcagtcacttccccagcaacgcttccagctctcctccgccttccagcagcagcaacagcagatccaacagttaaggttcctccaacaccagatggcgatggctgccgccgccgcccagaccgcccagctgcaccatcacaggcataccgggagccagagcaaaagtaagatgaaaagaggcacaccaactacgccgaaattttag

SEQ ID NO: 25808 - DNA, 2217 bp, Artificial Sequence
  derived and/or modified sequence
atgcaacaggcacttgagcttgccttagacagagctgagtatgttatcgagagtgcccggcagaggcctcctaagaggaagtacctgtcctccggtaggaaatctgtgttccaaaagctgtacgacctttatattgaagagtgtgaaaaagagcccgaggtgaagaagctgcgccggaatgtgaatttgctggagaagttggtcatgcaggagaccttgagctgtctggtggtgaacctctacccaggcaacgaaggatactcactcatgctgagagggaaaaacggaagtgacagtgaaacaatccggcttccctatgaagagggagagctgcttgaatatctggatgcagaagaacttccgccaatcctagtggatctgctggaaaaaagtcaggtgaatatttttcattgcggctgcgtgattgcagagatacgcgattaccgccagtcaagtaacatgaaatcccctggctaccagtcacgacatattctgctcagacccacaatgcagacgttgatctgcgatgtccactctatcaccagcgataatcataagtggacacaggaggacaagctgctcctggagtcccagttgattcttgccacagctgagcccctttgtttggaccccagcattgcggtgacctgtacagctaaccgccttctgtataacaagcagaaaatgaacaccaggcccatgaagcgctgttttaagagatacagcagatctagcttaaatcgccagcaggacttgagtcattgtccaccaccccctcagttgagactgctcgatttccttcagaaaaggaaggagaggaaagcgggacaacactatgatttaaagatctctaaggcaggaaattgcgttgatatgtggaagcgctcaccatgcaatttggcaataccatccgaggtggacgtcgagaagtacgctaaagtcgaaaaaagcatcaaatctgacgatagccagcctactgtgtggcctgcacacgacgtgaaagatgactacgtcttcgagtgtgaggccggaacgcaataccagaaaacaaagctcactatcctgcaatctttgggtgatcccttatactatggtaaaattcaaccgtgtaaggctgacgaagaatccgatagtcagatgtcacccagtcacagctctactgacgatcattcaaattggtttattattggctccaaaactgacgctgaaagggtagtgaaccagtaccaagaactggtacagaatgaagctaagtgccctgtgaagatgagccatagttcgtctggtagtgcaagcctttcgcaggtgagccctgggaaggaaacggaccagacagaaactgtatctgtgcagtctagcgtgctgggaaagggggtgaaacaccggcctccgccaatcaagctgccttctagtagcggcaactcctcatccggtaactactttacccctcagcaaacctcaagctttctgaaatcacccaccccccctccgagctctaagcctagcagtatcccccgcaagagcagtgtcgacttgaatcaggtgagcatgctatcccctgccgctttgagccccgctagctccagccagcgcacaacagccactcaggttatggccaacagcgccgggctgaacttcatcaacgtcgtgggctcagtatgcggtgcgcaggccctcatgtcagggtccaatcctatgctcggctgcaatacaggcgctatcacgcctgccgggatcaatctgtctgggctgctgccatccggtgggttactgccaaacgcactgccctcagccatgcaggctgcttctcaggcaggggtaccattcggcctgaagaacacaagcagcctgagaccactcaacctgctgcagctgccaggaggatctcttatcttcaatacactgcagcagcagcaacagcagctgtcccaatttaccccccagcagccacagcagccaactacctgctcgccccagcagcctggggaacagggttctgaacagggctcaacgagtcaggagcaggccctctcagcccaacaggccgctgtgataaacctcaccggcgtgggctcttttatgcagagccaggccgcagctgtcgcaattttggcggcttctaatgggtacgggtcatccagctctacaaattcctctgccacgagctcctcagcttacaggcagcccgacacacgggccctgaatcagaagaactag

SEQ ID NO: 25809 - DNA, 2340 bp, Artificial Sequence
  derived and/or modified sequence
atgcagcaggccctggagctggccctggacagagcagaatatgtgattgagagcgcccggcagaggcctcccaagaggaagtacctgagcagcggcaggaagtctgtgttccagaagctgtatgacctgtacattgaagaatgtgagaaggagcctgaggtgaagaagctgcggagaaatgtgaacctgctggagaagctggtgatgcaggagaccctgagctgcctggtggtgaacctgtacccaggaaatgaaggctacagcctgatgctgcggggcaagaatggaagtgacagcgagaccatccggctgccctatgaggagggggagctgctggagtacctggatgctgaggagctgccccccatcctggtggacctgctggagaagagccaggtgaacatcttccactgcggctgtgtgattgctgagatccgggactaccggcagagcagcaacatgaagagccctggctaccagagccgccacatcctgctgcggcccaccatgcagaccctcatctgtgatgtgcacagcatcaccagtgacaaccacaagtggacccaggaggacaagctgctgctggagagccagctgatcctggccacagctgagcccctgtgcctggaccccagcattgctgtgacctgcacagccaaccggctgctgtacaacaagcagaagatgaacacccggcccatgaagcgctgcttcaagcgctacagccgcagcagcctgaaccggcagcaggacctgagccactgccccccaccaccccagctgcggctgctggacttcctgcagaagaggaaggagaggaaggccggccagcactatgacctgaagatcagcaaggccggcaactgtgtggacatgtggaagaggagcccctgcaacctggccatccccagcgaggtggatgtggagaagtatgccaaggtggagaagagcatcaagagtgatgacagccagcccaccgtgtggccagcccatgatgtgaaggatgattatgtgtttgaatgtgaggccggcacccagtaccagaagaccaagctgaccatcctgcagagcctgggggaccccctgtactacggcaagatccagccctgcaaggcagatgaggagagtgacagccagatgagccccagccacagcagcacagatgaccacagcaactggttcatcatcggcagcaagacagatgctgagcgggtggtgaaccagtaccaggagctggtgcagaatgaggccaagtgccctgtgaagatgagccacagcagcagcggcagcgccagcctgagccaggtgtcccctgggaaggagacagaccagacagaaacagtgtctgtgcagagctctgtgctgggcaaaggagtgaagcaccggcccccacccatcaagctgcccagcagcagcggcaacagcagcagcggcaactacttcaccccccagcagaccagcagcttcctgaagagccccaccccaccacccagcagcaagcccagcagcatccccaggaagagctctgtggacctgaaccaggtgtccatgctgagccctgctgccctgagccctgccagcagcagccagaggaccacagccacccaggtgatggccaacagcgctggcctgaacttcatcaacgtggtgggctctgtgtgtggggcccaggccctgatgagcggcagcaaccccatgctgggctgcaacacaggagccatcaccccagctggcatcaacctgagcggcctgctgcccagcggcggcctgctgcccaatgccctgcccagcgccatgcaggccgccagccaggccggcgtgcccttcggcctgaagaacaccagcagcctgcggcccctgaacctgctgcagctgcccggcggcagcctcatcttcaacaccctgcagcagcagcagcagcagctgagccagttcaccccccagcagccccagcagcccaccacctgcagcccccagcagcctggagagcagggcagcgagcagggcagcaccagccaggagcaggccctgagcgcccagcaggccgctgtgatcaacctgactggagtgggcagcttcatgcagagccaggccgctgtgctgagccagctgggcagcgctgagaacagacctgagcagagcctgccccagcagcgcttccagctgagcagcgccttccagcagcagcagcagcagatccagcagctgcgcttcctgcagcaccagatggccatggctgctgctgctgcccagacagcccagctgcaccaccaccgccacacaggcagccagagcaagagcaagatgaagaggggcacccccaccacccccaagttctag

SEQ ID NO: 25810 - DNA, 2217 bp, Artificial Sequence
  derived and/or modified sequence
atgcagcaggccctggagctggccctggacagagcagaatatgtgattgagagcgcccggcagaggcctcccaagaggaagtacctgagcagcggcaggaagtctgtgttccagaagctgtatgacctgtacattgaagaatgtgagaaggagcctgaggtgaagaagctgcggagaaatgtgaacctgctggagaagctggtgatgcaggagaccctgagctgcctggtggtgaacctgtacccaggaaatgaaggctacagcctgatgctgcggggcaagaatggaagtgacagcgagaccatccggctgccctatgaggagggggagctgctggagtacctggatgctgaggagctgccccccatcctggtggacctgctggagaagagccaggtgaacatcttccactgcggctgtgtgattgctgagatccgggactaccggcagagcagcaacatgaagagccctggctaccagagccgccacatcctgctgcggcccaccatgcagaccctcatctgtgatgtgcacagcatcaccagtgacaaccacaagtggacccaggaggacaagctgctgctggagagccagctgatcctggccacagctgagcccctgtgcctggaccccagcattgctgtgacctgcacagccaaccggctgctgtacaacaagcagaagatgaacacccggcccatgaagcgctgcttcaagcgctacagccgcagcagcctgaaccggcagcaggacctgagccactgccccccaccaccccagctgcggctgctggacttcctgcagaagaggaaggagaggaaggccggccagcactatgacctgaagatcagcaaggccggcaactgtgtggacatgtggaagaggagcccctgcaacctggccatccccagcgaggtggatgtggagaagtatgccaaggtggagaagagcatcaagagtgatgacagccagcccaccgtgtggccagcccatgatgtgaaggatgattatgtgtttgaatgtgaggccggcacccagtaccagaagaccaagctgaccatcctgcagagcctgggggaccccctgtactacggcaagatccagccctgcaaggcagatgaggagagtgacagccagatgagccccagccacagcagcacagatgaccacagcaactggttcatcatcggcagcaagacagatgctgagcgggtggtgaaccagtaccaggagctggtgcagaatgaggccaagtgccctgtgaagatgagccacagcagcagcggcagcgccagcctgagccaggtgtcccctgggaaggagacagaccagacagaaacagtgtctgtgcagagctctgtgctgggcaaaggagtgaagcaccggcccccacccatcaagctgcccagcagcagcggcaacagcagcagcggcaactacttcaccccccagcagaccagcagcttcctgaagagccccaccccaccacccagcagcaagcccagcagcatccccaggaagagctctgtggacctgaaccaggtgtccatgctgagccctgctgccctgagccctgccagcagcagccagaggaccacagccacccaggtgatggccaacagcgctggcctgaacttcatcaacgtggtgggctctgtgtgtggggcccaggccctgatgagcggcagcaaccccatgctgggctgcaacacaggagccatcaccccagctggcatcaacctgagcggcctgctgcccagcggcggcctgctgcccaatgccctgcccagcgccatgcaggccgccagccaggccggcgtgcccttcggcctgaagaacaccagcagcctgcggcccctgaacctgctgcagctgcccggcggcagcctcatcttcaacaccctgcagcagcagcagcagcagctgagccagttcaccccccagcagccccagcagcccaccacctgcagcccccagcagcctggagagcagggcagcgagcagggcagcaccagccaggagcaggccctgagcgcccagcaggccgctgtgatcaacctgactggagtgggcagcttcatgcagagccaggccgctgctgtggccatcctggccgccagcaatggctacggcagcagcagcagcaccaacagcagcgccaccagcagcagcgcctaccggcagcctgacacccgggccctgaaccagaagaactag

SEQ ID NO: 25811 - DNA, 2340 bp, Artificial Sequence
  derived and/or modified sequence
atgcagcaggccctggagctggccctggaccgggccgagtacgtgattgagtctgcccggcagaggcctcccaaacgcaaatatctgtcatctgggaggaagtccgtttttcagaaattgtacgatctttatatagaggagtgtgaaaaggaaccggaggtgaagaagttaaggcgaaacgtcaatctcctggaaaaactggtaatgcaggagacattgtcttgtctcgtagtgaatctgtaccctggcaacgagggctattccctgatgttgcgtggcaagaatggaagtgattccgaaaccattaggctgccctacgaagaaggcgaattactagagtacctcgacgctgaagaacttcctcctatccttgtggacctcctcgagaaaagccaggtcaacatcttccattgtggttgtgttatcgccgaaattagagactacaggcagtccagcaatatgaagtctcccggctaccaatcccgtcacattctcctccggccaacaatgcagacactgatctgcgacgtgcacagtatcacctcagataatcataagtggacgcaggaggataagctccttttggaaagccagctgattttggccaccgcagaaccgttgtgcctggatccctctatagctgtgacctgtacagcaaataggctcttatacaacaagcagaagatgaacacacgccccatgaaacgctgtttcaaacggtacagcagaagttcactgaacaggcagcaggacctgtctcactgcccccccccgcctcaactccgtctcctggattttctacagaagcgtaaggaacggaaggctggacagcactatgatctcaagatctcaaaggctggtaattgtgtggacatgtggaaaagatcaccttgcaacttagccatcccctccgaggtcgacgtcgaaaagtacgcaaaggtggaaaaatcaatcaagtccgacgacagccagccaacagtctggccagcacatgatgtgaaagatgattacgtgtttgagtgcgaggccggcacacagtaccagaagaccaaactcacaatactgcagagcctgggagatcctctctattacgggaaaattcaaccttgtaaagccgatgaggaaagtgattctcagatgtcgccctcacattcaagcaccgatgatcattcaaactggtttataataggcagtaagacagacgctgaacgtgtggtgaaccagtatcaggagctggtgcagaatgaggccaagtgtcctgtgaaaatgtctcactcctcatccggaagtgcttctctgtcccaggtctcacccggtaaagaaactgaccagactgagactgtgtccgtgcagtcatccgttctcggcaagggcgttaaacatagaccacctcccataaagctaccatcatcttccggaaattccagcagcggcaattatttcactccacagcagaccagctccttcttgaaaagccctacacccccgccttctagtaagccttcctctatcccaagaaagtcctctgtcgatctgaaccaagtttccatgctcagtccagcggcccttagccccgctagcagttcacaaagaactaccgccacgcaggtgatggccaacagtgctggactgaatttcatcaacgttgttggcagtgtctgcggagcgcaggcccttatgagcggctccaatcctatgctgggctgtaacactggggcaatcacgcccgctggtattaacctgtccggcctactgccgtcgggcggactcctgcctaacgcgcttccttcggcaatgcaagcagcttcccaggctggcgtaccattcggcttaaagaatacctcctccctacgccctctgaacctgcttcaactcccgggaggcagccttattttcaacaccctccagcagcaacagcagcagcttagccagtttacaccacagcaacctcaacagccgactacctgctcccctcagcagcctggtgagcagggttcagaacaaggatcgactagccaggagcaggcgctttcggctcaacaggccgctgtaattaatctgacaggtgtcggaagtttcatgcagagccaagccgcagtactctcccagctcggcagcgctgagaacaggcccgagcagtcattgccgcagcagcggttccaattgagctccgcattccaacagcagcaacagcagatccagcagttacggtttctccagcatcaaatggccatggcagccgccgcggcccaaacagcacagttgcatcaccatcgacacaccggctctcagagcaaaagtaagatgaagagagggacaccaacaacacctaaattctag

SEQ ID NO: 25812 - DNA, 2217 bp, Artificial Sequence
  derived and/or modified sequence
atgcagcaggccctggagctggccctggaccgggccgagtacgtgattgaaagtgctcgccagagaccacctaagcggaagtacctctcatcaggcaggaaaagcgtctttcaaaaactatacgacctgtacatagaagagtgcgaaaaggagcctgaagttaaaaaattaaggcgcaacgtgaacttgctggaaaaactggtgatgcaggaaacactatcatgtttggtggtcaacctgtatccagggaacgaaggctatagcttgatgcttaggggtaaaaacggttctgatagtgaaaccattcgcctcccttacgaggaaggcgagctactggagtacttggatgccgaggaattgcccccaattctggtcgacctcctcgagaaatcccaggtcaacatttttcactgcgggtgtgtgattgccgagatcagggattatagacagagcagcaatatgaagagccctggttaccaatcacggcatattctgttaaggccaaccatgcaaacccttatatgtgatgtacactcaatcacctctgataaccacaagtggacgcaggaagacaagctgctcttggaaagccagcttatccttgccacagcagagccactgtgtctggatccttccatcgctgttacctgtacagctaacaggctgctatataacaaacagaaaatgaataccaggccgatgaaaaggtgcttcaaaagatattctcgcagttccttgaaccgccagcaagatctgagtcactgcccaccgcccccccagctgaggttgctggactttttgcagaaaaggaaggagaggaaggcaggacagcactatgacctgaagatcagtaaggcgggcaattgcgtggacatgtggaaacgaagtccctgcaatctggcgatcccatcagaggtcgacgttgaaaaatacgctaaagtggaaaaaagcatcaagtccgacgacagtcaacctaccgtctggccggcccacgatgtaaaagacgattacgtcttcgagtgcgaggccggcacacaatatcaaaaaaccaaactgaccatactgcagtcactgggagaccccctctactatgggaagatccagccatgcaaggctgacgaggagtctgattctcagatgtctccctcccacagctccacagacgatcattccaattggttcattatcgggagtaaaaccgacgcggagagagtggtcaaccagtatcaggaactggtgcaaaacgaagcaaagtgtccagtgaagatgtcacacagctcgtctggatctgcttctctctctcaagtgagcccggggaaggaaacggaccagaccgaaacagtgtccgtccagtcatctgtacttggtaaaggcgtcaaacatcggcctccgccaatcaagctcccgtccagtagtgggaatagttctagcgggaattattttacacctcaacagacctctagcttcctgaaatctccgacgcctccccctagctctaaacctagctccatcccgcgtaaaagctcggttgatctgaatcaggtttcaatgttgagccccgcagcactgagccccgcatcatcgtcgcagaggaccaccgctacgcaagtaatggctaatagcgccggtctgaactttataaacgtagttggaagcgtctgtggcgcgcaggcgctaatgagcggttccaatcccatgcttggatgcaataccggtgccatcacacccgccggcattaacctctctggtctgctcccctccggcgggttactacctaacgccttgccgagcgccatgcaggctgcctcacaggccggggtccccttcggactaaagaatacttcttccctgaggcctctcaatctattacagctgccgggcgggagccttatattcaataccctgcagcagcaacagcaacagctgtctcagtttaccccccagcagccgcagcagcctaccacctgctctccccaacagccgggagagcagggcagcgaacaggggagcacgtcgcaggagcaggctctttccgcccagcaggccgccgtaattaatctgacaggagtggggtcgtttatgcaaagccaggccgctgccgtcgctatcctcgctgcctctaatggttacggatcatcatcctctacaaactcttctgcaacctccagctctgcgtacagacagccagacacgcgagctctgaatcagaagaactag

SEQ ID NO: 25813 - DNA, 2340 bp, Artificial Sequence
  derived and/or modified sequence
atgcagcaggctctcgagctagccctggaccgtgcagaatacgtcatagagtcagctaggcagagacccccaaagcgaaaatacctcagttccggtagaaagagtgtgttccagaagttgtacgacctatacatcgaagaatgtgagaaggagcctgaggtcaaaaaactgaggagaaacgtcaatcttcttgaaaaacttgtgatgcaggagacactttcttgcctagtcgtaaacctctatccaggaaatgagggctatagccttatgctgcgcggtaaaaatggatctgatagcgagacgattagactgccttacgaggaaggagagctgctcgaatacctcgacgctgaagaactacctcccatcctcgtggacttgttagagaagagtcaggtgaacatctttcactgtggctgtgtgattgccgaaattcgtgattaccgccaatccagcaatatgaagagccctggctatcaaagccggcatatccttttgaggccaactatgcagactctgatatgcgacgtgcactctatcacaagcgataatcataagtggacacaggaggacaagctgttgctcgagagccaactcattctggccactgcggagcccctctgtttagaccccagtatcgccgtgacatgtaccgccaatagattgctatacaacaaacaaaaaatgaatacacgacctatgaaacggtgtttcaagagatactcccgctcctctctgaacagacaacaggacctgagtcattgccctccccctccgcaactgagattgttagactttctgcaaaaaagaaaggaacggaaagcagggcaacactacgacctgaaaatcagtaaggcagggaactgcgtggatatgtggaagagatccccctgcaatcttgccataccctccgaagtggatgtggagaaatatgctaaggttgagaagtctatcaaatcagatgacagccagcctacagtgtggccagcacacgatgtcaaggatgactatgtgtttgaatgtgaggcaggcacccagtaccagaagaccaagctgacaatcctgcagagcctaggggaccccctgtactacggtaagatccagccctgtaaggctgacgaggaatcggatagccagatgagcccttctcactcgagtacggacgaccacagcaattggttcattatcggttcgaagaccgatgcagagagagtggtcaatcagtatcaagaactggtgcagaacgaggccaaatgccctgtcaagatgtcacactcttctagtgggagcgcatctctttcacaggtgtctccaggtaaagaaactgaccagacagagacagtgtccgtccagtcttcagtgttaggaaagggtgttaagcatagaccaccaccaataaagctgcctagctcatccggtaacagttcttccgggaactactttactccccagcagacctcctctttcctaaagagccctacccctccaccaagtagcaaaccaagtagcatacctagaaagtcgagtgtggatctgaaccaagttagtatgctcagcccagctgccctgtctcccgcatcatccagccagcgaacaacagcaactcaggtgatggctaatagcgccggactgaacttcatcaatgtcgtcggctctgtatgcggcgctcaggcccttatgagcggaagtaacccaatgctaggatgcaacaccggagctatcaccccagccggtatcaatctctcaggactcctgcctagtggtggactcttgccaaacgccctgcccagtgccatgcaggcggctagccaggcaggggtcccattcggcttgaagaatacttctagcctgcgacctctgaatttgctgcagttgccaggtgggtccctgatctttaacactttgcaacaacagcagcagcagttgtctcagtttaccccccaacagccacagcaaccgacaacttgttcacctcaacagccaggtgaacagggctcggagcaaggaagcacttcccaggaacaggctttgagcgctcagcaggccgctgtgatcaacctgacaggagtagggagtttcatgcaaagccaggcggcagtcctgagccagctcggctccgccgaaaacaggccagagcaatcgctcccacagcaaaggtttcaactgtcctccgccttccagcagcagcaacagcagatacagcagctgcgcttccttcagcaccagatggccatggcagctgccgctgcccagaccgcccaactgcaccaccaccgtcacactggaagccagagcaaaagtaagatgaagcgcggaacgcccacaaccccaaaattttag

SEQ ID NO: 25814 - DNA, 2217 bp, Artificial Sequence
  derived and/or modified sequence
atgcaacaggcgctggagttggcccttgatagagctgagtacgtgatcgagtctgctcggcagcgcccaccaaagcgcaaatacctgtctagcggccgtaagtccgtctttcagaaactgtacgatctctacatcgaagagtgcgaaaaagagccagaggtgaagaagctgaggcgaaatgttaacttactggagaagttagttatgcaagaaactctctcctgtctggtggttaatctctaccctgggaacgagggttactcacttatgctgcgaggaaagaatggcagcgactccgaaacaatacgcctgccatatgaggagggggagctcctcgaatatctagacgcggaagaacttccacctatcttggttgacctgctggagaaatcccaggtaaacatatttcattgcggctgtgtcatagccgaaatcagagactacaggcagtccagcaacatgaaaagtcctggctatcagtcgcgccatatcctccttagacccaccatgcagactctcatctgcgacgtacactcaattactagtgataatcacaaatggacccaagaagacaaattgctcctggaaagccagctgatcctggccactgcggaacctttgtgcttggacccaagcattgccgttacatgtacagccaacagactactgtacaataaacagaagatgaatacccgccctatgaaacgctgctttaaaaggtactccagatctagcctgaataggcagcaggacttgtcccattgccccccacctccccaactccgcttactggacttccttcagaaaagaaaggaacgaaaagccggacagcattacgacttgaagatcagcaaggccggaaactgcgtcgatatgtggaaacggtcaccgtgcaatctcgcaatccctagtgaagtggacgtagagaagtacgccaaggtggagaagtccataaagtcggacgatagtcagcctaccgtctggccggctcatgatgtgaaggacgactacgtgttcgaatgtgaagccggtacccaatatcagaaaacgaagctgaccattttacagagtttaggcgaccctctctattatggcaaaatccagccatgtaaagccgatgaggagtctgactcccagatgagcccgtcgcattcatctacagatgaccattcaaattggtttatcatcgggagcaaaaccgacgccgagcgagtcgttaatcaataccaagagctcgtccaaaatgaagctaaatgtcctgtgaagatgtcccattcgtccagcggaagcgcaagtttgtcacaggtgagccccggtaaggaaactgatcaaaccgagacagtatccgtgcaaagctctgttcttggaaagggcgtcaaacatcgacccccacctatcaaattaccttccagttcagggaacagttcatcgggtaattatttcacccctcagcagacttcaagcttcctaaagagtccaacccccccacctagcagcaaaccatcttctattccccgtaagagcagcgtcgacctgaaccaggtctccatgttatcccctgcggcactatctccagcaagtagttcccagcgcacgactgcaacccaggtaatggccaattcagctggcctgaacttcattaacgtagtgggctccgtgtgcggcgctcaggccctcatgtccggatccaacccaatgctcggctgcaatacaggcgcaataacgccagcgggtatcaatctctcgggtctgcttccctccggtggtctgcttccaaatgctttgccatcagctatgcaagctgccagccaggctggcgttccctttggcctgaaaaatactagttcccttcgccctcttaatctgctgcaacttccgggagggagtctaattttcaacactctgcaacaacaacagcagcagctgagccagtttacacctcagcagccacagcagccaaccacttgcagtccccaacaacccggagagcagggttcagaacaggggagcacctcacaggagcaggcccttagcgcacagcaggctgcagtgataaatctgacgggggtcgggagtttcatgcagagccaggctgcagccgtcgcaatcttagctgcctctaatgggtatgggagctcctccagcaccaacagctccgcgactagttcctccgcctacagacaacccgatacgcgcgctctaaatcaaaagaactag

SEQ ID NO: 25815 - DNA, 2340 bp, Artificial Sequence
  derived and/or modified sequence
atgcagcaggccctggagctggccctggacagagccgagtacgtgatcgagagcgccagacagagaccccccaagagaaagtacctgagcagcggcagaaagagcgtgttccagaagctgtacgacctgtacatcgaggagtgcgagaaggagcccgaggtgaagaagctgagaagaaacgtgaacctgctggagaagctggtgatgcaggagaccctgagctgcctggtggtgaacctgtaccccggcaacgagggctacagcctgatgctgagaggcaagaacggcagcgacagcgagaccatcagactgccctacgaggagggcgagctgctggagtacctggacgccgaggagctgccccccatcctggtggacctgctggagaagagccaggtgaacatcttccactgcggctgcgtgatcgccgagatcagagactacagacagagcagcaacatgaagagccccggctaccagagcagacacatcctgctgagacccaccatgcagaccctgatctgcgacgtgcacagcatcaccagcgacaaccacaagtggacccaggaggacaagctgctgctggagagccagctgatcctggccaccgccgagcccctgtgcctggaccccagcatcgccgtgacctgcaccgccaacagactgctgtacaacaagcagaagatgaacaccagacccatgaagagatgcttcaagagatacagcagaagcagcctgaacagacagcaggacctgagccactgccccccccccccccagctgagactgctggacttcctgcagaagagaaaggagagaaaggccggccagcactacgacctgaagatcagcaaggccggcaactgcgtggacatgtggaagagaagcccctgcaacctggccatccccagcgaggtggacgtggagaagtacgccaaggtggagaagagcatcaagagcgacgacagccagcccaccgtgtggcccgcccacgacgtgaaggacgactacgtgttcgagtgcgaggccggcacccagtaccagaagaccaagctgaccatcctgcagagcctgggcgaccccctgtactacggcaagatccagccctgcaaggccgacgaggagagcgacagccagatgagccccagccacagcagcaccgacgaccacagcaactggttcatcatcggcagcaagaccgacgccgagagagtggtgaaccagtaccaggagctggtgcagaacgaggccaagtgccccgtgaagatgagccacagcagcagcggcagcgccagcctgagccaggtgagccccggcaaggagaccgaccagaccgagaccgtgagcgtgcagagcagcgtgctgggcaagggcgtgaagcacagacccccccccatcaagctgcccagcagcagcggcaacagcagcagcggcaactacttcaccccccagcagaccagcagcttcctgaagagccccacccccccccccagcagcaagcccagcagcatccccagaaagagcagcgtggacctgaaccaggtgagcatgctgagccccgccgccctgagccccgccagcagcagccagagaaccaccgccacccaggtgatggccaacagcgccggcctgaacttcatcaacgtggtgggcagcgtgtgcggcgcccaggccctgatgagcggcagcaaccccatgctgggctgcaacaccggcgccatcacccccgccggcatcaacctgagcggcctgctgcccagcggcggcctgctgcccaacgccctgcccagcgccatgcaggccgccagccaggccggcgtgcccttcggcctgaagaacaccagcagcctgagacccctgaacctgctgcagctgcccggcggcagcctgatcttcaacaccctgcagcagcagcagcagcagctgagccagttcaccccccagcagccccagcagcccaccacctgcagcccccagcagcccggcgagcagggcagcgagcagggcagcaccagccaggagcaggccctgagcgcccagcaggccgccgtgatcaacctgaccggcgtgggcagcttcatgcagagccaggccgccgtgctgagccagctgggcagcgccgagaacagacccgagcagagcctgccccagcagagattccagctgagcagcgccttccagcagcagcagcagcagatccagcagctgagattcctgcagcaccagatggccatggccgccgccgccgcccagaccgcccagctgcaccaccacagacacaccggcagccagagcaagagcaagatgaagagaggcacccccaccacccccaagttctag

SEQ ID NO: 25816 - DNA, 2217 bp, Artificial Sequence
  derived and/or modified sequence
atgcagcaggccctggagctggccctggacagagccgagtacgtgatcgagagcgccagacagagaccccccaagagaaagtacctgagcagcggcagaaagagcgtgttccagaagctgtacgacctgtacatcgaggagtgcgagaaggagcccgaggtgaagaagctgagaagaaacgtgaacctgctggagaagctggtgatgcaggagaccctgagctgcctggtggtgaacctgtaccccggcaacgagggctacagcctgatgctgagaggcaagaacggcagcgacagcgagaccatcagactgccctacgaggagggcgagctgctggagtacctggacgccgaggagctgccccccatcctggtggacctgctggagaagagccaggtgaacatcttccactgcggctgcgtgatcgccgagatcagagactacagacagagcagcaacatgaagagccccggctaccagagcagacacatcctgctgagacccaccatgcagaccctgatctgcgacgtgcacagcatcaccagcgacaaccacaagtggacccaggaggacaagctgctgctggagagccagctgatcctggccaccgccgagcccctgtgcctggaccccagcatcgccgtgacctgcaccgccaacagactgctgtacaacaagcagaagatgaacaccagacccatgaagagatgcttcaagagatacagcagaagcagcctgaacagacagcaggacctgagccactgccccccccccccccagctgagactgctggacttcctgcagaagagaaaggagagaaaggccggccagcactacgacctgaagatcagcaaggccggcaactgcgtggacatgtggaagagaagcccctgcaacctggccatccccagcgaggtggacgtggagaagtacgccaaggtggagaagagcatcaagagcgacgacagccagcccaccgtgtggcccgcccacgacgtgaaggacgactacgtgttcgagtgcgaggccggcacccagtaccagaagaccaagctgaccatcctgcagagcctgggcgaccccctgtactacggcaagatccagccctgcaaggccgacgaggagagcgacagccagatgagccccagccacagcagcaccgacgaccacagcaactggttcatcatcggcagcaagaccgacgccgagagagtggtgaaccagtaccaggagctggtgcagaacgaggccaagtgccccgtgaagatgagccacagcagcagcggcagcgccagcctgagccaggtgagccccggcaaggagaccgaccagaccgagaccgtgagcgtgcagagcagcgtgctgggcaagggcgtgaagcacagacccccccccatcaagctgcccagcagcagcggcaacagcagcagcggcaactacttcaccccccagcagaccagcagcttcctgaagagccccacccccccccccagcagcaagcccagcagcatccccagaaagagcagcgtggacctgaaccaggtgagcatgctgagccccgccgccctgagccccgccagcagcagccagagaaccaccgccacccaggtgatggccaacagcgccggcctgaacttcatcaacgtggtgggcagcgtgtgcggcgcccaggccctgatgagcggcagcaaccccatgctgggctgcaacaccggcgccatcacccccgccggcatcaacctgagcggcctgctgcccagcggcggcctgctgcccaacgccctgcccagcgccatgcaggccgccagccaggccggcgtgcccttcggcctgaagaacaccagcagcctgagacccctgaacctgctgcagctgcccggcggcagcctgatcttcaacaccctgcagcagcagcagcagcagctgagccagttcaccccccagcagccccagcagcccaccacctgcagcccccagcagcccggcgagcagggcagcgagcagggcagcaccagccaggagcaggccctgagcgcccagcaggccgccgtgatcaacctgaccggcgtgggcagcttcatgcagagccaggccgccgccgtggccatcctggccgccagcaacggctacggcagcagcagcagcaccaacagcagcgccaccagcagcagcgcctacagacagcccgacaccagagccctgaaccagaagaactag

SEQ ID NO: 25817 - protein, 2391 aa, Artificial Sequence
  derived and/or modified sequence
MTDLLRSVVTVIDVFYKYTKQDGECGTLSKGELKELLEKELHPVLKNPDDPDTVDVIMHMLDRDHDRRLDFTEFLLMIFKLTMACNKVLSKEYCKASGSKKHRRGHRHQEEESETEEDEEDTPGHKSGYRHSSWSEGEEHGYSSGHSRGTVKCRHGSNSRRLGRQGNLSSSGNQEGSQKRYHRSSCGHSWSGGKDRHGSSSVELRERINKSHISPSRESGEEYESGSGSNSWERKGHGGLSCGLETSGHESNSTQSRIREQKLGSSCSGSGDSGRRSHACGYSNSSGCGRPQNASSSCQSHRFGGQGNQFSYIQSGCQSGIKGGQGHGCVSGGQPSGCGQPESNPCSQSYSQRGYGARENGQPQNCGGQWRTGSSQSSCCGQYGSGGSQSCSNGQHEYGSCGRFSNSSSSNEFSKCDQYGSGSSQSTSFEQHGTGLSQSSGFEQHVCGSGQTCGQHESTSSQSLGYDQHGSSSGKTSGFGQHGSGSGQSSGFGQCGSGSGQSSGFGQHGSVSGQSSGFGQHGSVSGQSSGFGQHESRSRQSSYGQHGSGSSQSSGYGQYGSRETSGFGQHGLGSGQSTGFGQYGSGSGQSSGFGQHGSGSGQSSGFGQHESRSGQSSYGQHSSGSSQSSGYGQHGSRQTSGFGQHGSGSSQSTGFGQYGSGSGQSSGFGQHVSGSGQSSGFGQHESRSGHSSYGQHGFGSSQSSGYGQHGSSSGQTSGFGQHELSSGQSSSFGQHGSGSGQSSGFGQHGSGSGQSSGFGQHESRSGQSSYGQHSSGSSQSSGYGQHGSRQTSGFGQHGSGSSQSTGFGQYGSGSGQSAGFGQHGSGSGQSSGFGQHESRSHQSSYGQHGSGSSQSSGYGQHGSSSGQTSGFGQHRSSSGQYSGFGQHGSGSGQSSGFGQHGTGSGQYSGFGQHESRSHQSSYGQHGSGSSQSSGYGQHGSSSGQTFGFGQHRSGSGQSSGFGQHGSGSGQSSGFGQHESGSGKSSGFGQHESRSSQSNYGQHGSGSSQSSGYGQHGSSSGQTTGFGQHRSSSGQYSGFGQHGSGSDQSSGFGQHGTGSGQSSGFGQYESRSRQSSYGQHGSGSSQSSGYGQHGSNSGQTSGFGQHRPGSGQSSGFGQYGSGSGQSSGFGQHGSGTGKSSGFAQHEYRSGQSSYGQHGTGSSQSSGCGQHESGSGPTTSFGQHVSGSDNFSSSGQHISDSGQSTGFGQYGSGSGQSTGLGQGESQQVESGSTVHGRQETTHGQTINTTRHSQSGQGQSTQTGSRVTRRRRSSQSENSDSEVHSKVSHRHSEHIHTQAGSHYPKSGSTVRRRQGTTHGQRGDTTRHGHSGHGQSTQTGSRTSGRQRFSHSDATDSEVHSGVSHRPHSQEQTHSQAGSQHGESESTVHERHETTYGQTGEATGHGHSGHGQSTQRGSRTTGRRGSGHSESSDSEVHSGGSHRPQSQEQTHGQAGSQHGESGSTVHGRHGTTHGQTGDTTRHAHYHHGKSTQRGSSTTGRRGSGHSESSDSEVHSGGSHTHSGHTHGQSGSQHGESESIIHDRHRITHGQTGDTTRHSYSGHEQTTQTGSRTTGRQRTSHSESTDSEVHSGGSHRPHSREHTYGQAGSQHEEPEFTVHERHGTTHGQIGDTTGHSHSGHGQSTQRGSRTTGRQRSSHSESSDSEVHSGVSHTHTGHTHGQAGSQHGQSESIVPERHGTTHGQTGDTTRHAHYHHGLTTQTGSRTTGRRGSGHSEYSDSEGYSGVSHTHSGHTHGQARSQHGESESIVHERHGTIHGQTGDTTRHAHSGHGQSTQTGSRTTGRRSSGHSEYSDSEGHSGFSQRPHSRGHTHGQAGSQHGESESIVDERHGTTHGQTGDTSGHSQSGHGQSTQSGSSTTGRRRSGHSESSDSEVHSGGSHTHSGHTHSQARSQHGESESTVHKRHQTTHGQTGDTTEHGHPSHGQTIQTGSRTTGRRGSGHSEYSDSEGPSGVSHTHSGHTHGQAGSHYPESGSSVHERHGTTHGQTADTTRHGHSGHGQSTQRGSRTTGRRASGHSEYSDSEGHSGVSHTHSGHAHGQAGSQHGESGSSVHERHGTTHGQTGDTTRHAHSGHGQSTQRGSRTAGRRGSGHSESSDSEVHSGVSHTHSGHTYGQARSQHGESGSAIHGRQGTIHGQTGDTTRHGQSGHGQSTQTGSRTTGRQRSSHSESSDSEVHSEASPTHSGHTHSQAGSRHGQSGSSGHGRQGTTHGQTGDTTRHAHYGYGQSTQRGSRTTGRRGSGHSESSDSEVHSWGSHTHSGHIQGQAGSQQRQPGSTVHGRLETTHGQTGDTTRHGHSGYGQSTQTGSRSSRASHFQSHSSERQRHGSSQVWKHGSYGPAEYDYGHTGYGPSGGSRKSISNSHLSWSTDSTANKQLSRH

SEQ ID NO: 25818 - DNA, 87 bp, Artificial Sequence
  derived and/or modified sequence
acaaaattgatagaccactagcaagactaataaagaagaaaagagagaagaatcattaccattcaggacataggcatgggcaaggac

SEQ ID NO: 25819 - DNA, 7176 bp, Artificial Sequence
  derived and/or modified sequence
atgaccgacctgctgagaagcgtggtgaccgtgatcgacgtgttctacaagtacaccaagcaggacggcgagtgcggcaccctgagcaagggcgagctgaaggagctgctggagaaggagctgcaccccgtgctgaagaaccccgacgaccccgacaccgtggacgtgatcatgcacatgctggacagagaccacgacagaagactggacttcaccgagttcctgctgatgatcttcaagctgaccatggcctgcaacaaggtgctgagcaaggagtactgcaaggccagcggcagcaagaagcacagaagaggccacagacaccaggaggaggagagcgagaccgaggaggacgaggaggacacccccggccacaagagcggctacagacacagcagctggagcgagggcgaggagcacggctacagcagcggccacagcagaggcaccgtgaagtgcagacacggcagcaacagcagaagactgggcagacagggcaacctgagcagcagcggcaaccaggagggcagccagaagagataccacagaagcagctgcggccacagctggagcggcggcaaggacagacacggcagcagcagcgtggagctgagagagagaatcaacaagagccacatcagccccagcagagagagcggcgaggagtacgagagcggcagcggcagcaacagctgggagagaaagggccacggcggcctgagctgcggcctggagaccagcggccacgagagcaacagcacccagagcagaatcagagagcagaagctgggcagcagctgcagcggcagcggcgacagcggcagaagaagccacgcctgcggctacagcaacagcagcggctgcggcagaccccagaacgccagcagcagctgccagagccacagattcggcggccagggcaaccagttcagctacatccagagcggctgccagagcggcatcaagggcggccagggccacggctgcgtgagcggcggccagcccagcggctgcggccagcccgagagcaacccctgcagccagagctacagccagagaggctacggcgccagagagaacggccagccccagaactgcggcggccagtggagaaccggcagcagccagagcagctgctgcggccagtacggcagcggcggcagccagagctgcagcaacggccagcacgagtacggcagctgcggcagattcagcaacagcagcagcagcaacgagttcagcaagtgcgaccagtacggcagcggcagcagccagagcaccagcttcgagcagcacggcaccggcctgagccagagcagcggcttcgagcagcacgtgtgcggcagcggccagacctgcggccagcacgagagcaccagcagccagagcctgggctacgaccagcacggcagcagcagcggcaagaccagcggcttcggccagcacggcagcggcagcggccagagcagcggcttcggccagtgcggcagcggcagcggccagagcagcggcttcggccagcacggcagcgtgagcggccagagcagcggcttcggccagcacggcagcgtgagcggccagagcagcggcttcggccagcacgagagcagaagcagacagagcagctacggccagcacggcagcggcagcagccagagcagcggctacggccagtacggcagcagagagaccagcggcttcggccagcacggcctgggcagcggccagagcaccggcttcggccagtacggcagcggcagcggccagagcagcggcttcggccagcacggcagcggcagcggccagagcagcggcttcggccagcacgagagcagaagcggccagagcagctacggccagcacagcagcggcagcagccagagcagcggctacggccagcacggcagcagacagaccagcggcttcggccagcacggcagcggcagcagccagagcaccggcttcggccagtacggcagcggcagcggccagagcagcggcttcggccagcacgtgagcggcagcggccagagcagcggcttcggccagcacgagagcagaagcggccacagcagctacggccagcacggcttcggcagcagccagagcagcggctacggccagcacggcagcagcagcggccagaccagcggcttcggccagcacgagctgagcagcggccagagcagcagcttcggccagcacggcagcggcagcggccagagcagcggcttcggccagcacggcagcggcagcggccagagcagcggcttcggccagcacgagagcagaagcggccagagcagctacggccagcacagcagcggcagcagccagagcagcggctacggccagcacggcagcagacagaccagcggcttcggccagcacggcagcggcagcagccagagcaccggcttcggccagtacggcagcggcagcggccagagcgccggcttcggccagcacggcagcggcagcggccagagcagcggcttcggccagcacgagagcagaagccaccagagcagctacggccagcacggcagcggcagcagccagagcagcggctacggccagcacggcagcagcagcggccagaccagcggcttcggccagcacagaagcagcagcggccagtacagcggcttcggccagcacggcagcggcagcggccagagcagcggcttcggccagcacggcaccggcagcggccagtacagcggcttcggccagcacgagagcagaagccaccagagcagctacggccagcacggcagcggcagcagccagagcagcggctacggccagcacggcagcagcagcggccagaccttcggcttcggccagcacagaagcggcagcggccagagcagcggcttcggccagcacggcagcggcagcggccagagcagcggcttcggccagcacgagagcggcagcggcaagagcagcggcttcggccagcacgagagcagaagcagccagagcaactacggccagcacggcagcggcagcagccagagcagcggctacggccagcacggcagcagcagcggccagaccaccggcttcggccagcacagaagcagcagcggccagtacagcggcttcggccagcacggcagcggcagcgaccagagcagcggcttcggccagcacggcaccggcagcggccagagcagcggcttcggccagtacgagagcagaagcagacagagcagctacggccagcacggcagcggcagcagccagagcagcggctacggccagcacggcagcaacagcggccagaccagcggcttcggccagcacagacccggcagcggccagagcagcggcttcggccagtacggcagcggcagcggccagagcagcggcttcggccagcacggcagcggcaccggcaagagcagcggcttcgcccagcacgagtacagaagcggccagagcagctacggccagcacggcaccggcagcagccagagcagcggctgcggccagcacgagagcggcagcggccccaccaccagcttcggccagcacgtgagcggcagcgacaacttcagcagcagcggccagcacatcagcgacagcggccagagcaccggcttcggccagtacggcagcggcagcggccagagcaccggcctgggccagggcgagagccagcaggtggagagcggcagcaccgtgcacggcagacaggagaccacccacggccagaccatcaacaccaccagacacagccagagcggccagggccagagcacccagaccggcagcagagtgaccagaagaagaagaagcagccagagcgagaacagcgacagcgaggtgcacagcaaggtgagccacagacacagcgagcacatccacacccaggccggcagccactaccccaagagcggcagcaccgtgagaagaagacagggcaccacccacggccagagaggcgacaccaccagacacggccacagcggccacggccagagcacccagaccggcagcagaaccagcggcagacagagattcagccacagcgacgccaccgacagcgaggtgcacagcggcgtgagccacagaccccacagccaggagcagacccacagccaggccggcagccagcacggcgagagcgagagcaccgtgcacgagagacacgagaccacctacggccagaccggcgaggccaccggccacggccacagcggccacggccagagcacccagagaggcagcagaaccaccggcagaagaggcagcggccacagcgagagcagcgacagcgaggtgcacagcggcggcagccacagaccccagagccaggagcagacccacggccaggccggcagccagcacggcgagagcggcagcaccgtgcacggcagacacggcaccacccacggccagaccggcgacaccaccagacacgcccactaccaccacggcaagagcacccagagaggcagcagcaccaccggcagaagaggcagcggccacagcgagagcagcgacagcgaggtgcacagcggcggcagccacacccacagcggccacacccacggccagagcggcagccagcacggcgagagcgagagcatcatccacgacagacacagaatcacccacggccagaccggcgacaccaccagacacagctacagcggccacgagcagaccacccagaccggcagcagaaccaccggcagacagagaaccagccacagcgagagcaccgacagcgaggtgcacagcggcggcagccacagaccccacagcagagagcacacctacggccaggccggcagccagcacgaggagcccgagttcaccgtgcacgagagacacggcaccacccacggccagatcggcgacaccaccggccacagccacagcggccacggccagagcacccagagaggcagcagaaccaccggcagacagagaagcagccacagcgagagcagcgacagcgaggtgcacagcggcgtgagccacacccacaccggccacacccacggccaggccggcagccagcacggccagagcgagagcatcgtgcccgagagacacggcaccacccacggccagaccggcgacaccaccagacacgcccactaccaccacggcctgaccacccagaccggcagcagaaccaccggcagaagaggcagcggccacagcgagtacagcgacagcgagggctacagcggcgtgagccacacccacagcggccacacccacggccaggccagaagccagcacggcgagagcgagagcatcgtgcacgagagacacggcaccatccacggccagaccggcgacaccaccagacacgcccacagcggccacggccagagcacccagaccggcagcagaaccaccggcagaagaagcagcggccacagcgagtacagcgacagcgagggccacagcggcttcagccagagaccccacagcagaggccacacccacggccaggccggcagccagcacggcgagagcgagagcatcgtggacgagagacacggcaccacccacggccagaccggcgacaccagcggccacagccagagcggccacggccagagcacccagagcggcagcagcaccaccggcagaagaagaagcggccacagcgagagcagcgacagcgaggtgcacagcggcggcagccacacccacagcggccacacccacagccaggccagaagccagcacggcgagagcgagagcaccgtgcacaagagacaccagaccacccacggccagaccggcgacaccaccgagcacggccaccccagccacggccagaccatccagaccggcagcagaaccaccggcagaagaggcagcggccacagcgagtacagcgacagcgagggccccagcggcgtgagccacacccacagcggccacacccacggccaggccggcagccactaccccgagagcggcagcagcgtgcacgagagacacggcaccacccacggccagaccgccgacaccaccagacacggccacagcggccacggccagagcacccagagaggcagcagaaccaccggcagaagagccagcggccacagcgagtacagcgacagcgagggccacagcggcgtgagccacacccacagcggccacgcccacggccaggccggcagccagcacggcgagagcggcagcagcgtgcacgagagacacggcaccacccacggccagaccggcgacaccaccagacacgcccacagcggccacggccagagcacccagagaggcagcagaaccgccggcagaagaggcagcggccacagcgagagcagcgacagcgaggtgcacagcggcgtgagccacacccacagcggccacacctacggccaggccagaagccagcacggcgagagcggcagcgccatccacggcagacagggcaccatccacggccagaccggcgacaccaccagacacggccagagcggccacggccagagcacccagaccggcagcagaaccaccggcagacagagaagcagccacagcgagagcagcgacagcgaggtgcacagcgaggccagccccacccacagcggccacacccacagccaggccggcagcagacacggccagagcggcagcagcggccacggcagacagggcaccacccacggccagaccggcgacaccaccagacacgcccactacggctacggccagagcacccagagaggcagcagaaccaccggcagaagaggcagcggccacagcgagagcagcgacagcgaggtgcacagctggggcagccacacccacagcggccacatccagggccaggccggcagccagcagagacagcccggcagcaccgtgcacggcagactggagaccacccacggccagaccggcgacaccaccagacacggccacagcggctacggccagagcacccagaccggcagcagaagcagcagagccagccacttccagagccacagcagcgagagacagagacacggcagcagccaggtgtggaagcacggcagctacggccccgccgagtacgactacggccacaccggctacggccccagcggcggcagcagaaagagcatcagcaacagccacctgagctggagcaccgacagcaccgccaacaagcagctgagcagacactag

SEQ ID NO: 25820 - DNA, 7176 bp, Artificial Sequence
  derived and/or modified sequence
atgactgatctcctgcgatctgtggtaacagtaattgatgtgttctataaatatactaagcaggacggtgagtgcggcaccttgagcaaaggcgaactcaaggagctgttggaaaaagaattgcatcccgtgctcaagaatccggatgatcccgataccgtggatgtcattatgcatatgctcgatcgggaccatgaccgcaggcttgacttcacagagttcctcctgatgatcttcaaactgacaatggcgtgcaataaagtgttgagtaaggagtattgtaaagcgtctggctcaaaaaaacataggagaggacaccgccaccaggaggaagaatccgagaccgaggaggacgaggaagacactcctggccataaatctgggtacaggcacagttcttggtctgaaggagaggaacacggctacagctctggtcattcgagaggaaccgttaagtgccgccacgggtcaaattcgcgccgccttggacggcagggcaatctgagttcatccggcaaccaggagggcagccaaaaaagatatcatagaagcagttgcggacactcttggtcgggggggaaagaccgtcacggctccagttccgtggaactccgggaaaggattaacaagtcccacattagtcccagccgagaatctggagaagagtacgaatccgggtcgggttctaactcttgggagagaaaaggacatggggggctgagctgtggccttgagacctcggggcatgaatctaactctactcagtcaagaattcgggagcagaaattgggctccagttgctccggtagcggagattccggtcgaaggagccacgcgtgcggatactctaacagtagtggttgcggccgcccccagaatgcatcaagcagctgtcaatcacacagatttggaggacagggaaaccagttcagctatatacagagcggctgtcaatcgggaataaagggtggacagggccacggatgcgtgtctggtggtcaaccaagtggctgtgggcagcccgagagcaatccctgctcgcaatcatactctcaacggggctacggtgctcgagagaacggccaacctcagaattgcggtggacaatggaggacaggtagtagccagtcctcctgttgtgggcagtacggatccggaggcagtcagagctgcagtaacggccagcatgaatatgggagttgcgggaggttttcaaattcttcctcatctaatgagttctctaaatgcgaccagtacggatccgggagctcccagtccacttctttcgaacagcacgggaccggactcagccagtccagcggtttcgagcaacacgtgtgcgggagtggccaaacttgcggacagcatgagagcacctcctctcagagcctgggctatgaccaacacgggagttcgtcaggaaagacctctggatttgggcagcatgggagcggtagcggccagtcatcagggtttggtcagtgcgggtctggatcgggtcaatctagtgggttcggacaacatggttcggtttccggacaatccagtggtttcggtcagcatgggagcgtgagcggtcagtcaagtgggttcgggcagcatgagtcccgctcgaggcagtcctcctacgggcagcatgggagcgggagcagccaatcttcaggttacggacagtacggatcccgcgaaacaagcggatttggacagcacggtcttggtagtggtcagtctactggatttggtcagtacggaagtggctctggacagtcttcgggatttggacaacatggcagcgggagcggccagtcttctggcttcggccagcatgagagtaggtccggtcagagtagctatggacagcacagcagtggctcttctcagagcagcgggtatggccagcacgggagccgacagacatcggggtttggtcagcacgggagcgggagttcacagtcgactggcttcggccaatatggatcaggcagcgggcaatcttccgggttcggacagcacgtctcaggctcgggccagagctcaggcttcggccaacacgaaagccggagcggccactccagctacggccaacatggcttcggttcctcacagagttccggctacggtcagcatgggtcctcatcaggccaaacaagcggcttcgggcagcatgaactttcttccggacagtcttcttccttcggccagcacgggtccggatcaggacaatcatccggcttcggacagcatggctcggggtcaggccagagttcaggttttggtcaacacgagtcccgcagcggtcaatcaagttacggacaacatagctccggctcatctcagtcttccgggtatgggcaacatgggtccagacagaccagcggctttggtcagcacggctcgggatccagccaaagcacgggatttggccagtacggttcaggctctggccagagcgccggcttcggccagcatggcagtggatccggccaaagttccggctttgggcagcacgagtctcgctcccaccaatcgtcctacgggcaacacggaagcgggtcctctcaatcgagtggttacggacagcatgggtctagcagcggtcagacatcaggctttgggcagcataggtccagctcgggacagtattctggattcggacagcatggttctggatccgggcagtcatccggattcgggcagcatggcacgggatccggccagtactcaggttttggtcagcacgagtcacgatcacaccagagttcttacggacaacatggcagcgggtcgtcacagtcatccgggtatggccagcacggctcctcctcaggccaaacctttggattcggccagcaccggagcgggtccggccaatcatccgggttcggccagcacggatccgggagtggccagtcttcaggctttggacaacatgagtccggaagcggaaagtccagcggatttggacagcacgagagtcggagctctcaatccaattatgggcaacacggcagcggatcttcacagagctctggttacggccagcatgggagctcttccgggcagaccactgggtttgggcaacacagatccagcagtggtcagtatagtggcttcggccagcatggctccggcagcgaccagtcatcaggctttgggcagcacgggaccgggagtgggcagtcttccggcttcgggcagtatgagagtcgctctcggcagtcttcctatggacagcacggctcggggtcctcgcaaagcagcggctatggacagcatggatccaattccggacagactagcggatttgggcaacaccgtccaggcagcggacagtccagcggatttggccagtatggctcaggaagcgggcagagttctgggtttggccagcatgggagcggcacggggaagtcatccgggttcgctcagcatgagtatagaagcgggcagtcctcctatgggcagcatgggaccggttcttcgcagtcatcaggttgtggccagcatgagtcgggcagcggccctaccacatcctttggtcaacacgttagcggctccgataatttcagctcgagcggacagcacatatctgatagcggccaatctacaggcttcggtcagtatgggtccgggagtggacagtccaccgggttaggacaaggcgaatcacagcaggtggaaagtggctccacggttcatggtagacaggaaacaactcacggccagaccattaataccacccgtcacagccagagcggccagggacagagtacccagacaggcagtcgagttactcggcggcggcgatcctcccagtctgaaaatagcgattcagaagtgcactccaaggtatcacaccgacactcagagcatatccacacgcaagctggctcacactaccctaaaagcggctctactgtgcgccggaggcagggcacaacacatggacagagaggtgacactactaggcacgggcactctggccatggccaatctacccagacaggatcacggaccagcgggaggcaacgattctcccatagcgacgctacggattccgaggtgcactcaggggtgagccaccgtccccactcccaggaacaaacacacagccaagccggatctcaacatggcgaaagcgaatctacagttcacgaaaggcatgagaccacctacgggcagacgggtgaggctactggtcacggacattctggccatggccagagcactcaaaggggttcccggacaactggacgccgggggtcagggcatagtgaatcatcagactctgaggtccacagtggaggctcccacagaccccaatcacaggaacagactcacgggcaagccggctctcagcacggggagagcggtagcaccgtgcacgggcggcatggcaccacgcacggacagactggagataccacacgccatgcacactatcaccatggtaagagcactcagcggggtagctctactactggaagaagaggctctgggcattctgaaagttctgacagcgaagtgcactccgggggctcccacactcactcaggccatacacacggacaaagtgggagccagcatggcgagtcagaatctattatccacgataggcaccgcattacccacgggcagacaggtgacaccacacggcattcttattccggtcatgagcagacgactcaaactgggtcccgcaccacaggccggcagagaacctcccattcagagtcgaccgactccgaagtgcactctggtggcagtcataggccccatagcagggaacatacctacggccaggctggcagccaacatgaagaacccgagtttaccgttcacgagcgtcatggcactacacacggtcaaataggggacactaccggacacagccactccgggcacggccagagcacccaacggggctcacggacaaccggcaggcaaagatccagtcacagcgaaagttccgatagcgaagtgcactccggtgtctcacatactcacaccggccacacccatgggcaagccgggagccaacatggccagtctgagtcaatagtgccggagcgacatggtactacccatggccagactggagatactacacggcacgctcactaccatcacggtctgacgacccagaccggttcaagaactactggccggcggggatctgggcactctgagtactcagactcagagggctattcaggcgtgtcccacacccactccggacacacacacggacaggcaagatcacaacatggcgagtccgaatcaatcgtgcatgaacggcacgggacaatccacgggcagaccggcgacaccacccgccatgcgcacagcggccatggccagtccacccagaccggaagtcggactaccggtcggagatcctcgggccattctgagtattcagattcagaaggtcactcaggattttctcagagacctcattctcgtgggcacacacacggacaggcgggctcccaacacggtgagtctgagagtatcgtggatgagcgtcatggaactactcatgggcaaactggggatacgtcaggccacagccagtccggacacgggcagtccacacaatcaggtagcagcacaaccggaaggagaaggtccggacattccgagtccagcgactcagaggtgcatagtggaggatcacatactcacagcggccacacccattcccaggccagaagccagcatggagaatcagagtcaacggtgcataagcggcatcaaacgacccatggacaaactggggacaccaccgagcatggacacccgagccatggacagactattcaaaccggatctagaaccaccggtcgtcgtggcagcggtcacagtgagtacagtgacagcgaaggtccctccggcgtcagtcacacccactcaggtcatacacacggtcaggcaggatcccactatccggaaagcggcagctctgtccatgagcggcacggcaccacccatggacagactgccgataccacccgacatggtcactcagggcacgggcagtcgacgcagcgtggatcgagaaccacgggcagaagagcttccggtcacagcgagtacagcgacagcgagggccattcaggagtatcacacactcactcagggcatgcccacgggcaggccggctcacagcacggggaatctggatcatctgttcatgaacggcacgggactactcatgggcagacaggtgatacaacaagacacgcacacagtggtcatgggcagtctactcagagaggttcacgcaccgctggccggcgagggagcgggcactccgagagctctgattctgaggttcactccggtgtctctcacacccatagcggacatacttatggccaggctagatctcaacacggcgaatctggctctgccattcacggaagacagggcaccatccatggacagacaggcgacactacgcgacacggacagtccggacatgggcagtccacacagactgggagtagaactactggacggcagaggagttcacactctgagagctccgacagcgaagtgcactcagaggcctctcccacccactctggccacacacactctcaggcaggatcacggcatggccaaagcggatcctccggccacggaaggcagggtacaacacacggccagacaggcgataccacacgccatgcacactatgggtatggacaaagcactcaacgcgggtccagaacaaccggaagacgcgggtccggccacagcgagtcctcagatagcgaggtacactcttggggaagtcacacacactcaggacacattcagggccaggctggctcacagcagaggcaaccggggtctacggtgcacggaagacttgaaacgacacatgggcagacaggggacactacccgccacggtcactctggttatgggcagtcaacacaaacaggaagccgctcaagcagagcctcccactttcagtcacatagcagcgaacgtcaacgtcacggctcaagtcaggtctggaaacacggctcttacggcccagctgaatatgactacggacacaccggttacggtccctccggcggctcccgtaagtctatctccaattcgcacctttcctggagcaccgattccactgctaataagcagctaagccgccactag

SEQ ID NO: 25821 - DNA, 7176 bp, Artificial Sequence
  derived and/or modified sequence
atgacagacctgctgcggtctgtggtgacagtgattgatgtgttctacaagtacaccaagcaggatggagaatgtggcaccctgagcaagggggagctgaaggagctgctggagaaggagctgcaccctgtgctgaagaacccagatgatcctgacacagtggatgtgatcatgcacatgctggaccgggaccatgaccggcggctggacttcacagagttcctgctgatgatcttcaagctgaccatggcctgcaacaaggtgctgagcaaggagtactgcaaggccagcggcagcaagaagcacagaagaggccaccgccaccaggaggaggagagcgagacagaagaagatgaggaggacaccccaggccacaagagcggctaccgccacagctcctggagcgagggggaggagcacggctacagcagcggccacagccggggcaccgtgaagtgcagacatggcagcaacagccggcggctgggccggcagggcaacctgagcagcagcggcaaccaggagggcagccagaagcgctaccacaggagcagctgtggccacagctggagcggcggcaaggacagacatggcagcagctctgtggagctgcgggagcgcatcaacaagagccacatcagccccagccgggagagcggggaggagtatgaaagtggcagcggcagcaacagctgggagaggaaaggacatggaggcctgagctgtggcctggagaccagcggccacgagagcaacagcacccagagccgcatccgggagcagaagctgggcagcagctgcagcggcagcggggacagcggcagaagaagccacgcctgtggctacagcaacagcagcggctgcggccggccccagaatgccagcagcagctgccagagccacagatttggaggccagggcaaccagttctcctacatccagagcggctgccagagcggcatcaagggcggccagggccacggctgtgtgtctgggggccagcccagcggctgcggccagcctgagagcaacccctgcagccagagctacagccagaggggctatggagccagagaaaatggccagccccagaactgtggcggccagtggaggacaggcagcagccagagcagctgctgcggccagtatggcagcggcggcagccagagctgcagcaatggccagcacgagtatggcagctgtggccgcttcagcaacagcagcagcagcaatgagttcagcaaatgtgaccagtatggcagcggcagcagccagagcaccagctttgagcagcacggcaccggcctgagccagagcagcggctttgagcagcacgtgtgtggcagcggccagacctgtggccagcacgagagcaccagcagccagagcctgggctatgaccagcacggcagcagcagcggcaagaccagcggcttcggccagcacggcagcggcagcggccagagcagcggcttcggccagtgtggcagcggcagcggccagagcagcggcttcggccagcacggctctgtgtctggccagagcagcggcttcggccagcacggctctgtgtctggccagagcagcggcttcggccagcacgagagccgcagccggcagagcagctatggccagcacggcagcggcagcagccagagcagcggctacggccagtatggcagccgggagaccagcggcttcggccagcacggcctgggcagcggccagagcacaggcttcggccagtatggcagcggcagcggccagagcagcggcttcggccagcacggcagcggcagcggccagagcagcggcttcggccagcacgagagccgcagcggccagagcagctatggccagcacagcagcggcagcagccagagcagcggctacggccagcacggcagccggcagaccagcggcttcggccagcacggcagcggcagcagccagagcactggatttggccagtatggcagcggcagcggccagagcagcggcttcggccagcacgtgtctggcagcggccagagcagcggcttcggccagcacgagagccgcagcggccacagcagctatggccagcacggcttcggcagcagccagagcagcggctacggccagcacggcagcagcagcggccagaccagcggcttcggccagcacgagctgagcagcggccagagcagcagctttggccagcacggcagcggcagcggccagagcagcggcttcggccagcacggcagcggcagcggccagagcagcggcttcggccagcacgagagccgcagcggccagagcagctatggccagcacagcagcggcagcagccagagcagcggctacggccagcacggcagccggcagaccagcggcttcggccagcacggcagcggcagcagccagagcactggatttggccagtatggcagcggcagcggccagagcgctggcttcggccagcacggcagcggcagcggccagagcagcggcttcggccagcacgagagccgcagccaccagagcagctatggccagcacggcagcggcagcagccagagcagcggctacggccagcacggcagcagcagcggccagaccagcggcttcggccagcacaggagcagcagcggccagtacagcggcttcggccagcacggcagcggcagcggccagagcagcggcttcggccagcacggcaccggcagcggccagtacagcggcttcggccagcacgagagccgcagccaccagagcagctatggccagcacggcagcggcagcagccagagcagcggctacggccagcacggcagcagcagcggccagaccttcggcttcggccagcacaggagcggcagcggccagagcagcggcttcggccagcacggcagcggcagcggccagagcagcggcttcggccagcatgaaagtggcagcggcaagagcagcggcttcggccagcacgagagccgcagcagccagagcaactacggccagcacggcagcggcagcagccagagcagcggctacggccagcacggcagcagcagcggccagaccactggatttggccagcacaggagcagcagcggccagtacagcggcttcggccagcacggcagcggcagtgaccagagcagcggcttcggccagcacggcaccggcagcggccagagcagcggcttcggccagtatgagagccgcagccggcagagcagctatggccagcacggcagcggcagcagccagagcagcggctacggccagcacggcagcaacagcggccagaccagcggcttcggccagcacaggcctggcagcggccagagcagcggcttcggccagtatggcagcggcagcggccagagcagcggcttcggccagcacggcagcggcaccgggaagagcagcggctttgcccagcacgagtaccgcagcggccagagcagctatggccagcacggcaccggcagcagccagagcagcggctgcggccagcatgaaagtggcagcggccccaccaccagctttggccagcacgtgtctggcagtgacaacttcagcagcagcggccagcacatcagtgacagcggccagagcactggatttggccagtatggcagcggcagcggccagagcacaggcctgggccagggcgagagccagcaggtggagagcggcagcacagtgcacggccggcaggagaccacccacggccagaccatcaacaccaccaggcacagccagagcggccagggccagagcacccagacaggcagccgggtgaccaggagaagaagaagcagccagagcgagaacagcgacagcgaggtgcacagcaaggtgagccaccgccacagcgagcacatccacacccaggccggcagccactaccccaagagcggcagcacagtgagaagacggcagggcaccacccacggccagagaggagacaccaccaggcatggccacagcggccacggccagagcacccagacaggcagcaggaccagcggccggcagcgcttcagccacagtgatgccacagattctgaggtgcacagcggcgtgagccaccggccccacagccaggagcagacccacagccaggccggcagccagcacggggagagcgagagcacagtgcatgaaagacatgagaccacctacggccagacaggagaggccactggacatggccacagcggccacggccagagcacccagaggggcagcaggaccactggaagaagaggcagcggccacagcgagagcagtgacagcgaggtgcacagcggcggcagccaccggccccagagccaggagcagacccacggccaggccggcagccagcacggggagagcggcagcacagtgcacggcagacatggcaccacccacggccagacaggagacaccaccaggcatgcccactaccaccacggcaagagcacccagaggggcagcagcaccaccggccggcggggcagcggccacagcgagagcagtgacagcgaggtgcacagcggcggcagccacacccacagcggccacacccacggccagagcggcagccagcacggggagagcgagagcatcatccatgacagacaccgcatcacccacggccagacaggagacaccaccaggcacagctacagcggccacgagcagaccacccagacaggcagcaggaccaccggccggcagaggaccagccacagcgagagcacagacagcgaggtgcacagcggcggcagccaccggccccacagccgggagcacacctacggccaggccggcagccagcacgaggagcctgagttcaccgtgcatgaaagacatggcaccacccacggccagatcggggacaccaccggccacagccacagcggccacggccagagcacccagaggggcagcaggaccaccggccggcagaggagcagccacagcgagagcagtgacagcgaggtgcacagcggcgtgagccacacccacacaggccacacccacggccaggccggcagccagcacggccagagcgagagcatcgtgcctgagcggcacggcaccacccacggccagacaggagacaccaccaggcatgcccactaccaccacggcctgaccacccagacaggcagcaggaccactggaagaagaggcagcggccacagcgagtacagcgacagcgagggctacagcggcgtgagccacacccacagcggccacacccacggccaggcccggagccagcacggggagagcgagagcatcgtgcatgaaagacatggcaccatccacggccagacaggagacaccaccaggcatgcccacagcggccacggccagagcacccagacaggcagcaggaccaccggccgccgcagcagcggccacagcgagtacagcgacagcgagggccacagcggcttcagccagaggccccacagccggggccacacccacggccaggccggcagccagcacggggagagcgagagcatcgtggatgagcggcacggcaccacccacggccagacaggagacaccagcggccacagccagagcggccacggccagagcacccagagcggcagcagcaccactggaagaagaagaagtggccacagcgagagcagtgacagcgaggtgcacagcggcggcagccacacccacagcggccacacccacagccaggcccggagccagcacggggagagcgagagcacagtgcacaagaggcaccagaccacccacggccagacaggagacaccacagagcacggccaccccagccacggccagaccatccagacaggcagcaggaccaccggccggcggggcagcggccacagcgagtacagcgacagcgagggccccagcggcgtgagccacacccacagcggccacacccacggccaggccggcagccactacccagagagcggcagctctgtgcatgagcggcacggcaccacccacggccagacagctgacaccaccaggcatggccacagcggccacggccagagcacccagaggggcagcaggaccactggaagaagagccagcggccacagcgagtacagcgacagcgagggccacagcggcgtgagccacacccacagcggccacgcccacggccaggccggcagccagcacggggagagcggcagctctgtgcatgaaagacatggcaccacccacggccagacaggagacaccaccaggcatgcccacagcggccacggccagagcacccagaggggcagcaggacagctggccggcggggcagcggccacagcgagagcagtgacagcgaggtgcacagcggcgtgagccacacccacagcggccacacctacggccaggcccggagccagcacggggagagcggcagcgccatccacggccggcagggcaccatccacggccagacaggagacaccaccaggcatggccagagcggccacggccagagcacccagacaggcagcaggaccaccggccggcagaggagcagccacagcgagagcagtgacagcgaggtgcacagcgaggccagccccacccacagcggccacacccacagccaggccggcagccgccacggccagagcggcagcagcggccacggccggcagggcaccacccacggccagacaggagacaccaccaggcatgcccactacggctacggccagagcacccagaggggcagcaggaccaccggccggcggggcagcggccacagcgagagcagtgacagcgaggtgcacagctggggcagccacacccacagcggccacatccagggccaggccggcagccagcagaggcagcccggcagcacagtgcacggccgcctggagaccacccacggccagacaggagacaccaccaggcatggccacagcggctacggccagagcacccagacaggcagccgcagcagccgggccagccacttccagagccacagcagcgagcggcagagacatggcagcagccaggtgtggaagcacggcagctatggccctgcagaatatgactatggccacacaggctacggccccagcggcggcagcaggaagagcatcagcaacagccacctgtcctggagcacagacagcacagccaacaagcagctgagccgccactag

SEQ ID NO: 25822 - DNA, 7176 bp, Artificial Sequence
  derived and/or modified sequence
atgaccgacctgctgcggagcgtggtgaccgtgatcgacgtgttctataaatacactaaacaagatggtgagtgtggaaccttgtccaagggggaacttaaagaattattggagaaggaactgcacccagtcctaaaaaatcccgatgatcctgataccgtagatgtgatcatgcacatgttagatcgggaccacgaccgccgactggatttcaccgaattcttgctcatgatctttaagctgaccatggcgtgtaataaagtactgtccaaggagtactgtaaggcctcaggctccaaaaagcatcgccgcggacatagacaccaggaagaggagtctgagacggaagaagatgaggaagatacccctggtcataagagtgggtatcgtcacagcagctggtccgagggcgaagaacacgggtattcatctggacatagccgcggcacggtgaagtgtcgtcatggttccaactcccggcgactgggtaggcaaggaaacttgagttcgtcaggaaaccaagaggggtctcagaagagataccacaggtcgtcatgcggacattcttggagcggggggaaggatcgacacggctcgtcctccgtggaactgagagaacggatcaacaaaagtcacatcagcccatcccgggaatccggtgaagaatacgaatccgggtccggctccaacagttgggaacggaaaggccacggaggcttaagttgtggcctggagacaagtgggcacgaaagcaactccacgcagtcccgcatcagggagcagaagctgggaagctcatgctccgggtccggcgattctgggcgacggtcacacgcctgtggatattctaatagcagtggctgtggacggccccagaacgccagctcatcctgccagagtcacagattcgggggacagggtaaccagttctcatacatccaaagtggctgtcagtcagggatcaaaggcggccagggtcatggatgcgtgagtggcggacagccctccggctgcggccaaccagagtccaatccctgttcacaaagctacagtcaaaggggttacggagccagggagaatggacagccgcagaactgtggcggtcagtggcgcacgggctcaagtcagagctcatgctgcggccagtatggaagcggtggctcccaatcctgtagtaatggccagcacgaatatggcagctgtggcaggtttagcaattccagttcttccaatgagttttcaaagtgtgatcaatatgggtcgggctctagtcagagtacgagctttgagcagcacgggactggcctcagtcagtcctcgggcttcgaacagcacgtgtgtggatctggacagacatgtggacagcacgaatccacttcatctcagtctctgggctacgatcagcatgggtctagctcggggaaaacttccggattcggacagcacggctctggtagtggtcaaagttcaggtttcggccagtgcggctctgggtcgggtcaatcctcagggtttggccagcacggatcagtgtccggtcagagttccggttttggacagcacggctccgtctccgggcaatcatcaggattcgggcaacatgagtcgcgttctcgccagtcgagctacggccagcacgggagcggtagttctcagagcagcgggtatggacagtacggcagccgagagacgtcgggattcggtcagcacgggcttgggtccggccagagcacagggttcggtcagtatggcagtggtagcggacagagctcagggttcggccagcacggctccggaagtggacagtcttccggcttcggacagcatgaatcccggagcggccagtcgagctatggacagcacagttcagggtcttctcagtcttctggctatggacagcacgggagccggcagacttcaggatttggacaacacgggtcgggaagtagccagagcactggattcggccagtatggtagtggcagcggccaatccagcggctttggtcagcatgtgagcggctcgggccagtctagtggctttggccagcatgaatcaagatctggacacagctcttacgggcagcacggattcggtagcagccagtcatccggctatgggcaacacggatcctcctcaggccagacatctggtttcggacagcacgagctgtcatcgggccaatcgagctctttcgggcagcatggttccgggagcgggcagagtagtggttttggtcaacacggctccggctctggtcagtcctcgggattcggccagcatgaaagccgcagtgggcagtccagctacggccagcactcttccggaagcagccagtctagcggctatggccaacatggaagccgacagacaagcggatttggccagcacgggagcggatcttcccagtcaaccgggttcggacagtacggtagtggaagcggccagtccgcaggattcggacagcacgggagtggatccggccagtccagtgggttcggccaacatgaaagtagaagccaccagagtagctacggccaacatggctccggctccagccaaagtagtggatatggtcagcacggaagctcatccggacagaccagcggctttggacagcatcggtcttcttctggccagtactcagggttcggacagcacggatcgggctccggccaaagtagcggcttcgggcagcacggcaccggcagtgggcagtactctggttttggacagcatgagagccgttcacaccagtctagttatggtcaacatggcagcggatcttctcagtcctccggctacgggcagcatgggagttcatccggccaaacgtttggatttgggcaacacaggagcgggtccggccagtctagtggctttggacagcacgggtccggctcaggacagtcttctggcttcggacagcatgagtcaggctctggcaaaagcagtggctttggccagcacgagtcacgtagcagccagtccaactatgggcagcacggctcaggatccagtcaatcctctggctatgggcagcatggttcatccagcggccaaactacagggtttggacagcacagatcttcttctggacagtacagcggtttcggccagcacggtagcggctcggatcagagcagtggctttggccaacacggaaccgggagcggccagagctccggttttggccagtatgagagtcgctcgaggcaaagcagctacggacagcatggatctgggtcatcccaaagctcaggctacggccaacacggaagcaacagtggtcagacttctgggtttgggcagcaccgcccagggtctgggcagtcttctggattcggccagtatggaagtggcagtggtcagagttctgggttcggtcaacacggtagcggcaccgggaaatcttcggggtttgcccaacacgaatatagaagtgggcagtcgagctatggtcaacacggcaccggatcaagccagtcaagcggctgcggccaacatgagagcggatcagggcctaccacaagcttcggacagcatgtgtcaggctcagataacttctcctcatcaggccaacacatttccgattcggggcagagcactgggttcggacagtatggttccggcagtggtcagagcaccgggctgggtcaaggcgaatcacaacaggttgagtctggctctacagtgcacggacggcaggagaccacacatggacagaccatcaatactaccagacacagccaatcaggccaaggccagtctacccaaaccggtagtagagtcaccaggaggcggcggagcagtcagagcgagaacagcgactctgaagtgcacagtaaagtttcacatcgacattctgagcatattcacactcaagccggtagccattatccgaaaagtggatctaccgtccgcaggagacaggggacaactcatggtcagaggggagacacgacaaggcacgggcatagcgggcatggacagagcacccagacagggagccgcacctccggacgccagcgtttttcgcattccgatgcgacagactcagaggtgcactctggtgttagtcacaggccgcactcacaggagcaaacccatagtcaagccggctctcagcacggggaatctgagagtactgtgcacgagaggcatgaaacaacatacggacagaccggtgaagccacaggacacggccatagcggccacggccagtccacacagaggggttctagaacgacgggacgtaggggttcgggccactctgagtcctctgattcagaggtgcactccggtggaagtcatcgcccccagtctcaggagcagactcacggccaggccggttctcagcacggcgagtccgggagcactgtgcacgggaggcatgggaccacacatggacagacgggggatacaacgcgtcatgcacattaccaccatgggaaaagtacgcagcgggggagcagcaccactggacgtagggggagtggccattcagagtcgagcgactctgaggtgcacagtggcggatcacatactcacagtggacacacccacggtcagagcggaagccagcacggcgagagcgaaagtattatccatgataggcatagaatcacacatgggcagacgggggacacaacaaggcattcatactctgggcatgaacagacaacccagaccggctctagaactacggggcgacagcggacctctcactctgagtcaacagactccgaggtgcacagtgggggaagtcataggccccacagtagggaacatacgtacggtcaggcagggagccaacacgaggagcccgagtttaccgtacatgaaagacacggtaccacacatggccaaatcggtgacaccacaggccatagtcactcaggccatggtcagagcacccagagggggtcccgaacaaccgggcgacagcggtcctcccactccgaatcctccgatagcgaggtacacagtggtgtcagccatacccacacaggccatactcatggacaggccggcagtcagcacgggcagtcagagagcattgtgccagagcgacacggcaccacccacggacagaccggcgacacaactcgtcacgctcactaccaccatggtttgactacacagacagggagccgaactactggacgccgggggagcggacatagcgagtacagcgatagtgaaggatacagcggcgtgtctcatacgcatagtggtcacacccacggtcaggctcgcagccagcacggtgagagcgagtctattgtgcacgaaaggcacgggacaatccacgggcagactggagacactacgcggcacgcacacagcggccacggacaaagcacacagacggggtcacgaaccactggccgcaggagctccggacattccgaatactctgattctgaaggccactctgggtttagtcagcgaccgcactcgcgaggacatacccacggacaggccggcagccagcacggcgaatctgagtcaatagtcgatgagcgccatggcacaacacacggacagacaggcgatacctctggccacagtcagtccggccacggacagagtactcaatcagggagctctacaacagggcgaaggcggtccggacattcggaatctagcgacagtgaagttcactctgggggaagccatacgcattcagggcatacccacagtcaggctcgctcccaacacggcgaatctgagtccacggtacataaacgtcaccagaccacccacgggcagaccggagatactacagagcatggtcacccatcacatggacagactattcagacaggttccaggacgactggcagaagaggttccggccactccgaatactccgatagtgaaggcccgagtggggtatcgcacactcactctggacacacgcacggccaggccgggtcccactaccccgaatccggcagtagtgtacacgagaggcacggcaccacacacgggcaaaccgccgacactacacgtcatggccacagtggccatggtcagagtacgcagagaggcagtcgtaccaccggacgacgggcttctggtcactcagagtacagtgactctgaagggcactctggggtcagccacacacactcggggcatgctcacggacaggccggatcccagcatggagaaagcgggagctccgtccacgagcgacacgggactacccacgggcaaaccggggatacgacccgacacgcccactccggtcacggacagagcactcagcggggatcaaggacagctggaagacgcggcagtgggcactctgagtcatccgacagtgaggtgcatagtggagtaagccacacgcacagcggccacacctacggacaagcgcggtcccaacacggagaatccggcagtgccatacatggcaggcagggaaccatccatggtcagaccggggacacaactaggcatggtcagtctggacatggccagtccacccagactggcagtcgaaccaccggtcgacagcggtcctcccatagcgaatcctccgacagtgaagtgcatagcgaggcaagtccaactcacagcggtcatacccattcacaagccggatcacgccatggacaatcaggctcatctggccacggacgacagggcacaacccatggccagacgggtgataccactcgacatgcccactacggctacggccagtccacacagcggggttcacgtacgactggaaggagaggttccggacacagtgagtcctcggactccgaagtgcacagttggggctctcatacgcacagtggacacatccaagggcaagcaggtagccagcagagacagccaggctccacagtgcatggtcgtctggagacaactcacggccagaccggagatactaccaggcacggtcactcaggctacggccagtcaactcagactggaagcaggtcaagtcgggcatcccattttcagtcccacagttctgagaggcagcggcacggctcttcacaggtatggaagcacggcagctacgggccagctgagtatgattatggccacactggctacggtcccagcggaggatctaggaaatccatctctaattctcatctgtcatggtctacagattcaaccgcaaataaacagttgagtaggcattag

SEQ ID NO: 25823 - DNA, 7175 bp, Artificial Sequence
  derived and/or modified sequence
atgactgacctcctccgctctgtggtcaccgtgatcgacgtattctacaaatataccaagcaggatggtgagtgtggtacgctgagcaaaggggaactgaaagaactgctggagaaagaattacatcctgtcctcaagaacccagacgatcctgacactgttgatgtgattatgcacatgcttgatagagaccacgatcggcgtctggattttaccgaattcctcttgatgattttcaagttaactatggcctgcaataaggtgctgagcaaagaatattgcaaggcatccggctcgaagaagcaccgacggggacaccggcatcaggaagaagaaagcgagacggaggaagacgaggaagataccccaggccataagtccggttaccgtcacagctcttggtccgagggggaagaacatggttactcgtctggacactctcgagggacagtgaagtgccggcacggctcaaattccaggcgcttaggaagacagggtaacctctcatcatctgggaatcaggaggggagccagaaacgttaccaccgatcttcgtgtgggcacagctggtctggtggtaaagaccgccacggctcctcttcagtagagttgcgagaacgaattaataaaagccatataagtccctcacgggaatctggggaggagtacgagagcggctctgggagtaactcttgggagaggaaagggcatggagggcttagctgcggactggaaacatcgggacacgagagcaacagcacacagtctaggatacgggagcagaaactcggctcatcatgttcgggatcgggagacagcggacgaagaagccacgcttgtggctactccaattccagcggctgtggaaggccgcaaaacgcttctagctcctgccagtctcacaggttcggtggccagggcaatcagttctcttacatccagagcggctgtcagagcggaattaagggcggacagggccatggctgcgtgtcaggagggcagccctccggatgcgggcagccggaatccaatccatgttctcagtcatattcccagcgcggttacggcgctcgagaaaacgggcaacctcagaactgcggcggacaatggcggactggcagttcccagagctcatgttgcggtcagtatgggtctggagggtcacagagctgcagtaacggacaacacgagtatggctcctgcgggagatttagcaactcatcttcctctaacgaattctccaaatgtgatcagtatggctctggcagttctcagtccactagtttcgaacagcacgggaccggtctcagccagtcctcaggattcgagcagcatgtttgtggctcgggccagacctgtggacagcacgagtccacgagctctcagagcctcgggtatgatcagcacggtagcagctccgggaaaacatctggcttcgggcagcatggcagcggttcaggacagagcagtgggttcggtcaatgcgggagcggcagtgggcagagctctggtttcggccagcacgggtcagtgtccgggcaatcaagcggcttcggacagcacgggagcgtttcgggccagtcaagcgggtttgggcagcatgagagcaggtctagacagtccagttacggtcaacacgggagcggcagctcccaatcatccggctatggacagtatggtagccgagagacttctggcttcggccagcacggcctcggctctgggcaatcaacaggttttggtcagtatggatcaggctcaggccagagctccggattcggccaacatggctctggcagcgggcagtcctcaggtttcgggcaacatgaaagtagaagcggacaatcatcatacgggcaacactcatcaggttcatctcagtcttccggctacggtcagcatggaagtaggcagaccagtggttttggacaacacggttcgggatcgagtcagagcacagggttcggtcagtacggcagtggctccgggcagtcttctggatttggccagcacgtgtccggtagcggccaatctagtgggttcggccagcacgaatccagatccggccattcctcctatgggcagcatggctttggctctagccaatcttcaggatacggacaacatgggtcttcaagtggtcagacctccggctttggccaacacgaactgagttccggacagtcttcttccttcggccagcatggatcaggctctggccaatcttccggtttcgggcaacatgggtcgggaagtggtcagtcttcaggattcggtcaacacgagagtcggtccggccaatcctcttatggacaacattcaagtggaagcagtcaatccagtggctacgggcagcatgggagcaggcagacgtcaggattcggccagcacggctcaggaagctcgcagtctaccggattcgggcaatacggatcggggtctgggcagtccgctggcttcggacagcatggctcggggagtggtcagtcatccggatttgggcagcatgaatctagaagccaccagtcctcctatgggcagcatggttccggatcatctcagagcagtgggtatgggcagcacggcagcagcagtggacagacctccggattcggtcagcacaggtcttcatctgggcagtactcaggttttggtcagcatggctccggatctggccagagctccgggtttggccagcatggaaccggttccgggcagtactcaggattcggccagcacgagtcgcgctcacaccagtcaagctacgggcaacacggctccgggagtagccagtcttctggatacggtcaacacgggtcgagctccgggcagacttttgggttcgggcagcatcgcagtggatccgggcaatcatccggattcggccaacacggtagcggctcagggcagtccagcggctttggtcagcatgagtcaggatccggtaagagttctgggtttggtcagcacgaatcaaggtcaagtcaatctaactacggacagcacggctctggcagttcccagagctccggatacggacagcatggaagcagctcggggcagacaaccggcttcgggcagcacagatcaagcagcggccagtacagtgggtttggtcagcacggctcaggatcagaccaaagtagtgggtttgggcagcacggcactggttccgggcagagcagtgggtttggtcagtacgaatctaggtctcgacagtcgtcttacggacagcatggcagcggatccagccaaagttctggctacggacaacacggctcaaactcagggcaaacttccggcttcggacagcatagacccggaagcggtcaatcatccggctttggacagtatggatccggtagtgggcagagttcagggtttggtcagcacgggtctggaaccggaaagtcttccggttttgcccagcatgaatatcggtcaggacagtcgtcctatgggcagcacgggactggttcatcccagagttctggatgcggtcagcacgagagcggcagcggcccaacaacatcattcggccagcatgtctccgggagcgacaacttctctagctccggacagcacatcagcgactcgggtcagagcaccggcttcgggcagtacggctccggcagcggccaatctaccggcctgggacaaggcgagagccagcaggtcgaatctgggagtaccgtgcatggacggcaggagaccacccacggccagaccattaataccaccagacatagccagtcaggacaggggcaatcgacccagacaggatcacgcgtcactcgtcggagaaggagtagtcaatctgaaaattccgactccgaagtgcatagtaaagttagccaccggcacagtgagcacatccacacccaagcgggatcccattacccaaagtcgggatccacagtgaggcggcgacaaggtactacacatggccagagaggcgacaccaccaggcatggacactccggacacgggcagtccactcaaacaggctcccgtaccagcggtcggcagcgctttagtcactcagatgccactgattcagaggtgcattctggggtatcacataggccacacagccaggaacagacacacagtcaagccggatcgcaacacggtgagagtgaatcaacggtccatgagagacacgagaccacttatggccagactggtgaggcaaccggacacggacatagcggacatgggcaaagcacgcagcggggtagtaggaccaccgggaggagaggtagcgggcattcggagtccagtgattcagaggttcatagcggtggctctcatcgcccacagtctcaggagcaaacacatggacaggctggatcccaacatggggagtccggctcgacggtgcatgggcgtcatggcacaacccacggccagacgggtgacactacgaggcacgcccattatcatcacggtaagtctacccagcggggttctagtaccacgggacggagaggtagcggccatagcgaatcttccgacagtgaggtgcattccggaggatcacatacgcattcagggcatactcacgggcagtctggctcccaacacggagaatcagagtcaattatccacgaccgtcaccggatcacccatggccaaactggtgacacaacaaggcactcatacagcggccatgagcaaactactcagaccgggtcgagaacaactggacggcagagaacatcacactccgagtctactgattctgaggtgcactcaggcggatcccataggccccactcacgcgaacacacctatggacaagccggaagtcaacacgaggaacccgaattcactgttcatgaacgccacgggaccactcacggacaaatcggcgacaccactggccattcacactctggacatggacagtccacccagagagggtcacgaacgactgggaggcaaagaagcagtcattccgagtcatctgattctgaggttcactccggcgtttctcatacccatacaggacatacccatggacaggccggtagtcagcacggccagtctgaaagtatcgtccctgagaggcatggcactacacacggtcaaacgggagataccactcggcatgctcactaccatcatggtctgacaacgcagaccggctctcgtaccactgggcgtcgcggatctggccatagtgagtattctgattcagaagggtatagcggggtgtcacacacacactccggccatactcacgggcaggcccgatcgcagcacggggaaagtgagagtatcgttcatgaaagacatgggaccattcacggccaaactggggatacgactcggcacgctcatagtggacatggacaatccacccagaccgggagccgaacaactggccgacgaagcagtggacatagcgaatactcggacagcgaggggcacagcgggttcagtcagcggcctcactcacgcggtcatacacatggacaggctgggtcccagcacggcgagagtgagagcattgtcgatgagcggcacggtaccacccatggccaaaccggggacaccagtggacactctcagagcggccacggacaatccacccaatctggtagctcaacgacagggagacggcgttccggccattccgagtcatctgattctgaggtgcatagcggcggttcacacacccatagcggccatacccacagccaagccaggtctcagcacggtgagtctgaatcaaccgtgcacaagcggcaccagacaacacatgggcagacaggcgacacaaccgaacatggccatcccagtcacgggcaaacaattcagacaggctcccgaacgacaggccgaaggggttccggtcattctgagtatagcgacagcgaaggtccttctggagtgagtcatacccactccggtcatacacacggccaggctggatctcattacccagagagcggctcatccgtgcacgagcgtcatggaaccacacacgggcagacagcagataccaccaggcacggacattcagggcacgggcagtccacccagagagggtcccgaaccactggtagaagggcatcggggcacagcgaatatagtgatagtgagggccattctggggtttcacacactcactccgggcacgcgcacggacaggcaggtagccagcatggcgagagcggctctagtgtccatgagcggcatggaacaactcacggtcagactggtgataccaccaggcacgcccacagcgggcatgggcagagcacgcagcggggtagcaggactgccggtcgtcgcggttctgggcacagcgagagcagtgactccgaggtgcattccggagtgagccatacccattccggtcacacatacggtcaggcgcgaagccaacacggagagagcggtagtgctattcatgggaggcagggtaccattcatggccagaccggagacaccacaagacacgggcagtctggacatgggcagagcacacagaccggtagtagaacaacaggcagacaaagatccagccattctgaatcttcagactccgaggttcactccgaggcatccccaactcattccggccacacacactcacaggcaggctcccgccatggtcaaagtggttcatccgggcacggcagacagggcaccacacacgggcagaccggagacaccaccaggcacgcccactatggctatggccaatctactcagagggggtccagaactacaggcaggcgtggatcaggacattctgaaagttcagattctgaggtgcactcctggggtagtcacacccactctggccacatccaaggacaggcgggtagccaacagcggcagcccggttcaactgtgcacgggaggctcgagacaacacacggccaaacaggggacacaactaggcatgggcatagcggttacggtcaatctacccagacgggatcgcggagcagcagggcctcccactttcagtctcatagcagtgagcgccaaagacatggctccagtcaggtttggaagcacggatcgtacggtccggctgagtacgactacgggcatactgggtatggcccatccgggggatctcgtaagtcaattagcaattcccaccttagctggagcaccgattccactgctaacaagcagctatcccgccacta

SEQ ID NO: 25824 - DNA, 9122 bp, Artificial Sequence
  derived and/or modified sequence
accctgcaagctgcatcaggctttatcctacttgttcctttggtgaaccaggttcacttaaacttgcaaaaagatgaccgacctcttgagaagtgttgtcaccgtaattgatgttttctacaaatacaccaagcaagatggggagtgtggcacactgagcaagggtgaactaaaggaacttctggagaaagagcttcatccagttctgaagaacccagatgatccagacacagtggatgtcatcatgcatatgctggatcgagatcatgacagaagattggactttactgagtttcttttgatgatattcaagctgactatggcctgcaacaaggtcctcagcaaagaatactgcaaagcttcagggtcaaagaagcataggcgtggtcaccgacaccaagaagaagaaagtgaaacagaagaggatgaagaggatacaccaggacataaatcaggttacagacattcaagttggagtgagggagaggagcatggatatagttctgggcactcaaggggaactgtgaaatgtagacatgggtccaactccaggaggctaggaagacaaggtaatttatccagctctgggaaccaagagggatctcagaaaagataccacaggtccagctgtggtcattcatggagtggtggcaaagacagacatggttccagctctgtagaactgagagaaagaataaacaagtcacacattagcccttctagggaatctggggaggagtatgaatctggatctggatcaaacagttgggaaaggaaaggtcatggtggtctgtcatgtggattggagactagtgggcatgaatcaaactctactcagtcaagaattagagaacaaaagcttgggtctagctgttcaggttcaggagacagtgggaggcgaagtcatgcatgtggttatagcaattcaagtgggtgtggaaggccacaaaatgcttcaagttcttgtcagtcacatagatttggagggcaaggaaatcaatttagctatattcagtcaggctgtcagtcaggaattaagggaggacaaggccatggctgtgtctcaggaggtcagccctctggatgtggtcaacctgagtctaacccctgtagtcagtcctatagtcagagaggatatggagctagagaaaatggtcaaccacagaactgtggaggacaatggagaacaggctcaagtcagtcctcttgctgtggacaatatgggtctggaggtagccagtcttgtagtaatggtcaacatgaatatggttcctgtggccgcttttcaaactcttctagttcaaatgaattttccaaatgtgatcaatatgggtctggttcaagtcagtctactagctttgaacaacatggaacaggcttgagtcagtcctctgggttcgaacaacatgtatgtggctcaggtcaaacttgtggccagcatgagtctacatcaagtcaatccttgggctatgaccagcatgggtctagctcaggtaagacatctggctttggacaacatgggtctggctcaggtcagtcctctggctttggacaatgtgggtcaggctcaggtcagtcctctggctttggacagcatgggtctgtctcaggacaatcctctggttttggacagcatgggtctgtctcaggacaatcctctggttttggacaacatgagtctagatcacgtcagtctagctatggccaacatggttctggctcaagtcaatcatctggctatggccaatatgggtctagagagacatctggctttggacaacatgggttgggctcaggtcaatccactggctttggccaatatggatcgggctcaggtcagtcctctggctttggacaacatgggtctggctcaggacaatcctctggctttggacaacatgagtctagatcaggtcagtctagttatggccaacacagttctggctcaagtcagtcatctggctatggccaacatgggtctagacagacatctggctttggacaacatgggtcaggctcaagtcaatccactggctttggccaatatggatcaggctcaggtcagtcctctggctttggacaacatgtttctggctcaggacaatcctctggttttggacaacatgagtctagatcaggtcattctagctatggccaacatggttttggctcaagtcaatcatctggctatggtcaacatgggtcaagttcaggacagacatctggatttggacaacacgagttaagctcaggtcagtcttccagctttggccaacatggatcaggctcaggtcagtcctctggctttggacaacatgggtctggctcaggacaatcctctggctttggacaacatgagtctagatcaggtcagtctagctatggccaacacagttctggctcaagtcagtcatctggctatggccaacatgggtctagacagacatctggctttggacaacatgggtcaggctcaagtcaatccactggctttggccaatatggatcaggctcaggtcagtccgctggctttggacaacatgggtctggctcaggacaatcctctggctttggacagcatgagtctagatcacatcagtccagctatggccaacatggttctggctcaagtcaatcatctggctatggtcaacatgggtcaagttcgggacagacatctggctttggacaacacaggtcaagctcaggtcaatactctggctttggacaacatggatcaggctcaggtcagtccagtggctttggacaacatgggactggctcaggacaatactctggttttggacaacatgagtctagatcacatcagtctagctatggccaacatggttctggctcaagtcagtcatctggctatggtcaacatgggtcaagttcaggacagacttttggatttggacaacacaggtcaggctcaggtcaatcctctggctttggccaacatggatcaggctcaggtcagtcctctggctttggacaacatgagtcaggctcaggaaaatcctctggctttggacagcatgagtctagatcaagtcagtctaattatggccaacatggttctggctcaagtcagtcatctggctatggtcaacatgggtctagttcaggacagacaactggctttggacaacacaggtcaagctcaggccaatactcaggctttggacaacatggatcaggctcagatcagtcctctggctttggacaacatgggactggttcaggacaatcctctggttttggacaatatgagtctagatcacgtcagtctagctatggccaacatggttctggctcaagtcaatcatctggctatggtcaacatgggtcaaattcaggacagacatctggatttggacaacacaggccaggctcaggtcagtcctctggctttggccaatatggatcgggctcaggtcagtcttctggctttggacaacatgggtcaggcacaggtaaatcctctggctttgcacagcatgagtacagatcaggtcagtctagctatggccaacatggtactggctccagtcaatcatctggctgtggccaacatgagtctggctcaggtccaaccacaagttttggacagcatgtgtctggctcagacaatttctctagttctggacaacatatatctgactcaggtcagtccactggatttggccaatatggttcaggctcaggtcaatcaactggcttgggccagggtgaatctcaacaagtagagtcaggatccacagttcatgggagacaggaaactactcatggtcagacaataaataccactagacatagccagtctggtcaaggacaatccacacagacagggtccagggtaactagaagacgaagatctagccaaagtgagaacagtgacagtgaagtgcactcaaaggtctcacacagacattcagaacacattcacacacaagctggatctcactacccaaagtcaggatccacagttcgcagaagacaaggaactactcatggacagagaggagataccactagacatggccattctggtcatggacagtctacacagacaggttccagaacatctggaagacagagatttagccacagtgatgccactgacagtgaagtgcactcaggggtctcacatagaccacactcacaagaacaaactcacagccaagctggatctcaacatggagagtcagaatccacagttcatgagagacatgaaactacttatggacagacaggagaggccactggacatggccactctggtcatggacagtccacacagagagggtccaggacaactggaagaaggggatctggccatagtgagtccagtgacagtgaagtgcactcagggggctcacacagaccacaatcacaagaacaaactcatggccaagccggatctcaacatggagagtcaggatccacagttcatgggagacacggaactactcatggacagacaggagataccactagacatgcccactatcatcatggaaaatccacacagagagggtccagtacaactggaagaaggggatctggccacagtgagtccagtgacagtgaagtgcactcagggggctcgcacacacattcaggacacactcacggccaaagtggatctcaacatggagagtcagaatccataattcatgacagacacagaattactcatggacagacaggagataccactagacattcctactctggtcatgaacaaaccacacagacagggtccaggacaactggaagacagagaactagccacagtgagtccactgacagtgaagtgcactcagggggctcacacagaccacactcacgagaacacacttacggccaagccggatctcaacatgaagagccagaattcacagttcatgagagacacggaactactcatggacagataggagataccactggacattcccactctggtcatggacagtccacacagagagggtccaggacaactggaagacagagatctagccacagtgagtccagtgacagtgaagtgcactcaggggtctcacacacacatacaggacacactcatggtcaagctggatctcaacatggacagtcagaatccatagttcctgagagacatggaactactcatggacagacaggagataccactagacatgcccactatcatcatggattaaccacacagacagggtccaggactactggaagaaggggatctggccacagtgagtacagtgacagtgaagggtactcaggagtctcacatacacattcaggacacactcatggccaagccagatctcaacatggagagtcagaatccatagttcatgagagacatggaactatacatggacagacaggcgataccaccagacatgcccactctggtcatggacagtccacacagacagggtccaggaccactggaagaaggtcatctggccacagtgagtacagtgacagtgaagggcactcagggttctcacaaagaccacactcacgaggacacactcacggccaggctggatctcaacatggagagtcagaatccatagttgacgagagacatggaactactcatggacagacaggagataccagtggacattctcaatctggtcatggacagtccacacagtcaggatccagtacaactggaagaaggagatctggccacagtgagtccagtgacagtgaagtgcactcagggggctcacatacacattcaggacacacacacagccaagccaggtctcaacatggagagtcagaatccacagttcacaagagacaccaaactactcatggacagacaggagataccactgaacatggccaccctagtcatggacaaaccatacagacagggtccaggacaactggaagaaggggatctggccacagtgagtacagtgacagtgaagggccctcaggggtctcacacacacattcaggacacactcacggtcaagctggatctcactatccagagtcaggatcctcagttcatgagagacacggaactactcatggacaaacagcagataccactagacatggccactctggtcatggacagtccacacagagagggtccaggacaactggaagaagggcatctggccacagtgagtacagtgacagtgaagggcactcaggggtctcacacacacattcaggacacgctcatggccaagccggatctcaacatggagagtcaggatcctcagttcatgagagacacggaactactcatggacagacaggagataccactagacatgctcactctggtcatggacagtccacacagagagggtcaaggacagctggaagaaggggatctggccacagtgagtccagtgacagtgaagtgcactcaggggtctcacacacacattcaggacacacttatggccaagccagatctcaacatggagagtcaggatctgccattcacgggagacagggaactatacatggacagacaggagataccactagacatggccagtctggtcatggacagtccacacagacaggttccaggacaactggaagacaaagatctagtcacagtgagtccagtgatagtgaagtgcactcagaggcctcacccacacattcaggacacactcacagccaagccggatctcgacatggacagtcaggatcctcaggtcatgggagacagggaactactcatggacagacaggagataccactagacatgcccactatggttatggacaatccacacagagagggtccaggacaactggaagaaggggatctggccacagtgagtccagtgacagtgaagtgcactcatggggctcacacacacattcaggacacattcagggccaagctggatctcaacaaagacagccaggatccacagttcatgggagactggaaactactcatggacagacaggagataccactagacatggccattctggttatggacaatccacacagacaggttccagatctagtagagcaagtcattttcagtcacatagtagtgaaaggcaaaggcatggatcaagtcaggtttggaaacatggcagctatggacctgcagaatatgactatgggcacactgggtatgggccttctggtggcagcagaaaaagcatcagtaattctcacctttcatggtcaacagacagcactgcaaacaagcaactgtctagacattgacagttattttctagttctgaccttatagtatccaaagcaactaaaagaacaggaagacacagtttaaatcatgaacagtcaatggtaagttatgaacattcagttgattctcagtatcagtctcgacctattattataagaagtcaggaatctagtcatggacattctatagtaactcataaacagtcaaacaacacctatgttcaacctggatataacacagccagaagggagggatgtacacatagccagtcaaatgaccaccttggatttggccatggacaatccatatcagttcatggccattcaaaatctagttcaatcagaaaacaggaatcccatactgataacaaaaagcattcagaagattgggagaaagacactcatgagcaattaggatctaggcatgggaagttagagttcaatacaataggtatacatggatctagccagcaacatttcggagatacaacttttcatgggcaggtaagatccagcacaggttttgccagataggtattaagtcatgggccatcaagagatgcctagggtcagtctggattcagtaccaatgaaagacaagtatacagccatggccaatcaaatgatagttatgagtagtcaaatgacagcaaaagtcaaagatacattttcagtcactttcttgacagccaagaccctgcaggaattgaagagtataggtatagatattcatcaagcagtgcaaccatatgcagtgggggagacaaaggcaagagtcagagtcaagtctgtcaggaggtatcagaatatacggtgaggatgtgggcaaaaaacaaagaggctctgaggccagcggttaccatacaaaggaaagaacaggctctggttccttctgcttagatagcaacaccccactctatgaatatgtccaagaacaaaggagttattactttgaataagaagccaacataaactagcccaagataagaactaacccagagaagaaatgagacacatacatgaaattaaggtatttaacatgatctcctcttttggtagtaagggtatatgtctgttctttcattttaactatagttctgtactatattacttttgtttggtgccaggtgtttttgtaaggctccacattcattgaactccttggttagaaaatagtgaatgaggccgggcgcggtggctcacgcctgtaatcccagcactttgggaggccaagatgggtggatcacgaagtcaggagttcgagaccagcctggccaacatagtgaaatcccgtctctactaaaaatacaaaaattagctgggtgcagtagcgggcacctgtaatcctagctactcaggaggctgaggcaggagaattggttgaacccgggaggcagaggttgcagtgagccgagatcgcaccactgcactccagcctgggtgactgagcaagactccaccttgaaaaaaagaaagaaagaaaatagtgaatggaagaaaaagataaacaccatttggggctatattcagaactatataataaagagagatttgtgtggttgggaataaaattaggttttaaaaaaatttccgaatttcaaaatttggattttccagattttgttttaattaattattgacaaacctatccaaggagctaaatgacgtggtttaggagccaaaacgtctctagaaacattataacacatcccatcctgaacaaagaatgttgtcatagtttcccacatgaatattcagaatatttgcatctttttgtgtcactactggaattctgtacaattatatttaaatttattgtcatggccttctggatataggatccagaaaattgtacttcataaaaattggcaataaacatttcatcaagtta

SEQ ID NO: 25825 - protein, 480 aa, Artificial Sequence [sequence omitted]

SEQ ID NO: 25826 - protein, 418 aa, Artificial Sequence
  derived and/or modified sequence
MKTERPRPNTFIIRCLQWTTVIERTFHVETPEEREEWTTAIQTVADGLKKQEEEEMDFRSGSPSDNSGAEEMEVSLAKPKHRVTMNEFEYLKLLGKGTFGKVILVKEKATGRYYAMKILKKEVIVAKDEVAHTLTENRVLQNSRHPFLTALKYSFQTHDRLCFVMEYANGGELFFHLSRERVFSEDRARFYGAEIVSALDYLHSEKNVVYRDLKLENLMLDKDGHIKITDFGLCKEGIKDGATMKTFCGTPEYLAPEVLEDNDYGRAVDWWGLGVVMYEMMCGRLPFYNQDHEKLFELILMEEIRFPRTLGPEAKSLLSGLLKKDPKQRLGGGSEDAKEIMQHRFFAGIVWQHVYEKKLSPPFKPQVTSETDTRYFDEEFTAQMITITPPDQDDSMECVDSERRPHFPQFSYSASGTA

SEQ ID NO: 25827 - DNA, 2794 bp, Artificial Sequence
  derived and/or modified sequence
cggcaggaccgagcgcggcaggcggctggcccagcgcagccagcgcggcccgaaggacgggagcaggcggccgagcaccgagcgctgggcaccgggcaccgagcggcggcggcacgcgaggcccggccccgagcagcgcccccgcccgccgcggcctccagcccggccccgcccagcgccggcccgcggggatgcggagcggcgggcgccggaggccgcggcccggctaggcccgcgctcgcgcccggacgcggcggcccgaggctgtggccaggccagctgggctcggggagcgccagcctgagaggagcgcgtgagcgtcgcgggagcctcgggcaccatgagcgacgtggctattgtgaaggagggttggctgcacaaacgaggggagtacatcaagacctggcggccacgctacttcctcctcaagaatgatggcaccttcattggctacaaggagcggccgcaggatgtggaccaacgtgaggctcccctcaacaacttctctgtggcgcagtgccagctgatgaagacggagcggccccggcccaacaccttcatcatccgctgcctgcagtggaccactgtcatcgaacgcaccttccatgtggagactcctgaggagcgggaggagtggacaaccgccatccagactgtggctgacggcctcaagaagcaggaggaggaggagatggacttccggtcgggctcacccagtgacaactcaggggctgaagagatggaggtgtccctggccaagcccaagcaccgcgtgaccatgaacgagtttgagtacctgaagctgctgggcaagggcactttcggcaaggtgatcctggtgaaggagaaggccacaggccgctactacgccatgaagatcctcaagaaggaagtcatcgtggccaaggacgaggtggcccacacactcaccgagaaccgcgtcctgcagaactccaggcaccccttcctcacagccctgaagtactctttccagacccacgaccgcctctgctttgtcatggagtacgccaacgggggcgagctgttcttccacctgtcccgggagcgtgtgttctccgaggaccgggcccgcttctatggcgctgagattgtgtcagccctggactacctgcactcggagaagaacgtggtgtaccgggacctcaagctggagaacctcatgctggacaaggacgggcacattaagatcacagacttcgggctgtgcaaggaggggatcaaggacggtgccaccatgaagaccttttgcggcacacctgagtacctggcccccgaggtgctggaggacaatgactacggccgtgcagtggactggtgggggctgggcgtggtcatgtacgagatgatgtgcggtcgcctgcccttctacaaccaggaccatgagaagctttttgagctcatcctcatggaggagatccgcttcccgcgcacgcttggtcccgaggccaagtccttgctttcagggctgctcaagaaggaccccaagcagaggcttggcgggggctccgaggacgccaaggagatcatgcagcatcgcttctttgccggtatcgtgtggcagcacgtgtacgagaagaagctcagcccacccttcaagccccaggtcacgtcggagactgacaccaggtattttgatgaggagttcacggcccagatgatcaccatcacaccacctgaccaagatgacagcatggagtgtgtggacagcgagcgcaggccccacttcccccagttctcctactcggccagcggcacggcctgaggcggcggtggactgcgctggacgatagcttggagggatggagaggcggcctcgtgccatgatctgtatttaatggtttttatttctcgggtgcatttgagagaagccacgctgtcctctcgagcccagatggaaagacgtttttgtgctgtgggcagcaccctcccccgcagcggggtagggaagaaaactatcctgcgggttttaatttatttcatccagtttgttctccgggtgtggcctcagccctcagaacaatccgattcacgtagggaaatgttaaggacttctgcagctatgcgcaatgtggcattggggggccgggcaggtcctgcccatgtgtcccctcactctgtcagccagccgccctgggctgtctgtcaccagctatctgtcatctctctggggccctgggcctcagttcaacctggtggcaccagatgcaacctcactatggtatgctggccagcaccctctcctgggggtggcaggcacacagcagccccccagcactaaggccgtgtctctgaggacgtcatcggaggctgggcccctgggatgggaccagggatgggggatgggccagggtttacccagtgggacagaggagcaaggtttaaatttgttattgtgtattatgttgttcaaatgcattttgggggtttttaatctttgtgacaggaaagccctcccccttccccttctgtgtcacagttcttggtgactgtcccaccgggagcctccccctcagatgatctctccacggtagcacttgaccttttcgacgcttaacctttccgctgtcgccccaggccctccctgactccctgtgggggtggccatccctgggcccctccacgcctcctggccagacgctgccgctgccgctgcaccacggcgtttttttacaacattcaactttagtatttttactattataatataatatggaaccttccctccaaattcttcaataaaagttgcttttcaaaaaaaaaaaaaaaaaaaaaa

SEQ ID NO: 25828 - DNA, 2878 bp, Artificial Sequence
  derived and/or modified sequence
cggcaggaccgagcgcggcaggcggctggcccagcgcagccagcgcggcccgaaggacgggagcaggcggccgagcaccgagcgctgggcaccgggcaccgagcggcggcggcacgcgaggcccggccccgagcagcgcccccgcccgccgcggcctccagcccggccccgcccagcgccggcccgcggggatgcggagcggcgggcgccggaggccgcggcccggctaggcccgcgctcgcgcccggacgcggcggcccggggcttagggaaggccgagccagcctgggtcaaagaagtcaaaggggctgcctggaggaggcagcctgtcagctggtgcatcagaggctgtggccaggccagctgggctcggggagcgccagcctgagaggagcgcgtgagcgtcgcgggagcctcgggcaccatgagcgacgtggctattgtgaaggagggttggctgcacaaacgaggggagtacatcaagacctggcggccacgctacttcctcctcaagaatgatggcaccttcattggctacaaggagcggccgcaggatgtggaccaacgtgaggctcccctcaacaacttctctgtggcgcagtgccagctgatgaagacggagcggccccggcccaacaccttcatcatccgctgcctgcagtggaccactgtcatcgaacgcaccttccatgtggagactcctgaggagcgggaggagtggacaaccgccatccagactgtggctgacggcctcaagaagcaggaggaggaggagatggacttccggtcgggctcacccagtgacaactcaggggctgaagagatggaggtgtccctggccaagcccaagcaccgcgtgaccatgaacgagtttgagtacctgaagctgctgggcaagggcactttcggcaaggtgatcctggtgaaggagaaggccacaggccgctactacgccatgaagatcctcaagaaggaagtcatcgtggccaaggacgaggtggcccacacactcaccgagaaccgcgtcctgcagaactccaggcaccccttcctcacagccctgaagtactctttccagacccacgaccgcctctgctttgtcatggagtacgccaacgggggcgagctgttcttccacctgtcccgggagcgtgtgttctccgaggaccgggcccgcttctatggcgctgagattgtgtcagccctggactacctgcactcggagaagaacgtggtgtaccgggacctcaagctggagaacctcatgctggacaaggacgggcacattaagatcacagacttcgggctgtgcaaggaggggatcaaggacggtgccaccatgaagaccttttgcggcacacctgagtacctggcccccgaggtgctggaggacaatgactacggccgtgcagtggactggtgggggctgggcgtggtcatgtacgagatgatgtgcggtcgcctgcccttctacaaccaggaccatgagaagctttttgagctcatcctcatggaggagatccgcttcccgcgcacgcttggtcccgaggccaagtccttgctttcagggctgctcaagaaggaccccaagcagaggcttggcgggggctccgaggacgccaaggagatcatgcagcatcgcttctttgccggtatcgtgtggcagcacgtgtacgagaagaagctcagcccacccttcaagccccaggtcacgtcggagactgacaccaggtattttgatgaggagttcacggcccagatgatcaccatcacaccacctgaccaagatgacagcatggagtgtgtggacagcgagcgcaggccccacttcccccagttctcctactcggccagcggcacggcctgaggcggcggtggactgcgctggacgatagcttggagggatggagaggcggcctcgtgccatgatctgtatttaatggtttttatttctcgggtgcatttgagagaagccacgctgtcctctcgagcccagatggaaagacgtttttgtgctgtgggcagcaccctcccccgcagcggggtagggaagaaaactatcctgcgggttttaatttatttcatccagtttgttctccgggtgtggcctcagccctcagaacaatccgattcacgtagggaaatgttaaggacttctgcagctatgcgcaatgtggcattggggggccgggcaggtcctgcccatgtgtcccctcactctgtcagccagccgccctgggctgtctgtcaccagctatctgtcatctctctggggccctgggcctcagttcaacctggtggcaccagatgcaacctcactatggtatgctggccagcaccctctcctgggggtggcaggcacacagcagccccccagcactaaggccgtgtctctgaggacgtcatcggaggctgggcccctgggatgggaccagggatgggggatgggccagggtttacccagtgggacagaggagcaaggtttaaatttgttattgtgtattatgttgttcaaatgcattttgggggtttttaatctttgtgacaggaaagccctcccccttccccttctgtgtcacagttcttggtgactgtcccaccgggagcctccccctcagatgatctctccacggtagcacttgaccttttcgacgcttaacctttccgctgtcgccccaggccctccctgactccctgtgggggtggccatccctgggcccctccacgcctcctggccagacgctgccgctgccgctgcaccacggcgtttttttacaacattcaactttagtatttttactattataatataatatggaaccttccctccaaattcttcaataaaagttgcttttcaaaaaaaaaaaaaaaaaaaaaa

SEQ ID NO: 25829 - DNA, 3008 bp, Artificial Sequence
  derived and/or modified sequence
taattatgggtctgtaaccaccctggactgggtgctcctcactgacggacttgtctgaacctctctttgtctccagcgcccagcactgggcctggcaaaacctgagacgcccggtacatgttggccaaatgaatgaaccagattcagaccggcaggggcgctgtggtttaggaggggcctggggtttctcccaggaggtttttgggcttgcgctggagggctctggactcccgtttgcgccagtggcctgcatcctggtcctgtcttcctcatgtttgaatttctttgctttcctagtctggggagcagggaggagccctgtgccctgtcccaggatccatgggtaggaacaccatggacagggagagcaaacggggccatctgtcaccaggggcttagggaaggccgagccagcctgggtcaaagaagtcaaaggggctgcctggaggaggcagcctgtcagctggtgcatcagaggctgtggccaggccagctgggctcggggagcgccagcctgagaggagcgcgtgagcgtcgcgggagcctcgggcaccatgagcgacgtggctattgtgaaggagggttggctgcacaaacgaggggagtacatcaagacctggcggccacgctacttcctcctcaagaatgatggcaccttcattggctacaaggagcggccgcaggatgtggaccaacgtgaggctcccctcaacaacttctctgtggcgcagtgccagctgatgaagacggagcggccccggcccaacaccttcatcatccgctgcctgcagtggaccactgtcatcgaacgcaccttccatgtggagactcctgaggagcgggaggagtggacaaccgccatccagactgtggctgacggcctcaagaagcaggaggaggaggagatggacttccggtcgggctcacccagtgacaactcaggggctgaagagatggaggtgtccctggccaagcccaagcaccgcgtgaccatgaacgagtttgagtacctgaagctgctgggcaagggcactttcggcaaggtgatcctggtgaaggagaaggccacaggccgctactacgccatgaagatcctcaagaaggaagtcatcgtggccaaggacgaggtggcccacacactcaccgagaaccgcgtcctgcagaactccaggcaccccttcctcacagccctgaagtactctttccagacccacgaccgcctctgctttgtcatggagtacgccaacgggggcgagctgttcttccacctgtcccgggagcgtgtgttctccgaggaccgggcccgcttctatggcgctgagattgtgtcagccctggactacctgcactcggagaagaacgtggtgtaccgggacctcaagctggagaacctcatgctggacaaggacgggcacattaagatcacagacttcgggctgtgcaaggaggggatcaaggacggtgccaccatgaagaccttttgcggcacacctgagtacctggcccccgaggtgctggaggacaatgactacggccgtgcagtggactggtgggggctgggcgtggtcatgtacgagatgatgtgcggtcgcctgcccttctacaaccaggaccatgagaagctttttgagctcatcctcatggaggagatccgcttcccgcgcacgcttggtcccgaggccaagtccttgctttcagggctgctcaagaaggaccccaagcagaggcttggcgggggctccgaggacgccaaggagatcatgcagcatcgcttctttgccggtatcgtgtggcagcacgtgtacgagaagaagctcagcccacccttcaagccccaggtcacgtcggagactgacaccaggtattttgatgaggagttcacggcccagatgatcaccatcacaccacctgaccaagatgacagcatggagtgtgtggacagcgagcgcaggccccacttcccccagttctcctactcggccagcggcacggcctgaggcggcggtggactgcgctggacgatagcttggagggatggagaggcggcctcgtgccatgatctgtatttaatggtttttatttctcgggtgcatttgagagaagccacgctgtcctctcgagcccagatggaaagacgtttttgtgctgtgggcagcaccctcccccgcagcggggtagggaagaaaactatcctgcgggttttaatttatttcatccagtttgttctccgggtgtggcctcagccctcagaacaatccgattcacgtagggaaatgttaaggacttctgcagctatgcgcaatgtggcattggggggccgggcaggtcctgcccatgtgtcccctcactctgtcagccagccgccctgggctgtctgtcaccagctatctgtcatctctctggggccctgggcctcagttcaacctggtggcaccagatgcaacctcactatggtatgctggccagcaccctctcctgggggtggcaggcacacagcagccccccagcactaaggccgtgtctctgaggacgtcatcggaggctgggcccctgggatgggaccagggatgggggatgggccagggtttacccagtgggacagaggagcaaggtttaaatttgttattgtgtattatgttgttcaaatgcattttgggggtttttaatctttgtgacaggaaagccctcccccttccccttctgtgtcacagttcttggtgactgtcccaccgggagcctccccctcagatgatctctccacggtagcacttgaccttttcgacgcttaacctttccgctgtcgccccaggccctccctgactccctgtgggggtggccatccctgggcccctccacgcctcctggccagacgctgccgctgccgctgcaccacggcgtttttttacaacattcaactttagtatttttactattataatataatatggaaccttccctccaaattcttcaataaaagttgcttttcaaaaaaaaaaaaaaaaaaaaaa

SEQ ID NO: 25830 - DNA, 1443 bp, Artificial Sequence
  derived and/or modified sequence
atgagcgacgtggccatcgtgaaggagggctggctgcacaagagaggcgagtacatcaagacctggagacccagatacttcctgctgaagaacgacggcaccttcatcggctacaaggagagaccccaggacgtggaccagagagaggcccccctgaacaacttcagcgtggcccagtgccagctgatgaagaccgagagacccagacccaacaccttcatcatcagatgcctgcagtggaccaccgtgatcgagagaaccttccacgtggagacccccgaggagagagaggagtggaccaccgccatccagaccgtggccgacggcctgaagaagcaggaggaggaggagatggacttcagaagcggcagccccagcgacaacagcggcgccgaggagatggaggtgagcctggccaagcccaagcacagagtgaccatgaacgagttcgagtacctgaagctgctgggcaagggcaccttcggcaaggtgatcctggtgaaggagaaggccaccggcagatactacgccatgaagatcctgaagaaggaggtgatcgtggccaaggacgaggtggcccacaccctgaccgagaacagagtgctgcagaacagcagacaccccttcctgaccgccctgaagtacagcttccagacccacgacagactgtgcttcgtgatggagtacgccaacggcggcgagctgttcttccacctgagcagagagagagtgttcagcgaggacagagccagattctacggcgccgagatcgtgagcgccctggactacctgcacagcgagaagaacgtggtgtacagagacctgaagctggagaacctgatgctggacaaggacggccacatcaagatcaccgacttcggcctgtgcaaggagggcatcaaggacggcgccaccatgaagaccttctgcggcacccccgagtacctggcccccgaggtgctggaggacaacgactacggcagagccgtggactggtggggcctgggcgtggtgatgtacgagatgatgtgcggcagactgcccttctacaaccaggaccacgagaagctgttcgagctgatcctgatggaggagatcagattccccagaaccctgggccccgaggccaagagcctgctgagcggcctgctgaagaaggaccccaagcagagactgggcggcggcagcgaggacgccaaggagatcatgcagcacagattcttcgccggcatcgtgtggcagcacgtgtacgagaagaagctgagcccccccttcaagccccaggtgaccagcgagaccgacaccagatacttcgacgaggagttcaccgcccagatgatcaccatcaccccccccgaccaggacgacagcatggagtgcgtggacagcgagagaagaccccacttcccccagttcagctacagcgccagcggcaccgcctag

SEQ ID NO: 25831 - DNA, 1443 bp, Artificial Sequence
  derived and/or modified sequence
atgtctgacgtcgcgatcgtgaaggagggctggctgcacaagcggggggagtacataaaaacatggcgtccgagatatttcctgttaaaaaatgacggaacattcatcggatataaagaaagacctcaggatgtcgatcaacgcgaggcgccactgaacaacttcagcgtggcgcagtgtcaattgatgaagaccgaaagacctcgccctaatacctttataatacgctgcctgcagtggaccaccgtgatcgagcgcacctttcatgttgaaactccagaggagcgtgaggaatggaccactgccatccagaccgtggccgacgggcttaagaagcaggaggaggaagagatggacttcaggtccggtagcccgtccgataacagcggggccgaagaaatggaggtctccttagctaaacctaagcaccgcgttacgatgaatgaattcgagtatctgaaactgctcggcaagggcacattcggcaaagtgattctggtgaaagaaaaagctacaggccgatattacgcgatgaagattcttaaaaaagaagtgatcgtcgcaaaggacgaagtagcccacacactaaccgaaaacagagtccttcagaacagccggcacccctttctgacggctttgaagtactccttccaaacacatgacaggctgtgcttcgtcatggaatacgcaaacggcggcgaactttttttccacctgagccgggagcgggtgttttcagaggacagagcgaggttctatggggcagagattgtctcagctttggactacctccatagtgagaaaaacgtggtgtatcgcgatctcaagctggaaaatctaatgctagataaggacggccacattaagatcaccgattttggactgtgcaaggaggggattaaagacggagctaccatgaaaacattttgcgggacaccggagtatctggctcccgaagtattggaggataatgattacggcagggccgtggactggtgggggctcggtgtggtgatgtatgagatgatgtgcggccgcctgcctttctacaatcaggatcacgagaaacttttcgagctgatacttatggaggagataagatttcctaggacgctcggaccagaggcaaagagcctgttgtctggcctgttaaaaaaagacccaaagcagcggctaggtggcgggtccgaggacgccaaggagattatgcagcacaggtttttcgctgggattgtctggcaacatgtgtacgaaaagaagttatcccctccattcaaaccccaagtgacctccgaaacggacacccggtattttgacgaggagttcaccgcccaaatgattacaatcaccccacccgaccaggacgactccatggagtgcgtggactccgaacgccgaccacatttcccacagtttagttactccgcttctggcaccgcttag

SEQ ID NO: 25832 - DNA, 1443 bp, Artificial Sequence
  derived and/or modified sequence
atgtctgatgtggccatcgtgaaggagggctggctgcacaagagaggagagtacatcaagacctggaggccccgctacttcctgctgaagaatgatggcaccttcatcggctacaaggagcggccccaggatgtggaccagcgggaggcccccctgaacaacttctctgtggcccagtgccagctgatgaagacagagcggccccggcccaacaccttcatcatccgctgcctgcagtggaccaccgtcatcgagaggaccttccacgtggagaccccagaggagcgggaggagtggaccacagccatccagacagtggctgatggcctgaagaagcaggaggaggaggagatggacttccgcagcggcagccccagcgacaacagcggggctgaggagatggaggtgtccctggccaagcccaagcaccgggtgaccatgaatgaatttgagtacctgaagctgctgggcaagggcaccttcggcaaggtgatcctggtgaaggagaaggccaccggccgctactatgccatgaagatcctgaagaaggaggtgattgtggccaaggatgaggtggcccacaccctgacagagaacagagtgctgcagaacagccgccaccccttcctgacagccctgaagtacagcttccagacccatgaccggctgtgctttgtgatggagtatgccaatggaggagagctgttcttccacctgagccgggagagggtcttctctgaagatcgggcccgcttctatggagctgagatcgtgtctgccctggactacctgcacagcgagaagaatgtggtgtacagagacctgaagctggagaacctgatgctggacaaggatggccacatcaagatcacagactttggcctgtgcaaggagggcatcaaggatggagccaccatgaagaccttctgtggcaccccagagtacctggcccctgaggtgctggaggacaatgactatggccgggctgtggactggtggggcctgggcgtggtgatgtatgagatgatgtgtggccgcctgcccttctacaaccaggaccacgagaagctgtttgagctgatcctgatggaggagatccgcttccccaggaccctgggccctgaggccaagagcctgctgagcggcctgctgaagaaggaccccaagcagaggctgggcggcggctctgaagatgccaaggagatcatgcagcaccgcttctttgctggcatcgtgtggcagcacgtgtatgagaagaagctgagcccccccttcaagccccaggtgaccagcgagacagacacccgctactttgatgaggagttcaccgcccagatgatcaccatcaccccaccagaccaggatgacagcatggagtgtgtggacagcgagcggcggccccacttcccccagttctcctacagcgccagcggcacagcctag

SEQ ID NO: 25833 - DNA, 1443 bp, Artificial Sequence
  derived and/or modified sequence
atgagcgacgtggccatcgtgaaggagggctggctgcacaagcggggcgagtacatcaaaacctggagaccgcgatacttcctactcaagaacgacggaaccttcattggatacaaagaaagaccacaggatgtcgaccagcgggaggcccctttgaacaatttcagcgtggcacagtgtcagctgatgaagactgagaggccccgtccaaataccttcattatacggtgcctacaatggaccactgtgattgaacgcacctttcatgtggaaacgcccgaagagagagaggagtggaccacagcgatacaaaccgtcgctgatggcctcaaaaaacaggaggaagaagaaatggatttcagatccggcagcccctctgataactcaggagccgaggagatggaggtgtctttggctaaaccgaaacatcgggtgacaatgaacgaatttgaataccttaaactgctgggcaaaggcacctttgggaaggtgattttggtcaaagaaaaggctacggggaggtattatgctatgaaaatcctgaagaaagaggtcatcgtggcgaaagacgaagtggcccatacgcttaccgaaaatcgagtgctacagaactccagacatcccttcctgactgcactaaagtatagttttcaaacccacgaccggctgtgcttcgtgatggaatacgccaacggtggcgagctttttttccatctctctcgagaacgtgtgtttagtgaggaccgagccagattctacggggccgaaatcgtcagcgcgttggactatctgcactcggaaaaaaatgtcgtctaccgcgatctgaagctggagaaccttatgctggataaggacggccacatcaagatcacagatttcggactttgcaaggagggaatcaaggatggcgccactatgaagaccttttgcgggacgccagagtacctggctcctgaagttcttgaggacaatgactacggtagagccgtcgattggtgggggctgggagtcgtgatgtacgagatgatgtgtggccgcttgccgttctacaatcaggaccatgagaagctgttcgagcttatattaatggaggagatccgattcccgcgcacacttggacctgaagctaagtccctcctgtctggactgttaaagaaagaccctaaacagcggttgggcggaggaagcgaagatgcgaaggagatcatgcagcataggttttttgccggaatagtctggcagcacgtgtatgagaagaagctgtcccccccatttaaacctcaggtgacctcggagacagatactcggtactttgacgaggagtttaccgcccagatgatcacaattacacctcctgatcaggacgacagtatggaatgcgtagactccgagaggaggccccatttccctcagttttcctattcggcttccgggaccgcatag

SEQ ID NO: 25834 - DNA, 1443 bp, Artificial Sequence
  derived and/or modified sequence
atgtctgacgtggccattgttaaggaaggctggctccataagcggggagaatacatcaagacatggcgacctcgatactttctgctgaaaaacgacggtaccttcattgggtataaggagaggccccaagatgttgaccagcgggaggctcctttgaacaacttctcagtggcgcagtgccaattgatgaagaccgaaagaccaaggcccaacacatttatcattcgctgcctccaatggactacagttattgagcgtacctttcacgttgagactcccgaggaaagagaggaatggaccaccgctattcagactgtcgcggacggcctgaaaaagcaggaggaggaagaaatggacttccggtccggaagcccctccgataacagcggcgctgaggaaatggaggtgtccctcgcaaagcccaagcaccgtgtgactatgaacgagtttgaatatctgaaattactcggtaagggcacttttggtaaggtcattctggtcaaggaaaaggctacgggaaggtattacgccatgaaaatcttaaaaaaggaagtaattgtggcaaaagacgaggtggcccacaccctgactgagaatcgtgtgctccaaaatagtaggcacccctttcttacagcattgaagtattcttttcagacacacgatcggctgtgtttcgtgatggagtacgcaaacggcggtgagctcttttttcacctgagtcgcgaacgggtcttcagtgaggatagggcccgattctatggggctgaaatcgtcagcgccctcgactacctgcactctgagaaaaatgtcgtgtacagggacttaaaactggagaatctcatgctcgataaagatggccatatcaagatcaccgactttggtctgtgcaaggaagggataaaagatggagcgacaatgaagacattttgcggcactccagaatatctcgccccagaggtgctggaggacaacgattatggtcgagctgtcgactggtggggtctaggcgtggtaatgtatgagatgatgtgcgggaggctgcctttttacaatcaggatcatgagaaactttttgaactgatactcatggaagagatccgctttccacgcactttagggcctgaggccaagagcttattatcaggactgttaaagaaggacccgaaacagcggctgggaggaggatccgaggacgcaaaagagatcatgcagcaccgcttcttcgccggtattgtgtggcagcatgtttatgaaaagaagttgtcaccccctttcaaaccacaggtgacttccgaaaccgacacaaggtactttgacgaagagtttacggcccagatgataaccatcaccccccctgaccaggacgacagtatggagtgcgtggactccgagcgacgcccacactttcctcaattctcttatagcgccagcgggacggcctag

SEQ ID NO: 25835 - DNA, 2866 bp, Artificial Sequence
  derived and/or modified sequence
ggcggcggcggcaggaccgagcgcggcaggcggctggcccagcgcacgcagcgcggcccgaagacgggagcaggcggccgagcaccgagcgctgggcaccgggcaccgagcggcggcggcacgcgaggcccggccccgagcagcgcccccgcccgccgcggcctccagcccggccccgcccagcgccggcccgcggggatgcggagcggcgggcgccggaggccgcggcccggctaggcccgcgctcgcgcccggacgcggcggcccggggcttagggaaggccgagccagcctgggtcaaagaagtcaaaggggctgcctggaggaggcagcctgtcagctggtgcatcagaggctgtggccaggccagctgggctcggggagcgccagcctgagaggagcgcgtgagcgtcgcgggagcctcgggcaccatgagcgacgtggctattgtgaaggagggttggctgcacaaacgaggggagtacatcaagacctggcggccacgctacttcctcctcaagaatgatggcaccttcattggctacaaggagcggccgcaggatgtggaccaacgtgaggctcccctcaacaacttctctgtggcgcagtgccagctgatgaagacggagcggccccggcccaacaccttcatcatccgctgcctgcagtggaccactgtcatcgaacgcaccttccatgtggagactcctgaggagcgggaggagtggacaaccgccatccagactgtggctgacggcctcaagaagcaggaggaggaggagatggacttccggtcgggctcacccagtgacaactcaggggctgaagagatggaggtgtccctggccaagcccaagcaccgcgtgaccatgaacgagtttgagtacctgaagctgctgggcaagggcactttcggcaaggtgatcctggtgaaggagaaggccacaggccgctactacgccatgaagatcctcaagaaggaagtcatcgtggccaaggacgaggtggcccacacactcaccgagaaccgcgtcctgcagaactccaggcaccccttcctcacagccctgaagtactctttccagacccacgaccgcctctgctttgtcatggagtacgccaacgggggcgagctgttcttccacctgtcccgggagcgtgtgttctccgaggaccgggcccgcttctatggcgctgagattgtgtcagccctggactacctgcactcggagaagaacgtggtgtaccgggacctcaagctggagaacctcatgctggacaaggacgggcacattaagatcacagacttcgggctgtgcaaggaggggatcaaggacggtgccaccatgaagaccttttgcggcacacctgagtacctggcccccgaggtgctggaggacaatgactacggccgtgcagtggactggtgggggctgggcgtggtcatgtacgagatgatgtgcggtcgcctgcccttctacaaccaggaccatgagaagctttttgagctcatcctcatggaggagatccgcttcccgcgcacgcttggtcccgaggccaagtccttgctttcagggctgctcaagaaggaccccaagcagaggcttggcgggggctccgaggacgccaaggagatcatgcagcatcgcttctttgccggtatcgtgtggcagcacgtgtacgagaagaagctcagcccacccttcaagccccaggtcacgtcggagactgacaccaggtattttgatgaggagttcacggcccagatgatcaccatcacaccacctgaccaagatgacagcatggagtgtgtggacagcgagcgcaggccccacttcccccagttctcctactcggccagcggcacggcctgaggcggcggtggactgcgctggacgatagcttggagggatggagaggcggcctcgtgccatgatctgtatttaatggtttttatttctcgggtgcatttgagagaagccacgctgtcctctcgagcccagatggaaagacgtttttgtgctgtgggcagcaccctcccccgcagcggggtagggaagaaaactatcctgcgggttttaatttatttcatccagtttgttctccgggtgtggcctcagccctcagaacaatccgattcacgtagggaaatgttaaggacttctgcagctatgcgcaatgtggcattggggggccgggcaggtcctgcccatgtgtcccctcactctgtcagccagccgccctgggctgtctgtcaccagctatctgtcatctctctggggccctgggcctcagttcaacctggtggcaccagatgcaacctcactatggtatgctggccagcaccctctcctgggggtggcaggcacacagcagccccccagcactaaggccgtgtctctgaggacgtcatcggaggctgggcccctgggatgggaccagggatgggggatgggccagggtttacccagtgggacagaggagcaaggtttaaatttgttattgtgtattatgttgttcaaatgcattttgggggtttttaatctttgtgacaggaaagccctcccccttccccttctgtgtcacagttcttggtgactgtcccaccgggagcctccccctcagatgatctctccacggtagcacttgaccttttcgacgcttaacctttccgctgtcgccccaggccctccctgactccctgtgggggtggccatccctgggcccctccacgcctcctggccagacgctgccgctgccgctgcaccacggcgtttttttacaacattcaactttagtatttttactattataatataatatggaaccttccctccaaattcttcaataaaagttgcttttcaaa

SEQ ID NO: 25836 - DNA, 1257 bp, Artificial Sequence
  derived and/or modified sequence
atgaagaccgagagacccagacccaacaccttcatcatcagatgcctgcagtggaccaccgtgatcgagagaaccttccacgtggagacccccgaggagagagaggagtggaccaccgccatccagaccgtggccgacggcctgaagaagcaggaggaggaggagatggacttcagaagcggcagccccagcgacaacagcggcgccgaggagatggaggtgagcctggccaagcccaagcacagagtgaccatgaacgagttcgagtacctgaagctgctgggcaagggcaccttcggcaaggtgatcctggtgaaggagaaggccaccggcagatactacgccatgaagatcctgaagaaggaggtgatcgtggccaaggacgaggtggcccacaccctgaccgagaacagagtgctgcagaacagcagacaccccttcctgaccgccctgaagtacagcttccagacccacgacagactgtgcttcgtgatggagtacgccaacggcggcgagctgttcttccacctgagcagagagagagtgttcagcgaggacagagccagattctacggcgccgagatcgtgagcgccctggactacctgcacagcgagaagaacgtggtgtacagagacctgaagctggagaacctgatgctggacaaggacggccacatcaagatcaccgacttcggcctgtgcaaggagggcatcaaggacggcgccaccatgaagaccttctgcggcacccccgagtacctggcccccgaggtgctggaggacaacgactacggcagagccgtggactggtggggcctgggcgtggtgatgtacgagatgatgtgcggcagactgcccttctacaaccaggaccacgagaagctgttcgagctgatcctgatggaggagatcagattccccagaaccctgggccccgaggccaagagcctgctgagcggcctgctgaagaaggaccccaagcagagactgggcggcggcagcgaggacgccaaggagatcatgcagcacagattcttcgccggcatcgtgtggcagcacgtgtacgagaagaagctgagcccccccttcaagccccaggtgaccagcgagaccgacaccagatacttcgacgaggagttcaccgcccagatgatcaccatcaccccccccgaccaggacgacagcatggagtgcgtggacagcgagagaagaccccacttcccccagttcagctacagcgccagcggcaccgcctag

SEQ ID NO: 25837 - DNA, 1443 bp, Artificial Sequence
  derived and/or modified sequence
atgtctgacgtggctatcgtgaaggaagggtggctgcataagagaggggagtacattaagacctggcggccacggtacttcctcctgaaaaacgacggtacctttataggctataaggagcgaccacaggacgtggatcagagagaagctccgctcaacaacttctccgtagcccaatgccaactgatgaagactgagagacctagacctaatactttcattatccgatgtctgcagtggacaacggtgatcgaacgaactttccatgtggaaacccctgaggaacgcgaggaatggaccacagcaatccaaacagttgccgacggcctcaagaaacaggaggaagaggagatggacttccgtagcggctcccctagtgataactcaggcgccgaggagatggaagtttcactcgccaaaccaaagcacagagtcaccatgaatgagttcgaatatctcaaactcttgggtaagggcacgttcggcaaggtcatcctggtgaaagagaaagctaccggtcggtactatgccatgaagatacttaaaaaagaagtgatcgtcgctaaggacgaggtggcccacaccctcactgagaatcgggtcttgcagaatagccggcacccttttctaacagcattgaaatattcattccagactcatgaccgattatgttttgtcatggagtatgccaatgggggagaattgttttttcacctgagtcgagaacgagtttttagcgaagatcgtgcaagattctatggagctgaaattgtttccgctctggattacctgcactccgagaaaaatgtagtgtacagggatctgaaattggaaaaccttatgttggataaggatgggcacatcaagatcaccgacttcggactctgcaaggaggggattaaagacggtgcgactatgaaaaccttttgcggtactcccgagtacctcgccccggaggtgttagaagacaatgattacggtcgagctgtggactggtggggcttgggcgtagttatgtatgaaatgatgtgcggaaggctccccttttataaccaggatcacgaaaaactcttcgagctgatcttaatggaagagattcgctttccccgtacccttgggcccgaggctaaatccctgctgagcggtctcctgaagaaggatccaaagcaaagactgggtggcgggtcggaggatgccaaggaaattatgcagcacagattttttgccggcatcgtgtggcagcatgtctacgagaagaagttgtctccccccttcaagccccaggtcacctccgaaacagacacaaggtattttgatgaagagttcactgcccaaatgatcactattacaccacctgatcaagacgactctatggaatgcgtggactctgaacggaggcctcattttccacagttctcatatagtgcgtcaggaacagcatag

SEQ ID NO: 25838 - DNA, 1443 bp, Artificial Sequence
  derived and/or modified sequence
atgtccgatgtggcaattgtcaaggagggatggctgcataaaaggggtgaatatattaaaacatggcgtcctagatacttcctgttgaaaaatgacggtaccttcataggctataaagaaagaccgcaagatgtggaccagagggaagcgcccttgaacaatttttccgtcgcccaatgtcaactcatgaagaccgagaggccaagacctaacacctttatcatacgctgtctgcagtggactacagtaattgagcgaacatttcatgttgagacacccgaagaacgcgaggagtggactactgccatccagacagtagcggacggtcttaagaagcaagaggaggaagagatggatttcaggagtggcagtccaagtgataatagcggtgctgaagaaatggaggttagtttggccaagcccaaacaccgagtgaccatgaatgagtttgagtatctcaagttactgggcaaaggtactttcgggaaggtcattctggtcaaggagaaagctacagggcgttactacgccatgaaaatcctgaagaaagaagtaatcgtggctaaggacgaagtcgcccataccttgaccgagaaccgtgtgctgcagaactcaagacatccatttctcacagccctcaaatactcattccagacccacgataggctctgctttgtcatggaatacgctaatggaggcgaacttttttttcatctgtcccgagaaagagtgtttagcgaggatagagctagattctatggggctgagatcgtgagcgctttggactatctacacagcgaaaaaaatgttgtgtaccgcgacctgaaattggagaatctgatgctggataaggacggccacatcaagattacagactttggtctgtgcaaagagggcatcaaggatggcgcaacaatgaaaacattttgcgggacacctgagtatctggcccctgaggtgcttgaggacaatgattatggcagggctgtcgattggtggggtctgggcgtggtcatgtacgaaatgatgtgtgggcggctcccgttctacaatcaggatcacgagaaactgtttgagttgattctgatggaggaaatccgttttccgcggactctgggaccagaagcaaaatctctcctatccgggcttcttaagaaagatcccaagcagaggttgggtggcgggtccgaggacgcaaaggagattatgcagcacaggttttttgcaggaattgtgtggcagcacgtttacgaaaaaaaactcagtccaccctttaaaccccaggtgacctctgaaacagatacacgatatttcgacgaggagtttacagcccagatgatcaccattacccctcctgaccaggatgactcaatggaatgcgtcgactctgaaaggcggccccattttccacagttttcttacagcgccagcggcactgcttag

SEQ ID NO: 25839 - DNA, 1257 bp, Artificial Sequence
  derived and/or modified sequence
atgaagaccgagagacctcggcccaacacgtttatcattcgctgtctgcagtggactactgtcattgagaggacctttcacgtcgaaactcctgaggagagggaggagtggaccacggccatccagactgtagcggatgggctgaaaaaacaagaagaggaggagatggacttcagatccggcagccccagtgacaacagcggggccgaggagatggaggtgtctttggccaagcctaaacaccgcgttacgatgaacgagttcgagtacttaaagttgctgggcaaaggcaccttcgggaaagtcattctggtcaaagagaaggctaccggccgctattatgcaatgaaaatcttgaagaaggaggtcatagtggcgaaggatgaggtggcacacaccttaaccgaaaaccgagtgttacagaatagccgacacccatttctgacagcactgaagtacagctttcagactcatgacagactctgttttgtgatggagtacgccaacggcggggagctgttttttcacctcagtagagagagagtgtttagtgaggatagagcgaggttctatggagctgagatcgtctcagcattagattatcttcacagcgagaaaaacgtagtctaccgcgatcttaagctggagaacctgatgctagacaaagacgggcatatcaaaatcactgactttggactgtgtaaggagggcatcaaggatggcgccacaatgaaaaccttctgcggcacccctgagtatttggcgccagaggtcctggaggacaacgactatggacgtgccgtagactggtggggcctcggggttgtaatgtacgagatgatgtgcggtaggctgcctttctataaccaggaccacgagaaactgtttgagctgatcctgatggaagaaatccggtttcctagaacactcggaccagaggccaaatcgcttcttagcggcctcctgaaaaaggacccaaaacagcgcctgggaggaggctctgaggacgctaaagaaattatgcagcacagattttttgccggcattgtgtggcagcacgtgtacgaaaagaaactcagcccacctttcaagccccaggtcacctctgagacagacacccgctacttcgacgaggagtttaccgctcaaatgattaccataactccacccgaccaggatgattctatggaatgcgtcgatagcgagcggcgaccccacttccctcagttcagctactctgcttcaggcacagcttag

SEQ ID NO: 25840 - DNA, 1443 bp, Artificial Sequence
  derived and/or modified sequence
atgtccgatgtagcaatcgtgaaggagggttggctgcacaagaggggcgaatatatcaagacttggcgccccagatacttcctgttgaagaatgacggaacttttatcggttacaaggagagacctcaggatgtggaccagcgcgaggcccccttaaacaacttcagtgtggcccagtgccaactgatgaaaacagagaggcctcggcccaacacttttattatacgatgtctccagtggacgaccgttatcgagcggacctttcatgtcgagacgcctgaagagagggaagaatggaccacagccatccaaacggtcgccgacggtctgaagaaacaagaggaggaagagatggatttccggagcggaagtccttccgataatagtggggctgaggagatggaagtcagcctggcgaaacctaagcaccgggtgaccatgaatgagttcgaatatcttaaattactcgggaagggaacttttggcaaagtgattctggtcaaagaaaaggcaactgggaggtactacgctatgaagattttgaaaaaagaagtcatcgtcgcgaaagacgaagtcgcccatacgctgaccgagaaccgggtgctgcagaatagccggcatccatttttgacggccctcaagtattcctttcagacccatgaccgattgtgtttcgtaatggaatatgccaatggcggcgaactgtttttccatctctcacgcgagagggtgttttccgaggatcgcgcacgtttctacggcgccgaaatcgtctcggctctcgattatctacattctgagaagaatgtggtatacagagatctgaaattggagaaccttatgctggacaaggacggacatattaaaatcacagacttcgggttgtgcaaggaaggtattaaggacggcgccacgatgaagaccttctgtggcacgcctgaatatctggcacctgaggtcctcgaggacaacgactatgggcgggctgttgattggtggggtcttggagtagtcatgtacgaaatgatgtgcggtagattacctttctataaccaggatcacgaaaaactttttgagttgatattaatggaggagattcggtttccccggaccttgggtcctgaggcaaagtcgctactgtctgggctgctgaaaaaagatcccaagcagaggctcggggggggcagcgaggatgctaaggagatcatgcaacacagattcttcgctgggattgtctggcagcacgtctacgagaagaaactctccccgccattcaagccacaggtcacgtccgagacggacactaggtactttgatgaggaattcacagcacagatgattaccataaccccgcccgatcaggacgactccatggaatgtgtcgattccgagcgtcggccccacttcccacaattcagttactccgcatctggcactgcttag

SEQ ID NO: 25841 - DNA, 1443 bp, Artificial Sequence
  derived and/or modified sequence
atgtcggacgtcgctattgtgaaagaagggtggctgcacaagcgcggcgagtatataaagacttggaggccaagatattttctgcttaagaacgacggcacgttcattgggtataaagagagaccccaggacgttgatcagagagaggcacctcttaacaactttagcgtcgcgcagtgtcagcttatgaaaacagaaagacccaggccaaatacgtttattattcggtgcctgcaatggacaaccgtgatcgaacggaccttccacgttgagactccggaggaacgggaggaatggactactgccattcagacagtggcagacgggctgaagaaacaggaagaagaagagatggatttccggtctggctcaccaagtgataactcaggcgccgaagagatggaggtgagcctggccaaaccgaaacaccgggtgaccatgaacgaattcgaatacctcaaacttctcggcaaagggacgttcggtaaagtgattcttgtaaaagagaaagctaccgggcgatactacgctatgaagatccttaagaaagaagttatcgttgctaaggacgaggttgcccacactctgaccgagaaccgcgtgttacagaattctcggcaccccttcctgactgctctgaaatacagtttccaaacccatgaccggctctgctttgtaatggaatacgccaacggaggggagctgttctttcatctgagtagagaaagagttttttccgaagaccgcgccagattctacggggcagaaattgtaagtgctttggactacctccattcagagaagaatgtagtatatcgagacctcaaactagaaaatcttatgctggacaaggacggacatatcaagatcaccgatttcgggctgtgcaaagaggggatcaaggatggcgccactatgaaaaccttctgtgggacaccagagtaccttgctcctgaggtcttggaagacaacgactatggtcgggcagtcgactggtggggcctgggcgtagtcatgtacgagatgatgtgtggccggctccctttctacaatcaggaccacgagaagctgttcgaacttatcttgatggaggagattaggttccctagaacactgggccccgaagccaagagcttgctgagtggcctactgaagaaggatcccaaacagaggttgggtggaggaagcgaggatgctaaggaaattatgcagcatagattttttgcaggaattgtttggcaacacgtgtatgaaaaaaaacttagcccgccattcaaaccccaagtgacttctgagactgacacaaggtacttcgatgaagagttcacggcccagatgatcacaattacacctcctgatcaggacgactcaatggaatgcgtggattcagagcgtaggccacactttccacagtttagctactcagcctcaggaactgcgtag

SEQ ID NO: 25842 - DNA, 1443 bp, Artificial Sequence
  derived and/or modified sequence
atgtctgacgtggctatcgtcaaggaaggttggctgcataagcgaggtgagtacattaaaacttggcgcccaaggtacttcctgctcaagaacgacgggactttcatagggtataaggagagaccccaggatgtggatcagagagaggcaccactaaacaacttttccgtggcacagtgtcaactcatgaagactgaacgcccacgaccaaacaccttcataattagatgcttgcaatggaccaccgtaattgagcgaacattccacgtggagactcctgaggaaagggaggaatggaccacggctatccagacagtggcggatggattgaagaaacaggaggaggaggagatggactttaggtcaggctccccctcggataacagtggggcagaagagatggaagtctctttagcaaaaccgaagcatcgtgttacaatgaatgaattcgagtacctcaagctcttaggaaaaggaacctttggaaaggtgatcttagttaaagagaaggccaccgggagatattacgcaatgaaaatcctcaagaaggaggtgatcgtggctaaggatgaagtggctcacaccctcactgaaaatcgcgttctgcagaacagtcggcaccctttcctgacagctctgaagtactcttttcagacccacgatagactgtgctttgtgatggagtacgcaaacggaggtgagttgtttttccacctgtctcgcgaaagagtgttcagtgaagatcgcgctaggttttacggcgcggaaatagtgtcagcactggattacttgcattcagagaagaatgtggtttatcgcgacctgaagttggaaaaccttatgcttgataaagacggacacatcaaaatcaccgattttggcctgtgcaaggagggaatcaaggacggagctaccatgaagaccttttgtgggacccctgaatatctcgctcccgaagtacttgaggacaatgattacggccgagccgtggactggtgggggctcggggtcgtcatgtacgagatgatgtgcgggcgcttaccattttataaccaagatcacgagaagctgttcgaattgatccttatggaagaaatccggttcccgcgcacactgggacccgaggccaagagtttgctctctggacttttgaaaaaagatcctaaacagagactcggtggcggctccgaagatgcgaaggagatcatgcagcaccggttcttcgccggaatagtttggcagcatgtgtatgagaagaagcttagccccccctttaaaccgcaggtgacatcagagactgacacccggtactttgacgaggagttcacagcccagatgattacaattacgcctcctgaccaagacgatagcatggagtgtgtcgatagcgagcgccgcccacacttcccacaattttcctattcagccagtggcacagcgtag

SEQ ID NO: 25843 - DNA, 1257 bp, Artificial Sequence
  derived and/or modified sequence
atgaagacagagcggccccggcccaacaccttcatcatccgctgcctgcagtggaccaccgtcatcgagaggaccttccacgtggagaccccagaggagcgggaggagtggaccacagccatccagacagtggctgatggcctgaagaagcaggaggaggaggagatggacttccgcagcggcagccccagcgacaacagcggggctgaggagatggaggtgtccctggccaagcccaagcaccgggtgaccatgaatgaatttgagtacctgaagctgctgggcaagggcaccttcggcaaggtgatcctggtgaaggagaaggccaccggccgctactatgccatgaagatcctgaagaaggaggtgattgtggccaaggatgaggtggcccacaccctgacagagaacagagtgctgcagaacagccgccaccccttcctgacagccctgaagtacagcttccagacccatgaccggctgtgctttgtgatggagtatgccaatggaggagagctgttcttccacctgagccgggagagggtcttctctgaagatcgggcccgcttctatggagctgagatcgtgtctgccctggactacctgcacagcgagaagaatgtggtgtacagagacctgaagctggagaacctgatgctggacaaggatggccacatcaagatcacagactttggcctgtgcaaggagggcatcaaggatggagccaccatgaagaccttctgtggcaccccagagtacctggcccctgaggtgctggaggacaatgactatggccgggctgtggactggtggggcctgggcgtggtgatgtatgagatgatgtgtggccgcctgcccttctacaaccaggaccacgagaagctgtttgagctgatcctgatggaggagatccgcttccccaggaccctgggccctgaggccaagagcctgctgagcggcctgctgaagaaggaccccaagcagaggctgggcggcggctctgaagatgccaaggagatcatgcagcaccgcttctttgctggcatcgtgtggcagcacgtgtatgagaagaagctgagcccccccttcaagccccaggtgaccagcgagacagacacccgctactttgatgaggagttcaccgcccagatgatcaccatcaccccaccagaccaggatgacagcatggagtgtgtggacagcgagcggcggccccacttcccccagttctcctacagcgccagcggcacagcctag

SEQ ID NO: 25844 - DNA, 1443 bp, Artificial Sequence
  derived and/or modified sequence
atgagcgacgtggccatcgtgaaggagggctggctgcacaagcggggcgagtacatcaaaacctggaggcctaggtatttcctcttaaagaacgatgggaccttcattggctacaaagaaagaccacaggacgtagatcaaagggaagcccctcttaacaatttctcagtagcccagtgccaactgatgaaaactgagcggccccgccctaacaccttcatcatcaggtgtctgcagtggaccacagttattgaacggactttccacgtggaaacgcccgaagaacgagaagagtggaccaccgctatacaaacggtggctgacggactgaaaaaacaagaagaagaagaaatggattttcgctccggttccccatctgacaatagcggagctgaggagatggaggtcagcctcgctaagcccaaacaccgagttaccatgaacgaatttgagtatctaaagttgttagggaagggaacttttggcaaggtgatactcgtgaaagaaaaagcaaccggccgctactacgccatgaagattctgaagaaagaggtcatcgttgcaaaggatgaggtggcccatacattgacagagaacagagtgcttcagaattcccggcacccgttcctgacagcactgaagtactcgttccagactcatgacaggctgtgctttgtcatggaatacgccaacggcggggagctgttctttcatctgtctcgggaacgcgtcttctcagaggacagggcgaggttttacggcgctgaaatcgtaagcgccctagactaccttcattcagaaaaaaacgtggtgtaccgagatctcaaacttgagaaccttatgttggacaaagatggtcacattaaaattacagactttgggctgtgtaaagaagggattaaggatggtgccactatgaagacattctgtggaactccagagtacctggcccctgaagtgctggaagataacgactacgggagggctgtcgattggtggggcctcggtgtggtcatgtacgaaatgatgtgcgggcgacttcctttctacaatcaagatcacgagaaactgttcgaactcattctcatggaagagattcgttttccccggacattaggccccgaggcgaagagtctgttaagcggcctgcttaaaaaggaccctaagcaacggttagggggagggtctgaagatgcgaaagagattatgcaacatagattttttgctggcatagtctggcagcatgtgtatgagaagaagctgagccctcccttcaaacctcaagtgaccagcgaaacagatactcgctattttgatgaagaatttaccgctcagatgatcactatcactccaccagaccaagatgacagcatggaatgtgtcgactcagagaggaggcctcattttccacagttctcctatagcgctagcggcacggcatag

SEQ ID NO: 25845 - DNA, 1443 bp, Artificial Sequence
  derived and/or modified sequence
atgagcgacgtggccatcgtgaaggagggctggctgcacaagcggggggagtatattaagacatggcgtcccaggtacttcttgctgaagaacgacggaacatttattggctacaaggaaaggcctcaggatgtcgaccagcgggaagcacctttgaataatttcagcgttgctcagtgtcaactaatgaaaaccgagcgccctaggcccaacacatttatcatccggtgcctccagtggaccacggtcatcgaacggactttccatgttgagacacccgaggagcgggaagagtggacgacagccatccaaacagttgccgatggcctgaagaagcaggaggaagaggagatggattttagaagcggatctccctcagataattccggggctgaggagatggaggtgtctttggctaagccaaaacaccgcgtaactatgaacgagtttgagtatcttaaactgcttggcaagggcacatttggtaaagtgattctcgttaaggagaaggcgaccggccgctactacgctatgaagattctgaaaaaggaggttatcgtggctaaggacgaagtggcccacaccctgaccgaaaaccgcgtcctccagaacagccgtcacccattcctgacagctctgaagtattctttccaaacacacgatcggttatgtttcgtgatggaatatgctaacggcggcgagctgttctttcatttgagcagagaacgcgtctttagcgaggacagagcccgcttctatggcgcagaaattgtgtcggcactcgactatttacactcagaaaagaacgtagtgtacagagacttaaagctcgagaacctgatgcttgacaaagatggccacattaaaataaccgatttcggattatgcaaagaagggatcaaggatggagccacaatgaagaccttctgcgggactcccgaatacctcgcacccgaagtactggaagacaacgattatggcagagccgtagactggtggggcttgggggttgtcatgtacgaaatgatgtgcgggcgtttacccttctacaaccaggatcatgaaaaactcttcgagctgattctcatggaggagatccggttcccacgcactctggggccggaggccaagtcattgttgagcgggctgctgaagaaggatccaaaacagcggctcggcggcggatctgaagacgcaaaggagataatgcaacaccggtttttcgccggcatcgtgtggcaacacgtatacgagaagaaattgtcccctccattcaaaccacaggtgacgtctgagaccgacaccaggtattttgatgaagaatttactgctcagatgatcactataactccccctgaccaggacgattctatggagtgtgttgactcagagcgaaggcctcacttcccccagttctcctattctgcttctggcactgcttag

SEQ ID NO: 25846 - DNA, 1257 bp, Artificial Sequence
  derived and/or modified sequence
atgaagaccgagcggccccggcccaacaccttcatcatccggtgcctccagtggacaactgtgattgaacgtacctttcatgttgaaacaccagaagagagggaagaatggacaacagccatccagacagttgcggacggactcaagaaacaggaagaggaagagatggattttaggtcgggatctccgtccgacaactccggcgcagaagagatggaggtgtccttggcaaaacctaaacaccgcgtgacgatgaacgagttcgagtacttgaagctgttagggaaaggaaccttcggaaaggtgattttggtcaaagagaaggccactggacgctattacgctatgaagattttgaaaaaggaggtaatcgtcgctaaagacgaggtggcccacacactgacagagaatcgggtgctccagaactcacggcacccgtttctcacagccctgaagtacagctttcagacccacgaccgcctctgcttcgtgatggaatacgctaacggcggcgagttgttctttcacctaagtcgggagagggtcttctccgaggatagggcaaggttctacggagctgagattgtctcagcactggattacctgcactccgagaagaacgtcgtataccgtgacttaaagctggagaatttgatgctagacaaggatggccatatcaagattacggactttggactatgtaaggaagggatcaaggacggcgccaccatgaaaaccttctgcggcacgccagagtatttagcgcccgaggtcctcgaggacaacgactacggcagggctgtcgattggtggggtttgggggtggtaatgtacgaaatgatgtgcggccgccttccattctacaatcaggaccacgaaaagctttttgagttgattctcatggaagaaattagatttccccggacgttgggcccagaagccaaatcccttttgtccggcctcctcaagaaggaccctaagcagagactggggggaggaagcgaggatgccaaggaaatcatgcagcatagatttttcgcgggcattgtgtggcagcacgtgtacgaaaaaaaactgtctccgcccttcaaaccacaagttacgtccgaaacagacacacggtactttgacgaggagttcacagctcagatgattaccattactccccctgatcaagatgacagcatggaatgcgttgatagtgaaagacgccctcattttccacagttctcctatagcgcgtctggcacagcctag

SEQ ID NO: 25847 - DNA, 1443 bp, Artificial Sequence
  derived and/or modified sequence
atgagcgacgtggccatcgtgaaggagggctggctgcacaagcggggggagtacataaaaacttggagacccagatacttcctgctgaagaatgatggcaccttcatcggatataaagaacgccctcaagacgtggatcagcgagaggctccgctcaataatttttcggtggctcagtgccaattgatgaaaacagagaggcccagaccaaatacattcataatccgctgtctgcagtggacaaccgtcatcgagcggacattccatgtagaaaccccggaagaacgcgaagaatggacgacagccattcagaccgtggccgacgggcttaagaagcaggaggaggaggaaatggactttagaagcgggagtcccagtgataacagcggcgctgaggagatggaggtcagcttggccaaacctaaacaccgggtcactatgaatgaattcgagtacctgaaactgctggggaagggaaccttcggtaaggtgattctcgtaaaagagaaagccacgggcagatattatgccatgaagatactgaagaaagaagtgattgtagccaaggacgaagtagctcacaccctgactgagaaccgggtcctgcaaaattcccgtcatccatttctgaccgccctgaagtactcctttcagactcacgatagactctgttttgtgatggaatacgcgaacgggggtgagctgtttttccatctctcccgcgagcgagtctttagcgaagaccgagcgcggttctatggggccgaaatagtctcggccctagactacctgcacagcgaaaagaatgtggtttatcgcgacctaaaactggagaacctgatgctggataaagatggccatatcaaaattaccgactttggcctttgtaaagagggtatcaaggacggtgcaaccatgaagacgttctgtggtacccccgaatatttggcaccagaggtgctggaggataacgactacgggcgcgcagtcgattggtggggcctgggcgtggtcatgtacgagatgatgtgtggtcgactacccttctataatcaagaccacgaaaagctcttcgaactgatcctgatggaggagattcgcttccctaggaccctgggccccgaggccaagtcacttctgagcggcctgttaaaaaaagatccgaaacagcgcctcgggggcggctcagaggacgcaaaggagatcatgcagcaccggtttttcgccggaatcgtgtggcagcacgtgtatgaaaagaaactcagcccaccatttaaacctcaggtgacttcggagaccgatacccggtacttcgacgaagagtttacagcacagatgattacaattaccccaccagatcaggacgactcaatggagtgcgtcgactcagagcggcgacctcatttcccccagttctcatactctgctagtgggacggcttag

SEQ ID NO: 25848 - DNA, 1443 bp, Artificial Sequence
  derived and/or modified sequence
atgagcgacgtggccatcgtgaaggagggctggctgcacaagcggggagagtacattaagacctggaggcccaggtatttcctcctgaaaaacgacggtacatttattggatataaagaacggccccaagacgtggatcaacgagaggcccccctgaacaacttttcagttgcacagtgccagttaatgaaaactgaaaggcctcgccccaatactttcatcattaggtgcttgcaatggacaaccgttatagaacggacatttcacgtcgagacgccggaagaacgtgaggaatggactacagcgattcaaacagtggccgatggactcaagaaacaggaggaagaagagatggacttccgttccgggagcccaagcgacaatagtggggcggaagagatggaagtgagcctagccaaacctaaacacagggtcaccatgaatgagtttgagtatctgaaacttctcggaaagggcacgtttggcaaggtgatacttgtcaaggagaaggcaaccgggcgatattatgcgatgaaaatcctgaaaaaggaagtgatcgtagccaaggacgaagtagcacatacgctcactgagaaccgggttctgcagaactcgcggcatccattccttaccgccctcaagtacagttttcagacccatgaccggttgtgctttgtcatggaatacgccaacgggggcgagctgttcttccaccttagtagagaacgggtcttctccgaggacagagctcgcttctatggagcagaaattgtcagcgccctggattacctgcactctgaaaaaaacgtggtgtatcgggatctcaagttggaaaacctgatgctggacaaggacggtcatattaagataaccgactttgggctgtgtaaagaaggtatcaaggatggggcaaccatgaaaacattttgcggcactcccgaatacctggcacccgaagtactggaggacaacgattacggtagagcagtggactggtggggactcggcgtcgttatgtacgaaatgatgtgtggtagattgcccttttataatcaggatcacgagaagctgtttgagttgatcctgatggaggagattaggttcccccgtactctcgggccagaagccaaaagtcttttaagcgggctgctgaagaaagaccccaagcagcgtctgggaggtggcagcgaggacgcaaaggaaattatgcagcacaggttcttcgccggtatagtgtggcagcacgtttatgagaagaaactcagcccaccattcaagccccaggttacgagcgaaaccgacactagatacttcgatgaggaatttacagcacaaatgatcacaatcacccccccagaccaggacgatagcatggagtgtgtggactctgaacggcggcctcacttcccccaattctcctactctgcatctgggaccgcctag

SEQ ID NO: 25849 - DNA, 1443 bp, Artificial Sequence
  derived and/or modified sequence
atgagcgacgtggccatcgtgaaggagggctggctgcacaagcggggagagtatatcaagacgtggcgacctagatatttcctgcttaaaaacgatggtactttcattggctacaaggaaagaccacaagatgtggaccagagagaggcacctctgaataacttttctgtggcgcagtgtcagctgatgaagaccgagagacctcgccccaatacttttatcatcagatgcttgcaatggaccaccgtgatcgagcggacattccacgtggagacccctgaagagagagaggaatggaccaccgccatccaaacagtggctgacggattgaaaaaacaggaagaggaggaaatggacttcaggtctggaagccctagtgacaacagcggagccgaagagatggaggtgtctcttgctaagccgaagcaccgtgtgactatgaacgagtttgaatacctgaaattgctcggcaaaggcacctttgggaaggtaattttggtgaaggaaaaagccactggtcgttactatgcaatgaaaatactcaaaaaagaagtaatcgtcgctaaggacgaagtagcacacaccctcacagaaaaccgggtgctgcagaactcccgtcaccctttcctgacagccctgaaatattcattccagacgcatgatcgattatgcttcgtgatggagtacgccaacggcggcgagcttttcttccacctgagcagggagcgagtcttctcagaggaccgggcgagattttatggcgctgaaattgtctcggcactcgactacctgcatagtgagaaaaacgtcgtgtatcgcgatctgaagttggaaaacttaatgttggacaaagacggacatattaaaatcactgatttcggtctgtgcaaggagggcattaaggacggcgctactatgaagactttctgcggcacacctgagtacctggcacctgaagtgctggaggacaacgactacggacgcgccgtggactggtggggtctgggggtagtgatgtacgagatgatgtgtggcagactgccgttttacaaccaggatcacgaaaaactcttcgaactaatccttatggaggagatacggtttccacggactctggggccagaagccaaatcactgctcagcgggctactcaagaaggaccccaagcaacggctggggggcggaagcgaggatgcaaaagaaatcatgcagcatcgcttcttcgcaggtatagtctggcagcacgtctacgaaaagaagttatctccaccttttaagccacaggtaacatccgagactgatacaaggtattttgacgaagagttcacagcgcagatgattaccatcactccccctgaccaggatgattccatggagtgtgtggattctgagcgcagaccccacttccctcagttttcttactcagcctcaggcaccgcttag

SEQ ID NO: 25850 - DNA, 1443 bp, Artificial Sequence
  derived and/or modified sequence
atgtccgatgtagcgatcgtgaaggagggttggctgcataagcggggagagtatatcaaaacctggaggccccgatacttccttctgaagaatgacgggacgtttattggttacaaggagcgcccacaggatgttgaccagagggaggcacctctcaacaatttctcggtggctcagtgccagctgatgaagacagagcgccctcgcccaaacaccttcatcattcgctgtttgcagtggaccaccgtaatagaacggactttccacgtggagaccccggaggaaagggaggagtggaccactgcaatacaaacagtggctgatggactgaagaaacaggaggaggaagagatggactttcgaagcggctccccaagtgataattctggggctgaagagatggaggtgagcctggcaaagcccaagcacagggtgaccatgaatgaattcgaatatctcaagctcttggggaaaggcacgttcggcaaggtcatccttgtgaaagagaaggccactggcagatattatgctatgaagatcctgaagaaggaggttatcgtggccaaggacgaggtggcccacacactgacggaaaatagagtgcttcagaatagtcgtcatcctttcctgaccgccttgaaatatagctttcagacccacgatcggctctgttttgtgatggagtatgccaatgggggtgaactttttttccacctatcaagggaaagagtgttctcggaagacagggcaaggttttatggagcagagatagtgtctgcactggactacctccacagcgagaagaacgtggtttatcgtgacctgaaactggaaaatctgatgctggacaaggacggccatatcaagataacagacttcggactctgtaaagagggcatcaaagacggcgctaccatgaagactttctgcggcacaccggagtacctcgcacccgaggttctggaagacaacgactacggaagagctgtggactggtggggcttgggcgttgtgatgtacgagatgatgtgcggcaggctgccattttataaccaagatcacgaaaaactgtttgaactcatcctgatggaagaaatcaggttccctcgaacattaggcccagaagccaaaagtctcctgagcggactgctaaaaaaagaccctaagcaacggctgggtggtggcagcgaggacgcaaaggagatcatgcagcaccggttctttgctgggattgtctggcagcatgtatatgagaagaagttgagtccaccttttaagcctcaagtgacttccgagactgacacaagatactttgacgaagaattcactgcccagatgattaccattacccccccagaccaggatgactccatggagtgcgtagacagcgagcggagacctcactttccccaattcagttacagtgcctctgggaccgcttag

SEQ ID NO: 25851 - DNA, 1443 bp, Artificial Sequence
  derived and/or modified sequence
atgtccgacgtcgcaatcgtcaaggagggctggctacacaagcgaggagaatatataaaaacatggcgacctcggtacttcctgcttaaaaatgacgggacgttcattggctacaaggagcggcctcaggatgtagatcagagagaggccccactgaataattttagcgtggcccagtgccagcttatgaaaacagagagaccaagacctaacacatttattattcggtgtctgcagtggactaccgtgattgagcgcacttttcatgtggaaacccctgaagagagagaggaatggactacagcaattcagactgtcgcggacggcctgaagaagcaagaggaggaggagatggacttccgatccggctcacccagcgacaacagcggggctgaagagatggaggtgtcgctcgccaagcccaagcatcgagtcacaatgaacgaattcgaatatttaaagctgctgggtaaggggacatttggaaaagtgatcctggtgaaggaaaaggccaccggacggtactacgcgatgaaaatactcaagaaagaggttatcgtggccaaggatgaagtggctcatacactaacagagaatcgcgtgctacagaatagccggcatcctttcctaaccgcactcaagtacagcttccagacacatgatagactctgttttgtgatggagtacgcaaatggtggtgaactcttttttcatctctcaagagaacgcgtgttcagtgaagatagagctagattctatggagctgaaatagtgtctgccttggattacctgcacagtgaaaagaacgtcgtctaccgggatctgaaactcgagaacctcatgctggataaagacggccatattaagattactgactttggcctttgcaaagaggggattaaagatggcgctacaatgaaaacgttttgcggcacgcccgagtatctggctccagaggttttagaagacaatgattatggtagggcagtagactggtggggcctcggagtcgtaatgtatgaaatgatgtgcggaagacttcctttctataaccaggatcacgagaagctattcgaactgatattaatggaagagataagattccctcgcaccttgggccctgaagcaaagagcctgttgtcaggacttttgaagaaagatccgaagcagcgcctgggaggaggatcagaggatgccaaggagattatgcagcataggttttttgccggaatcgtgtggcagcacgtgtacgaaaaaaagctgagtcccccattcaagccccaggtgacaagtgaaactgacacccggtattttgacgaggaatttacggcccaaatgatcactatcacacctccagatcaagacgactcaatggaatgcgttgactccgaaagaaggccccatttccctcagttttcgtactctgcaagtggaacagcttag

SEQ ID NO: 25852 - DNA, 1257 bp, Artificial Sequence
  derived and/or modified sequence
atgaagacggaaagacccaggcccaacacgttcatcatccgttgcttgcagtggaccacagtaatcgaaagaacgtttcacgttgaaacacctgaagagagggaggaatggacaacggcaatacagacagttgcggatggtctgaagaagcaggaagaggaggaaatggattttcggtccggatcaccctcggataattccggcgctgaggagatggaagtttccctggctaaacccaaacatagagttacgatgaatgagtttgaataccttaagctactgggcaaaggaacatttgggaaggtgattctggtcaaagagaaggccaccggtcggtactacgcaatgaaaatcctgaaaaaagaggtgatcgtggcaaaggacgaggtcgcccacaccctgaccgaaaatagagtactccagaactcacggcatcctttcctcactgccttaaagtattcatttcaaacccacgaccgtctctgttttgttatggagtacgccaatggcggtgagctcttctttcacctgagtagggagagggtatttagtgaggatagagccaggttttatggggcagaaatagtcagtgctctagactacctgcatagtgagaagaacgtcgtgtaccgggatttaaagttggaaaatttaatgttggacaaagatggacacatcaagattacagactttggcctatgtaaggaggggatcaaggatggcgcaacgatgaagacattttgcgggactcctgagtacctggcacccgaggtcctggaggacaacgattacggtcgggctgtcgactggtggggcctgggcgtagtaatgtatgaaatgatgtgtggtagacttcccttctataaccaagatcacgagaaactgttcgagctgatcctgatggaagagattcgttttccccgaaccttagggccagaggccaaaagcctgctgtcaggactactgaagaaggatcctaagcaacgacttggaggcggaagtgaagacgcaaaagaaatcatgcaacataggttctttgcaggaatcgtctggcagcacgtgtacgaaaaaaagctttcacccccattcaaacctcaggtcaccagtgaaacagataccaggtatttcgacgaagaattcactgcacaaatgattacaattacgcctccggatcaggatgattcaatggaatgtgtggattccgagcggaggccccacttcccccagtttagctactccgcaagcggtactgcctag

SEQ ID NO: 25853 - DNA, 1443 bp, Artificial Sequence
  derived and/or modified sequence
atgagcgatgtcgcgatagtgaaggagggatggttgcataagagaggcgagtacatcaaaacatggcggcctcgctactttttgctcaagaacgatgggacgtttattgggtacaaggaacgcccacaggacgtcgaccagagagaggctcccttgaataacttttccgtggcccagtgtcagctcatgaagaccgaacggccacggccaaatacatttattatccggtgccttcagtggacgacagtgattgagcgaacgtttcatgtggagacacccgaggaaagggaagagtggacaacagcaatccagaccgtagccgacggcctgaaaaaacaggaggaagaagagatggatttccgctccggatcacctagcgataactccggggcagaagaaatggaagtctccctagccaagccaaagcaccgggtgacaatgaacgagttcgaatacctgaaattgctcgggaaggggacattcggtaaggtgattctggtgaaagaaaaggctaccggcaggtattacgccatgaaaatactcaagaaggaggttatagtggcaaaagatgaagtggctcatactttaactgagaacagagtcctgcagaactcacgccaccctttcctgaccgccctcaaatacagttttcagacacacgaccggttgtgtttcgtaatggagtacgctaacgggggagagctgttttttcatctgagcagagaaagagtgttttcggaagaccgagcccgtttctatggggctgaaattgtgtccgcactcgactatctccacagcgaaaagaatgtggtctatcgcgacctcaagctggagaatttaatgcttgacaaggatgggcacataaaaattacagacttcggactttgtaaggaggggataaaggatggcgctacgatgaagaccttctgtggtactcctgaatacttggctcctgaagtccttgaggacaacgattacggacgcgcagtagattggtggggccttggggtggttatgtatgaaatgatgtgcggccgtctgcccttctacaaccaagatcatgaaaaattatttgaacttatcctgatggaagaaattcgatttccaaggacgttggggcctgaggcaaaatccctgctgagcggactgctgaaaaaggatccgaagcagcgattgggaggcggatcagaggatgccaaagagattatgcagcaccgctttttcgctggtattgtctggcagcatgtgtacgaaaaaaaactctcacctcccttcaaaccacaggtgacctctgaaacggacacgcgatatttcgatgaggaatttactgctcagatgatcactataacgccacctgaccaggacgacagcatggagtgcgtggacagtgaacggaggcctcatttccctcagttttcttactctgctagcggcaccgcctag

SEQ ID NO: 25854 - DNA, 1443 bp, Artificial Sequence
  derived and/or modified sequence
atgtcagacgtggccattgtgaaggagggttggctgcacaagcggggtgagtatatcaaaacatggagacctaggtattttctgcttaagaatgacgggacatttattggatacaaggagaggccgcaagatgtggaccagagagaagcccctctgaacaactttagcgtggcccagtgccagttaatgaaaacagaaagacccagacctaacactttcataatccgatgtctgcagtggacaactgtcattgagaggacatttcacgtcgagacaccagaggagagagaagagtggaccactgctatacagacagtcgccgacggccttaagaaacaggaagaggaagagatggacttcagaagcggctcaccttccgataattccggcgctgaagagatggaggtttctttggctaaacccaagcatcgtgtgactatgaatgaatttgagtatctgaagctgcttgggaagggcacattcggcaaagtgattctcgttaaagagaaggctacgggcaggtactacgcaatgaagatcctgaaaaaggaggtcatcgtagctaaagacgaggtggcgcatacacttacagagaatagggtgttacaaaacagcaggcacccctttctgactgcgctgaagtacagcttccagacccacgatcggctttgcttcgtaatggaatacgcaaatggaggtgaactgttttttcacctgtcccgcgaaagggtcttcagcgaggatcgtgcccgattttatggggctgaaatcgtgtcagctttagactacctgcactcagaaaagaacgtggtgtaccgggatctgaaactggagaacctaatgctggacaaggacgggcatatcaaaatcactgactttggcctgtgcaaagagggcattaaagatggtgctaccatgaaaactttctgtggaacaccagaataccttgccccagaagtcttggaagataatgactatgggagggccgttgactggtggggactcggcgtggtcatgtacgaaatgatgtgtggcagacttcccttctacaaccaggaccacgagaagttgttcgagctgatcctcatggaggagatccggttccctcggactctcggtccagaagccaagagtctgctgagtgggctcttaaaaaaagaccctaaacaacggctgggaggcggatcagaggatgctaaagaaatcatgcagcaccggttctttgccggtattgtctggcaacacgtctacgagaagaagctgagtccacccttcaagccccaggtgacttctgaaaccgacaccagatatttcgacgaggagtttacagctcagatgatcactataacccccccagatcaggatgatagcatggagtgcgtcgatagcgagcgcaggccccactttcctcagttttcatacagtgcttcaggtacagcttag

SEQ ID NO: 25855 - DNA, 1443 bp, Artificial Sequence
  derived and/or modified sequence
atgtccgacgtcgcaatagtcaaagaaggctggcttcacaaacgcggagaatacattaagacctggcgaccgcgttatttcctcctgaaaaacgatgggacattcattggctacaaggaaaggccccaggatgtggaccagcgggaggcaccactgaataacttcagcgtggctcaatgtcagctgatgaaaaccgagcggcctagaccaaacacttttatcatcagatgtctgcagtggaccactgtgatcgaacgaaccttccacgtcgaaacacctgaggaaagagaggaatggacaaccgccatccagactgtcgcagatggcctgaaaaagcaggaagaagaggaaatggacttccgatccggctctccgtcagacaatagtggagcagaggagatggaggtgtctctggctaagcccaaacaccgtgtgaccatgaatgagtttgagtatctgaaactgctcggcaaaggtacttttggcaaagtgatcctggtgaaagaaaaggcaacagggcgatactacgccatgaagatcttgaagaaggaagttatcgtggccaaggacgaggtggcccacacgttgactgaaaatcgggtgctgcagaattctagacatcctttcctcactgcattaaagtactcatttcagacgcatgatagactttgcttcgtgatggagtacgcaaacgggggagagctgttctttcacttatcgcgggaaagggtcttcagcgaagatcgtgccaggttctatggggcagagatcgtgtcagccctggattatctacatagcgagaaaaacgtggtttaccgcgacttgaagctggaaaacctgatgctggataaggacggacacattaagattaccgactttgggctctgtaaggaaggaataaaggacggagccactatgaaaacattttgcggcactcctgagtacctcgctcctgaagtcctggaagataacgactatggcagggctgtcgattggtggggattaggggtcgtaatgtatgaaatgatgtgtggcaggctcccattttataatcaggatcatgagaaacttttcgaactgatccttatggaggaaatcagatttccaagaactcttggacctgaggccaagtcacttttatccgggctgttaaagaaagaccccaagcagagactggggggtggcagcgaagacgccaaagagattatgcagcatcgattctttgctggtattgtctggcagcacgtgtatgaaaagaagcttagtcctccctttaagccacaagtgacttcggagaccgatacacgatatttcgacgaagagttcaccgctcaaatgattaccatcactccgcctgatcaagacgactccatggagtgcgttgatagcgagcgaaggccgcacttccctcaattctcctactctgcttctggcaccgcctag

SEQ ID NO: 25856 - DNA, 3913 bp, Artificial Sequence
  derived and/or modified sequence
aagaatatgtgcttatggtaaaggcaggcggcaggtacggaggctgtgggaagtcggggtccctccgcccccacaggcagccctgtgctggcctggtgtatacgtttctgtgcagacgtacaccaccctgtgtgagcacagatgtatttttacacatggctctggacagctgtctgactctgtcagcagcaggccttggaggggctcaggcccgtgtgggggtggggggacatccagaggtctttgagtccagccctctgcctccaggccacgcccactcagtgtcgtcagagccccctgtgcctgaggcgtgcgcggctcggagccctgccctcggagtcctgcggtgccttcctcgagtctggcctgctttccatcctgctaagtacttggggcatttccctctttgggtaaggtgtggtcttccctgtcctggcattagacacaaggcagtgggccttcctgccattctaagtgtagcttaagacaatcagtgcaaagcaaccctttgtgggtgtccagcccttgcctcgggaggccagaaaggtggcctggggggagagcgtctaagctggctgtggaaagacccatgttgggatccattccacagaggtcgtcaggggtctctgcctggcctggaggtcccagagaggaccctcctcccctcaggaaggcccatctggaagggtagcagaggactgctcacaggaagagcatgcgaagtgctctttctggggatgcctgtagttggtgatgtgggaactgggttttgagggatgcctaggagttcatccatcagaggggaaatgaggaagccatgcaggatcaatggataaagtgtgctcaggtgagggttggctggtgggccgctgcagggcgggggcctgtccagtgctcccccacttacttgctgcctcccgactgctgtaattatgggtctgtaaccaccctggactgggtgctcctcactgacggacttgtctgaacctctctttgtctccagcgcccagcactgggcctggcaaaacctgagacgcccggtacatgttggccaaatgaatgaaccagattcagaccggcaggggcgctgtggtttaggaggggcctggggtttctcccaggaggtttttgggcttgcgctggagggctctggactcccgtttgcgccagtggcctgcatcctggtcctgtcttcctcatgtttgaatttctttgctttcctagtctggggagcagggaggagccctgtgccctgtcccaggatccatgggtaggaacaccatggacagggagagcaaacggggccatctgtcaccaggggcttagggaaggccgagccagcctgggtcaaagaagtcaaaggggctgcctggaggaggcagcctgtcagctggtgcatcagaggctgtggccaggccagctgggctcggggagcgccagcctgagaggagcgcgtgagcgtcgcgggagcctcgggcaccatgagcgacgtggctattgtgaaggagggttggctgcacaaacgaggggagtacatcaagacctggcggccacgctacttcctcctcaagaatgatggcaccttcattggctacaaggagcggccgcaggatgtggaccaacgtgaggctcccctcaacaacttctctgtggcgcagtgccagctgatgaagacggagcggccccggcccaacaccttcatcatccgctgcctgcagtggaccactgtcatcgaacgcaccttccatgtggagactcctgaggagcgggaggagtggacaaccgccatccagactgtggctgacggcctcaagaagcaggaggaggaggagatggacttccggtcgggctcacccagtgacaactcaggggctgaagagatggaggtgtccctggccaagcccaagcaccgcgtgaccatgaacgagtttgagtacctgaagctgctgggcaagggcactttcggcaaggtgatcctggtgaaggagaaggccacaggccgctactacgccatgaagatcctcaagaaggaagtcatcgtggccaaggacgaggtggcccacacactcaccgagaaccgcgtcctgcagaactccaggcaccccttcctcacagccctgaagtactctttccagacccacgaccgcctctgctttgtcatggagtacgccaacgggggcgagctgttcttccacctgtcccgggagcgtgtgttctccgaggaccgggcccgcttctatggcgctgagattgtgtcagccctggactacctgcactcggagaagaacgtggtgtaccgggacctcaagctggagaacctcatgctggacaaggacgggcacattaagatcacagacttcgggctgtgcaaggaggggatcaaggacggtgccaccatgaagaccttttgcggcacacctgagtacctggcccccgaggtgctggaggacaatgactacggccgtgcagtggactggtgggggctgggcgtggtcatgtacgagatgatgtgcggtcgcctgcccttctacaaccaggaccatgagaagctttttgagctcatcctcatggaggagatccgcttcccgcgcacgcttggtcccgaggccaagtccttgctttcagggctgctcaagaaggaccccaagcagaggcttggcgggggctccgaggacgccaaggagatcatgcagcatcgcttctttgccggtatcgtgtggcagcacgtgtacgagaagaagctcagcccacccttcaagccccaggtcacgtcggagactgacaccaggtattttgatgaggagttcacggcccagatgatcaccatcacaccacctgaccaagatgacagcatggagtgtgtggacagcgagcgcaggccccacttcccccagttctcctactcggccagcggcacggcctgaggcggcggtggactgcgctggacgatagcttggagggatggagaggcggcctcgtgccatgatctgtatttaatggtttttatttctcgggtgcatttgagagaagccacgctgtcctctcgagcccagatggaaagacgtttttgtgctgtgggcagcaccctcccccgcagcggggtagggaagaaaactatcctgcgggttttaatttatttcatccagtttgttctccgggtgtggcctcagccctcagaacaatccgattcacgtagggaaatgttaaggacttctgcagctatgcgcaatgtggcattggggggccgggcaggtcctgcccatgtgtcccctcactctgtcagccagccgccctgggctgtctgtcaccagctatctgtcatctctctggggccctgggcctcagttcaacctggtggcaccagatgcaacctcactatggtatgctggccagcaccctctcctgggggtggcaggcacacagcagccccccagcactaaggccgtgtctctgaggacgtcatcggaggctgggcccctgggatgggaccagggatgggggatgggccagggtttacccagtgggacagaggagcaaggtttaaatttgttattgtgtattatgttgttcaaatgcattttgggggtttttaatctttgtgacaggaaagccctcccccttccccttctgtgtcacagttcttggtgactgtcccaccgggagcctccccctcagatgatctctccacggtagcacttgaccttttcgacgcttaacctttccgctgtcgccccaggccctccctgactccctgtgggggtggccatccctgggcccctccacgcctcctggccagacgctgccgctgccgctgcaccacggcgtttttttacaacattcaactttagtatttttactattataatataatatggaaccttccctccaaattcttcaataaaagttgcttttc

SEQ ID NO: 25857 - DNA, 2710 bp, Artificial Sequence
  derived and/or modified sequence
ggcggccgagcaccgagcgctgggcaccgggcaccgagcggcggcggcacgcgaggcccggccccgagcagcgcccccgcccgccgcggcctccagcccggccccgcccagcgccggcccgcggggatgcggagcggcgggcgccggaggccgcggcccggctaggcccgcgctcgcgcccggacgcggcggcccgaggctgtggccaggccagctgggctcggggagcgccagcctgagaggagcgcgtgagcgtcgcgggagcctcgggcaccatgagcgacgtggctattgtgaaggagggttggctgcacaaacgaggggagtacatcaagacctggcggccacgctacttcctcctcaagaatgatggcaccttcattggctacaaggagcggccgcaggatgtggaccaacgtgaggctcccctcaacaacttctctgtggcgcagtgccagctgatgaagacggagcggccccggcccaacaccttcatcatccgctgcctgcagtggaccactgtcatcgaacgcaccttccatgtggagactcctgaggagcgggaggagtggacaaccgccatccagactgtggctgacggcctcaagaagcaggaggaggaggagatggacttccggtcgggctcacccagtgacaactcaggggctgaagagatggaggtgtccctggccaagcccaagcaccgcgtgaccatgaacgagtttgagtacctgaagctgctgggcaagggcactttcggcaaggtgatcctggtgaaggagaaggccacaggccgctactacgccatgaagatcctcaagaaggaagtcatcgtggccaaggacgaggtggcccacacactcaccgagaaccgcgtcctgcagaactccaggcaccccttcctcacagccctgaagtactctttccagacccacgaccgcctctgctttgtcatggagtacgccaacgggggcgagctgttcttccacctgtcccgggagcgtgtgttctccgaggaccgggcccgcttctatggcgctgagattgtgtcagccctggactacctgcactcggagaagaacgtggtgtaccgggacctcaagctggagaacctcatgctggacaaggacgggcacattaagatcacagacttcgggctgtgcaaggaggggatcaaggacggtgccaccatgaagaccttttgcggcacacctgagtacctggcccccgaggtgctggaggacaatgactacggccgtgcagtggactggtgggggctgggcgtggtcatgtacgagatgatgtgcggtcgcctgcccttctacaaccaggaccatgagaagctttttgagctcatcctcatggaggagatccgcttcccgcgcacgcttggtcccgaggccaagtccttgctttcagggctgctcaagaaggaccccaagcagaggcttggcgggggctccgaggacgccaaggagatcatgcagcatcgcttctttgccggtatcgtgtggcagcacgtgtacgagaagaagctcagcccacccttcaagccccaggtcacgtcggagactgacaccaggtattttgatgaggagttcacggcccagatgatcaccatcacaccacctgaccaagatgacagcatggagtgtgtggacagcgagcgcaggccccacttcccccagttctcctactcggccagcggcacggcctgaggcggcggtggactgcgctggacgatagcttggagggatggagaggcggcctcgtgccatgatctgtatttaatggtttttatttctcgggtgcatttgagagaagccacgctgtcctctcgagcccagatggaaagacgtttttgtgctgtgggcagcaccctcccccgcagcggggtagggaagaaaactatcctgcgggttttaatttatttcatccagtttgttctccgggtgtggcctcagccctcagaacaatccgattcacgtagggaaatgttaaggacttctgcagctatgcgcaatgtggcattggggggccgggcaggtcctgcccatgtgtcccctcactctgtcagccagccgccctgggctgtctgtcaccagctatctgtcatctctctggggccctgggcctcagttcaacctggtggcaccagatgcaacctcactatggtatgctggccagcaccctctcctgggggtggcaggcacacagcagccccccagcactaaggccgtgtctctgaggacgtcatcggaggctgggcccctgggatgggaccagggatgggggatgggccagggtttacccagtgggacagaggagcaaggtttaaatttgttattgtgtattatgttgttcaaatgcattttgggggtttttaatctttgtgacaggaaagccctcccccttccccttctgtgtcacagttcttggtgactgtcccaccgggagcctccccctcagatgatctctccacggtagcacttgaccttttcgacgcttaacctttccgctgtcgccccaggccctccctgactccctgtgggggtggccatccctgggcccctccacgcctcctggccagacgctgccgctgccgctgcaccacggcgtttttttacaacattcaactttagtatttttactattataatataatatggaaccttccctccaaattcttcaataaaagttgcttttcaaa

SEQ ID NO: 25858 - DNA, 1564 bp, Artificial Sequence
  derived and/or modified sequence
ctgccacggagccccagcggctacacactccactcactcacacctctcagggccccgcacgttcccacagccctcagggtgtacgtgctgtaggtgtggctgtgccccagagtgccagctgatgaagacggagcggccccggcccaacaccttcatcatccgctgcctgcagtggaccactgtcatcgaacgcaccttccatgtggagactcctgaggagcgggaggagtggacaaccgccatccagactgtggctgacggcctcaagaagcaggaggaggaggagatggacttccggtcgggctcacccagtgacaactcaggggctgaagagatggaggtgtccctggccaagcccaagcaccgcgtgaccatgaacgagtttgagtacctgaagctgctgggcaagggcactttcggcaaggtgatcctggtgaaggagaaggccacaggccgctactacgccatgaagatcctcaagaaggaagtcatcgtggccaaggacgaggtggcccacacactcaccgagaaccgcgtcctgcagaactccaggcaccccttcctcacagccctgaagtactctttccagacccacgaccgcctctgctttgtcatggagtacgccaacgggggcgagctgttcttccacctgtcccgggagcgtgtgttctccgaggaccgggcccgcttctatggcgctgagattgtgtcagccctggactacctgcactcggagaagaacgtggtgtaccgggacctcaagctggagaacctcatgctggacaaggacgggcacattaagatcacagacttcgggctgtgcaaggaggggatcaaggacggtgccaccatgaagaccttttgcggcacacctgagtacctggcccccgaggtgctggaggacaatgactacggccgtgcagtggactggtgggggctgggcgtggtcatgtacgagatgatgtgcggtcgcctgcccttctacaaccaggaccatgagaagctttttgagctcatcctcatggaggagatccgcttcccgcgcacgcttggtcccgaggccaagtccttgctttcagggctgctcaagaaggaccccaagcagaggcttggcgggggctccgaggacgccaaggagatcatgcagcatcgcttctttgccggtatcgtgtggcagcacgtgtacgagaagaagctcagcccacccttcaagccccaggtcacgtcggagactgacaccaggtattttgatgaggagttcacggcccagatgatcaccatcacaccacctgaccaagatgacagcatggagtgtgtggacagcgagcgcaggccccacttcccccagttctcctactcggccagcggcacggcctgaggcggcggtggactgcgctggacgatagcttggagggatggagaggcggcctcgtgccatgatctgtatttaatggtttttatttctcgggtgcatttgagagaagccacgctgtcctctcgagcccagatggaaagacgtttttgtgctgtgggcagcaccctcccccgcagcggggtagggaag

SEQ ID NO: 25859 - DNA, 3916 bp, Artificial Sequence
  derived and/or modified sequence
ctttgggtaaggtgtggtcttccctgtcctggcattagacacaaggcagtgggccttcctgccattctaagtgtagcttaagacaatcagtgcaaagcaaccctttgtgggtgtccagcccttgcctcgggaggccagaaaggtggcctggggggagagcgtctaagctggctgtggaaagacccatgttgggatccattccacagaggtcgtcaggggtctctgcctggcctggaggtcccagagaggaccctcctcccctcaggaaggcccatctggaagggtagcagaggactgctcacaggaagagcatgcgaagtgctctttctggggatgcctgtagttggtgatgtgggaactgggttttgagggatgcctaggagttcatccatcagaggggaaatgaggaagccatgcaggatcaatggataaagtgtgctcaggtgagggttggctggtgggccgctgcagggcgggggcctgtccagtgctcccccacttacttgctgcctcccgactgctgtaattatgggtctgtaaccaccctggactgggtgctcctcactgacggacttgtctgaacctctctttgtctccagcgcccagcactgggcctggcaaaacctgagacgcccggtacatgttggccaaatgaatgaaccagattcagaccggcaggggcgctgtggtttaggaggggcctggggtttctcccaggaggtttttgggcttgcgctggagggctctggactcccgtttgcgccagtggcctgcatcctggtcctgtcttcctcatgtttgaatttctttgctttcctagtctggggagcagggaggagccctgtgccctgtcccaggatccatgggtaggaacaccatggacagggagagcaaacggggccatctgtcaccaggggcttagggaaggccgagccagcctgggtcaaagaagtcaaaggggctgcctggaggaggcagcctgtcagctggtgcatcaggttagggaggctgggaaggccttttggggatgggggtgatttgtccaacggctgggggaggtgggaatggggaggtgagcaaggcagcagctctcagggcctggctgttgcgggtggtggtggcaggggctggaggctctaagcctagaataaggagaggcccaggtccagggaactgtgttcaattacatggatttgacacttggcagccctgagtgttttggggagagggaaggcaggcgggcagatgggggtcagagagcttagagggatggcagcccacctgggaaggcaggtgcgggtggagcccccaggcacgtgcagtgggtctctggctcacccagggcgaggagctgcccttagccaggcgtggcctcacattcagcttcctttgcttctcccagaggctgtggccaggccagctgggctcggggagcgccagcctgagaggagcgcgtgagcgtcgcgggagcctcgggcaccatgagcgacgtggctattgtgaaggagggttggctgcacaaacgaggggagtacatcaagacctggcggccacgctacttcctcctcaagaatgatggcaccttcattggctacaaggagcggccgcaggatgtggaccaacgtgaggctcccctcaacaacttctctgtggcgcagtgccagctgatgaagacggagcggccccggcccaacaccttcatcatccgctgcctgcagtggaccactgtcatcgaacgcaccttccatgtggagactcctgaggagcgggaggagtggacaaccgccatccagactgtggctgacggcctcaagaagcaggaggaggaggagatggacttccggtcgggctcacccagtgacaactcaggggctgaagagatggaggtgtccctggccaagcccaagcaccgcgtgaccatgaacgagtttgagtacctgaagctgctgggcaagggcactttcggcaaggtgatcctggtgaaggagaaggccacaggccgctactacgccatgaagatcctcaagaaggaagtcatcgtggccaaggacgaggtggcccacacactcaccgagaaccgcgtcctgcagaactccaggcaccccttcctcacagccctgaagtactctttccagacccacgaccgcctctgctttgtcatggagtacgccaacgggggcgagctgttcttccacctgtcccgggagcgtgtgttctccgaggaccgggcccgcttctatggcgctgagattgtgtcagccctggactacctgcactcggagaagaacgtggtgtaccgggacctcaagctggagaacctcatgctggacaaggacgggcacattaagatcacagacttcgggctgtgcaaggaggggatcaaggacggtgccaccatgaagaccttttgcggcacacctgagtacctggcccccgaggtgctggaggacaatgactacggccgtgcagtggactggtgggggctgggcgtggtcatgtacgagatgatgtgcggtcgcctgcccttctacaaccaggaccatgagaagctttttgagctcatcctcatggaggagatccgcttcccgcgcacgcttggtcccgaggccaagtccttgctttcagggctgctcaagaaggaccccaagcagaggcttggcgggggctccgaggacgccaaggagatcatgcagcatcgcttctttgccggtatcgtgtggcagcacgtgtacgagaagaagctcagcccacccttcaagccccaggtcacgtcggagactgacaccaggtattttgatgaggagttcacggcccagatgatcaccatcacaccacctgaccaagatgacagcatggagtgtgtggacagcgagcgcaggccccacttcccccagttctcctactcggccagcggcacggcctgaggcggcggtggactgcgctggacgatagcttggagggatggagaggcggcctcgtgccatgatctgtatttaatggtttttatttctcgggtgcatttgagagaagccacgctgtcctctcgagcccagatggaaagacgtttttgtgctgtgggcagcaccctcccccgcagcggggtagggaagaaaactatcctgcgggttttaatttatttcatccagtttgttctccgggtgtggcctcagccctcagaacaatccgattcacgtagggaaatgttaaggacttctgcagctatgcgcaatgtggcattggggggccgggcaggtcctgcccatgtgtcccctcactctgtcagccagccgccctgggctgtctgtcaccagctatctgtcatctctctggggccctgggcctcagttcaacctggtggcaccagatgcaacctcactatggtatgctggccagcaccctctcctgggggtggcaggcacacagcagccccccagcactaaggccgtgtctctgaggacgtcatcggaggctgggcccctgggatgggaccagggatgggggatgggccagggtttacccagtgggacagaggagcaaggtttaaatttgttattgtgtattatgttgttcaaatgcattttgggggtttttaatctttgtgacaggaaagccctcccccttccccttctgtgtcacagttcttggtgactgtcccaccgggagcctccccctcagatgatctctccacggtagcacttgaccttttcgacgcttaacctttccgctgtcgccccaggccctccctgactccctgtgggggtggccatccctgggcccctccacgcctcctggccagacgctgccgctgccgctgcaccacggcgtttttttacaacattcaactttagtatttttactattataatataatatggaaccttccctccaaattcttcaataaaagttgcttttcaaa

SEQ ID NO: 25860 - DNA, 1595 bp, Artificial Sequence
  derived and/or modified sequence
agtcctgcggtgccttcctcgagtctggcctgctttccatcctgctaagtacttggggcatttccctctttggaggctgtggccaggccagctgggctcggggagcgccagcctgagaggagcgcgtgagcgtcgcgggagcctcgggcaccatgagcgacgtggctattgtgaaggagggttggctgcacaaacgaggggagtacatcaagacctggcggccacgctacttcctcctcaagaatgatggcaccttcattggctacaaggagcggccgcaggatgtggaccaacgtgaggctcccctcaacaacttctctgtggcgcagtgccagctgatgaagacggagcggccccggcccaacaccttcatcatccgctgcctgcagtggaccactgtcatcgaacgcaccttccatgtggagactcctgaggagcgggaggagtggacaaccgccatccagactgtggctgacggcctcaagaagcaggaggaggaggagatggacttccggtcgggctcacccagtgacaactcaggggctgaagagatggaggtgtccctggccaagcccaagcaccgcgtgaccatgaacgagtttgagtacctgaagctgctgggcaagggcactttcggcaaggtgatcctggtgaaggagaaggccacaggccgctactacgccatgaagatcctcaagaaggaagtcatcgtggccaaggacgaggtggcccacacactcaccgagaaccgcgtcctgcagaactccaggcaccccttcctcacagccctgaagtactctttccagacccacgaccgcctctgctttgtcatggagtacgccaacgggggcgagctgttcttccacctgtcccgggagcgtgtgttctccgaggaccgggcccgcttctatggcgctgagattgtgtcagccctggactacctgcactcggagaagaacgtggtgtaccgggacctcaagctggagaacctcatgctggacaaggacgggcacattaagatcacagacttcgggctgtgcaaggaggggatcaaggacggtgccaccatgaagaccttttgcggcacacctgagtacctggcccccgaggtgctggaggacaatgactacggccgtgcagtggactggtgggggctgggcgtggtcatgtacgagatgatgtgcggtcgcctgcccttctacaaccaggaccatgagaagctttttgagctcatcctcatggaggagatccgcttcccgcgcacgcttggtcccgaggccaagtccttgctttcagggctgctcaagaaggaccccaagcagaggcttggcgggggctccgaggacgccaaggagatcatgcagcatcgcttctttgccggtatcgtgtggcagcacgtgtacgagaagaagctcagcccacccttcaagccccaggtcacgtcggagactgacaccaggtattttgatgaggagttcacggcccagatgatcaccatcacaccacctgaccaagatgacagcatggagtgtgtggacagcgagcgcaggccccacttcccccagttctcctactcggccagcggcacggcctga

SEQ ID NO: 25861 - DNA, 3066 bp, Artificial Sequence
  derived and/or modified sequence
atggataaagtgtgctcaggtgagggttggctggtgggccgctgcagggcgggggcctgtccagtgctcccccacttacttgctgcctcccgactgctgtaattatgggtctgtaaccaccctggactgggtgctcctcactgacggacttgtctgaacctctctttgtctccagcgcccagcactgggcctggcaaaacctgagacgcccggtacatgttggccaaatgaatgaaccagattcagaccggcaggggcgctgtggtttaggaggggcctggggtttctcccaggaggtttttgggcttgcgctggagggctctggactcccgtttgcgccagtggcctgcatcctggtcctgtcttcctcatgtttgaatttctttgctttcctagtctggggagcagggaggagccctgtgccctgtcccaggatccatgggtaggaacaccatggacagggagagcaaacggggccatctgtcaccaggggcttagggaaggccgagccagcctgggtcaaagaagtcaaaggggctgcctggaggaggcagcctgtcagctggtgcatcagaggctgtggccaggccagctgggctcggggagcgccagcctgagaggagcgcgtgagcgtcgcgggagcctcgggcaccatgagcgacgtggctattgtgaaggagggttggctgcacaaacgaggggagtacatcaagacctggcggccacgctacttcctcctcaagaatgatggcaccttcattggctacaaggagcggccgcaggatgtggaccaacgtgaggctcccctcaacaacttctctgtggcgcagtgccagctgatgaagacggagcggccccggcccaacaccttcatcatccgctgcctgcagtggaccactgtcatcgaacgcaccttccatgtggagactcctgaggagcgggaggagtggacaaccgccatccagactgtggctgacggcctcaagaagcaggaggaggaggagatggacttccggtcgggctcacccagtgacaactcaggggctgaagagatggaggtgtccctggccaagcccaagcaccgcgtgaccatgaacgagtttgagtacctgaagctgctgggcaagggcactttcggcaaggtgatcctggtgaaggagaaggccacaggccgctactacgccatgaagatcctcaagaaggaagtcatcgtggccaaggacgaggtggcccacacactcaccgagaaccgcgtcctgcagaactccaggcaccccttcctcacagccctgaagtactctttccagacccacgaccgcctctgctttgtcatggagtacgccaacgggggcgagctgttcttccacctgtcccgggagcgtgtgttctccgaggaccgggcccgcttctatggcgctgagattgtgtcagccctggactacctgcactcggagaagaacgtggtgtaccgggacctcaagctggagaacctcatgctggacaaggacgggcacattaagatcacagacttcgggctgtgcaaggaggggatcaaggacggtgccaccatgaagaccttttgcggcacacctgagtacctggcccccgaggtgctggaggacaatgactacggccgtgcagtggactggtgggggctgggcgtggtcatgtacgagatgatgtgcggtcgcctgcccttctacaaccaggaccatgagaagctttttgagctcatcctcatggaggagatccgcttcccgcgcacgcttggtcccgaggccaagtccttgctttcagggctgctcaagaaggaccccaagcagaggcttggcgggggctccgaggacgccaaggagatcatgcagcatcgcttctttgccggtatcgtgtggcagcacgtgtacgagaagaagctcagcccacccttcaagccccaggtcacgtcggagactgacaccaggtattttgatgaggagttcacggcccagatgatcaccatcacaccacctgaccaagatgacagcatggagtgtgtggacagcgagcgcaggccccacttcccccagttctcctactcggccagcggcacggcctgaggcggcggtggactgcgctggacgatagcttggagggatggagaggcggcctcgtgccatgatctgtatttaatggtttttatttctcgggtgcatttgagagaagccacgctgtcctctcgagcccagatggaaagacgtttttgtgctgtgggcagcaccctcccccgcagcggggtagggaagaaaactatcctgcgggttttaatttatttcatccagtttgttctccgggtgtggcctcagccctcagaacaatccgattcacgtagggaaatgttaaggacttctgcagctatgcgcaatgtggcattggggggccgggcaggtcctgcccatgtgtcccctcactctgtcagccagccgccctgggctgtctgtcaccagctatctgtcatctctctggggccctgggcctcagttcaacctggtggcaccagatgcaacctcactatggtatgctggccagcaccctctcctgggggtggcaggcacacagcagccccccagcactaaggccgtgtctctgaggacgtcatcggaggctgggcccctgggatgggaccagggatgggggatgggccagggtttacccagtgggacagaggagcaaggtttaaatttgttattgtgtattatgttgttcaaatgcattttgggggtttttaatctttgtgacaggaaagccctcccccttccccttctgtgtcacagttcttggtgactgtcccaccgggagcctccccctcagatgatctctccacggtagcacttgaccttttcgacgcttaacctttccgctgtcgccccaggccctccctgactccctgtgggggtggccatccctgggcccctccacgcctcctggccagacgctgccgctgccgctgcaccacggcgtttttttacaacattcaactttagtatttttactattataatataatatggaaccttccctccaaattct

SEQ ID NO: 25862 - protein, 156 aa, Artificial Sequence
  derived and/or modified sequence
MPALLPVASRLLLLPRVLLTMASGSPPTQPSPASDSGSGYVPGSVSAAFVTCPNEKVAKEIARAVVEKRLAACVNLIPQITSIYEWKGKIEEDSEVLMMIKTQSSLVPALTDFVRSVHPYEVAEVIALPVEQGNFPYLQWVRQVTESVSDSITVLP

SEQ ID NO: 25863 - protein, 198 aa, Artificial Sequence
  derived and/or modified sequence
MIGSGLAGSGGAGGPSSTVTWCALFSNHVAATQASLLLSFVWMPALLPVASRLLLLPRVLLTMASGSPPTQPSPASDSGSGYVPGSVSAAFVTCPNEKVAKEIARAVVEKRLAACVNLIPQITSIYEWKGKIEEDSEVLMMIKTQSSLVPALTDFVRSVHPYEVAEVIALPVEQGNFPYLQWVRQVTESVSDSITVLP

SEQ ID NO: 25864 - DNA, 597 bp, Artificial Sequence
  derived and/or modified sequence
atgatcggcagcggcctggccggcagcggcggcgccggcggccccagcagcaccgtgacctggtgcgccctgttcagcaaccacgtggccgccacccaggccagcctgctgctgagcttcgtgtggatgcccgccctgctgcccgtggccagcagactgctgctgctgcccagagtgctgctgaccatggccagcggcagcccccccacccagcccagccccgccagcgacagcggcagcggctacgtgcccggcagcgtgagcgccgccttcgtgacctgccccaacgagaaggtggccaaggagatcgccagagccgtggtggagaagagactggccgcctgcgtgaacctgatcccccagatcaccagcatctacgagtggaagggcaagatcgaggaggacagcgaggtgctgatgatgatcaagacccagagcagcctggtgcccgccctgaccgacttcgtgagaagcgtgcacccctacgaggtggccgaggtgatcgccctgcccgtggagcagggcaacttcccctacctgcagtgggtgagacaggtgaccgagagcgtgagcgacagcatcaccgtgctgccctag

SEQ ID NO: 25865 - DNA, 762 bp, Artificial Sequence
  derived and/or modified sequence
cttcctggggttgtttctccgtgtgacgtgtggcctttgagatcaactctcctgtaccagcgtaggccgcatgagtggggggcgggctcccgcggtcctgctcggcggagtggggcattcttcgggggtgcatcagagggagggcagagcctgaggatctaagcgaaggcttccccgggtgtaatttcctgggctgtttgtgaggagagatcgaattcgcctcctgctctcaggcctctctgctcctgtcttttgtttggatgccggcgctgctgcctgtggcctcccgccttttgttgctaccccgagtcttgctgaccatggcctctggaagccctccgacccagccctcgccggcctcggattccggctctggctacgttccgggctcggtctctgcagcctttgttacttgccccaacgagaaggtcgccaaggagatcgccagggccgtggtggagaagcgcctagcagcctgcgtcaacctcatccctcagattacatccatctatgagtggaaagggaagatcgaggaagacagtgaggtgctgatgatgattaaaacccaaagttccttggtcccagctttgacagattttgttcgttctgtgcacccttacgaagtggccgaggtaattgcattgcctgtggaacaggggaactttccgtacctgcagtgggtgcgccaggtcacagagtcagtttctgactctatcacagtcctgccatgatgagccctgttcctgctcatcatgaagatcc

SEQ ID NO: 25866 - DNA, 937 bp, Artificial Sequence
  derived and/or modified sequence
cagccagcaagtggcagtttcgggttcacacggaaacgggcgtgccatttccgcgcacgtctgcagatgcggtagtcgattggtcaagtctcccatggctcctccttcatcaggaggtgggcaaaccgcgccatgatagggtcgggattggctggctctggaggcgcaggtggtccttcttctactgtcacatggtgcgcgctgttttctaatcacgtggctgccacccaggcctctctgctcctgtcttttgtttggatgccggcgctgctgcctgtggcctcccgccttttgttgctaccccgagtcttgctgaccatggcctctggaagccctccgacccagccctcgccggcctcggattccggctctggctacgttccgggctcggtctctgcagcctttgttacttgccccaacgagaaggtcgccaaggagatcgccagggccgtggtggagaagcgcctagcagcctgcgtcaacctcatccctcagattacatccatctatgagtggaaagggaagatcgaggaagacagtgaggtgctgatgatgattaaaacccaaagttccttggtcccagctttgacagattttgttcgttctgtgcacccttacgaagtggccgaggtaattgcattgcctgtggaacaggggaactttccgtacctgcagtgggtgcgccaggtcacagagtcagtttctgactctatcacagtcctgccatgatgagccctgttcctgctcatcatgaagatccccgcgatacttcaacgccttctgacttccaggtgatgactgggcccccaataaatcccgtctttgggtctctctgccttttgcctgttttttgtcatgtatgcaaatttgttgggagaatataagtgcttctagtccctgtattctctacatctttcagaatgactcagagctgcta

SEQ ID NO: 25867 - DNA, 1199 bp, Artificial Sequence
  derived and/or modified sequence
acggaaacgggcgtgccatttccgcgcacgtctgcagatgcggtagtcgattggtcaagtctcccatggctcctccttcatcaggaggtgggcaaaccgcgccatgatagggtcgggattggctggctctggaggcgcaggtggtccttcttctactgtcacatggtgcgcgctgttttctaatcacgtggctgccacccaggtaagaagaggccgctcttcctggggttgtttctccgtgtgacgtgtggcctttgagatcaactctcctgtaccagcgtaggccgcatgagtggggggcgggctcccgcggtcctgctcggcggagtggtgagtgaccggccccgccccgccccttccggtcctcgaagcctcgaccgctacccgcaccctaaatcccagaggttggccccctgaggtgtgagtgaaatgagcttttgctttattttccaagtttctctctcaccttcaggggcattcttcgggggtgcatcagagggagggcagagcctgaggatctaagcgaaggcttccccgggtgtaatttcctgggctgtttgtgaggagagatcgaattcgcctcctgctctcaggcctctctgctcctgtcttttgtttggatgccggcgctgctgcctgtggcctcccgccttttgttgctaccccgagtcttgctgaccatggcctctggaagccctccgacccagccctcgccggcctcggattccggctctggctacgttccgggctcggtctctgcagcctttgttacttgccccaacgagaaggtcgccaaggagatcgccagggccgtggtggagaagcgcctagcagcctgcgtcaacctcatccctcagattacatccatctatgagtggaaagggaagatcgaggaagacagtgaggtgctgatgatgattaaaacccaaagttccttggtcccagctttgacagattttgttcgttctgtgcacccttacgaagtggccgaggtaattgcattgcctgtggaacaggggaactttccgtacctgcagtgggtgcgccaggtcacagagtcagtttctgactctatcacagtcctgccatgatgagccctgttcctgctcatcatgaagatccccgcgatacttcaacgccttctgacttccaggtgatgactgggcccccaataaatcccgtctttgggtctctctgcc

SEQ ID NO: 25868 - DNA, 597 bp, Artificial Sequence
  derived and/or modified sequence
atgattggatctggtctagcaggatctggaggcgccggtgggccttcctccacagtaacctggtgtgctttattctcaaatcacgttgctgccacccaagcttcgttgctccttagtttcgtctggatgcccgctctgctacccgtagcttctagattgctgctgctgcctagagtgctactgactatggccagcggcagcccacccacacagcccagccccgcctccgacagcggctctggctatgtgccggggtctgtgtctgccgcatttgttacatgtcccaatgaaaaggtggctaaagaaatcgcgcgggccgtggtcgaaaaaagattggctgcttgcgtgaacctgattcctcagattacctcaatctacgagtggaagggaaagatcgaagaggatagtgaggtattaatgatgattaagacccagtcgtcactggtgccagcattgaccgacttcgtacgatccgtgcatccctatgaggtcgctgaggtaatagccctgcccgtagaacaggggaactttccctaccttcagtgggtccgccaagttactgagtctgtgagcgactccataactgtcctcccttag

SEQ ID NO: 25869 - DNA, 597 bp, Artificial Sequence
  derived and/or modified sequence
atgattggcagcggcctggccggcagcggcggggccggcggccccagcagcacagtgacctggtgtgccctcttcagcaaccacgtggccgccacccaggccagcctgctgctgagctttgtgtggatgcctgccctgctgcctgtggccagccggctgctgctgctgccccgggtgctgctgaccatggccagcggcagcccccccacccagcccagccctgccagtgacagcggcagcggctacgtgcccggctctgtgtctgctgcctttgtgacctgccccaatgagaaggtggccaaggagatcgcccgggctgtggtggagaagaggctggccgcctgtgtgaacctgatcccccagatcaccagcatctatgagtggaagggcaagattgaggaggacagcgaggtgctgatgatgatcaagacccagagcagcctggtgcctgccctgacagactttgtgcgctctgtgcacccctatgaggtggccgaggtgattgccctgcctgtggagcagggcaacttcccctacctgcagtgggtgcggcaggtgacagaatctgtgtctgacagcatcaccgtgctgccctag

SEQ ID NO: 25870 - DNA, 597 bp, Artificial Sequence
  derived and/or modified sequence
atgatcggcagcggcctggccggcagcggcggcgccggcggcccctcctccacggtgacatggtgcgctctgttttccaatcacgtcgccgccacacaggccagcttgctcctgagttttgtgtggatgcccgccttgctccccgttgctagtcggctgctgctccttccgagggtgcttctaaccatggcgagcggctcaccccctacccaacctagccccgcgagcgactcaggaagcggctatgttcccggatccgtttctgcggccttcgttacctgtcctaatgagaaagtcgctaaggagatcgcacgtgcggtcgtggaaaaacgactggccgcatgtgtgaatttaattccacagatcactagcatatacgaatggaaagggaaaatcgaagaggactcagaggtgctcatgatgataaagacacagtccagtttagtcccagcactgactgactttgtccgttccgttcacccatatgaagttgcagaagtgattgcactcccagtggaacagggtaactttccctacctacagtgggtgcgacaggtgacagagtcagtgagcgatagcatcacagtcctgccatag

SEQ ID NO: 25871 - DNA, 597 bp, Artificial Sequence
  derived and/or modified sequence
atgattggcagcggcttggcaggctcagggggagccggtgggcctagctctaccgtgacatggtgtgctctgttctccaaccacgtcgccgcaactcaggctagcctcctcttaagctttgtttggatgccagccctcctcccagtggcatccagactattgctccttcctagagttctgttgactatggcatcaggttcccctccaacgcagcctagccctgctagcgactcaggcagcggctacgtgcccggatccgtgtcagcggcttttgtgacttgccctaatgagaaggtcgcaaaagagattgccagagcagtggtagaaaagaggttagccgcatgtgtgaatctgataccacagatcacctctatttatgagtggaaggggaaaatcgaagaggattccgaggtcttgatgatgattaaaacccagagttcattggttcccgcactaacagactttgttaggtccgtgcatccgtacgaagttgcagaggtcattgcacttcctgtggagcagggaaacttcccatatttgcaatgggtgagacaggtgaccgaaagtgtgagtgattccatcaccgtccttccctag

SEQ ID NO: 25872 - protein, 388 aa, Artificial Sequence
  derived and/or modified sequence
MLNGTTLEAAMLFHGISGGHIQGIMEEMERRSKTEARLAKGAQLNGRDAGMPPLSPEKPALCAGCGGKISDRYYLLAVDKQWHLRCLKCCECKLALESELTCFAKDGSIYCKEDYYRRFSVQRCARCHLGISASEMVMRARDSVYHLSCFTCSTCNKTLTTGDHFGMKDSLVYCRAHFETLLQGEYPPQLSYTELAAKSGGLALPYFNGTGTVQKGRPRKRKSPALGVDIVNYNSGCNENEADHLDRDQQPYPPSQKTKRMRTSFKHHQLRTMKSYFAINHNPDAKDLKQLAQKTGLTKRVLQVWFQNARAKFRRNLLRQENGGVDKADGTSLPAPPSADSGALTPPGTATTLTDLTNPTITVVTSVTSNMDSHESGSPSQTTLTNLF

SEQ ID NO: 25873 - DNA, 1164 bp, Artificial Sequence
  derived and/or modified sequence
atgctgaacggtaccactctagaggcagccatgctctttcacgggatctccggaggccacatccaaggcatcatggaggagatggagcgcagatccaagactgaggcccgtctggccaaaggcgcccagctcaacggccgcgacgcgggcatgcccccgctcagcccggagaagcccgccctgtgcgccggctgcgggggcaagatctcggacaggtactatctgctggctgtggacaaacagtggcatctgagatgcctgaagtgctgtgaatgtaagctggccctcgagtccgagctcacctgctttgccaaggacggtagcatttactgcaaggaggattactacagaaggttctctgtgcagagatgtgcccgctgccaccttggcatttccgcctcggagatggtcatgcgcgcccgagactctgtctaccacctgagctgcttcacctgctccacttgcaacaagactctgaccacgggcgaccatttcggcatgaaggacagcctggtgtactgccgcgcccacttcgagaccctcttgcaaggagagtatccaccgcagctgagctacacggagctggcggccaagagcggcggcctggccctgccttacttcaacggtacgggcaccgtgcagaaagggcggccccggaagcggaagagcccagcgctgggagtggacatcgtcaattacaactcaggttgtaatgagaatgaggcagaccacttggaccgggaccagcagccttatccaccctcgcagaagaccaagcgcatgcgaacctctttcaagcatcaccagctccggaccatgaaatcctactttgccatcaaccacaacccggatgccaaggacctcaagcagcttgcccagaaaacaggtctgaccaaaagagttttgcaggtttggttccaaaacgcacgagccaaattcagaaggaaccttttgcggcaggagaatgggggtgttgataaagctgacggcacgtcgcttccggccccgccctcagcagacagcggagctctcactccacccggcactgcgaccactttaacagacctgaccaatcccactatcactgtagtgacatccgtgacctctaacatggacagccacgaatccggaagcccctcacaaactaccttaacaaaccttttc

SEQ ID NO: 25874 - DNA, 1167 bp, Artificial Sequence
  derived and/or modified sequence
atgctgaatggaactacccttgaggccgcaatgctgtttcacgggatcagtggaggccacatccagggcattatggaagagatggaacgacgatccaaaacggaggccaggcttgccaagggggcccagttgaacgggcgtgacgccggtatgcctcccctaagtcccgagaaaccagccctttgtgcagggtgtgggggcaaaatttcagacagatattacctgctggctgtagacaaacaatggcatctgaggtgcctgaagtgctgtgagtgcaagctcgccctggaatccgaactgacctgcttcgcaaaggacggaagtatctactgtaaggaagattattatcgtcggttcagtgttcaacggtgtgcccggtgtcacctgggtatatcagcctctgagatggttatgcgggcacgtgattccgtttatcatctgagctgcttcacgtgttccacttgtaataagaccctaacaacgggggaccacttcggtatgaaggactccctggtctactgccgtgcccattttgagacactcctgcagggagaataccctccacagctatcctataccgaactggcagctaagtcgggcggactggccctgccttacttcaatgggaccggcaccgtgcagaaaggacgacccaggaagcgcaaatccccggcactgggtgtagacatcgtgaactacaattcaggatgtaatgagaacgaggccgatcatctagatagagaccagcaaccttatccgccctcccagaaaaccaaacgaatgaggacttcgttcaaacatcatcagcttaggacgatgaagtcttactttgctattaatcataatccagatgcaaaagatctcaagcagcttgcccaaaagactggcctaaccaagagagtgctacaggtgtggtttcagaacgctcgggctaagtttcgaaggaacctgttaagacaggaaaatggaggcgtggataaagccgacggtactagtctgccagctccaccatctgcagactccggcgccttgacacctcccgggaccgcgacaaccctgaccgacctcactaacccgacaattaccgtcgtaacttccgtgactagtaacatggattctcacgaatctgggtctcccagccagaccactctgaccaatctgttttag

SEQ ID NO: 25875 - DNA, 1167 bp, Artificial Sequence
  derived and/or modified sequence
atgctgaatggcaccaccctggaggccgccatgctgttccacggcatcagcggcggccacatccagggcatcatggaggagatggagcggcgcagcaagacagaggcccggctggccaagggggcccagctgaatggaagagatgctggcatgccacccctgagccctgagaagccagccctgtgtgccggctgcggcggcaagatcagtgaccgctactacctgctggccgtggacaagcagtggcacctgcgctgcctgaagtgctgtgagtgcaagctggccctggagagcgagctgacctgctttgccaaggatggcagcatctactgcaaggaggactactaccgccgcttctctgtgcagagatgtgcccgctgccacctgggcatcagcgccagcgagatggtgatgagggcccgggacagcgtgtaccacctgagctgcttcacctgcagcacctgcaacaagaccctgaccactggagaccacttcggcatgaaggacagcctggtgtactgccgggcccactttgagaccctgctgcagggcgagtacccaccccagctgagctacacagagctggccgccaagagcggcggcctggccctgccctacttcaacggcaccggcaccgtgcagaagggccggcccaggaagaggaagagccctgccctgggcgtggacatcgtgaactacaacagcggctgcaatgaaaatgaggccgaccacctggaccgggaccagcagccctacccacccagccagaagaccaagaggatgaggaccagcttcaagcaccaccagctgcggaccatgaagagctactttgccatcaaccacaacccagatgccaaggacctgaagcagctggcccagaagacaggcctgaccaagagggtgctgcaggtgtggttccagaatgcccgggccaagttcagaagaaacctgctgcggcaggagaatggaggagtggacaaggcagatggcaccagcctgcctgccccacccagcgctgacagcggggccctgaccccacctggaacagccaccaccctgacagacctgaccaaccccaccatcaccgtggtgacctctgtgaccagcaacatggacagccatgagagcggcagccccagccagaccaccctgaccaacctcttctag

SEQ ID NO: 25876 - DNA, 7413 bp, Artificial Sequence
  derived and/or modified sequence
gcgtgatccactccttttcctctaagaatgctgaacggtaccactctagaggcagccatgctctttcacgggatctccggaggccacatccaaggcatcatggaggagatggagcgcagatccaagactgaggcccgtctggccaaaggcgcccagctcaacggccgcgacgcgggcatgcccccgctcagcccggagaagcccgccctgtgcgccggctgcgggggcaagatctcggacaggtactatctgctggctgtggacaaacagtggcatctgagatgcctgaagtgctgtgaatgtaagctggccctcgagtccgagctcacctgctttgccaaggacggtagcatttactgcaaggaggattactacagaaggttctctgtgcagagatgtgcccgctgccaccttggcatttccgcctcggagatggtcatgcgcgcccgagactctgtctaccacctgagctgcttcacctgctccacttgcaacaagactctgaccacgggcgaccatttcggcatgaaggacagcctggtgtactgccgcgcccacttcgagaccctcttgcaaggagagtatccaccgcagctgagctacacggagctggcggccaagagcggcggcctggccctgccttacttcaacggtacgggcaccgtgcagaaagggcggccccggaagcggaagagcccagcgctgggagtggacatcgtcaattacaactcaggttgtaatgagaatgaggcagaccacttggaccgggaccagcagccttatccaccctcgcagaagaccaagcgcatgcgaacctctttcaagcatcaccagctccggaccatgaaatcctactttgccatcaaccacaacccggatgccaaggacctcaagcagcttgcccagaaaacaggtctgaccaaaagagttttgcaggtttggttccaaaacgcacgagccaaattcagaaggaaccttttgcggcaggagaatgggggtgttgataaagctgacggcacgtcgcttccggccccgccctcagcagacagcggagctctcactccacccggcactgcgaccactttaacagacctgaccaatcccactatcactgtagtgacatccgtgacctctaacatggacagccacgaatccggaagcccctcacaaactaccttaacaaaccttttctaacattggttttttttttttagtttttaaattcttcctcttctttttattattattctaattattattattttattatttacaagactttttttttcttctaacccacaagatatttggggaataaaaataacagcttggtgtgtagcatctgcagccacttggcaaatgagtttacagtattgtctcctttaagtgaatatattttgtctacaaagtgtatttggatttaaaaaaattaattaggtctttcagttggtaaggagagtttttgaataattctaataagtgcctcttaaaattgtatgttacttatttccagaatctcgaagaaaaaagaaaaaagagtggtattattatgggcaaataatcatattcccacttaaatgattaggttaataaagaaccagataattaattagttactttttaaatcttgcaattgtatgtgtgattatggagttttgaaaacgttacattttttaaatcttaaaactgaaaacttgtttttagtatttctatttcttacctgaactgttaattcaagtgaggaatatgatgaaataaaagcattaactacagacattttaaatagtaatgattaattaggtgagaaatctattacaggaatgtgacttttccttctcttaggggtgtacaactctaaaaactttttacttggttatttgtttttcaacatttgaaaaatacttaagctccctatgtatccatgaaaattccgcattgattttgacattccatacttttaacctcctaaagctaaaaacaatagctcggaaaccattctttctagttactttttttcccagggaaaatggaaataagcaaaatataatgttttaagaagtaaaaaaatcaatataatttaattaatagctctattaattggcttcagctgtaccatgatattgtatctggcattctatatgaataatgtttaaaatacccagcctggtagacttataccaacaattggttttgttttgttttattttattttgacataggttgacttatgtattgaaaataatttttctgatattagagatttgaagttattagtcttaaagtagataaactcagaagccttgtggatgctgatctgaatatatttcctagtttacagtagcatttttttcttttaatttaagctaaaatcttaatggtctgggcagtggtgaatgttcatctattacgcttctgttgtagttaaataccaattagattgtggatttcctaaaaaaataaaaaagaagtcaagatatatgtcttgctttagtggattgttaagaataactttgcacatattttccactttttggaccccttaaatctcctttggtggtcgaagtggctatttaatagattttaaaggtgtccttctggctgtataaatgtgtggttacatattgacagttcactgcccacattaaagtgcattattgtaacttttgctcagggtctttagaaaattagcacagaaagtagcttattttttaaaaaaagatgatggaagataagttaacactgtaacagaagaaaggtgtgattgccattatatatttagcaagtatggttatcatcttatatggagcttaaatcttgacttttcatacttctattacattttgggcatttaccactaaccagaccaaacaaccttggtaaggctgagatcttattaatacacttttacaggtaaaatattgacacttataaattttgttctttgacagaacaatatatggtactatatagatctactttattaagtagactaattataactcagttctcctatgtgccttatgatataacttggaagtaagtttgtgaaaaatcaggatatatgtgttgtttgttaaattaactgttttaagcccttttaacacctcactagttttgtactgttttacctcttatttctgaaactctttttatggtgtatcctgttagaggggacaaacatgtcatagaaagcagttgtgcactctttcaaatatagttgataaattcaataatcttatatattgagcttcgtgtttatagtacagtaagtggtctagcaaaattgtccatgtttctttgtttattgataaatgcattgtatagaaactatttcccctaaatatttatggaccaaacaattgtgatatatcctattaaatttgtgtgaataaaacattttgaatctaaggagttttctttcccatcagttttatttaagttttaaccgtactagtgtgttccagcatctatatgtaaaagcttttcaaatggtaatacaacattgttagaaatatttaaacatacaaatagtttttagacttccaaacttctgattcatatgaaatgttacacattgttgcacaggcagtgtaattcaacctagaaatacctttgaatatatttgcttataacaaaagtaatgccccactgatttgactcagtccaatttttagaataaaaaggctaattagcatataaagtaattgcatggaacgaaaccttaaatatgattaagatttcatgttaggtctattgagcacaaatggatatttgtaaatctaaatagaaattgcagacccctaaaagccaagttgctctgtagttaataaattgtcactatgatttttttcagggagaacaaatcttggggcattacagccaaacatcccgacgtttgaaaattccctaaagtattaaaagaaggggaaaagtttgatcggaaatccactgcagtgaagacaaagacactattaggttatgataatcatacattaaaaaatttattaagccaaaaaaaaagagagagagagagacttaaatgtcatttactgaatgttaacgaaacttgtgttctttatggtgtctaacacaactgaaggcctaaaattatgtggtttaaacaaaattagataaaccatgtacaaaaccagagcaacctggcagtaatatgcccaccccatatttgaaaaaaattattattgaaaaaaatttcacacatttgtcaagcacagttgtaaaataaagtccaaaacattcatttcacctgcttgctaatgtgtattagtcctgttaatggcattttccaactgtaaattcaaagaaaagctatcacccatttaagagtatagggatcaaaccccagtaattttagcattattgtttatcacttcctttttaaacagaaatctctgcatgcacttttacatatgtcacctctagtgtacacctctgtatgatgacttatctttgctgtttcttgtatgataaatagctttcattaataaacatttatttgatgcaaacatagttaactttatgttaaacacatgctgttgaaattaattttgaacacttaaagaggcagcacagtacatttacaacttgttatactaatgaaaaaatacaaacagcatagtgagattaaattctggtaatctaggataaaattacttacttggtttttaccttttcatgacttattttcatttgttgtattcaattgccacatgtattaaaaataaaaaacaaagtgaacccaaattacaacaaaataaaccttagaataaactattgtgtaaaatttcagcaacttttttagattactagggtaaaatttatagatcctatgtgagtttacatgtttgctatgcaatgaacaaatttattgatgtatacaaatatattctgaactataaaaagatccaatctttgcatagttcaattacatatgattattacaaacaaaaaagcaaatggaaagacagacaaatatttaggaatgaggttttttttaattgttaaagggaatatttgaagaataaaattttagctattcctatttagccgtatatccaaagcatatgttaaacaaactaacatatactttccagaaaatttttcattatgatgaaatttttattatatacaaatgaaccctatgtaaatgatgtaacttttatgaatgacagacattaaatatttcacttacatgtattctcagaattttgaatgttttcttaaatgctttcacttcctgaataataaaaagaaaaaattttaaagaagagagagcaacttactaataaaaaaaagcaatgcaccatgacaagtagactattttgagtgatcacaaatcatgctggttttgtcagtaacttgaatgtttatgcctcattgaaacctcatccacagctatagcaacttaaatagattttccaatgcatttccagccagtttattcaaatctttgccctacagtcttgccttctttccctgttctgtcacctgtggcaatttcatttagaagtattttggaacttcgcctggttttacagacctttaaatatttgtctggtatgtgaaatgcaggaagagaccagagagggaaagaacataactgaaattagacatctgaaaaaaaaatacaaatttgaaacaggcacattttttaaaaccaaaaaaaaaaaaaaaaagagagagagagagaaaggagtactaattatgtgagtgggaagaggaagcgtgtgatgcagagctggaaggtctgttgtgctttactgtgatgtaaagcagtctttgagtctgggcaactgcacatttactgtttggtgtggaatagaaaaatgtggacctcttagttgagagcaggacactaaattttcatagcttctacctcccagttgcctgggttagtctaacttctggcagattgatcttgggcaaaaagcttcactgagagttagtgtctgtgtgctttggttgaatagccaccttaatactgacttacatagtgggtaggtttttgatacctcaaataaggataaaactccataataaaggacccaaagcaaatacttttaaaacttaggtgatttttcatcacctaaaacataaatagctttatttagcaaaatcccagtggaatctaccacacattcttttataataacccttttttgggagtcaaagtattgtttttttattagccacatataaatatcatctcattttctgttgcagtgtgactgcaaggcatgttgtggtggaaatcattagaactgggaagctctggaatggaaatttggaatcgtgtcattctaggctcttaaagagaatattagggataatactgttgtaaaaaataaatataaacacctaattttgtatgaagttttgctatttaaattttaactatgttataaacaaagctagctttacttgtagagagttcgtgtactcttgagctcattcaatagcttttacattttgtagtctcttccacaacagggcaaaataagcacagtaggacttagtccaaattgacgaaatatcattgaattttctttgaaagcatatatatagataaactctggattggtcttttagatctgttttctgtttttagtaattgggaacaaactcttgatattaaaataaataaaatgcctctaatgtaaagccacagccctgcttctagccaatgtcaaaaataggaagtttttttaatggtttactgttgattttaaacattttaataatagtgctctgccctcacaacagtttttttttcagaataatattatgatttaccttattttaaaaataaattataattctaacttaaaatattattttaaatgcccctctgggaagatttccgttttattttatgaggttccctggcagttgggggggtggtgaggttgggagagggaaagtttagaactgtgcatgatactcaaggaaaagtctatgaatatgatgtaagtagtaacattattgccacaactaaatttctgtttaactgtgttgcagaatatgataatgtcatctaacatcactccctacttgcaacattcctctgtgaatattaatatagttaaccctcccttattatgtatcatatcaataagtttctcttcccttggattaatttttgcttctttgcattacattttatcttgtgctaagataacaaaaagcaagcaagaataaagatccagatattagccatatgtagaaagttcctggtgtgcatttctgtgtacttttccctcacatattagaattgtcaggaaagtttttttcttttggaactttctgtttacattttgcatgatcttataaattaacctgaagagtaattggataccttttatggttatttgaaaataaaatttgctacaaataaga

SEQ ID NO: 25877 - DNA, 1167 bp, Artificial Sequence
  derived and/or modified sequence
atgctgaacggcaccaccctggaggccgccatgctgttccacggcataagcggcggacacatacaggggattatggaggaaatggaaaggcggagcaaaactgaggcgcgcttagccaagggagcccaattgaacgggcgtgatgctggcatgccaccactgtcccccgagaaaccagctctctgtgcaggctgcggaggcaaaatatccgatcgttactacttgctagccgtcgataagcagtggcacttgagatgcttgaagtgttgcgagtgtaagctcgctttggaatccgagctgacgtgcttcgctaaagacggctccatttattgtaaggaggattattatcgccggttctccgtccaacggtgcgcgcgttgccatcttggtatcagcgccagcgagatggtgatgcgcgctcgggattctgtgtatcacctgtcctgctttacgtgctcaacttgtaataagacactcacaaccggagaccacttcggtatgaaggacagcctggtctattgccgggctcattttgaaacgctgttgcagggggaatatcctccacaacttagttacactgagcttgcggcaaaatcagggggcttagccctgccctactttaatggcacaggtacagtacagaagggaagaccgcgcaagaggaagagcccagcgctcggggttgatatcgtaaactacaactctgggtgtaacgagaacgaggccgaccatctagaccgcgaccagcagccctaccctccctcccaaaagacgaagaggatgcgcacctcattcaagcaccatcagctacgtactatgaagtcatacttcgccattaaccataatccagacgcgaaggatttgaagcagctcgctcagaaaaccggtctcaccaaacgggtgctgcaggtgtggtttcagaacgcacgagccaaattcaggcgtaacctcctcaggcaggagaacggcggcgtcgacaaggcggatggtacctctctccctgctccgccttccgctgacagcggcgcactgacgcctccgggcactgcaaccactttaacagacttgactaatccaacgatcacagtggtgaccagtgtcacttcaaatatggacagtcatgagtcagggagcccttcacagacgaccctaaccaatctgttttag

SEQ ID NO: 25878 - DNA, 1167 bp, Artificial Sequence
  derived and/or modified sequence
atgctgaatggaactacactggaagccgctatgctttttcatgggatctccggtgggcatatacaggggatcatggaggagatggagcgccgaagtaagacggaagctaggctggccaaaggagctcagctgaacgggagagatgcaggaatgccaccactgagcccggagaaaccagccctgtgtgctgggtgtggtggaaaaatttcagataggtattacctcctcgcagttgacaagcagtggcacctgagatgcctgaagtgttgcgagtgcaagctggccctggagtcagagctgacctgctttgccaaagatgggagtatttactgcaaggaagactattatagacgtttttccgtgcagaggtgtgcacggtgtcacctaggaatttccgcaagcgaaatggtgatgcgggctagggactcagtttatcatctctcatgcttcacttgttcaacatgcaataaaactttgacaactggggatcacttcggaatgaaggacagcctggtgtactgccgagctcatttcgaaactctgctgcagggggagtaccctcctcagctctcatataccgaactggcggcaaagtctggcggactcgcattgccctattttaacgggacaggaaccgtgcaaaagggaaggccgaggaagaggaagagcccagcactgggcgtcgacattgtcaattacaactcaggatgtaacgagaatgaagctgaccacctggatcgtgatcaacaaccttatcctccctcgcagaagactaaaaggatgagaaccagcttcaaacatcaccagctgaggacgatgaaaagctacttcgccattaaccacaatccagacgctaaagatttgaaacagcttgctcagaagactggcctgaccaagagagtgcttcaggtgtggttccaaaacgctcgagcaaaattcaggcgcaatctgttaaggcaggagaacgggggtgtggataaagccgacggtaccagcttgccagccccaccaagcgccgattcaggcgctctgactcctcctggtacagccacaaccctaaccgatctcactaatccaaccatcacggtcgttacatccgtcacaagtaatatggactcccacgaatcgggcagtcctagccagaccactcttacgaatttgttttag

SEQ ID NO: 25879 - DNA, 1167 bp, Artificial Sequence
  derived and/or modified sequence
atgctgaacggcaccaccctggaggccgccatgctgttccacggcatcagcggcggccacatccagggcatcatggaggagatggagagaagaagcaagaccgaggccagactggccaagggcgcccagctgaacggcagagacgccggcatgccccccctgagccccgagaagcccgccctgtgcgccggctgcggcggcaagatcagcgacagatactacctgctggccgtggacaagcagtggcacctgagatgcctgaagtgctgcgagtgcaagctggccctggagagcgagctgacctgcttcgccaaggacggcagcatctactgcaaggaggactactacagaagattcagcgtgcagagatgcgccagatgccacctgggcatcagcgccagcgagatggtgatgagagccagagacagcgtgtaccacctgagctgcttcacctgcagcacctgcaacaagaccctgaccaccggcgaccacttcggcatgaaggacagcctggtgtactgcagagcccacttcgagaccctgctgcagggcgagtaccccccccagctgagctacaccgagctggccgccaagagcggcggcctggccctgccctacttcaacggcaccggcaccgtgcagaagggcagacccagaaagagaaagagccccgccctgggcgtggacatcgtgaactacaacagcggctgcaacgagaacgaggccgaccacctggacagagaccagcagccctacccccccagccagaagaccaagagaatgagaaccagcttcaagcaccaccagctgagaaccatgaagagctacttcgccatcaaccacaaccccgacgccaaggacctgaagcagctggcccagaagaccggcctgaccaagagagtgctgcaggtgtggttccagaacgccagagccaagttcagaagaaacctgctgagacaggagaacggcggcgtggacaaggccgacggcaccagcctgcccgccccccccagcgccgacagcggcgccctgaccccccccggcaccgccaccaccctgaccgacctgaccaaccccaccatcaccgtggtgaccagcgtgaccagcaacatggacagccacgagagcggcagccccagccagaccaccctgaccaacctgttctag

SEQ ID NO: 25880 - protein, 359 aa, Artificial Sequence
  derived and/or modified sequence
  misc_feature (1)..(1): Xaa can be any naturally occurring amino acid
XATAMTSAWLAQGTGEGVNDVRKGACASHVSTMASFLKGAHVTINARAEEDVEPECIMEKVAKASGANYSFHKESGRFQDVGPQAPVGSVYQKTNAVSEIKRVGKDSFWAKAEKEEENRRLEEKRRAEEAQRQLEQERRERELREAARREQRYQEQGGEASPQRTWEQQQEVVSRNRNEQESAVHPREIFKQKERAMSTTSISSPQPGKLRSPFLQKQLTQPETHFGREPAAAISRPRADLPAEEPAPSTPPCLVQAEEEAVYEEPPEQETFYEQPPLVQQQGAGSEHIDHHIQGQGLSGQGLCARALYDYQAADDTEISFDPENLITGIEVIDEGWWRGYGPDGHFGMFPANYVELIE

SEQ ID NO: 25881 - protein, 327 aa, Artificial Sequence
  derived and/or modified sequence
MASFLKGAHVTINARAEEDVEPECIMEKVAKASGANYSFHKESGRFQDVGPQAPVGSVYQKTNAVSEIKRVGKDSFWAKAEKEEENRRLEEKRRAEEAQRQLEQERRERELREAARREQRYQEQGGEASPQRTWEQQQEVVSRNRNEQESAVHPREIFKQKERAMSTTSISSPQPGKLRSPFLQKQLTQPETHFGREPAAAISRPRADLPAEEPAPSTPPCLVQAEEEAVYEEPPEQETFYEQPPLVQQQGAGSEHIDHHIQGQGLSGQGLCARALYDYQAADDTEISFDPENLITGIEVIDEGWWRGYGPDGHFGMFPANYVELIE

SEQ ID NO: 25882 - protein, 430 aa, Artificial Sequence
  derived and/or modified sequence
MAANLSRNGPALQEAYVRVVTEKSPTDWALFTYEGNSNDIRVAGTGEGGLEEMVEELNSGKVMYAFCRVKDPNSGLPKFVLINWTGEGVNDVRKGACASHVSTMASFLKGAHVTINARAEEDVEPECIMEKVAKASGANYSFHKESGRFQDVGPQAPVGSVYQKTNAVSEIKRVGKDSFWAKAEKEEENRRLEEKRRAEEAQRQLEQERRERELREAARREQRYQEQGGEASPQRTWEQQQEVVSRNRNEQESAVHPREIFKQKERAMSTTSISSPQPGKLRSPFLQKQLTQPETHFGREPAAAISRPRADLPAEEPAPSTPPCLVQAEEEAVYEEPPEQETFYEQPPLVQQQGAGSEHIDHHIQGQGLSGQGLCARALYDYQAADDTEISFDPENLITGIEVIDEGWWRGYGPDGHFGMFPANYVELIE

SEQ ID NO: 25883 - protein, 360 aa, Artificial Sequence
  derived and/or modified sequence
MKATAMTSAWLAQGTGEGVNDVRKGACASHVSTMASFLKGAHVTINARAEEDVEPECIMEKVAKASGANYSFHKESGRFQDVGPQAPVGSVYQKTNAVSEIKRVGKDSFWAKAEKEEENRRLEEKRRAEEAQRQLEQERRERELREAARREQRYQEQGGEASPQRTWEQQQEVVSRNRNEQESAVHPREIFKQKERAMSTTSISSPQPGKLRSPFLQKQLTQPETHFGREPAAAISRPRADLPAEEPAPSTPPCLVQAEEEAVYEEPPEQETFYEQPPLVQQQGAGSEHIDHHIQGQGLSGQGLCARALYDYQAADDTEISFDPENLITGIEVIDEGWWRGYGPDGHFGMFPANYVELIE

SEQ ID NO: 25884 - DNA, 1080 bp, Artificial Sequence
  derived and/or modified sequence
tgagccaccgccatgaccagcgcctggctggcccagggcaccggcgagggcgtgaacgacgtgagaaagggcgcctgcgccagccacgtgagcaccatggccagcttcctgaagggcgcccacgtgaccatcaacgccagagccgaggaggacgtggagcccgagtgcatcatggagaaggtggccaaggccagcggcgccaactacagcttccacaaggagagcggcagattccaggacgtgggcccccaggcccccgtgggcagcgtgtaccagaagaccaacgccgtgagcgagatcaagagagtgggcaaggacagcttctgggccaaggccgagaaggaggaggagaacagaagactggaggagaagagaagagccgaggaggcccagagacagctggagcaggagagaagagagagagagctgagagaggccgccagaagagagcagagataccaggagcagggcggcgaggccagcccccagagaacctgggagcagcagcaggaggtggtgagcagaaacagaaacgagcaggagagcgccgtgcaccccagagagatcttcaagcagaaggagagagccatgagcaccaccagcatcagcagcccccagcccggcaagctgagaagccccttcctgcagaagcagctgacccagcccgagacccacttcggcagagagcccgccgccgccatcagcagacccagagccgacctgcccgccgaggagcccgcccccagcacccccccctgcctggtgcaggccgaggaggaggccgtgtacgaggagccccccgagcaggagaccttctacgagcagccccccctggtgcagcagcagggcgccggcagcgagcacatcgaccaccacatccagggccagggcctgagcggccagggcctgtgcgccagagccctgtacgactaccaggccgccgacgacaccgagatcagcttcgaccccgagaacctgatcaccggcatcgaggtgatcgacgagggctggtggagaggctacggccccgacggccacttcggcatgttccccgccaactacgtggagctgatcgagtag

SEQ ID NO: 25885 - DNA, 1293 bp, Artificial Sequence
  derived and/or modified sequence
atggccgccaacctgagcagaaacggccccgccctgcaggaggcctacgtgagagtggtgaccgagaagagccccaccgactgggccctgttcacctacgagggcaacagcaacgacatcagagtggccggcaccggcgagggcggcctggaggagatggtggaggagctgaacagcggcaaggtgatgtacgccttctgcagagtgaaggaccccaacagcggcctgcccaagttcgtgctgatcaactggaccggcgagggcgtgaacgacgtgagaaagggcgcctgcgccagccacgtgagcaccatggccagcttcctgaagggcgcccacgtgaccatcaacgccagagccgaggaggacgtggagcccgagtgcatcatggagaaggtggccaaggccagcggcgccaactacagcttccacaaggagagcggcagattccaggacgtgggcccccaggcccccgtgggcagcgtgtaccagaagaccaacgccgtgagcgagatcaagagagtgggcaaggacagcttctgggccaaggccgagaaggaggaggagaacagaagactggaggagaagagaagagccgaggaggcccagagacagctggagcaggagagaagagagagagagctgagagaggccgccagaagagagcagagataccaggagcagggcggcgaggccagcccccagagaacctgggagcagcagcaggaggtggtgagcagaaacagaaacgagcaggagagcgccgtgcaccccagagagatcttcaagcagaaggagagagccatgagcaccaccagcatcagcagcccccagcccggcaagctgagaagccccttcctgcagaagcagctgacccagcccgagacccacttcggcagagagcccgccgccgccatcagcagacccagagccgacctgcccgccgaggagcccgcccccagcacccccccctgcctggtgcaggccgaggaggaggccgtgtacgaggagccccccgagcaggagaccttctacgagcagccccccctggtgcagcagcagggcgccggcagcgagcacatcgaccaccacatccagggccagggcctgagcggccagggcctgtgcgccagagccctgtacgactaccaggccgccgacgacaccgagatcagcttcgaccccgagaacctgatcaccggcatcgaggtgatcgacgagggctggtggagaggctacggccccgacggccacttcggcatgttccccgccaactacgtggagctgatcgagtag

SEQ ID NO: 25886 - DNA, 1083 bp, Artificial Sequence
  derived and/or modified sequence
atgaaggccaccgccatgaccagcgcctggctggcccagggcaccggcgagggcgtgaacgacgtgagaaagggcgcctgcgccagccacgtgagcaccatggccagcttcctgaagggcgcccacgtgaccatcaacgccagagccgaggaggacgtggagcccgagtgcatcatggagaaggtggccaaggccagcggcgccaactacagcttccacaaggagagcggcagattccaggacgtgggcccccaggcccccgtgggcagcgtgtaccagaagaccaacgccgtgagcgagatcaagagagtgggcaaggacagcttctgggccaaggccgagaaggaggaggagaacagaagactggaggagaagagaagagccgaggaggcccagagacagctggagcaggagagaagagagagagagctgagagaggccgccagaagagagcagagataccaggagcagggcggcgaggccagcccccagagaacctgggagcagcagcaggaggtggtgagcagaaacagaaacgagcaggagagcgccgtgcaccccagagagatcttcaagcagaaggagagagccatgagcaccaccagcatcagcagcccccagcccggcaagctgagaagccccttcctgcagaagcagctgacccagcccgagacccacttcggcagagagcccgccgccgccatcagcagacccagagccgacctgcccgccgaggagcccgcccccagcacccccccctgcctggtgcaggccgaggaggaggccgtgtacgaggagccccccgagcaggagaccttctacgagcagccccccctggtgcagcagcagggcgccggcagcgagcacatcgaccaccacatccagggccagggcctgagcggccagggcctgtgcgccagagccctgtacgactaccaggccgccgacgacaccgagatcagcttcgaccccgagaacctgatcaccggcatcgaggtgatcgacgagggctggtggagaggctacggccccgacggccacttcggcatgttccccgccaactacgtggagctgatcgagtag

SEQ ID NO: 25887 - DNA, 1080 bp, Artificial Sequence
  derived and/or modified sequence
tgagccaccgcaatgacgtccgcttggttggcccaaggaactggagagggtgttaacgatgttagaaagggggcgtgcgcttcacacgtctccactatggcaagttttctaaagggcgcacacgttacgatcaatgcacgtgcggaagaagacgttgaacccgagtgtatcatggaaaaagttgctaaggcctcgggcgcaaactacagtttccataaggaaagcggcaggtttcaggacgttggccctcaggccccagtcggctccgtttaccagaagacaaatgctgtgtcagaaatcaagagagtcgggaaagactccttctgggcgaaggctgaaaaggaggaagagaacaggagactggaggaaaagcgtcgcgccgaagaggctcagagacagttagaacaggagcgaagagagagagagctgagggaggccgcgaggagagagcagaggtaccaggaacagggcggagaggcctccccacagcgtacttgggaacagcaacaagaagtggtaagccggaacagaaatgagcaggagagtgctgtgcatcccagagagatctttaagcagaaagaacgtgctatgtccacaacaagtataagctctccccagccaggaaaactgcgatcaccctttctgcagaagcaacttacccagccagagacacactttggccgcgaacccgccgcagctattagtcggcctagagcagacctccctgccgaggagcccgctcccagcacgcctccctgtctggtgcaggcagaggaggaggccgtttacgaggagccgcctgaacaagaaactttctatgaacagcctcctttagtgcagcagcagggtgccggatctgaacacatcgaccatcatatccagggtcaaggccttagtggacagggactttgcgctcgcgctctgtacgactaccaggccgccgacgataccgaaatcagttttgatcctgagaatctaatcacaggcattgaagttattgatgaaggctggtggcgtgggtatggtcccgacgggcatttcggcatgttcccagctaattacgtcgagttaatagaatag

SEQ ID NO: 25888 - DNA, 1293 bp, Artificial Sequence
  derived and/or modified sequence
atggccgccaaccttagcaggaatggccctgcgctgcaagaggcatacgtgcgcgtcgtgaccgaaaaatctccaaccgattgggctttatttacctacgaggggaattcgaacgacatccgggtggccggaaccggcgaaggcgggcttgaagagatggtcgaagagctgaactccggaaaggtaatgtatgccttctgccgggtgaaggacccaaacagcggcctccccaaattcgtccttatcaattggactggggaaggggtgaatgatgtgaggaaaggtgcctgtgcctcacatgtgtcgactatggcctccttcctgaaaggcgcccacgtcaccatcaatgcaagggcggaagaggatgtggaacctgaatgtatcatggagaaggtcgctaaagccagcggagcaaattacagtttccataaggagtcaggccggtttcaggacgtggggccccaggcaccagtcggctcagtgtaccaaaagacaaacgctgttagcgagattaagagggtggggaaagattccttttgggccaaggccgagaaagaggaggaaaaccgtcggttagaagagaaacggagggccgaagaggcacagcggcagctggagcaggagcggcgcgaacgggagttacgcgaggctgcaagaagagagcaaagataccaggagcagggcggcgaggcgtctccccagagaacatgggaacagcagcaggaggtggtgagccgcaaccggaatgagcaggaatcagcggtgcacccccgtgagatctttaagcaaaaggagagagccatgtcgactacgtctataagctcgcctcaacctggaaagctccgcagcccattcctccaaaagcaacttactcagccagagacccactttggaagagagccagccgctgcaatctccaggccgcgggccgatctacctgctgaggagcctgccccatctactcccccctgccttgtgcaggccgaagaggaagccgtgtacgaagagcccccagaacaggaaacattttatgaacaacccccactggttcaacagcagggggcagggtctgagcatattgaccatcatattcagggccagggtcttagcgggcaaggcctgtgtgcaagagctttgtacgattatcaggctgctgacgacaccgagatcagctttgatcctgagaacctcatcactgggatagaagtcatcgatgagggctggtggagaggatacggccctgacggccacttcggcatgttccctgcgaactatgtagaattaattgagtag

SEQ ID NO: 25889 - DNA, 1083 bp, Artificial Sequence
  derived and/or modified sequence
atgaaggctaccgctatgacgtccgcctggctggctcaaggtacaggagagggggtgaacgacgtaaggaaaggcgcgtgcgccagccatgtgtcaaccatggcctcttttctgaaaggtgcacacgtgacaattaatgcccgagctgaagaagatgtggaaccagagtgtattatggagaaagttgctaaagcctctggcgcaaattattcgtttcataaggagtctgggcgctttcaggacgttgggcctcaggcccctgtcggctccgtttatcagaagacaaacgccgtgtcagagattaagagggtggggaaggactcattttgggcgaaggccgagaaggaagaagagaatcgccggttggaggagaagcgcagagccgaagaagcacagaggcagctcgagcaggagcgtagagagcgcgaactgcgggaggctgcaagacgtgagcagagatatcaggaacaggggggcgaagctagtcctcagaggacttgggagcagcagcaagaggtagtgagcaggaaccgtaacgagcaagagagcgccgtgcacccaagagaaattttcaagcaaaaggagcgggcaatgtccacaactagtattagttccccccagccaggcaagctgcgctccccgtttctgcaaaaacagctgacccaaccagaaacccatttcggccgggagccagccgcagccattagtcgccccagagcggacctgccggccgaagagcccgctccctccacaccaccatgccttgtgcaggctgaagaagaagcagtgtacgaggaaccaccggaacaggaaactttttatgagcagcctcctctagtgcagcagcagggcgccggctcggaacacatcgatcaccacatccagggacagggtctgtccggacagggcttgtgcgccagagccctgtatgactatcaggcagcagatgatactgagatcagtttcgaccccgaaaacctgataacaggaattgaggttatcgatgagggctggtggcgtggttacggaccggacggccattttggcatgttccccgcgaactacgtggaactcattgagtag

SEQ ID NO: 25890 - DNA, 1080 bp, Artificial Sequence
  derived and/or modified sequence
tgagccacagccatgaccagcgcctggctggcccagggcaccggggagggcgtgaatgatgtgaggaaaggagcctgtgccagccacgtgtccaccatggccagcttcctgaagggggcccacgtgaccatcaatgcccgggcagaggaggatgtggagcctgagtgcatcatggagaaggtggccaaggccagcggggccaactacagcttccacaaggagagcggccgcttccaggatgtgggcccccaggcccctgtgggctctgtgtaccagaagaccaatgctgtgtctgagatcaagagggtgggcaaggacagcttctgggccaaggccgagaaggaggaggagaacagaaggctggaggagaagagaagagctgaggaggcccagaggcagctggagcaggagcggcgggagcgggagctgcgggaggccgcccggcgggagcagcgctaccaggagcagggcggggaggccagcccccagaggacctgggagcagcagcaggaggtggtgtccaggaacagaaatgagcaggagagcgctgtgcacccccgggagatcttcaagcagaaggagcgggccatgagcaccaccagcatcagcagcccccagcccgggaagctgcggagccccttcctgcagaagcagctgacccagcctgagacccacttcggccgggagcctgctgctgccatcagccggcccagggctgacctgcctgctgaggagcccgcccccagcaccccaccctgcctggtgcaggccgaggaggaggccgtgtatgaggagcccccagagcaggagaccttctatgagcagccccccctggtgcagcagcagggcgccggcagcgagcacatcgaccaccacatccagggccagggcctgagcggccagggcctgtgtgcccgggccctgtatgactaccaggccgcagatgacacagagatcagctttgatcctgagaacctgatcaccggcatcgaggtgattgatgagggctggtggaggggctacggcccagatggccacttcggcatgtttcctgccaactacgtggagctgattgaatag

SEQ ID NO: 25891 - DNA, 1293 bp, Artificial Sequence
  derived and/or modified sequence
atggccgccaacctgagcagaaatggacctgccctgcaggaggcctacgtgcgggtggtgacagagaagagccccacagactgggccctcttcacctatgagggcaacagcaatgacatccgggtggccggcactggagagggcggcctggaggagatggtggaggagctgaacagcggcaaggtgatgtatgccttctgccgggtgaaggaccccaacagcggcctgcccaagtttgtgctgatcaactggacaggagagggcgtgaatgatgtgaggaagggggcctgtgccagccacgtgtccaccatggccagcttcctgaagggggcccacgtgaccatcaatgcccgggcagaagaagatgtggagcctgagtgcatcatggagaaggtggccaaggccagcggggccaactacagcttccacaaggagagcggccgcttccaggatgtgggcccccaggcccctgtgggctctgtgtaccagaagaccaatgctgtgtctgagatcaagagggtgggcaaggacagcttctgggccaaggccgagaaggaggaggagaacagaaggctggaggagaagagaagagctgaggaggcccagaggcagctggagcaggagcggcgggagcgggagctgcgggaggccgcccggcgggagcagcgctaccaggagcagggcggggaggccagcccccagaggacctgggagcagcagcaggaggtggtgtccaggaacagaaatgagcaggagagcgctgtgcacccccgggagatcttcaagcagaaggagcgggccatgagcaccaccagcatcagcagcccccagcccgggaagctgcggagccccttcctgcagaagcagctgacccagcctgagacccacttcggccgggagcctgctgctgccatcagccggcccagggctgacctgcctgctgaggagcccgcccccagcaccccaccctgcctggtgcaggccgaggaggaggccgtgtatgaggagcccccagagcaggagaccttctatgagcagccccccctggtgcagcagcagggcgccggcagcgagcacatcgaccaccacatccagggccagggcctgagcggccagggcctgtgtgcccgggccctgtatgactaccaggccgcagatgacacagagatcagctttgatcctgaaaatctcatcactggaattgaggtgattgatgagggctggtggaggggctacggcccagatggccacttcggcatgtttcctgccaactacgtggagctgattgaatag

SEQ ID NO: 25892 - DNA, 1083 bp, Artificial Sequence
  derived and/or modified sequence
atgaaggccacagccatgaccagcgcctggctggcccagggcactggagagggcgtgaatgatgtgaggaagggggcctgtgccagccacgtgtccaccatggccagcttcctgaagggggcccacgtgaccatcaatgcccgggcagaagaagatgtggagcctgagtgcatcatggagaaggtggccaaggccagcggggccaactacagcttccacaaggagagcggccgcttccaggatgtgggcccccaggcccctgtgggctctgtgtaccagaagaccaatgctgtgtctgagatcaagagggtgggcaaggacagcttctgggccaaggccgagaaggaggaggagaacagaaggctggaggagaagagaagagctgaggaggcccagaggcagctggagcaggagcggcgggagcgggagctgcgggaggccgcccggcgggagcagcgctaccaggagcagggcggggaggccagcccccagaggacctgggagcagcagcaggaggtggtgtccaggaacagaaatgagcaggagagcgctgtgcacccccgggagatcttcaagcagaaggagcgggccatgagcaccaccagcatcagcagcccccagcccgggaagctgcggagccccttcctgcagaagcagctgacccagcctgagacccacttcggccgggagcctgctgctgccatcagccggcccagggctgacctgcctgctgaggagcccgcccccagcaccccaccctgcctggtgcaggccgaggaggaggccgtgtatgaggagcccccagagcaggagaccttctatgagcagccccccctggtgcagcagcagggcgccggcagcgagcacatcgaccaccacatccagggccagggcctgagcggccagggcctgtgtgcccgggccctgtatgactaccaggccgcagatgacacagagatcagctttgatcctgaaaatctcatcactggaattgaggtgattgatgagggctggtggaggggctacggcccagatggccacttcggcatgtttcctgccaactacgtggagctgattgaatag

SEQ ID NO: 25893 - DNA, 1080 bp, Artificial Sequence
  derived and/or modified sequence
tgagccaccgccatgaccagcgcctggctggcccagggcaccggcgagggtgttaatgatgtgcgaaagggtgcttgcgcaagtcacgtatctacaatggcgtcttttctcaaaggggcacatgtgaccatcaatgcccgggcagaagaggatgttgaaccagagtgcatcatggagaaggtggccaaggcctcaggcgctaactactctttccacaaggagtctgggcgtttccaagacgtgggcccacaagctcccgttggatccgtgtatcagaagacaaatgcggttagcgaaattaagagagtgggaaaggattccttttgggccaaagccgagaaggaggaagaaaatcgacgactggaagaaaaacggagagcagaggaggcacagcggcagctggaacaggaacgcagagagcgggaattgagagaggccgccaggcgtgagcagcgttaccaggagcaggggggagaggcttccccacagcgcacatgggaacagcagcaggaagtggtgtcccgcaacaggaatgagcaggagagcgccgtgcatccccgggaaattttcaagcaaaaggagcgggccatgtccaccacttcaatctcttctccacagcctgggaagctgcgttcacctttcctccagaagcagctgacccagcctgaaacccatttcggcagagagcctgctgccgcgatctcaagaccacgcgccgaccttcctgctgaggagccagcaccgagcactcctccatgcctggttcaagcagaagaggaggcggtgtacgaggagcccccagagcaggagaccttttacgaacagccgcctctggtccaacaacagggtgcgggctcagagcacatcgaccaccacatccagggacagggcttgagcggacagggcctatgtgccagggctttatatgactatcaggccgccgacgacaccgagatttctttcgatcctgagaatctgatcaccggcatcgaggtaatcgacgaagggtggtggagggggtatggtccagatggacactttggcatgttccctgcgaactatgtcgaattgatcgagtag

SEQ ID NO: 25894 - DNA, 1293 bp, Artificial Sequence
  derived and/or modified sequence
atggccgccaacctgagccggaacggccccgccctgcaggaggcctacgtgagagtggtgaccgagaaaagtccgaccgattgggcactgtttacatatgagggtaattctaacgacatccgcgtggccggaaccggggagggcggcttagaggagatggtggaggagctgaactccgggaaggtcatgtacgccttttgccgcgtgaaagatcccaactctggcctgcctaagttcgttcttattaattggacaggtgaaggtgtgaacgatgtacgcaaaggcgcttgtgcttcccatgtttccactatggctagcttcctgaagggagcacatgtgactatcaatgcaagagcagaagaagacgtggaacccgaatgtataatggaaaaagttgcaaaggcttctggcgcaaactattcgttccataaagagtctgggcggttccaggatgtgggtcctcaagcaccagtgggttccgtgtatcagaaaaccaatgcagtttctgagattaagagggtcggcaaagattctttctgggctaaggctgagaaagaggaggagaatagaagactcgaggagaaacgacgggcagaggaggcacagcggcaactcgagcaggagcgacgcgagagggagctgcgagaggctgccagaagagaacagcgataccaagaacaggggggcgaagcttcacctcaacggacttgggagcagcagcaagaagtcgtgtctaggaaccggaacgagcaggaaagcgctgtgcaccccagggaaatctttaagcaaaaggagcgtgccatgagtaccacctctatttctagcccgcagcccggaaagcttcgctctccttttttgcagaagcagctcacccagcccgaaacacatttcgggcgagagccagcagccgccatctcccgaccccgagctgatctgcctgctgaggaacccgcaccttctaccccgccatgcctggttcaagcggaagaggaggcagtgtacgaagaaccccccgagcaggagacattttatgagcaacctccgctcgtgcaacagcaaggcgccggatctgagcatatagaccaccatattcaagggcagggattgagcggtcagggcctctgtgctagggccttgtacgactatcaggccgcggacgataccgagatctcttttgatcccgagaatcttattacgggcatcgaggtgattgatgaggggtggtggagaggatacggaccagacgggcattttggtatgtttccggcgaattacgtggagctgattgaatag

SEQ ID NO: 25895 - DNA, 1083 bp, Artificial Sequence
  derived and/or modified sequence
atgaaggccaccgccatgaccagcgcctggctggcccagggcaccggcgagggtgtcaacgatgtcagaaaaggtgcctgcgctagccacgtgtccaccatggcctcatttctgaagggcgctcacgtgaccattaacgccagagccgaagaggacgtagaacctgagtgtattatggagaaagtcgcaaaggcctccggcgcaaattacagctttcacaaagagtccgggcgcttccaggacgtggggccacaggctcccgttggcagtgtgtatcaaaaaactaacgcggtctcagagataaaaagggtgggcaaggacagcttctgggccaaggccgagaaggaagaggagaaccggcgcttagaagagaagagacgggctgaagaggcccagcgccagctggagcaggagcggcgcgaaagggagctaagggaggctgcccggcgcgagcagagataccaggagcagggcggcgaggcttcccctcagcgcacctgggaacagcagcaggaggtggtctcacgaaatcgtaacgagcaagagtccgctgtgcacccaagagaaattttcaagcagaaggaacgcgcaatgagcactacctctattagttcacctcagcctgggaagttacggagccctttcctccagaagcagctaacccagcccgagacccacttcgggcgcgaacctgctgctgcgatttcccggccgagagctgacctacctgcagaagagcctgccccaagcacccctccttgtctagtccaagctgaagaggaggcggtgtatgaggagcctcccgaacaggagacattctatgagcagccccctcttgtgcagcaacagggcgcaggctccgagcatattgaccaccacattcagggccaggggctatcgggccagggcctgtgcgcacgtgctctgtatgactaccaagccgccgatgacactgagatttctttcgatcctgagaatttgattacaggtatcgaggtgattgatgaggggtggtggaggggctacggtcccgacggacactttggcatgtttcctgccaattacgtggaactgatcgaatag

SEQ ID NO: 25896 - DNA, 1080 bp, Artificial Sequence
  derived and/or modified sequence
taagctactgccatgacctccgcgtggctcgctcagggaactggcgagggcgtgaatgacgtccgcaagggggcttgcgcctcccacgtgtccacgatggctagttttcttaagggggctcacgttaccatcaatgcgagagccgaggaagatgtggagcctgaatgtatcatggaaaaagtcgccaaggcctcaggcgcaaactattctttccacaaagaatctggcaggttccaggacgttgggccacaggctccggtcggctctgtctaccaaaagacaaatgccgtctcggagatcaaacgtgtaggcaaggacagtttctgggctaaggccgagaaagaggaagaaaatcggaggctggaagaaaagagacgggctgaggaggcacagaggcagctcgaacaggaacgcagggagcgggagttacgcgaagcggctcgacgggaacagcgatatcaggaacaggggggagaagcctcaccacagcgtacgtgggagcagcaacaggaggtcgtttcacgcaatagaaatgagcaggagtctgccgtgcacccaagagagatctttaagcaaaaagaacgagcgatgtccacaacgtcaatttccagtccccagcctggcaagctccgctcgcctttcttgcagaaacagctgactcagcctgagacccatttcggccgagagccagcggctgctatttccagacctcgggcagatctccccgcagaggagcctgcaccctctacaccgccatgtttggtgcaagcagaggaagaggccgtgtacgaagaaccacccgaacaggaaaccttttacgaacagccaccgcttgtgcagcagcaaggagcgggaagcgaacacatcgaccaccatattcagggacaaggcctctcaggacagggactatgcgctcgcgcactgtatgactaccaggccgctgacgacacagaaatcagcttcgatcctgagaacctgatcacaggcattgaggtgatcgacgagggctggtggcgtgggtatggccctgatggccacttcggcatgttcccagccaactacgtggagcttatcgaatag

SEQ ID NO: 25897 - DNA, 1293 bp, Artificial Sequence
  derived and/or modified sequence
atggcagccaatctatcccgtaatggccctgccctccaagaggcatatgttcgcgtggtcaccgagaagtctccgaccgattgggccttattcacatacgagggcaacagcaacgacatcagggttgccggaacaggagaagggggactcgaagagatggtggaagagttaaatagcggtaaggttatgtacgctttctgccgtgttaaagatcccaatagcggcctacctaagttcgtcctgatcaattggaccggtgagggagtgaatgacgtgcgcaaaggcgcatgcgcctcccatgtgtctaccatggccagctttctgaaaggtgctcacgtaaccataaacgcacgggcagaggaagatgttgagccagagtgtatcatggaaaaagttgcaaaggcaagtggagcaaactacagcttccataaggagtccggccgatttcaagacgtgggcccacaagcgcctgtcggttctgtgtatcaaaagacaaacgccgtttccgagatcaaacgggttggtaaggatagcttttgggctaaggccgagaaggaggaggaaaatcggcgactcgaagagaagcgtcgcgctgaggaggcccagagacagctggaacaggaacggagagaaagagagcttcgggaagccgctcggagggaacagcggtatcaggagcaaggtggagaagcttcccctcagagaacatgggaacaacagcaagaggtggtctctcggaacagaaacgaacaagagagtgccgtccacccgagagagattttcaagcaaaaagaaagggcaatgtcaactaccagcatatctagtccacagccaggtaaactgaggtcgccttttcttcaaaagcagctcactcagccagagacccacttcggccgagagccagcagcagccatctcaagaccgagggccgacttacctgccgaagaaccagccccatctactcctccatgtctcgtgcaagccgaagaagaggccgtgtacgaagaaccccctgaacaggaaacattttacgaacagcctccactcgtacagcagcaaggagctggctccgagcacatagaccaccatatacaggggcaaggtttaagcggacagggtttatgcgccagggccctctacgattaccaagccgcagacgacaccgaaatcagtttcgaccccgagaatcttatcacggggattgaagtgattgacgagggctggtggagagggtatggccctgacgggcactttggtatgttccccgctaactatgtggagttgatcgaatag

SEQ ID NO: 25898 - DNA, 1083 bp, Artificial Sequence
  derived and/or modified sequence
atgaaggccacggcgatgacctcagcctggttagcccaagggaccggggagggcgtgaacgatgtgaggaaaggagcctgcgcatcacacgtttcgacgatggcttcattccttaagggcgcacacgtaactatcaatgccagagcggaagaggacgtagagcctgagtgcataatggagaaagtggccaaggccagcggggctaactattccttccataaagaatctggccgttttcaagacgttggtcctcaggcaccagtcggttccgtctaccagaaaaccaacgccgtgagcgaaattaagagggtcggtaaggactcgttttgggctaaggccgaaaaagaggaggaaaaccgaagactggaggagaaaaggagggcggaagaggcccagcgccagctggaacaggaaaggagagaacgcgagctgagggaggccgctcgccgagaacaaaggtatcaggagcagggaggggaagctagcccccaacggacatgggaacagcagcaagaggttgtgagccgcaatcggaatgagcaggaaagtgcagtgcatcctcgggaaatctttaaacagaaagaacgagcaatgtcaaccacaagcatctcctctcctcagccaggaaagctcagaagccccttcctgcagaagcagctcacccagcccgaaacccactttggccgagagcccgctgccgcaatttcacgccctagagctgatctccccgcagaggagccagcaccgtcaaccccaccatgtctcgtccaagctgaggaggaggccgtgtatgaggagccacctgagcaggagacattctatgagcagccacccctggtccagcagcagggtgctggaagtgagcacatcgatcatcatatacagggccaagggctgagcggtcagggtctgtgcgctagggccctgtacgattaccaggccgcagacgatacagagatctccttcgaccctgagaacctcatcaccggcatcgaagtcatcgacgagggttggtggcggggatatggcccagacggacacttcggcatgttcccggctaattacgttgagctaattgagtag

SEQ ID NO: 25899 - DNA, 9618 bp, Artificial Sequence
  derived and/or modified sequence
ggcaacagcaatgacatccgcgtggctggcacaggggacaggcgagggcgtgaacgatgtgcggaagggagcctgtgccagccacgtcagcaccatggccagcttcctgaagggggcccatgtgaccatcaacgcacgggccgaggaggatgtggagcctgagtgcatcatggagaaggtggccaaggcttcaggtgccaactacagctttcacaaggagagtggccgcttccaggacgtgggaccccaggccccagtgggctctgtgtaccagaagaccaatgccgtgtctgagattaaaagggttggtaaagacagcttctgggccaaagcagagaaggaggaggagaaccgtcggctggaggaaaagcggcgggccgaggaggcacagcggcagctggagcaggagcgccgggagcgtgagctgcgtgaggctgcacgccgggagcagcgctatcaggagcagggtggcgaggccagcccccagaggacgtgggagcagcagcaagaagtggtttcaaggaaccgaaatgagcaggagtctgccgtgcacccgagggagattttcaagcagaaggagagggccatgtccaccacctccatctccagtcctcagcctggcaagctgaggagccccttcctgcagaagcagctcacccaaccagagacccactttggcagagagccagctgctgccatctcaaggcccagggcagatctccctgctgaggagccggcgcccagcactcctccatgtctggtgcaggcagaagaggaggctgtgtatgaggaacctccagagcaggagaccttctacgagcagcccccactggtgcagcagcaaggtgctggctctgagcacattgaccaccacattcagggccaggggctcagtgggcaagggctctgtgcccgtgccctgtacgactaccaggcagccgacgacacagagatctcctttgaccccgagaacctcatcacgggcatcgaggtgatcgacgaaggctggtggcgtggctatgggccggatggccattttggcatgttccctgccaactacgtggagctcattgagtgaggctgagggcacatcttgcccttcccctctcagacatggcttccttattgctggaagaggaggcctgggagttgacattcagcactcttccaggaataggacccccagtgaggatgaggcctcagggctccctccggcttggcagactcagcctgtcaccccaaatgcagcaatggcctggtgattcccacacatccttcctgcatcccccgaccctcccagacagcttggctcttgcccctgacaggatactgagccaagccctgcctgtggccaagccctgagtggccactgccaagctgcggggaagggtcctgagcaggggcatctgggaggctctggctgccttctgcatttatttgccttttttctttttctcttgcttctaaggggtggtggccaccactgtttagaatgacccttgggaacagtgaacgtagagaattgtttttagcagagtttgtgaccaaagtcagagtggatcatggtggtttggcagcagggaatttgtcttgttggagcctgctctgtgctccccactccatttctctgtccctctgcctgggctatgggaagtggggatgcagatggccaagctcccaccctgggtattcaaaaacggcagacacaacatgttcctccacgcggctcactcgatgcctgcaggccccagtgtgtgcctcaactgattctgacttcaggaaaagtaacacagagtggccttggcctgttgtcttcccctattttctgtcccagctcatccgtgtctctgaagaacaaatatgcttttggaccacgaattcccagtttggtctacacaggctcgcagctctcacctgtcctgctgtagcctgaatgctcccatgtgggaatagcaccccaccacctgcccagtgtctgcctctgctccgtgtctggggtgagcaccctcaccctgagactgtggctgatgatgatcagccaccaggaagaggctaaatgttaagatgggactgaagttggagccttcctgcgttccagttcctctaggagaggccaagggctgccctgctcccagcttcagggagcctctgcctacatgggatggcccactgtgtggcgtcaggtacctggcacccactgagcatccggggaattaggtccctcctgtgccccagagctgctaggcagactgctaggcggttgactcaaggtgttacctgctagtgcctggggtgaaggctgcatggagcccaaccttgctcctggccttcctgtgctcaggcctctccccttttcgccagggcttcctggtgcctctcccatgaagagggaacttcccctccactcccatggaagacccaggtttgggctgttgccagctttgaggccccctgtgggcttgcctgtcccaacccaagaggcagggctcaaagtgccacccgggggttgcaaggacagcagaggaccacctgccctctgcaggaagctgtccaggaagccgtgtcctgggctgtggtccttgctccccatggggagagctgggtcacttggcctcttctaactggccccaagcacgccaattctggagcatggttactaagtggctctgaagcttcagggtcaccacaggcttgtcctgactgcaaactcatggagtggttgcagccctggctcagtgtcctgatgactaggtgtgggtactaggctcctgcccctggtgacacacgtatggagtgggggagggtgggtggctgcacccctggttctggagtccccacagctgatggcggtgtgagcctggcatgcacggctgcgctggactccaggctgttgggggaggtgcctttattgcccaagcccacccctcacttggccttgccctgggcagccacagcctccatggccttccgcaccgtttcctcatcacccaggaactgcatgggcttggtgggcttcagctccttgttcagctcatacacaatggggatccccgtgggcaggttcagctccatgatcgcctggtctgacatccctatgccggaaggaataggtgtccttagcccctctgtccccagcctgtttacacagcagacactatgtgacctttatggtccacagagccagttcccctggcaccaattccttcccagccctgagaacgaggccacagaaatgttgccaaaggtcaaggagtaactgagttagaccaagcagcctacagaaatagcccagtggtgaaaaaaatggggacttcagccccacccaagtggctgtgatctgtggtggtgctgtccatagttccctcagcccagtgtgactccagccagactgaagttgagggtcaggaagggacactcaccctttgttttttttttttcttttctttttctttttcttttttttgagatggagttttactcctcttgcccaggctggagtgcagtggcacgatcttggctcactgcaacctccatctcctgggttgaagtgattctgcctcagcctcccaagtagctgggattacaggtgagcgccaccacacccggctaattttgtatttttagtagaaacgggttttaccatgttggtcaggctggtctcaaactcctgacctcaggtgatctgcctgcctcagcctcccaaagtgctgggattacaggagtgagccaccgtgcccagcaccctttggtttctaaagtgctctaaattctagacatcctgaacagaggagcaagtgcggaatggagctggaggagggacagggaggccgagcctggtcgaaacctgaccctgcctgcctcctgcagcccctgagctgggaatagcagctcgacctttgatgttcgcgccactccacccctgctccgtgcaggagggtttaagaaaatgttctctggggagtcagagtgaaatccctcatattcaccaccaaaagtgcgtcccctttccccaaaccaggctgtgggagggtcatggggctgcatgaagtctccggaagggagaggaggcaggtggtccttccctctgcctggccccagtgccaggtgccaggtgtccgtgtttggagcgggcaggcttggggctggctgggtctccggggcctgccggtctgggtgctctggccaactgcccaacggccctaggagcaggaggtctggggcacacccttctagcctttccaggactcaacaagctttaaggtcattcagatgctaatttagactgcccttgtgtcagaatactaaggtgggaggcggagcggaggtgccagtcactctgggcgaggccttactgcgcccatgcatcccgggcccatttgtcagcccttgctcttcagtgggagcccagctgcaagcccagagtctggccactccatagtcctgcacccctcttttgattggtctttcctttgcccagagaggggctccagagggagataggtggtgaagctcatgcagggattctgaggacctgatgggggagggccctgcgaggggtccaagcctacatcaagaggaattcagtaccagggggagctccccaccaccccggaaaagggagaggcccagagatggaggtggcttgtccagggccccacagtaagttgggatttggagccagatgctctaagcccagcccttccgtttcctagctgggtgtcccttggcagatgccacctttggagcctgccccacctcgggacacagcgagcttcgagtgcagtcagcccctgtggagtgtgtcccagttacacagaaatggggaaaatttcacaaaactaaaaaatggcttctcagccctcctttttcagtgaatgatgtggagccccacgcctagaaagcctggtccatgggcgagagactttgctgagatgagaagccagctggggctgctgcccacccaccctgcccaggctcctgaaggtggcctcaccttccaggtgcttgacaatgccccgcaggctgttcccgtgggctgcaatgagcactcgcttgccggccttgatctggggaacaatctcctcgttccagaagggcagggcccgggcaatggtgtccttgaggctctcgcaggtggggagttccccgggcttcaggcctgcgtaccgacgctcctgggggacacaggcacgctgctttccctcccaagccagtgggcccccacccgactccccactctgcagcttcccagaggccttcccagcaaaggcagcccaccttgctaatggagttgtagtaggggtgcttctcgtccatcgggggcggcgggatgtcgaaggagcgcctccagatcttcacctgctcctccccgtgcttggcggccgtttctgccttgttgaggcctgtgaggcccccgtaatgccgctcattgaggcgccaagtgcgcaccacaggcagccacatctggtccgtgccgtccaggatggcccagagggtgcggatggcccgcttcagcactgacgtgtagcagatgtcaaactccatcttggcatccttgatggccttggctccccgcttggcctcctcggtccccttttcactcagctctgcatcgaaccagccacagaaacggttctcctggttccatgtgctctcgccgtgccggaccatcacgaggcggtgagtggccatggtggcagcagggaccacagaggactctggacggggacggctgcttcccaacactcccagctttataatagtgtcttcccagcccccacccaccccagccaactgccaatcagcattccaggcggtggcaggtgaccagtagctgagctgctgggggctgggggccaggggagtgtgcaggccaagaggctgtgcttaaaatagccccacgcatccaccagctcctggcctgggttcaggtggcatgtctataaccagctggcacccagagcccagactgagtggggctgctggtcagggatgggcgtgaagggcagaagtctgggccaggggagatggggatagcagggacagaggggctctccagggcaacgctcagtggcctatcagccattctctgctcagacagaggcacaaacaaaatcccaacccctttctcctgtgattggcagccaggctaggaggcggccctcagcaggcagaggaggagagccagaggagctggtgcagaccacagctttgtggagaggagtctggccttgtggaaggtaccaggcagcagcagcagaatgggcaagggctggggctgagccgggtttccaggacaaagggggaaagggcccctgtctttcctccggggtccctttgtcaaggtctcatccatacatgccccatgctcccaccctatctgccctcacccaagccacgctcactctcctagccgaaaccaccttgaaaaagagaaatccaagggggtttgggggcaggactgaggactgtcagaagtcttgattgttaggtaaatgctcagcttagcaggaacccacaacgtaggctgaagggtggcacggagttgagtctaggaccaagacttctgcattcaggtttgggggatgagagccaccaaggcagggaagagactatgagcaataaagtcacaattggggccctaatgaaggggccatggccagacccttgggcatgggccccatccagggcctcccatttcctcccaccccagtgaccacactgtcacctgcgacacttctgataacaggagcgggtaggtgagaggccagcagagggaccaccactctgagacttggatctgagtgtgcaagaaaccctcgacaggcctccctccatccctgctggcctacctggggaggggctcctggcttggggcctgtgaagctaaggctctgtacccaaaggttggcagacaagtcccagtgggcaaagtcctgtcggctgccaggacccccaaggctggcaggtggaacccatccctcctagcagtgccatgcgcaggtctcactgttccacactgatcctgattgaagccacatctcctcatctgcttttgtccctttgaccaagagttgattcactagcccaactaaacatgactgaggaccaggctctggcagtcccacaggggccagacatgaagcccatatttcagtggaggagggatcgtaccagcagctaaacatgcctaccgtagatagcaccagatgctaggaaggaaggaccataatgtactgggagagatgggaaaggagaggccggggacagccctgaggtgacatgtgagtggaaagagcggagtgcaaaggcctcagctatgatgagtcctacagggagagcaattcaggtagaggggttggcaaagacccaagccctacagaaagcaaacaagctggggcagcgaccatcaggggcacatggcagagaggtgggctttgtgtcccaacacagtgggaatcactggagactttgaagcatggtcatattttcaagtcacttgcagctgtgtaggagtggaagtagaagctgagtaccctgcaggtctcggcagctttgatgagaacaaggccgcttagccagggctgggtgcagaagcagtggcaaggatcccccagacctgggagacctcactgccaaccaagcaggaggtgtcaaaaaggaaaggggagcccaaagaagggctggacttcggggaagcaagcccctgcttctgacccttggctccggcttgactttcctttgattcatttgacaagtagttgctggcctctgcagtgtgccagagctttcttggaggggtacaggggtaggaaaaccaaaagccaccctcagggcctccatccaggaaggcatagcatggtgggcggcgaggaaggctgctgagtcaacaaggtggtcccaggaaggtggagggagcatcttcccatgtctctcccactgacagccaccaatcctggacagatgcaggagcagctgtcagtagacagataagaaaaggagatcagattcaaagttccgcagagaagtggtgaggtaacaagtattgcctagcctggacacacaggcggcttgaaacctcaagtgcaccaacagaaagagctccaggaagaatcagaggagtgggatgtgaagcccctcgaagtcagtgagttgggggaatccctccaatttttcttttcttctctaccccagctcctgggcagtaacatggaggtggcagtggtggcacagtgacggtagtgtgagctgggtacgcacttgaaacctgagagggtaacgctaccctctgtctagaggagccatggccccaaaagcatggggcaaccaccttctgcagctcctttctgcccccctgcgctgggccctggatgcagtttcagggagtatgcagcagggtaggtagggaaagagccccagatttgtggctggaggtcttggtagggatgttgcagggagctgttgtgtttcagggagagtacagagaagggagagatgaagtgagtgatccgataaagtgatatgtgaagtcattggcttgctgccaagctgcgcacagggctgaccctagatgcacattgcaggtcccagactgaccggtgtagatacaggactaatatgactagtagtgcaaacactttaaacagtcaacattctgcttaggatttaaacaaggtccagagtctcaacataatatttaaaatatccaggttatccaaaataacccagtgtatgaaaaccaggaaaatcttaacatgggagaaaagaagatgatcaatacatgcccatcctgagatgattcaactattggaatgatcagatacagacttcaaagcagctatttataaccagccttcagaaagtattggtgaatattcttaaacagaatggaaatgacaaagcatggagtccataaattagatgatagtttggaaaaagatataaacttacaaaccaagaagctcagtgaaccacacaactggataaattaacaacaaaagtccaagcttagacacatcataaagaaacttctgaaaactaaagaccaagaaaaataagatcagccagagaaaaacgatacatttcattcaggtgaacaattctttgaaagactggatcttcaccagaaactatagaggccagaaagaagtggaacatttttagttttgaaataactgtcacccaagaattctatatccagtaaaaatttctattttactggaataaaagaatgaaataaagacattctcaaatgaaggcaagctgaggaaattcataaccaaagaatctgctttaaaaaaatgttaaaccaagttcttcagacagaagagattactgggggcaattcaaaactttgggaatgcaggaagaacatcataaatggcaaaagtccacataaatatgaaactattctttacttctttaagagttatgtgatggttgaattaagtcatgatactgtctgatggaggcttcagtgtatacagatgtaagacaactagaacatgaggggagaagggtgaagggacctagatggtagtgaggtttctacatgctacttgaaatggcaaaacattaatctaaattgactgtaagagtatgtgtatttggccgggcagg

SEQ ID NO: 25900 - DNA, 1415 bp, Artificial Sequence
  derived and/or modified sequence
aaaggggcggcccggcccggcccggaagctacagcagcggcgcggagactgcggggcgggccatggcggcgaacctgagccggaacgggccagcgctgcaagaggcctacgtgcgggtggtcaccgagaagtccccgaccgactgacaggcgagggcgtgaacgatgtgcggaagggagcctgtgccagccacgtcagcaccatggccagcttcctgaagggggcccatgtgaccatcaacgcacgggccgaggaggatgtggagcctgagtgcatcatggagaaggtggccaaggcttcaggtgccaactacagctttcacaaggagagtggccgcttccaggacgtgggaccccaggccccagtgggctctgtgtaccagaagaccaatgccgtgtctgagattaaaagggttggtaaagacagcttctgggccaaagcagagaaggaggaggagaaccgtcggctggaggaaaagcggcgggccgaggaggcacagcggcagctggagcaggagcgccgggagcgtgagctgcgtgaggctgcacgccgggagcagcgctatcaggagcagggtggcgaggccagcccccagaggacgtgggagcagcagcaagaagtggtttcaaggaaccgaaatgagcaggagtctgccgtgcacccgagggagattttcaagcagaaggagagggccatgtccaccacctccatctccagtcctcagcctggcaagctgaggagccccttcctgcagaagcagctcacccaaccagagacccactttggcagagagccagctgctgccatctcaaggcccagggcagatctccctgctgaggagccggcgcccagcactcctccatgtctggtgcaggcagaagaggaggctgtgtatgaggaacctccagagcaggagaccttctacgagcagcccccactggtgcagcagcaaggtgctggctctgagcacattgaccaccacattcagggccaggggctcagtgggcaagggctctgtgcccgtgccctgtacgactaccaggcagccgacgacacagagatctcctttgaccccgagaacctcatcacgggcatcgaggtgatcgacgaaggctggtggcgtggctatgggccggatggccattttggcatgttccctgccaactacgtggagctcattgagtgaggctgagggcacatcttgcccttcccctctcagacatggcttccttattgctggaagaggaggcctgggagttgacattcagcactcttccaggaataggacccccagtgaggatgaggcctcagggctccctccggcttggcagactcagcctgtcaccccaaatgcagcaatggcctggtgattcccacacatccttcctgcatcccccgaccctcccagacagctt

SEQ ID NO: 25901 - DNA, 1808 bp, Artificial Sequence
  derived and/or modified sequence
gtttccggttgtcggaggcgaggcttgtcggctgtcaaaggggcggcccggcccggcccggaagctacagcagcggcgcggagactgcggggcgggccatggcggcgaacctgagccggaacgggccagcgctgcaagaggcctacgtgcgggtggtcaccgagaagtccccgaccgactgggctctctttacctatgaaggcaacagcaatgacatccgcgtggctggcacaggggagggtggcctggaggagatggtggaggagctcaacagcgggaaggtgatgtacgccttctgcagagtgaaggaccccaactctggactgcccaaatttgtcctcatcaactggacaggcgagggcgtgaacgatgtgcggaagggagcctgtgccagccacgtcagcaccatggccagcttcctgaagggggcccatgtgaccatcaacgcacgggccgaggaggatgtggagcctgagtgcatcatggagaaggtggccaaggcttcaggtgccaactacagctttcacaaggagagtggccgcttccaggacgtgggaccccaggccccagtgggctctgtgtaccagaagaccaatgccgtgtctgagattaaaagggttggtaaagacagcttctgggccaaagcagagaaggaggaggagaaccgtcggctggaggaaaagcggcgggccgaggaggcacagcggcagctggagcaggagcgccgggagcgtgagctgcgtgaggctgcacgccgggagcagcgctatcaggagcagggtggcgaggccagcccccagaggacgtgggagcagcagcaagaagtggtttcaaggaaccgaaatgagcaggagtctgccgtgcacccgagggagattttcaagcagaaggagagggccatgtccaccacctccatctccagtcctcagcctggcaagctgaggagccccttcctgcagaagcagctcacccaaccagagacccactttggcagagagccagctgctgccatctcaaggcccagggcagatctccctgctgaggagccggcgcccagcactcctccatgtctggtgcaggcagaagaggaggctgtgtatgaggaacctccagagcaggagaccttctacgagcagcccccactggtgcagcagcaaggtgctggctctgagcacattgaccaccacattcagggccaggggctcagtgggcaagggctctgtgcccgtgccctgtacgactaccaggcagccgacgacacagagatctcctttgaccccgagaacctcatcacgggcatcgaggtgatcgacgaaggctggtggcgtggctatgggccggatggccattttggcatgttccctgccaactacgtggagctcattgagtgaggctgagggcacatcttgcccttcccctctcagacatggcttccttattgctggaagaggaggcctgggagttgacattcagcactcttccaggaataggacccccagtgaggatgaggcctcagggctccctccggcttggcagactcagcctgtcaccccaaatgcagcaatggcctggtgattcccacacatccttcctgcatcccccgaccctcccagacagcttggctcttgcccctgacaggatactgagccaagccctgcctgtggccaagccctgagtggccactgccaagctgcggggaagggtcctgagcaggggcatctgggaggctctggctgccttctgcatttatttgccttttttctttttctcttgcttctaaggggtggtggccaccactgtttagaatg

SEQ ID NO: 25902 - DNA, 1928 bp, Artificial Sequence
  derived and/or modified sequence
cgggccatggcggcgaacctgagccggaacgggccagcgctgcaagaggcctacgtgcgggtggtcaccgagaagtccccgaccgactgggctctctttacctatgaaggcaacagcaatgacatccgcgtggctggcacaggggacaggcgagggcgtgaacgatgtgcggaagggagcctgtgccagccacgtcagcaccatggccagcttcctgaagggggcccatgtgaccatcaacgcacgggccgaggaggatgtggagcctgagtgcatcatggagaaggtggccaaggcttcaggtgccaactacagctttcacaaggagagtggccgcttccaggacgtgggaccccaggccccagtgggctctgtgtaccagaagaccaatgccgtgtctgagattaaaagggttggtaaagacagcttctgggccaaagcagagaaggaggaggagaaccgtcggctggaggaaaagcggcgggccgaggaggcacagcggcagctggagcaggagcgccgggagcgtgagctgcgtgaggctgcacgccgggagcagcgctatcaggagcagggtggcgaggccagcccccagaggacgtgggagcagcagcaagaagtggtttcaaggaaccgaaatgagcaggagtctgccgtgcacccgagggagattttcaagcagaaggagagggccatgtccaccacctccatctccagtcctcagcctggcaagctgaggagccccttcctgcagaagcagctcacccaaccagagacccactttggcagagagccagctgctgccatctcaaggcccagggcagatctccctgctgaggagccggcgcccagcactcctccatgtctggtgcaggcagaagaggaggctgtgtatgaggaacctccagagcaggagaccttctacgagcagcccccactggtgcagcagcaaggtgctggctctgagcacattgaccaccacattcagggccaggggctcagtgggcaagggctctgtgcccgtgccctgtacgactaccaggcagccgacgacacagagatctcctttgaccccgagaacctcatcacgggcatcgaggtgatcgacgaaggctggtggcgtggctatgggccggatggccattttggcatgttccctgccaactacgtggagctcattgagtgaggctgagggcacatcttgcccttcccctctcagacatggcttccttattgctggaagaggaggcctgggagttgacattcagcactcttccaggaataggacccccagtgaggatgaggcctcagggctccctccggcttggcagactcagcctgtcaccccaaatgcagcaatggcctggtgattcccacacatccttcctgcatcccccgaccctcccagacagcttggctcttgcccctgacaggatactgagccaagccctgcctgtggccaagccctgagtggccactgccaagctgcggggaagggtcctgagcaggggcatctgggaggctctggctgccttctgcatttatttgccttttttctttttctcttgcttctaaggggtggtggccaccactgtttagaatgacccttgggaacagtgaacgtagagaattgtttttagcagagtttgtgaccaaagtcagagtggatcatggtggtttggcagcagggaatttgtcttgttggagcctgctctgtgctccccactccatttctctgtccctctgcctgggctatgggaagtggggatgcagatggccaagctcccaccctgggtattcaaaaacggcagacacaacatgttcctccacgcggctcactcgatgcctgcaggccccagtgtgtgcctcaactgattctgacttcaggaaaagtaacacagagtggccttggcctgttgtcttcccct

SEQ ID NO: 25903 - protein, 831 aa, Artificial Sequence
  derived and/or modified sequence
MADSSGQQAPDYRSILSISDEAARAQALNEHLSTRSYVQGYSLSQADVDAFRQLSAPPADPQLFHVARWFRHIEALLGSPCGKGQPCRLQASKGRRVQPQWSPPAGTQPCRLHLYNSLTRNKEVFIPQDGKKVTWYCCGPTVYDASHMGHARSYISFDILRRVLKDYFKFDVFYCMNITDIDDKIIKRARQNHLFEQYREKRPEAAQLLEDVQAALKPFSVKLNETTDPDKKQMLERIQHAVQLATEPLEKAVQSRLTGEEVNSCVEVLLEEAKDLLSDWLDSTLGCDVTDNSIFSKLPKFWEGDFHRDMEALNVLPPDVLTRVSEYVPEIVNFVQKIVDNGYGYVSNGSVYFDTAKFASSEKHSYGKLVPEAVGDQKALQEGEGDLSISADRLSEKRSPNDFALWKASKPGEPSWPCPWGKGRPGWHIECSAMAGTLLGASMDIHGGGFDLRFPHHDNELAQSEAYFENDCWVRYFLHTGHLTIAGCKMSKSLKNFITIKDALKKHSARQLRLAFLMHSWKDTLDYSSNTMESALQYEKFLNEFFLNVKDILRAPVDITGQFEKWGEEEAELNKNFYDKKTAIHKALCDNVDTRTVMEEMRALVSQCNLYMAARKAVRKRPNQALLENIALYLTHMLKIFGAVEEDSSLGFPVGGPGTSLSLEATVMPYLQVLSEFREGVRKIAREQKVPEILQLSDALRDNILPELGVRFEDHEGLPTVVKLVDRNTLLKEREEKRRVEEEKRKKKEEAARRKQEQEAAKLAKMKIPPSEMFLSETDKYSKFDENGLPTHDMEGKELSKGQAKKLKKLFEAQEKLYKEYLQMAQNGSFQ

SEQ ID NO: 25904 - DNA, 2496 bp, Artificial Sequence
  derived and/or modified sequence
atggccgactccagtgggcagcaggctcccgactaccgtagtattctgagtatttcagacgaggcagctcgcgcacaggctcttaatgaacacttgtccacaagatcctatgtccaggggtattcgctctcacaggctgacgtggacgccttccgacagctttcagcacctccggctgaccctcagctctttcacgtggccagatggttccgccacattgaagccttgctgggatccccatgtggcaaggggcaaccgtgtagactccaggccagtaaaggaagaagggtccagccacagtggtcccctccagccgggacccagccttgtcgccttcatctctacaactccctaactcgtaacaaggaagtgtttattccccaagatggcaaaaaagttacttggtactgttgcgggcccacagtgtatgatgcgagccatatgggacatgctcggtcatacatcagcttcgacatcctgaggcgagtactgaaagattacttcaagttcgacgttttctactgcatgaatatcaccgacatcgatgacaagattataaagcgcgctaggcagaatcatcttttcgaacagtatagagagaagcggcccgaagccgcccagctcttggaagacgtgcaggcggccttgaagccatttagcgtcaagttaaacgaaaccacagaccccgataaaaaacagatgttggagaggatccagcatgccgtccaactggccactgaacctctggaaaaggcagtgcaaagccgtctaaccggagaggaggttaattcctgcgtggaggtgctgctcgaagaggcaaaggatctgctgagtgactggctagacagcaccctggggtgtgacgtcaccgacaatagcatcttttctaaactccccaagttctgggagggagactttcaccgagacatggaggctcttaatgtgttgcctccagatgtcctgaccagagtgagcgagtacgtgccggagatcgtgaacttcgtacaaaagatcgtggacaatggatacggatatgtatcgaacggcagtgtctattttgacacagcaaagttcgcaagctcggaaaagcacagctacggaaagttagtgccagaggccgtcggtgaccagaaggcactgcaggaaggcgaaggggacttatcaatatccgcagacaggctctcagagaagagatccccgaacgacttcgccctatggaaagcctccaagccaggggagccctcttggccctgcccctgggggaagggcaggccgggctggcatatagagtgctcagcgatggcggggactctgctcggcgcttctatggacatacatggtggcggctttgacctgcgctttccacatcacgacaacgaacttgcccagtccgaagcctactttgagaacgattgctgggttaggtatttcttacacaccggccacctcaccattgctggctgcaagatgtctaaatccctgaagaattttatcaccatcaaagatgcgctcaaaaagcatagcgccagacagttgagacttgccttcctgatgcattcatggaaagacaccctagattactcgtccaacactatggagagcgccctccagtacgaaaaatttctcaatgaatttttcctgaacgtgaaggacatactgcgcgcgcctgttgatattaccggtcagttcgagaagtggggtgaggaggaggcagaactgaataagaatttttatgataagaaaacagctattcacaaggctctttgtgacaatgtcgacactcggaccgtaatggaagagatgagggcactggtgtcccagtgtaatctttatatggccgctcggaaggcagtgaggaagaggcccaatcaggctctattagagaacatagccctctatctcactcacatgctcaaaatcttcggcgccgtcgaggaggacagtagtctgggcttccccgtgggcggccctggcacgtctttgtctctggaagctactgtgatgccttacctacaagtgctgtcggagtttcgcgagggcgtgaggaagatagccagagaacagaaggtaccggagatattgcagctttctgacgccctgcgagataacatccttccagaattgggggtgcgatttgaagatcacgaaggccttccaacagtagtgaagcttgttgaccgtaacacacttctgaaggaacgggaggaaaagaggcgggtcgaggaagagaagagaaagaagaaagaggaggccgcaaggcgaaagcaggagcaagaggccgccaagctggccaagatgaagatccccccctccgaaatgttcctaagtgagactgataaatattctaaatttgacgagaacgggctccccactcatgacatggaaggcaaagagcttagcaagggccaggcaaagaaactgaaaaaactgtttgaggcccaggagaaactgtataaggagtatctgcagatggctcagaatggctcctttcaatag

SEQ ID NO: 25905 - DNA, 2496 bp, Artificial Sequence
  derived and/or modified sequence
atggctgacagcagcggccagcaggccccagactaccgcagcatcctgagcatcagtgatgaggccgcccgggcccaggccctgaatgagcacctgagcaccaggagctatgtgcagggctacagcctgagccaggctgatgtggatgccttccggcagctgagcgcccctcctgctgacccccagctgttccacgtggcccgctggttccgccacatcgaggccctgctgggcagcccctgtgggaagggccagccctgccgcctgcaggccagcaaaggaagaagagtgcagccccagtggagccccccagctggcacccagccctgccgcctgcacctgtacaacagcctgaccaggaacaaggaggtgttcatcccccaggacggcaagaaggtgacctggtactgctgcggccccaccgtgtatgatgccagccacatgggccacgcccggagctacatcagctttgacatcctgcggcgggtgctgaaggactacttcaagtttgatgtgttctactgcatgaacatcacagacattgatgacaagatcatcaagagggcccggcagaaccacctgtttgagcagtaccgggagaagaggcctgaggccgcccagctgctggaggatgtgcaggccgccctgaagcccttctctgtgaagctgaatgagaccacagatcctgacaagaagcagatgctggagcgcatccagcacgctgtgcagctggccacagagcccctggagaaggctgtgcagagccggctgaccggggaggaggtgaacagctgtgtggaggtgctgctggaggaggccaaggacctgctgagtgactggctggacagcaccctgggctgtgatgtgacagacaacagcatcttcagcaagctgcccaagttctgggagggggacttccaccgggacatggaggccctgaatgtgctgcccccagatgtgctgaccagggtgtctgaatatgtgcctgagatcgtgaactttgtgcagaagatcgtggacaatggctacggctacgtgtccaatggatctgtgtactttgacacagccaagtttgccagcagcgagaagcacagctatggcaagctggtgcctgaggccgtgggggaccagaaggccctgcaggagggggagggggacctgagcatctctgctgaccggctgtctgagaagaggagccccaatgactttgccctgtggaaggccagcaagccaggagagcccagctggccctgcccctggggcaagggccggcccggctggcacatcgagtgcagcgccatggccggcaccctgctgggcgcctccatggacatccacggcggcggctttgacctgcgcttcccccaccacgacaatgagctggcccagagcgaggcctactttgaaaatgactgctgggtgcgctacttcctgcacacaggccacctgaccatcgccggctgcaagatgagcaagagcctgaagaacttcatcaccatcaaggatgccctgaagaagcacagcgcccggcagctgcggctggccttcctgatgcacagctggaaggacaccctggactacagcagcaacaccatggagagcgccctgcagtatgagaagttcctgaatgagttcttcctgaatgtgaaggacatcctgcgggcccctgtggacatcaccggccagtttgagaagtggggcgaggaggaggccgagctgaacaagaacttctatgacaagaagacagccatccacaaggccctgtgtgacaacgtggacaccaggacagtgatggaggagatgagggccctggtgtcccagtgcaacctgtacatggccgccaggaaggctgtgaggaagaggcccaaccaggccctgctggagaacatcgccctgtacctgacccacatgctgaagatctttggagctgtggaggaggacagcagcctgggcttccctgtgggcggccctggcaccagcctgagcctggaggccaccgtgatgccctacctgcaggtgctgtctgagttccgggagggcgtgaggaagatcgcccgggagcagaaggtgcctgagatcctgcagctgagtgatgccctgcgggacaacatcctgcctgagctgggcgtgcgctttgaagatcatgagggcctgcccaccgtggtgaagctggtggacaggaacaccctgctgaaggagcgggaggagaagagaagagtggaggaggagaagaggaagaagaaggaggaggccgcccggaggaagcaggagcaggaggccgccaagctggccaagatgaagatccccccatctgagatgttcctgtctgaaacagacaagtacagcaagtttgatgaaaatggcctgcccacccatgacatggagggcaaggagctgagcaagggccaggccaagaagctgaagaagctgtttgaggcccaggagaagctgtacaaggagtacctgcagatggcccagaatggcagcttccagtag

SEQ ID NO: 25906 - DNA, 2496 bp, Artificial Sequence
  derived and/or modified sequence
atggccgacagcagcggccagcaggcccccgactaccggagcatcctctccatttcagatgaggccgcacgagcgcaggccctgaatgagcacctgagtacacgctcctacgtccaaggatattccctgtcacaggccgatgtggacgctttccgacagttgagcgctcctccagctgacccgcagttattccatgtggcccgctggttcagacacatcgaggctctgctggggtctccgtgcgggaaaggacaaccatgccgactacaggcctcaaaagggcgcagggttcaaccacaatggagccccccagccggcacacagccatgtcgcctccatctgtataattcactgacgcggaacaaggaggtgtttatcccccaagatggcaaaaaggtgacgtggtactgctgcggtccaactgtttatgacgcttctcatatgggccacgccaggagctatattagttttgatattctgcgcagagtgctaaaggattactttaaatttgacgtgttttactgtatgaacatcaccgacattgatgacaagatcataaaaagagctagacaaaatcacctgttcgagcaatatcgagaaaagaggcctgaggctgctcagctgttggaagatgtacaggctgccctgaagcctttctccgtcaaactgaatgagactactgacccagacaaaaaacagatgctcgagaggatccagcatgccgtacagctggcgacggagcccctggagaaagccgttcagtcaaggttgaccggggaagaggtaaactcttgcgttgaagttctgctcgaagaggccaaggaccttttgagtgattggttggactctacgctgggatgtgacgtaacggacaactcaatattctccaagctgccaaaattttgggaaggggattttcatcgagacatggaggccctgaatgtcctaccaccagacgtgctgactagagtttccgagtatgtgcctgagatcgtgaactttgtccagaagatagtggacaacgggtatggctatgtgagcaacggatcagtgtatttcgatactgcaaagttcgcatcttcagagaagcattcatacggtaagttggtgccagaggcagtcggagaccagaaggcgctccaggaaggcgagggagatctctccattagtgccgatcgcctaagtgaaaaacggtctccaaatgactttgccttatggaaagcttcaaagcctggcgagcccagttggccttgcccttggggtaagggacggcccggctggcacatcgaatgtagcgcgatggcaggcaccttgcttggcgcaagcatggacatccatggaggagggttcgatctccggtttcctcaccacgacaacgagctcgcccagtctgaggcctactttgagaacgactgctgggtaaggtattttcttcatactgggcacttgacaattgctggttgtaagatgtcaaaatccctcaaaaactttatcacaattaaggatgccctgaaaaaacactcagctcgacagctgagactcgccttccttatgcattcctggaaagacactctggattattcctccaacacaatggagtctgcactgcagtatgagaagtttctcaacgaattcttcctgaatgtcaaagatattctgagggcccccgtggacatcaccggacaatttgagaaatggggtgaggaggaagcggagttgaacaaaaatttctatgataagaagaccgccatccataaagcgctgtgtgataacgtcgacacacggacagttatggaggaaatgcgagctttggtctcccagtgcaacttgtacatggcagcacggaaggccgtgcgcaaacggcctaaccaggctctgcttgaaaacatagctctgtaccttacccacatgctaaagatcttcggagctgtcgaagaagattcttccctcggcttccccgtgggagggccagggaccagcctcagcctggaagccactgtgatgccatacctgcaggttctctccgagtttcgggagggtgtgagaaagatcgctcgagagcagaaggtgccagagattcttcagctgagtgacgctcttcgggataacattctgcctgagctcggcgtgagattcgaagatcacgagggtctgccaaccgtggtgaaattggtagaccggaacactctattgaaagaaagggaggagaagcgtcgcgttgaggaggagaagcggaaaaagaaagaagaagccgctaggagaaagcaggagcaagaggcagccaagctcgccaaaatgaaaattccccctagcgagatgttcttgtcagagacagataagtactccaagttcgatgaaaatggacttccgactcatgatatggaaggaaaggagctgtccaagggccaggctaaaaagctcaagaagctgttcgaggcccaagagaaactgtacaaagagtatcttcagatggcccagaatggcagttttcagtag

SEQ ID NO: 25907 - DNA, 2496 bp, Artificial Sequence
  derived and/or modified sequence
atggcagattcttccggccagcaagcaccagactataggtctatcctttctatttctgacgaagccgcaagagcgcaagcgttgaatgagcacttgagcacccggtcctatgtccagggctactctctgtcacaggccgatgtggacgcgtttaggcaattgtcagcgcctcctgccgatccgcaactattccatgtagcgcgatggttccgacatatcgaggctctcctgggatccccctgcggaaagggtcagccctgccggctccaagcctcaaagggcaggagggtgcagccccagtggtctccaccagccggtacgcaaccatgtcggctccacctgtacaacagtctcacccgtaacaaagaagtgtttattccgcaggacggaaaaaaggttacctggtattgttgcgggcctaccgtttatgatgcctcacatatgggccacgctcggagttacatctctttcgacatcctgagaagagttctaaaagactacttcaagttcgacgtgttctactgtatgaacatcacagacatcgacgataagatcatcaaacgggctagacagaatcatctattcgaacagtatcgtgagaagcgccctgaggcagcacaactgttggaagacgtgcaagctgctcttaagccgttcagcgtgaagcttaatgagacaactgacccggataagaaacagatgctggagcgcattcagcatgctgttcagctggccacggaaccgctggagaaggcagtccagtcacggctgacaggcgaggaggtaaacagctgtgttgaagtgcttctggaggaagcaaaggacctgctcagcgattggctcgactctacattggggtgtgatgtcacagataatagcatattttctaaacttcccaagttctgggaaggagactttcatagggatatggaggccttgaacgtcttgcccccagacgtcttgactagagtgagcgaatacgtcccagagatcgtgaatttcgtgcagaagatcgtcgataacggatacggctacgtgtcaaatgggagtgtatattttgacacagccaagttcgcttcctccgaaaaacacagctatggaaagctggtccccgaggctgtaggcgaccagaaggcgctccaggagggcgagggggacctaagtatctctgccgatcggcttagtgagaaaagatccccgaatgatttcgctctctggaaggcaagcaagcccggagaaccttcctggccctgcccttggggaaaggggcgaccaggctggcatattgaatgtagcgcgatggcgggaacccttttaggggcttctatggatattcatgggggagggttcgacctcagattccctcaccacgataacgagttggcccagagcgaggcatacttcgagaacgattgctgggtgaggtattttctgcacacaggccacttaactattgcaggttgcaagatgagcaagagcctgaagaatttcataaccatcaaggacgctctgaaaaagcattccgcgaggcagctccggctggccttcctgatgcacagttggaaagatactctcgactactccagtaataccatggaaagcgctctccagtatgaaaaattcctaaacgagttctttctcaacgtgaaagacatactgcgggctccagtggacatcacgggccagtttgagaagtggggagaagaggaggccgagctgaacaaaaacttttacgacaagaaaactgccattcataaggccctgtgtgacaatgtagacacgagaacagttatggaggagatgcgcgcactggtctcacagtgcaacttatacatggccgctcgaaaagccgtacggaagaggcccaatcaagcccttctggagaacatcgccctgtacctcactcacatgctcaaaattttcggagcggtggaagaggacagttccctgggtttccccgtgggcggacccggtacgagcctcagtctcgaagcaaccgtcatgccatacttgcaggtgttaagcgagttccgcgagggcgtcagaaaaatcgccagagaacagaaagtacccgagattctccagctgagtgacgcccttagggacaacattctgcctgaactgggcgttcgattcgaagatcacgagggactgcctactgtggtgaaattggtggacagaaatacattgctaaaggagagagaagagaagcgccgtgtggaagaggagaagcggaaaaaaaaggaggaggctgcgagaaggaaacaggagcaagaagcagctaaattagctaagatgaagatccctccctcagagatgtttctctccgagacagacaagtattccaagtttgatgaaaatgggctccctacccacgacatggagggaaaggagctgtccaaaggacaggctaagaaactcaagaagctttttgaggcacaggaaaaactctacaaggagtaccttcaaatggctcagaacgggagttttcaatag

SEQ ID NO: 25908 - DNA, 2758 bp, Artificial Sequence
  derived and/or modified sequence
ccggggcggcggttgcatcagattctaggaagtgtctgtagccgcagctgcgggtccgggattcccagccatggcagattcctccgggcagcaggctcctgactacaggtccattctgagcattagtgacgaggcagccagggcacaagccctgaacgagcacctcagcacgcgtagctatgtccaggggtactcactgtcccaggcagacgtggacgcgttcaggcagctctcggccccgcccgctgacccccagctcttccacgtggctcggtggttcaggcacatagaagcgctcctgggtagcccctgtggcaaaggccagccctgcaggctccaagcaagcaaaggccggcgtgtgcagccccagtggtcccctcctgctgggacccagccatgcagactccacctttacaacagcctcaccaggaacaaggaagtgttcatacctcaagatgggaaaaaggtgacgtggtattgctgtgggccaaccgtctatgacgcatctcacatggggcacgccaggtcctacatctcttttgatatcttgagaagagtgttgaaggattacttcaaatttgatgtcttttattgcatgaacattacggatattgatgacaagatcatcaagagggcccggcagaaccacctgttcgagcagtatcgggagaagaggcctgaagcggcacagctcttggaggatgttcaggccgccctgaagccattttcagtaaaattaaatgagaccacggatcccgataaaaagcagatgctcgaacggattcagcacgcagtgcagcttgccacagagccacttgagaaagctgtgcagtccagactcacgggagaggaagtcaacagctgtgtggaggtgttgctggaagaagccaaggatttgctctctgactggctggattctacacttggctgtgatgtcactgacaattccatcttctccaagctgcccaagttctgggagggggacttccacagagacatggaagctctgaatgttctccctccagatgtcttaacccgggttagtgagtatgtgccagaaattgtgaactttgtccagaagattgtggacaacggttacggctatgtctccaatgggtctgtctactttgatacagcgaagtttgcttctagcgagaagcactcctatgggaagctggtgcctgaggccgttggagatcagaaagcccttcaagaaggggaaggtgacctgagcatctctgcagaccgcctgagtgagaagcgctctcccaacgactttgccttatggaaggcctctaagcccggagaaccgtcctggccgtgcccttggggaaagggtcgtccgggctggcatatcgagtgctcggccatggcaggcaccctcctaggggcttcgatggacattcacggaggtgggttcgacctccggttcccccaccatgacaatgagctggcacagtcggaggcctactttgaaaacgactgctgggtcaggtacttcctgcacacaggccacctgaccattgcaggctgcaaaatgtcaaagtcactaaaaaacttcatcaccattaaagatgccttgaaaaagcactcagcacggcagttgcggctggccttcctcatgcactcgtggaaggacaccctggactactccagcaacaccatggagtcagcgcttcaatatgagaagttcttgaatgagtttttcttaaatgtgaaagatatccttcgcgctcctgttgacatcactggtcagtttgagaagtggggagaagaagaagcagaactgaataagaacttttatgacaagaagacagcaattcacaaagccctctgtgacaatgttgacacccgcaccgtcatggaagagatgcgggccttggtcagtcagtgcaacctctatatggcagcccggaaagccgtgaggaagaggcccaaccaggctctgctggagaacatcgccctgtacctcacccatatgctgaagatctttggggccgtagaagaggacagctccctgggattcccggtcggagggcctggaaccagcctcagtctcgaggccacagtcatgccctaccttcaggtgttatcagaattccgagaaggagtgcggaagattgcccgagagcaaaaagtccctgagattctgcagctcagcgatgccctgcgggacaacatcctgcccgagcttggggtgcggtttgaagaccacgaaggactgcccacagtggtgaaactggtagacagaaacaccttattaaaagagagagaagaaaagagacgggttgaagaggagaagaggaagaagaaagaggaggcggcccggaggaaacaggaacaagaagcagcaaagctggccaagatgaagattccccccagtgagatgttcttgtcagaaaccgacaaatactccaagtttgatgaaaatggtctgcccacacatgacatggagggcaaagagctcagcaaagggcaagccaagaagctgaagaagctcttcgaggctcaggagaagctctacaaggaatatctgcagatggcccagaatggaagcttccagtgagggggcacaggactgactttttaaaccattgtggactagtggctgctgtctgcctcagtgacaatgtcccagcgctcctatcatgtttacagtcacccttgggtcctaaattaagagttgtgttcatgtaggttcgtgtcgtcgttggctctgagacattgataataaatttttctcaacagtgagaccctc

SEQ ID NO: 25909 - DNA, 2496 bp, Artificial Sequence
  derived and/or modified sequence
atggccgacagcagcggccagcaggcccccgactacagaagcatcctgagcatcagcgacgaggccgccagagcccaggccctgaacgagcacctgagcaccagaagctacgtgcagggctacagcctgagccaggccgacgtggacgccttcagacagctgagcgccccccccgccgacccccagctgttccacgtggccagatggttcagacacatcgaggccctgctgggcagcccctgcggcaagggccagccctgcagactgcaggccagcaagggcagaagagtgcagccccagtggagcccccccgccggcacccagccctgcagactgcacctgtacaacagcctgaccagaaacaaggaggtgttcatcccccaggacggcaagaaggtgacctggtactgctgcggccccaccgtgtacgacgccagccacatgggccacgccagaagctacatcagcttcgacatcctgagaagagtgctgaaggactacttcaagttcgacgtgttctactgcatgaacatcaccgacatcgacgacaagatcatcaagagagccagacagaaccacctgttcgagcagtacagagagaagagacccgaggccgcccagctgctggaggacgtgcaggccgccctgaagcccttcagcgtgaagctgaacgagaccaccgaccccgacaagaagcagatgctggagagaatccagcacgccgtgcagctggccaccgagcccctggagaaggccgtgcagagcagactgaccggcgaggaggtgaacagctgcgtggaggtgctgctggaggaggccaaggacctgctgagcgactggctggacagcaccctgggctgcgacgtgaccgacaacagcatcttcagcaagctgcccaagttctgggagggcgacttccacagagacatggaggccctgaacgtgctgccccccgacgtgctgaccagagtgagcgagtacgtgcccgagatcgtgaacttcgtgcagaagatcgtggacaacggctacggctacgtgagcaacggcagcgtgtacttcgacaccgccaagttcgccagcagcgagaagcacagctacggcaagctggtgcccgaggccgtgggcgaccagaaggccctgcaggagggcgagggcgacctgagcatcagcgccgacagactgagcgagaagagaagccccaacgacttcgccctgtggaaggccagcaagcccggcgagcccagctggccctgcccctggggcaagggcagacccggctggcacatcgagtgcagcgccatggccggcaccctgctgggcgccagcatggacatccacggcggcggcttcgacctgagattcccccaccacgacaacgagctggcccagagcgaggcctacttcgagaacgactgctgggtgagatacttcctgcacaccggccacctgaccatcgccggctgcaagatgagcaagagcctgaagaacttcatcaccatcaaggacgccctgaagaagcacagcgccagacagctgagactggccttcctgatgcacagctggaaggacaccctggactacagcagcaacaccatggagagcgccctgcagtacgagaagttcctgaacgagttcttcctgaacgtgaaggacatcctgagagcccccgtggacatcaccggccagttcgagaagtggggcgaggaggaggccgagctgaacaagaacttctacgacaagaagaccgccatccacaaggccctgtgcgacaacgtggacaccagaaccgtgatggaggagatgagagccctggtgagccagtgcaacctgtacatggccgccagaaaggccgtgagaaagagacccaaccaggccctgctggagaacatcgccctgtacctgacccacatgctgaagatcttcggcgccgtggaggaggacagcagcctgggcttccccgtgggcggccccggcaccagcctgagcctggaggccaccgtgatgccctacctgcaggtgctgagcgagttcagagagggcgtgagaaagatcgccagagagcagaaggtgcccgagatcctgcagctgagcgacgccctgagagacaacatcctgcccgagctgggcgtgagattcgaggaccacgagggcctgcccaccgtggtgaagctggtggacagaaacaccctgctgaaggagagagaggagaagagaagagtggaggaggagaagagaaagaagaaggaggaggccgccagaagaaagcaggagcaggaggccgccaagctggccaagatgaagatcccccccagcgagatgttcctgagcgagaccgacaagtacagcaagttcgacgagaacggcctgcccacccacgacatggagggcaaggagctgagcaagggccaggccaagaagctgaagaagctgttcgaggcccaggagaagctgtacaaggagtacctgcagatggcccagaacggcagcttccagtag

SEQ ID NO: 25910 - protein, 253 aa, Artificial Sequence
  derived and/or modified sequence
MGSDAWVGLWRPHRPRGPIAAHYGGPGPKYKLPPNTGYALHDPSRPRAPAFTFGARFPTQQTTCGPGPGHLVPARMTVRGTDGAPAYSIYGRPRRSAPFLTPGPGRYFPERAGNATYPSAPRHTIAPRNWGVQAEQQSPGPAAYTVPSLLGPRVIGKVSAPTCSIYGRRAAGSFFEDLSKTPGPCAYQVVSPGVYKSRAPQFTILARTSLPQDNTRKPGPAAYNVDQHRKPRGWSFGIRHSDYLAPLVTDADN

SEQ ID NO: 25911 - DNA, 762 bp, Artificial Sequence
  derived and/or modified sequence
atgggcagcgacgcctgggtgggcctgtggagaccccacagacccagaggccccatcgccgcccactacggcggccccggccccaagtacaagctgccccccaacaccggctacgccctgcacgaccccagcagacccagagcccccgccttcaccttcggcgccagattccccacccagcagaccacctgcggccccggccccggccacctggtgcccgccagaatgaccgtgagaggcaccgacggcgcccccgcctacagcatctacggcagacccagaagaagcgcccccttcctgacccccggccccggcagatacttccccgagagagccggcaacgccacctaccccagcgcccccagacacaccatcgcccccagaaactggggcgtgcaggccgagcagcagagccccggccccgccgcctacaccgtgcccagcctgctgggccccagagtgatcggcaaggtgagcgcccccacctgcagcatctacggcagaagagccgccggcagcttcttcgaggacctgagcaagacccccggcccctgcgcctaccaggtggtgagccccggcgtgtacaagagcagagccccccagttcaccatcctggccagaaccagcctgccccaggacaacaccagaaagcccggccccgccgcctacaacgtggaccagcacagaaagcccagaggctggagcttcggcatcagacacagcgactacctggcccccctggtgaccgacgccgacaactag

SEQ ID NO: 25912 - DNA, 762 bp, Artificial Sequence
  derived and/or modified sequence
atgggttctgacgcctgggtaggcctgtggcgtccacatcgaccacgtggccccatcgccgcccactatggaggccccggtcccaaatacaagttaccacccaatactggctacgccctccacgacccgtctaggccgcgggctcctgccttcaccttcggagcccgtttcccaacacagcagactacctgtgggcccgggcccggacatctggtacctgcacgcatgaccgtccggggaacggacggagcccctgcttattcaatttatgggcggcctagacggagcgcaccttttctcacccccggacccgggagatacttcccagaaagggccggtaacgccacttatccaagtgccccccgccatactatcgctcctagaaattggggagtgcaggcagaacagcagagcccgggtcctgccgcgtatactgtcccctccctgttggggccacgggtaattggcaaagtctcagctcccacctgctcaatctatggtcgcagagccgcagggagcttttttgaagatttatctaaaacacccgggccgtgtgcctatcaggtcgtcagccccggtgtctacaagtcccgggccccccagtttactattcttgcccgtaccagcctcccacaggacaataccaggaaaccgggccctgccgcctataacgtagaccagcacagaaagccacgagggtggtcatttgggatcaggcatagcgattatttagccccacttgtcaccgacgccgacaactag

SEQ ID NO: 25913 - DNA, 762 bp, Artificial Sequence
  derived and/or modified sequence
atgggatccgatgcctgggtgggcctgtggcggccacatcgaccaagggggcccattgctgctcattatggtggcccaggacctaagtataaattgcctccgaatacagggtatgcacttcatgacccaagtcggcccagggcccccgccttcacatttggtgcacggtttccaacgcaacagacaacatgcgggccgggtcccggacacctcgtccctgctcgaatgactgtgcgcggtactgacggtgccccagcctacagtatctacgggcggcctagaagaagcgctcctttcctgacacctggtccgggcagatatttcccagagagagctggcaatgccacatatcctagtgcgcctagacatacgatagctccccgcaactggggagtgcaggcagagcagcagtccccaggcccagcagcatatacggtgccttcgctgctcggtccccgggtgatcgggaaagtgtcagccccaacttgtagcatttatgggaggcgggctgcaggaagcttcttcgaggatctgtctaagactccaggcccttgcgcctaccaggtcgtgtctcctggcgtctataaatctcgagcccctcaattcaccattctggctcgaacctcactgccgcaagataacacacggaagcccggtcctgccgcttataacgtcgatcagcacaggaaacctagaggatggtcctttggcatacggcatagtgactaccttgcaccgctagtgacagatgcagataattag

SEQ ID NO: 25914 - DNA, 762 bp, Artificial Sequence
  derived and/or modified sequence
atgggcagtgatgcctgggtgggcctgtggaggccccaccggccccggggccccatcgccgcccactatggaggccctggccccaagtacaagctgccccccaacacaggctacgccctgcatgaccccagccggccccgggccccagccttcacctttggagcccgcttccccacccagcagaccacctgtggccctggccctggccacctggtgcctgccaggatgacagtgcggggcacagatggagccccagcctacagcatctacggccggccccggcgcagcgcccccttcctgaccccaggccctggccgctacttccctgagagagctggaaatgccacctaccccagcgcccccaggcacaccatcgcccccaggaactggggcgtgcaggccgagcagcagagccctggccctgctgcctacacagtgcccagcctgctgggcccccgggtgattggcaaggtgtctgcccccacctgcagcatctacggccggcgggctgctggcagcttctttgaggacctgagcaagaccccaggcccctgtgcctaccaggtggtgtcccctggggtgtacaagagccgggccccccagttcaccatcctggcccggaccagcctgccccaggacaacaccaggaagccaggccctgctgcctacaacgtggaccagcacaggaagccccggggctggagctttggcatccgccacagcgactacctggcccccctggtgacagatgctgacaactag

SEQ ID NO: 25915 - DNA, 762 bp, Artificial Sequence
  derived and/or modified sequence
atgggcagcgacgcctgggtgggcctgtggcggccccaccggcccagaggacctatagctgcgcattacggtgggccggggcccaaatataaacttcctccaaacaccggttatgcgcttcatgatcctagtcgcccgagagcccctgcattcacctttggagctaggtttccgacccagcagactacttgtgggcctggtccaggtcacctcgttcccgcgcggatgacggtaaggggcaccgacggagctcccgcttattctatctacggccgccctcgtaggagcgccccatttttgactcccggccctggccggtatttccccgagcgagcaggcaatgccacttacccaagcgctccacgtcatacaattgcccctcggaattggggagttcaagcggagcagcagtcacccggcccagcagcatatactgtaccctctctgctgggccccagagtgatcggaaaggtgtcggcccccacatgcagtatctacggcagacgcgccgccggatcgttcttcgaggatcttagcaagacacccggcccctgcgcatatcaagtggtttccccgggcgtctacaaaagtagagctccgcagtttactatacttgcacgcacttcattaccacaggacaacaccagaaaacccggccctgccgcctataatgttgaccagcacaggaagccccgcggatggagttttgggattagacattccgactacttggctcccctggtgaccgacgcagacaattag

SEQ ID NO: 25916 - DNA, 762 bp, Artificial Sequence
  derived and/or modified sequence
atgggcagcgacgcctgggtgggcctgtggcggccccaccggccccgtggaccaatcgctgcccattatggaggccctggccctaaatacaaactccccccgaataccggctatgctctccacgacccaagccgaccgcgggcccccgccttcacctttggagctcgctttcctacccaacagacaacatgcggtccagggcccgggcacttggttccagccagaatgaccgtgcggggcacagacggagccccagcctattcgatctacggtcgcccccgacggagcgctcctttcttgacaccaggaccaggaaggtactttcctgagagagccggcaatgctacatacccaagtgcgccaagacacactatcgcaccccgtaactggggcgtgcaagctgaacagcagagccctggtccagccgcctacaccgttccctctctcttgggtcctcgagtgatcgggaaggtgtcggcacccacctgctcgatatatggcagacgggcagctggctccttctttgaagatctaagcaagacccctggcccctgtgcttaccaggtggtttcaccaggcgtgtacaaaagtagggcccctcagtttacaatcctggcaaggacatccctgccacaggataacacgaggaagcctggtcccgctgcatacaacgtggatcagcaccggaagcctaggggctggagcttcggaatccgtcattccgattatctcgccccactggttactgatgccgacaactag

SEQ ID NO: 25917 - DNA, 970 bp, Artificial Sequence
  derived and/or modified sequence
gaagcgggaaagggccacaatggggtctgggaggtgggcggggcggagcggggatgtccagccacgtcgctttgttttcccacgctaggagctaccacaacaggtgctgcgagccgtaagcgccccccacccgcgctatgggctcggacgcctgggtgggcctttggcggccacaccggccccgcggccccatcgcggcgcactacggaggccccgggcccaaatacaagctgccgcccaacaccggctacgccctgcatgacccgtcgcggccgcgcgcccccgccttcaccttcggcgcgcgcttccccacgcagcagacgacgtgcggccccgggccaggccacctggtgcccgctcgcatgaccgtgcgcggcaccgacggcgcccccgcctactccatctacggccgcccacgccgctcagcgcccttcctcactccgggacctggcaggtacttcccggagcgagcggggaacgcgacgtaccccagtgcgcctcggcacaccattgctccccgaaactggggtgtccaggcggaacagcagagcccaggtcccgcggcctatacggtgccctcgctcttgggtccgcgcgtcatcggcaaagtctccgccccaacttgctccatctacggccgcagagcggctggcagtttcttcgaggacctcagcaagaccccgggcccctgcgcctatcaggtcgtgagtccaggggtctacaagtcccgggccccccagttcacgattctggcgcggacttcgctcccccaagacaacactcggaagccagggcccgcggcctacaacgtggatcagcaccggaagccccgcggctggagtttcgggatccggcactcggactacctggccccgctggtgaccgacgcggacaactgacccgccaggcgggagcggccccacacgtgtttgcttaaagtctgcgagtccgcatcgtgtccgcctctctc

SEQ ID NO: 25918 - DNA, 762 bp, Artificial Sequence
  derived and/or modified sequence
atgggctcggacgcctgggtgggcctttggcggccacaccggccccgcggccccatcgcggcgcactacggaggccccgggcccaaatacaagctgccgcccaacaccggctacgccctgcatgacccgtcgcggccgcgcgcccccgccttcaccttcggcgcgcgcttccccacgcagcagacgacgtgcggccccgggccaggccacctggtgcccgctcgcatgaccgtgcgcggcaccgacggcgcccccgcctactccatctacggccgcccacgccgctcagcgcccttcctcactccgggacctggcaggtacttcccggagcgagcggggaacgcgacgtaccccagtgcgcctcggcacaccattgctccccgaaactggggtgtccaggcggaacagcagagcccaggtcccgcggcctatacggtgccctcgctcttgggtccgcgcgtcatcggcaaagtctccgccccaacttgctccatctacggccgcagagcggctggcagtttcttcgaggacctcagcaagaccccgggcccctgcgcctatcaggtcgtgagtccaggggtctacaagtcccgggccccccagttcacgattctggcgcggacttcgctcccccaagacaacactcggaagccagggcccgcggcctacaacgtggatcagcaccggaagccccgcggctggagtttcgggatccggcactcggactacctggccccgctggtgaccgacgcggacaactga

SEQ ID NO: 25919 - DNA, 465 bp, Artificial Sequence
  derived and/or modified sequence
atgctcccaggctacgccctgcatcccgtcgcggccgcgcgcccccgccttcaccttcggcgcgcgcttccccacgcagcagacgacgtgcggccccgggccaggccacctggtgcccgctcgcatgaccgtgcgcggcaccgacggcgcccccgcctactccatctacggccgcccacgccgctcagcgcccttcctcactccgggacctggtcaggacccccgggcccctggccaccccaacgccgaactgcctccagggaggcccacctgggaacccccgacctgaaccccgagtccccctcggataccctaacatattcggtacccccatatccggatctcaaatcccaaaccccgccacggggctttgataaatcgtggctcagactccccactagtcccaggaccccatctcgggtacccaccaggctcccacgcagttctagccccccacacccttga

SEQ ID NO: 25920 - DNA, 762 bp, Artificial Sequence
  derived and/or modified sequence
atgggatcagacgcctgggtgggcctgtggcggcctcaccggcctaggggtcctatagcagcgcactatgggggaccgggaccaaagtacaagttgccacccaatacaggctacgcgctgcacgatccttctagaccacgggcaccagcctttacatttggggctcgcttccccacccagcagaccacatgtggccctggcccaggtcatctcgttccagctcgaatgacagtaagagggacggacggtgccccagcgtacagcatctatgggaggcccaggcgatcggctccttttcttaccccgggtcccggtcggtattttcctgagagggcaggaaatgcgacctaccccagcgccccaaggcacacaatagcacctcgaaattggggagtgcaagcagaacagcagtcaccaggaccagctgcctatacagtgcccagcttgctgggacccagagtcatcgggaaagtatctgctcccacatgcagcatatacgggaggcgagctgctgggagtttcttcgaggacctctccaagaccccaggcccatgcgcatatcaagtggtctcccccggtgtgtacaaatcaagggcaccccagtttacgatactggccagaacctcacttcctcaggacaacactcggaaacctggacccgctgcttataatgtggaccaacatcgcaaaccacgtgggtggtcatttggtatccgacatagcgactacctcgcaccgttggtgaccgatgctgataactag

SEQ ID NO: 25921 - DNA, 762 bp, Artificial Sequence
  derived and/or modified sequence
atgggatctgatgcatgggttgggctctggaggccacacagacctcgcggacccatcgcagcccactacggcggacccggtcccaaatacaaactcccccctaacaccgggtatgccctgcacgacccgagcaggccacgcgcaccagccttcacgtttggcgctaggtttccaacccagcagactacatgtggcccaggccctggccacctggtgcccgctcggatgaccgtgagggggacagacggggcacccgcttactccatctatggccgaccaaggaggtctgcgcctttcctgaccccagggcctggtcggtacttcccagagcgggcaggtaacgcaacctacccctctgccccacggcacaccatcgcaccacgaaattggggcgtccaagctgagcagcagtctcccggacctgcagcatatactgtgccctccctactgggtcctcgtgtaatcggtaaggttagcgccccaacctgctccatctacggtaggagggctgccggaagcttcttcgaggaccttagtaaaacccccggaccgtgtgcttaccaggtggtgtcaccaggtgtctacaagtctcgcgcacctcagttcacaattctcgctcgaactagcttacctcaggacaacacgcggaagcctggcccagccgcttacaatgtggaccagcatcggaagccacggggatggagtttcggtattcgccactctgactatttggccccacttgtcaccgacgcggacaactag

SEQ ID NO: 25922 - DNA, 303 bp, Artificial Sequence
  derived and/or modified sequence
atgggcatcagcgaggagggcaacctgctgagcaccgtgagccccaccgtgaaggccctgttcggcaagaccagagtgagccccatcttccccttcagccccagaagccccttccagcccctgatccccagaacccccggcagcccctggggccccgtgggccccgccagccccctgggccccggcttccccatcggccccatgggccccggcaagcccgtgggccccaagggccccatgctgcccctgggccccagcggccccgtgggccccaccagccccctgttccccttctgcccctag

SEQ ID NO: 25923 - DNA, 303 bp, Artificial Sequence
  derived and/or modified sequence
atgggcatcagcgaggagggcaacctgctgagcacagtgagccccaccgtgaaggccctgtttgggaagaccagggtgagccccatcttccccttcagccccaggagccccttccagcccctcatccccaggaccccaggcagcccctggggccctgtgggccctgccagccccctgggccctggcttccccatcggccccatgggccctgggaagcctgtgggccccaagggccccatgctgcccctgggccccagcggccctgtgggccccaccagccccctcttccccttctgcccctag

SEQ ID NO: 25924 - DNA, 336 bp, Artificial Sequence
  derived and/or modified sequence
atggtgagcctgtgggtggaggacaccttcctgagccccggcttcgggttcgcacacgtggcatgtagtggccttggaatgaaacaaaagagaaaagccgcatcgtctgagcccacatccgaagtggcattaggaggcagtgccgggccagttaggtcccacctgcatcctgaagggttactctggtgtagccgatgcttcttcagcctccgacccaagggcaccgagccacccggtcgttccgcgggactgcagggtgcgactgagaggagcggttggaccagcgtccaagcccaggcgcaggcatgtgaaaacctggtgcccgctgcggtatag

SEQ ID NO: 25925 - DNA, 150 bp, Artificial Sequence
  derived and/or modified sequence
gtgggccccaccggccccgagggcccccggggcaacatcggccccctcggtcctaccggattacctgggcccatggggccaatcggaaagcctggccccaagggagaggccggcccgacaggcccccaagtttttccgttttgcatctag

SEQ ID NO: 25926 - DNA, 147 bp, Artificial Sequence
  derived and/or modified sequence
gtgggtcccactggtcctgaggggccaaggggcaacattgggcctttgggcccaactggtttaccgggccccatgggccctattggaaagcctggtcccaagggagaagctggacccacggggccccaggttttccctttttgtatc

SEQ ID NO: 25927 - protein, 193 aa, Artificial Sequence
  derived and/or modified sequence
MALSTDYALRTGAFEPAEASVNPQDLQGSLQELKERALSRYNLVRGQGPERLVSGSDDFTLFLWSPAEDKKPLTRMTGHQALINQVLFSPDSRIVASASFDKSIKLWDGRTGKYLASLRGHVAAVYQIAWSADSRLLVSGSSDSTLKVWDVKAQKLAMDLPGHADEVYAVDWSPDGQRVASGGKDKCLRIWRR

SEQ ID NO: 25928 - DNA, 582 bp, Artificial Sequence
  derived and/or modified sequence
atggcactcagcactgactatgccctgcgaactggagccttcgaacccgcagaagcctccgtgaacccccaggaccttcagggctccttgcaggagctcaaggagagggccctaagtcgttataatctggtcagaggtcaggggccggagcgccttgttagtggaagcgacgattttacgctgttcctgtggagcccggctgaggacaaaaagccccttactaggatgaccggccatcaggccctgattaaccaggtcttgttttctcctgactcgaggatcgtcgctagcgccagcttcgacaagtccattaaactttgggatggtcggactggcaagtacctcgcttctctcagagggcacgttgcagctgtgtaccagatagcctggtctgccgactcacggctgctagtgagtggctcttcagattccaccttgaaggtgtgggatgtgaaggcccagaagctcgcaatggacctcccgggccacgcagacgaagtgtatgctgtcgattggtctcctgacggacagagagtggctagcggggggaaggacaaatgtctaaggatttggagacggtag

SEQ ID NO: 25929 - DNA, 582 bp, Artificial Sequence
  derived and/or modified sequence
atggctctatcaacagattatgctcttcggacaggcgctttcgagccagctgaagcgagtgtgaacccacaggacctgcaagggagcctgcaggagctgaaggaaagagctctatcaaggtacaacttagtccgcgggcagggcccagaacgcctcgtgtccggcagtgacgacttcaccctgttcctatggagcccagcagaggataaaaaacccttgacacgcatgacaggccaccaggccctgattaatcaggtcctgttctctcccgacagccgcatcgtcgccagtgcgagctttgataagtcaatcaagttgtgggacggacggactggcaagtaccttgcctcactgcgaggacacgtagccgcagtgtatcagattgcctggagcgcggactccaggctgctggtgagtgggagttccgatagtactctgaaggtgtgggatgtgaaggcacaaaaactggccatggaccttccgggacatgccgacgaggtctacgcagtggactggagtcctgatggccagagggtggcaagcggaggcaaggacaaatgcctgaggatctggcgtaggtag

SEQ ID NO: 25930 - DNA, 582 bp, Artificial Sequence
  derived and/or modified sequence
atggccctgagcacagattatgccctgaggactggagcctttgagcctgctgaggcctctgtgaacccccaggacctgcagggcagcctgcaggagctgaaggagcgggccctgagccgctacaacctggtgcggggccagggccctgagcggctggtgtctggcagtgatgacttcaccctcttcctgtggagccctgctgaggacaagaagcccctgaccaggatgacaggccaccaggccctgatcaaccaggtgctcttctccccagacagccgcatcgtggccagcgccagctttgacaagagcatcaagctgtgggatggccgcacaggcaagtacctggccagcctgcggggccacgtggccgctgtgtaccagatcgcctggagcgctgacagccggctgctggtgtctggcagcagtgacagcaccctgaaggtgtgggatgtgaaggcccagaagctggccatggacctgcccggccacgcagatgaggtgtatgctgtggactggagcccagatggccagagggtggccagcggcggcaaggacaagtgcctgcgcatctggaggaggtag

SEQ ID NO: 25931 - DNA, 582 bp, Artificial Sequence
  derived and/or modified sequence
atggccctgagcaccgactacgccctgcggaccggcgccttcgagcctgccgaggcatccgtcaatccccaggaccttcagggttctctgcaggaactgaaggaacgggccctaagccgatataatctcgtccgtggccagggaccagagaggctggtgtctggatctgacgacttcactttgttcctctggtcccccgccgaagacaaaaaacccctcacgaggatgaccggacaccaggccttaattaatcaggttctgttttcccccgattctcggatcgttgctagtgcctcctttgacaaaagtatcaagttgtgggatgggagaaccgggaagtaccttgcctcgttgcgcggtcacgttgcagccgtgtaccagattgcctggagtgctgattcacgtctgcttgtgagcgggagcagcgatagtactctgaaagtatgggacgttaaagcccagaagctcgctatggaccttcctgggcatgccgacgaagtttatgctgtcgactggtctccagacggacaaagagtagcatctggcggaaaagacaagtgcctgcgcatctggcggcgctag

SEQ ID NO: 25932 - DNA, 582 bp, Artificial Sequence
  derived and/or modified sequence
atggccctgagcaccgactacgccctgcggaccggcgccttcgagccggccgaggcttccgtcaaccctcaagaccttcaagggtcactccaggagttaaaagagcgggcacttagtaggtataatcttgtgcggggtcaaggacctgagagactcgtgtcaggaagcgacgatttcaccctgttcctgtggagccccgcagaggataaaaagccactgacccgaatgacaggccatcaggcgcttatcaaccaggtgctgttctcacccgattcaagaatcgtggcatccgcttcgtttgacaaaagcatcaagctgtgggatgggcgcaccgggaagtatctggcgagtctgaggggtcatgtggctgccgtctatcagatcgcatggtcggccgactctcggttgctggtgtccggcagtagcgatagcactctcaaggtgtgggacgtgaaagctcaaaagctggccatggaccttccaggacatgctgacgaggtgtatgctgtcgactggagccccgatgggcaaagagtagcatcagggggtaaagataaatgcctgagaatctggcgccgctag

SEQ ID NO: 25933 - DNA, 582 bp, Artificial Sequence
  derived and/or modified sequence
atggccctgagcactgattatgccctgaggacaggtgcgtttgagccggcagaagcctctgtgaatccccaggatctgcaggggagcttacaggaacttaaggaaagagctctgtcccgatacaacctcgtgcggggacagggacctgagaggcttgtttctggcagcgacgatttcaccctgtttctgtggagcccagccgaggacaagaaacccctgacaaggatgacagggcaccaggctctgataaaccaggtcctcttctcccccgactcaagaatcgttgcctctgccagtttcgacaagagcatcaagttatgggacggcagaactggcaaatacttagcttcacttcgcggtcacgttgctgctgtgtatcagattgcatggtccgcggattcacgactgctggttagcggatcctcggacagtacactcaaggtttgggatgtcaaggctcagaagttggccatggacctgccagggcacgctgatgaagtctatgcagtggattggtcaccggatggacaacgcgtcgcttccgggggtaaagataagtgtctaagaatttggagacgttag

SEQ ID NO: 25934 - DNA, 582 bp, Artificial Sequence
  derived and/or modified sequence
atggccctctccaccgattacgccctcaggacaggcgcttttgagcccgctgaagcatcagttaaccctcaggacctgcagggcagcttacaggagttgaaggagagggctctctctagatacaatctggtcaggggccagggtcccgagagactggtatccggatccgatgatttcactctgttcctatggagtccagccgaggacaaaaagccacttacccggatgacaggccaccaggctctcatcaaccaagtgctcttttcaccagattcccgtatcgtggccagcgcaagtttcgacaagtcgattaaattgtgggacggccgtactggaaagtaccttgcgagtctacgcggtcatgtggctgccgtttatcaaatcgcttggtctgcagatagtcgccttctcgtctcaggcagcagcgactctacccttaaagtctgggatgtcaaagctcaaaagttggctatggatctgccaggacatgcagacgaagtttacgctgttgattggagccccgacggccagcgagtggccagcggaggtaaagacaagtgcttgcgtatctggaggcggtag

SEQ ID NO: 25935 - DNA, 582 bp, Artificial Sequence
  derived and/or modified sequence
atggccctgagcaccgactacgccctgagaaccggcgccttcgagcccgccgaggccagcgtgaacccccaggacctgcagggcagcctgcaggagctgaaggagagagccctgagcagatacaacctggtgagaggccagggccccgagagactggtgagcggcagcgacgacttcaccctgttcctgtggagccccgccgaggacaagaagcccctgaccagaatgaccggccaccaggccctgatcaaccaggtgctgttcagccccgacagcagaatcgtggccagcgccagcttcgacaagagcatcaagctgtgggacggcagaaccggcaagtacctggccagcctgagaggccacgtggccgccgtgtaccagatcgcctggagcgccgacagcagactgctggtgagcggcagcagcgacagcaccctgaaggtgtgggacgtgaaggcccagaagctggccatggacctgcccggccacgccgacgaggtgtacgccgtggactggagccccgacggccagagagtggccagcggcggcaaggacaagtgcctgagaatctggagaagatag

SEQ ID NO: 25936 - protein, 154 aa, Artificial Sequence
  derived and/or modified sequence
MASASARGNQDKDAHFPPPSKQSLLFCPKSKLHIHRAEISKIMRECQEESFWKRALPFSLVSMLVTQGLVYQGYLAANSRFGSLPKVALAGLLGFGLGKVSYIGVCQSKFHFFEDQLRGAGFGPQHNRHCLLTCEECKIKHGLSEKGDSQPSAS

SEQ ID NO: 25937 - DNA, 465 bp, Artificial Sequence
  derived and/or modified sequence
atggccagcgccagcgccagaggcaaccaggacaaggacgcccacttccccccccccagcaagcagagcctgctgttctgccccaagagcaagctgcacatccacagagccgagatcagcaagatcatgagagagtgccaggaggagagcttctggaagagagccctgcccttcagcctggtgagcatgctggtgacccagggcctggtgtaccagggctacctggccgccaacagcagattcggcagcctgcccaaggtggccctggccggcctgctgggcttcggcctgggcaaggtgagctacatcggcgtgtgccagagcaagttccacttcttcgaggaccagctgagaggcgccggcttcggcccccagcacaacagacactgcctgctgacctgcgaggagtgcaagatcaagcacggcctgagcgagaagggcgacagccagcccagcgccagctag

SEQ ID NO: 25938 - DNA, 465 bp, Artificial Sequence
  derived and/or modified sequence
atggccagcgcatccgccagaggaaaccaagacaaagatgcacatttccctccgcccagtaagcagtcactattattctgccccaagtcgaaactgcatatccaccgagccgagattagtaagattatgagggagtgccaggaggaaagtttctggaagagggcactccccttcagccttgtcagtatgctcgtgactcaagggcttgtgtaccagggctacctggcagccaattcccgctttggcagcctgcctaaggtggctcttgcaggccttctggggtttggtctcggaaaggtatcatacatcggggtgtgccagtccaagttccacttcttcgaggatcagttacgcggagccggctttggaccgcagcataatcgtcactgcctgctcacttgcgaagagtgcaaaataaagcacggccttagtgaaaagggtgactctcagccgtccgcctcgtag

SEQ ID NO: 25939 - DNA, 465 bp, Artificial Sequence
  derived and/or modified sequence
atggccagcgccagcgcccggggcaaccaggacaaggatgcccacttccccccacccagcaagcagagcctgctcttctgccccaagagcaagctgcacatccacagagctgagatcagcaagatcatgagggagtgccaggaggagagcttctggaagagggccctgcccttcagcctggtgtccatgctggtgacccagggcctggtgtaccagggctacctggccgccaacagcagatttggcagcctgcccaaggtggccctggccggcctgctgggcttcggcctgggcaaggtgtcctacatcggcgtgtgccagagcaagttccacttctttgaggaccagctgcggggggccggcttcggcccccagcacaacagacactgcctgctgacctgtgaggagtgcaagatcaagcacggcctgtctgagaagggggacagccagcccagcgccagctag

SEQ ID NO: 25940 - DNA, 465 bp, Artificial Sequence
  derived and/or modified sequence
atggccagcgccagcgcccggggcaaccaggacaaggacgcccactttcccccaccctccaaacagtctttattgttttgcccgaaatcaaaactgcacattcaccgtgcagaaatatctaaaattatgagggagtgccaggaggagtcattttggaaaagagccctgcccttttccctggttagtatgctggttacccagggcctggtgtatcagggttatctggcagcgaactccagatttgggagccttcccaaggtagccctggctgggctgctcgggtttggcctgggaaaagtgtcctatattggcgtctgccagtctaaattccactttttcgaggaccaattaagaggcgcgggcttcggccctcaacacaaccggcactgtcttctcacttgtgaggagtgcaagatcaaacatgggctgagcgagaaaggtgacagtcaacctagtgcctcttag

SEQ ID NO: 25941 - DNA, 465 bp, Artificial Sequence
  derived and/or modified sequence
atggcatccgcttctgccaggggtaaccaagacaaagacgcccatttcccccctccgtccaaacagtctctgctcttttgcccaaagagcaaattgcatattcaccgagcggagatcagcaaaatcatgcgggagtgtcaggaggagtccttttggaagagagccctccccttcagtctggtgtcaatgctcgtgacccagggcctcgtctatcaaggttacctggccgcaaattccagatttggatccctgccgaaagtagctcttgccggtcttctcggcttcggcctcgggaaggttagctacattggcgtttgtcagtcaaagtttcatttcttcgaggaccagctgcgcggagcgggatttggtcctcagcacaatcggcactgtctgctcacatgcgaagaatgcaagatcaaacacggactttccgaaaaaggggacagtcagccttctgccagctag

SEQ ID NO: 25942 - DNA, 1163 bp, Artificial Sequence
  derived and/or modified sequence
aggcgagggggcggagcaagagaagaaaacacaaagggccggaaggaagccggggagacaggtggggtactcgggaagctggagcgggccggcggtgcagtcacgggggagcgaggcctgctgggcttggcaacgagggactcggcctcggaggcgacccagaccacacagacactgggtcaaggagtaagcagaggataaacaactggaaggagagcaagcacaaagtcatcatggcttcagcgtctgctcgtggaaaccaagataaagatgcccattttccaccaccaagcaagcagagcctgttgttttgtccaaaatcaaaactgcacatccacagagcagagatctcaaagattatgcgagaatgtcaggaagaaagtttctggaagagagctctgcctttttctcttgtaagcatgcttgtcacccagggactagtctaccaaggttatttggcagctaattctagatttggatcattgcccaaagttgcacttgctggtctcttgggatttggccttggaaaggtatcatacataggagtatgccagagtaaattccatttttttgaagatcagctccgtggggctggttttggtccacagcataacaggcactgcctccttacctgtgaggaatgcaaaataaagcatggattaagtgagaagggagactctcagccttcagcttcctaaattctgtgtctgtgactttcgaagttttttaaacctctgaatttgtacacatttaaaatttcaagtgtactttaaaataaaatacttctaatggaacaaaaacattgtgtctgtcactcactgaaatgtattccgtggaaggctttcaagtgaactaagcgttacatgtttttctgctctttaagaacatgtcggggcatggcgcagtggctcatgcctgtaatcccagtactttgggaggccgaggcaggcagatcatttgaggtcaggagttcatgaccagcttggccaacatggtgaaaccccatctctgctaaaaatataaaaattagccaggcgtggtggcacatgcctgtaatcccagctactgagagggaggctgaggcaggagaatcacttgaacccaggaggcgaaagttgcagcgagcagagattgtgccactgcactccagcctgggtgccaga

SEQ ID NO: 25943 - protein, 652 aa, Artificial Sequence
  derived and/or modified sequence
MPPPLPLLLLTVLVVAAARPGCEFERNPAGECHRPPAADSATCVDLQLRTCSDAAYNHTTFPNLLQHRSWEVVEASSEYILLSVLHQLLEGQCNPDLRLLGCAVLAPRCEGGWVRRPCRHICEGLREVCQPAFDAIDMAWPYFLDCHRYFTREDEGCYDPLEKLRGGLEADEALPSGLPPTFIRFSHHSYAQMVRVLRRTASRCAHVARTYSIGRSFDGRELLVIEFSSRPGQHELMEPEVKLIGNIHGNEVAGREMLIYLAQYLCSEYLLGNPRIQRLLNTTRIHLLPSMNPDGYEVAAAEGAGYNGWTSGRQNAQNLDLNRNFPDLTSEYYRLAETRGARSDHIPIPQHYWWGKVAPETKAIMKWMQTIPFVLSASLHGGDLVVSYPFDFSKHPQEEKMFSPTPDEKMFKLLSRAYADVHPMMMDRSENRCGGNFLKRGSIINGADWYSFTGGMSDFNYLHTNCFEITVELGCVKFPPEEALYILWQHNKESLLNFVETVHRGIKGVVTDKFGKPVKNARISVKGIRHDITTAPDGDYWRLLPPGIHIVIAQAPGYAKVIKKVIIPARMKRAGRVDFILQPLGMGPKNFIHGLRRTGPHDPLGGASSLGEATEPDPLRARRQPSADGSKPWWWSYFTSLSTHRPRWLLKY

SEQ ID NO: 25944 - DNA, 1959 bp, Artificial Sequence
  derived and/or modified sequence
atgcctccgcctttgcctctcttacttctgaccgtcttggttgtcgctgctgcaagacccggatgcgagttcgagcggaaccctgccggagagtgccatagaccccctgccgctgacagcgcaacatgcgtggatctgcaactgaggacttgttctgatgccgcatacaatcacacaactttcccgaatctcttacagcaccggagctgggaggtggttgaggcgagcagtgaatatattcttctgtctgtgctacaccaactacttgaaggccagtgcaatcctgacttgaggttattaggatgcgccgtactggccccacgttgtgagggcggatgggtgcgtcgcccttgtcggcacatctgtgagggacttcgtgaggtgtgtcagcctgccttcgacgcaatcgacatggcatggccgtactttctggattgccatagatacttcacacgggaggacgaagggtgttatgaccccttagagaagcttcgcggtggcctcgaggcggacgaggctctgccttccgggctcccccctacctttattcgcttcagtcaccactcctatgctcaaatggtgcgggtgctaagaagaacagccagcagatgtgcacacgtggctcggacgtatagtatcgggaggtcattcgatggacgtgaactgctcgtcatcgagttctcttccaggcctggacagcatgaactaatggagcctgaggttaaactgattggaaatatacacggtaacgaagtggcaggcagagaaatgctaatctatctggcccagtacctctgcagcgaatatctactcgggaacccgaggatccagcggttgctcaacaccactcgcatacatctgctgcctagcatgaaccctgacggatatgaggttgcagccgctgaaggggcaggttataatggttggacttccggacggcagaatgcacagaatctagacttgaaccggaatttccctgacctcacctccgaatactatcgtttggctgagaccaggggggctcggtcagaccatatccctatcccacagcattattggtggggaaaagtcgcgccagagaccaaggcgatcatgaaatggatgcaaaccattccctttgtcctttccgcttcactccacggaggggacctagtggtgtcttaccctttcgactttagtaagcatccacaagaagagaagatgttttctccaacaccagacgagaagatgttcaaactgctgtcccgcgcatacgctgatgtgcacccgatgatgatggatcgctctgagaatcggtgcggaggcaattttctaaagcgtggctccattatcaatggcgcagattggtactctttcacaggcggtatgtctgatttcaattacctgcataccaactgcttcgaaataacagtggagctgggatgtgtcaaatttcccccagaagaggccctgtatattctctggcagcacaacaaggaatccctgctcaatttcgtggagactgtgcatcgcggtattaaaggtgttgtgactgataagttcggtaagcctgtgaagaacgccagaatcagtgtgaagggaatcaggcacgacatcacaaccgctccagatggcgattattggaggttgctgcccccaggcatccatatcgtgatcgctcaggcccctgggtacgctaaggtaatcaagaaggtgataatcccagctcgaatgaagcgggctggtcgagttgacttcatcctgcagcctctcggaatgggccctaagaatttcatccatgggctgagaaggactggcccacacgacccactcggaggagccagctccttgggcgaagccaccgagcctgatccacttagggcacgcaggcagccgtccgcagatggcagcaagccctggtggtggtcttactttacatccctcagtacacacagacctcgatggctgttgaagtactag

SEQ ID NO: 25945 - DNA, 1548 bp, Artificial Sequence
  derived and/or modified sequence
atggcctggccatactttctggactgccacaggtactttactcgggaagacgaaggttgttatgaccctctagagaaactccggggaggcctggaagcagatgaagctctcccaagtggactgccgcctactttcatccgtttctcacaccacagttatgcgcaaatggtgcgagtcttgagacgaacagcctctcgatgcgcacacgtggcacggacttatagcatcggtcgcagtttcgacgggagagaattgctcgtgattgagttttcttcccgccctggtcagcatgaattgatggaacctgaggtgaaactgattgggaatatacatggcaatgaagtggcaggccgagaaatgctcatttacctcgcacagtatctgtgttccgagtatttgcttgggaatcccagaattcagcggctgctgaacacaaccaggatacatcttttgccatccatgaatcctgacgggtacgaggtggcagctgctgagggagcgggttacaacggctggacttcaggaagacagaacgcacagaacctcgatttaaatagaaactttccggacttgacttccgagtactaccgcttggccgagacgagaggcgctcgcagcgaccatatccctattccacagcactactggtgggggaaggttgcacccgagaccaaggcaattatgaagtggatgcagacgattcctttcgtgctgagcgcatctctccatggaggagacctcgtggtatcttaccccttcgatttcagcaaacaccctcaggaagagaaaatgtttagcccaacacctgacgagaagatgtttaaacttctgtcacgggcttatgccgatgttcacccaatgatgatggaccggtctgaaaacagatgtggcggaaactttctcaaacggggtagtattatcaacggagcagactggtactccttcacaggaggcatgtcagacttcaactacctacatacgaattgcttcgagattacagtagagctggggtgtgtgaagtttcctcccgaggaagccctctacatactttggcaacacaataaggagtctctgcttaacttcgtagaaaccgtgcatagaggaattaaaggggtggttaccgacaaatttgggaagccagtgaaaaacgccaggattagtgtgaaggggatcaggcacgatatcacgacggcccctgacggggattactggcgcctgttaccgcctggcatccatatcgttattgcacaggctccgggatacgccaaggtgatcaaaaaggtgattattccagccagaatgaaacgcgcagggcgtgttgattttattctccaaccactgggcatgggtccaaaaaacttcattcacggactgcgcaggactggaccccatgacccgttggggggagcgtcctcccttggggaagcaaccgagccagatcctctgcgtgcgagacggcagccctctgccgatggtagtaaaccatggtggtggtcttacttcacctctctatccacacacaggccacgttggctgctgaagtattag

SEQ ID NO: 25946 - DNA, 1959 bp, Artificial Sequence
  derived and/or modified sequence
atgcccccacccctgcctctgctgttactaacagtcctggttgtagctgccgctcgcccaggatgcgaatttgagcggaatccagccggagagtgtcatagacctccagctgccgactctgctacatgcgtggacctacaactgcgcacctgtagcgatgccgcctacaatcatacgacattccctaatttgttgcagcataggtcatgggaggtggtagaagcatcatccgagtacattttgctgtccgtcctccaccagttgctggaaggacagtgcaatcctgatcttagactcctgggatgcgcggtccttgcacctaggtgcgagggaggctgggttagacggccatgtcggcacatttgcgagggactgagggaggtttgccagcccgcattcgacgccattgacatggcctggccatacttcctagattgtcatcggtatttcacaagagaagatgaaggctgttacgacccattggaaaagctgaggggagggttggaggcggatgaagccctaccttccggactcccaccaacatttatccgattttcacatcattcctatgcccagatggtgagggtgttgcgaagaaccgccagccgttgcgcccacgtggctagaacttacagtatcggtcggtcatttgacggtagagaattactggtcatcgaatttagcagccgccccggccaacacgaactgatggagcccgaagtcaaactaatcggaaatatacatggaaatgaggtggctggacgggagatgttaatttacctagcgcagtatctatgttctgagtatctcctggggaaccccagaattcaacgcttactgaatacaacccggatccatcttctcccttctatgaatcccgatgggtacgaggtcgctgcagcagaaggtgcaggatacaatggctggacctctgggcgtcagaacgctcaaaatcttgacttgaatcgtaacttccccgatctcacctctgaatattacagactggctgaaacaagaggcgcccgatctgaccatatccccatccctcaacattactggtgggggaaggtggccccagaaacaaaagcgatcatgaagtggatgcagaccatcccctttgtcctgagtgcatcattacatgggggtgatctcgtagtgtcctatccttttgatttttctaagcatcctcaggaggagaagatgttctctcccactcctgacgagaaaatgttcaaactgttgagtagggcttacgcagacgtccacccaatgatgatggacagatcagagaaccggtgcgggggaaattttcttaagcggggatcaatcataaatggcgcagattggtactcattcacggggggtatgtctgacttcaattacctccacacaaactgctttgagattactgttgagctgggctgcgtaaaattccccccggaagaggccctgtacatactgtggcagcacaataaagaatctctgctaaactttgtagaaaccgtccatcgggggataaagggcgtggtgacggacaaatttggcaagcctgtaaaaaacgcccgcatttccgtaaagggcattcgacatgatattaccacagccccagatggcgattactggaggctcctacctcccggtatccatattgtgatagctcaggcgccagggtatgctaaggtgattaaaaaggtcattattcccgcccgcatgaagcgcgctggaagggtcgactttatattgcagcccttaggaatgggacctaagaacttcattcatggactcaggaggacgggtccacatgacccattgggtggcgcatcatccctgggagaggctaccgagcctgacccattgcgagcgcgacggcagccctctgccgacggctccaagccttggtggtggtcatattttactagcttatccacgcaccgcccacgctggctcctcaagtactag

SEQ ID NO: 25947 - DNA, 3718 bp, Artificial Sequence
  derived and/or modified sequence
cgattgctcatcgctgggcctggaagatcacacagagggtttggcttggagtgactcctccaagcagggtctgcaccgccctgtgggctcaaggagggagaggagctgtggagaaatgctttgatgtctcttgcagatgaaacagtggagggggagtgggcaagactgggccaccatgggccacttgtctctgaggtgtgcaaagaggtgccagagggccacttggcagcggggctggttgggggccctgcatggagtcccctgtgtctgttgtctcacgagtcggtgtccaccagagaccctgcatgatccgcagcagtcctggcccgttagacctttctgtgtaaaagaaatgttctattgtgttctgtccaagacagttaccactggccgcatgtggcccccaaggcttgggatgtggctcttgccactgaggcctggatgtgggcgtttcatcgcatttgaatgagtctgaacctgtctttgaagagcctagggccagtgtgtgccacattcaactgtgcagggcagtgtccgctcatggttgggttcagaggatctgactgcgggtgccacacatgtgctagctcacgcgagtctcacgacagccttgctccatggaagaggaagtggagcctcgggaagggtgacagcagtggggtctttagctggagtggcccaagcccattgcggatggagggatggatttggccatttgtcaaacagctaccgagcacccactgtacatgtggctttgtgctgggacattgaggagggcaggagaaggaaggcagacaaacacccgggccgggctccagcaagccctgggttccgggctatgtcaggtgctcagggctgaacctggcatgtcttgcagcctctggctcccaatctgagaagggtggaccctgggctcccatgcgatgcagcggtagggggggtgccctttgccagcaggtgggagccgtctgtctgcagagctcagtccctgtagaggtggtggagctgcctgtgggaggccagggaggcgaggaaggaagccaagcccacagccctgggaaagcccaaggagtcggttggagattattttgggcatctctaccaccaaattgccggcttcctctgctagtctttcccctggagaaccgttttgagcagaagcaaaaccacagggcaaggagaagcttagaggagcacattaactctctgtggacccaggaacagcctgcgggcacctgcgtcctgctcctgtgggcctgactgctgcaaagcccctggcggggtggagggagctaagcgtcatcggggtggccctcagggcacctctgttctagtggatgacaggatggtggggaagctggtgcgtatgtggtgtagagacgttcgtattctagttccagaacccctccctcttccccagcccccttttttcttcctcccccaagtacttcccagagcccccctttctgtttccttcctggacaggcactcactgttgtaccgatgaggttgtaacagaaacactgggaagcctcacagcagccggagggggcaccacaaggagccttcctgtttccaccattagccaagcaaatgaagcagaatactgaactgcctgagtgccactgtcatggaaaacacgcccaggaaaatcccctctgcacacccagcaggggtttgccttggggggtccaggaccccatatatctgtcttcctttctgttgtcctgctccgtattttaggagcttcccacagtggccccatagtatgtttactcacagtcacgttaggaaccatggcgctgtgctgtgtacatacctcaggtgccgtttggcttagatatcgttgtaggcactgcagagggaactctaattaaagatagagatgtccaagcatggctgtcgtgcagaggggactaagggtgctgtgtgtggtcagcgttcccaggcagtggtaggaagcctgggggcctgacactgactgagcccccccactgctcccccaggaggcctggaggctgacgaggcactgccctcagggctgccgcccaccttcatccgcttcagccaccactcctacgcccagatggtgcgtgtgctgaggcggacggcctcccgctgcgcccacgtggccaggacctacagcatcgggcgcagcttcgacggcagggagctgctggtcatcgagttctccagccgccccggccagcacgagctgatggagcccgaggtgaagctcatcggcaacattcatggcaacgaggtggcgggccgggagatgctcatctacctagcccagtacctgtgctctgagtacctgcttggtaacccccgcatccagcgcctgctcaacaccacccgcatccacctgctgccctccatgaaccctgacggctatgaggtggcagctgccgagggtgccggctacaacgggtggacgagcgggaggcagaacgcgcagaacctggatctgaaccgaaatttcccggacctgacgtccgagtactaccggctggcggagacccgcggcgcacgcagcgaccacatccccatcccccagcactactggtggggtaaggtggccccggagacaaaggcaatcatgaagtggatgcagaccataccctttgtgctctcagccagccttcatgggggcgacctggtggtgtcctaccccttcgacttctccaagcacccccaggaggagaagatgttttctcccacgcccgacgagaagagggagccccctcctcagcacagacctgtcctgcttggtggggccctgatgagctcatgcagggtgagcccttcgcctgcctgacccaccaggagcctctgcccaagatgttcaagctgctgtccagagcctacgctgacgtccaccccatgatgatggacaggtcggagaataggtgtggaggcaatttcctgaagagggggagcatcatcaacggggcggactggtacagcttcacgggaggcatgtccgatttcaactacctgcacaccaactgctttgagatcacggtagagctgggctgtgtgaagttcccccccgaggaggccctgtacatactctggcagcacaacaaggagtcactcctgaatttcgtggagacggtgcaccggggcatcaaaggtgtggtgacagataaattcggcaagccagtcaaaaacgcccggatctcagtcaaaggcattcgccacgacatcaccacagccccagatggtgactactggagactgctgcccccaggtatccacattgtcattgcccaagcccctggctacgccaaagtcatcaagaaagtcatcatccccgcccggatgaagagggctggccgtgtggacttcattctgcaacctctggggatgggacccaagaactttattcatgggctgcggaggactgggccccacgacccactgggaggtgccagctctttgggggaggccacggagcccgacccgctccgggcgcgcaggcagccctcggccgacgggagtaagccctggtggtggtcctacttcacatcgctgagcacccacaggccacgctggctgctcaagtactagccccggccccagcacccgccaggatgtggagaccgaggcccatctccgcatcccgggctcctggctcttgattttgtctgccacagacatcccacaaagccgctgccattttattaaagtgttttgatccactttgcactgg

SEQ ID NO: 25948 - DNA, 1548 bp, Artificial Sequence
  derived and/or modified sequence
atggcttggccgtactttcttgattgtcaccgatacttcacacgggaggacgaaggatgctacgatccactggaaaaactgcgaggcggtctggaagctgacgaggctcttcctagcggcctgccaccaacctttatccgcttctctcaccattcatacgctcagatggtgcgagtactgagacgcacagcctcaagatgtgcgcatgtggcacgcacatacagcattggtagaagctttgacggcagggaattattagttattgagttcagctctcgtcctggccagcacgaactgatggaacctgaggtcaaactgattggcaacatccatgggaacgaagttgccggccgggagatgttgatctatctggcccaatatctttgctccgagtacctgctgggaaacccgcggatccagcgtttgttgaacaccaccaggattcacttactaccttctatgaaccccgatggatatgaagtcgccgccgcggagggggcggggtataatgggtggacgagtggccgccagaatgcccagaacttggatctcaaccgcaattttcctgatctaaccagcgaatactaccgcctagccgaaactcgaggagcacggtctgatcacatcccgattccacagcactactggtggggaaaggttgcccccgaaaccaaggccataatgaaatggatgcaaaccattcctttcgtgctttcagctagcctgcatgggggggacctagttgtatcctaccccttcgatttctccaaacacccccaggaagaaaagatgttttcacccactcccgacgagaagatgtttaagctgctgagccgggcgtatgcggatgtgcatccaatgatgatggatagaagcgaaaatcggtgcggcggaaacttcttgaagagaggatctataatcaatggcgccgactggtactctttcaccggaggcatgtccgattttaactatctccataccaactgttttgagatcactgtagagctgggatgcgtaaaattccctccagaagaggctctctacatcctgtggcagcataataaagagtccctgttaaattttgtcgagaccgtgcatcgaggcataaagggtgtggtcaccgataagttcggaaagcctgtgaagaacgctcgcataagtgttaagggtatcagacatgacataactactgctcctgatggggactactggcggctgttgcctcccgggatccacatcgtgatagcacaggcccccggttatgccaaggttatcaaaaaggtgataattcctgcccgtatgaagcgagcaggcagggtggactttatactgcagccgttaggtatggggccaaagaattttattcatggcctgcgtcgcacaggcccacatgacccgttgggcggggccagctccctgggtgaagctacagagcccgaccctcttcgcgccagacgccaaccgtccgccgatggttccaagccatggtggtggagctactttacatcccttagcactcatcgaccacgctggctgctcaagtactag

SEQ ID NO: 25949 - DNA, 1959 bp, Artificial Sequence
  derived and/or modified sequence
atgccccctcctttgccactgctgctattgacggtattagtggttgccgccgctaggccgggctgtgagtttgagcggaaccctgctggtgaatgccaccgtcccccagccgccgactcggcaacttgtgttgatctgcagctccgcacttgctccgacgctgcttacaaccatactacgtttcccaaccttctccaacacagatcgtgggaagttgtagaggcctcaagtgaatacatcctgctctcggtgcttcaccaacttttagagggacagtgtaacccagacctgagactactggggtgtgctgtgttagccccaaggtgcgaaggcggttgggtgagacgaccctgtaggcatatttgcgagggcttgagagaagtttgccagcccgccttcgacgcaatagacatggcctggccctactttctggactgtcaccgctacttcacacgtgaggatgagggatgctatgacccactggaaaaattacgaggcggtttggaggccgacgaggctctaccttctggtctcccacctacattcattcgattctctcatcatagttacgcgcagatggtccgtgtccttcgacgaactgcctcacgatgcgcccatgtggcccgtacttatagcatcggacgctcttttgatggacgtgaattactcgtgattgaatttagtagtcgccctggtcagcacgagctgatggaacccgaagttaaattgattggcaacatccacggcaatgaggttgccggtcgggagatgctcatttaccttgctcaatatctgtgctcggaatacttacttggtaaccctaggatccaaaggctcctcaacactacccgcattcacttactcccatcgatgaatccagatgggtatgaagttgcggctgcggaaggagcaggatataatggatggactagcggtcggcagaacgcccagaacttagacctgaacaggaatttccccgatctgacatctgaatactatagattggccgaaacccggggagctcggagcgatcacattccaatcccccagcactactggtggggaaaggtcgctccagaaactaaagctatcatgaaatggatgcagaccataccctttgtactcagtgcctcactccatgggggagacctggtcgtctcttatccttttgattttagcaaacatccacaggaagagaaaatgttctcgcctactccagacgagaaaatgttcaaactgctttctagagcttacgccgatgttcaccctatgatgatggatagatccgaaaaccgctgtgggggaaactttctgaaacggggatccataattaatggagctgactggtatagtttcacaggcgggatgtcagattttaactacttgcatacaaactgcttcgagatcaccgtcgagctgggatgtgtcaagtttccaccagaagaggccctctacatcctctggcaacacaataaggaatccctgctgaatttcgtagagactgtgcatcgaggaataaaaggcgtggtaactgacaagttcggcaagcccgttaagaacgccagaattagcgtgaaaggcattagacatgatatcaccacagcccctgacggtgattactggagactcttaccacccggtatccacatcgtgatcgcccaagctcctggctacgctaaggtaatcaagaaggtgatcatccctgctagaatgaaacgtgccggcagggtcgactttatcctccagcccctcggcatggggccaaaaaactttatccacggtctgagaagaactgggcctcacgatccattgggtggcgcttcatccttgggcgaagccaccgagcctgaccctctgagagccaggcgccaaccatcagcagacggcagcaaaccttggtggtggagttactttacatcacttagtacacacagacctcgttggctgctaaaatattag

SEQ ID NO: 25950 - DNA, 1548 bp, Artificial Sequence
  derived and/or modified sequence
atggcatggccctacttcctagactgccatagatactttacgagagaagacgaaggatgttatgaccccctagaaaagcttcgcggcggcctggaagccgacgaagccctgcccagcgggctgccacccacatttattagattctcccaccactcctacgcccagatggtccgggtgctgaggagaactgcctcccgttgcgctcacgtcgcaaggacatactctatcggaagatcgtttgatggtcgagaattgttggtcattgaatttagttcccgcccaggacaacacgagttaatggagcccgaggtcaaattaattgggaacattcatggaaatgaagttgctggtcgcgaaatgctgatctatctcgctcaatatctgtgttcagaatacttgctcgggaacccccgcatacaaaggctgcttaataccaccagaattcacttgcttccgtcaatgaaccccgacggatatgaggtagctgccgctgagggagctggctacaatggttggacgagcggacgccaaaacgctcagaacctcgacctgaaccggaacttcccagatttaacaagcgaatactataggttggccgagaccagaggagcccgaagcgatcatatcccaatccctcaacactactggtgggggaaggtagcccccgaaaccaaagccatcatgaaatggatgcagacaattccttttgtgctgtcagcaagcctgcatggaggtgatcttgtcgtctcctacccatttgatttctcaaagcaccctcaagaagagaagatgttctcgcccaccccagatgaaaagatgtttaaactgctgtcaagagcctacgctgacgttcaccctatgatgatggatagatcagaaaatcgctgtggcggtaacttcctaaagagaggatccattataaacggagctgactggtactcgttcaccggcggcatgagcgatttcaattacctgcacactaactgctttgagattaccgtcgaactcgggtgtgtgaaattccctccagaggaagccctgtacatcctgtggcaacacaacaaggaatctttattaaacttcgtcgaaactgttcacagagggataaagggcgtggtaacagataaattcggaaagccagtcaagaacgctcgcatctcagtcaaagggattcgccacgacataaccacggcgccagacggggattattggcgtctattaccccccggcattcacattgtgattgcgcaggcccccggctatgccaaggtaataaagaaggttatcattcccgcccggatgaagagagctgggcgagtcgattttatactccagccactgggcatgggtccaaagaatttcatccacggccttagacgcactggcccacacgacccactcggcggcgcctcctccctaggggaagccacagaaccagatccgcttcgtgcgcgaagacaaccctctgctgatggatcaaaaccttggtggtggtcatacttcacctctctttctacacatcgaccacgctggctgctgaaatactag

SEQ ID NO: 25951 - DNA, 1959 bp, Artificial Sequence
  derived and/or modified sequence
atgcccccccccctgcccctgctgctgctgaccgtgctggtggtggccgccgccagacccggctgcgagttcgagagaaaccccgccggcgagtgccacagaccccccgccgccgacagcgccacctgcgtggacctgcagctgagaacctgcagcgacgccgcctacaaccacaccaccttccccaacctgctgcagcacagaagctgggaggtggtggaggccagcagcgagtacatcctgctgagcgtgctgcaccagctgctggagggccagtgcaaccccgacctgagactgctgggctgcgccgtgctggcccccagatgcgagggcggctgggtgagaagaccctgcagacacatctgcgagggcctgagagaggtgtgccagcccgccttcgacgccatcgacatggcctggccctacttcctggactgccacagatacttcaccagagaggacgagggctgctacgaccccctggagaagctgagaggcggcctggaggccgacgaggccctgcccagcggcctgccccccaccttcatcagattcagccaccacagctacgcccagatggtgagagtgctgagaagaaccgccagcagatgcgcccacgtggccagaacctacagcatcggcagaagcttcgacggcagagagctgctggtgatcgagttcagcagcagacccggccagcacgagctgatggagcccgaggtgaagctgatcggcaacatccacggcaacgaggtggccggcagagagatgctgatctacctggcccagtacctgtgcagcgagtacctgctgggcaaccccagaatccagagactgctgaacaccaccagaatccacctgctgcccagcatgaaccccgacggctacgaggtggccgccgccgagggcgccggctacaacggctggaccagcggcagacagaacgcccagaacctggacctgaacagaaacttccccgacctgaccagcgagtactacagactggccgagaccagaggcgccagaagcgaccacatccccatcccccagcactactggtggggcaaggtggcccccgagaccaaggccatcatgaagtggatgcagaccatccccttcgtgctgagcgccagcctgcacggcggcgacctggtggtgagctaccccttcgacttcagcaagcacccccaggaggagaagatgttcagccccacccccgacgagaagatgttcaagctgctgagcagagcctacgccgacgtgcaccccatgatgatggacagaagcgagaacagatgcggcggcaacttcctgaagagaggcagcatcatcaacggcgccgactggtacagcttcaccggcggcatgagcgacttcaactacctgcacaccaactgcttcgagatcaccgtggagctgggctgcgtgaagttcccccccgaggaggccctgtacatcctgtggcagcacaacaaggagagcctgctgaacttcgtggagaccgtgcacagaggcatcaagggcgtggtgaccgacaagttcggcaagcccgtgaagaacgccagaatcagcgtgaagggcatcagacacgacatcaccaccgcccccgacggcgactactggagactgctgccccccggcatccacatcgtgatcgcccaggcccccggctacgccaaggtgatcaagaaggtgatcatccccgccagaatgaagagagccggcagagtggacttcatcctgcagcccctgggcatgggccccaagaacttcatccacggcctgagaagaaccggcccccacgaccccctgggcggcgccagcagcctgggcgaggccaccgagcccgaccccctgagagccagaagacagcccagcgccgacggcagcaagccctggtggtggagctacttcaccagcctgagcacccacagacccagatggctgctgaagtactag

SEQ ID NO: 25952 - DNA, 1548 bp, Artificial Sequence
  derived and/or modified sequence
atggcctggccctacttcctggactgccacagatacttcaccagagaggacgagggctgctacgaccccctggagaagctgagaggcggcctggaggccgacgaggccctgcccagcggcctgccccccaccttcatcagattcagccaccacagctacgcccagatggtgagagtgctgagaagaaccgccagcagatgcgcccacgtggccagaacctacagcatcggcagaagcttcgacggcagagagctgctggtgatcgagttcagcagcagacccggccagcacgagctgatggagcccgaggtgaagctgatcggcaacatccacggcaacgaggtggccggcagagagatgctgatctacctggcccagtacctgtgcagcgagtacctgctgggcaaccccagaatccagagactgctgaacaccaccagaatccacctgctgcccagcatgaaccccgacggctacgaggtggccgccgccgagggcgccggctacaacggctggaccagcggcagacagaacgcccagaacctggacctgaacagaaacttccccgacctgaccagcgagtactacagactggccgagaccagaggcgccagaagcgaccacatccccatcccccagcactactggtggggcaaggtggcccccgagaccaaggccatcatgaagtggatgcagaccatccccttcgtgctgagcgccagcctgcacggcggcgacctggtggtgagctaccccttcgacttcagcaagcacccccaggaggagaagatgttcagccccacccccgacgagaagatgttcaagctgctgagcagagcctacgccgacgtgcaccccatgatgatggacagaagcgagaacagatgcggcggcaacttcctgaagagaggcagcatcatcaacggcgccgactggtacagcttcaccggcggcatgagcgacttcaactacctgcacaccaactgcttcgagatcaccgtggagctgggctgcgtgaagttcccccccgaggaggccctgtacatcctgtggcagcacaacaaggagagcctgctgaacttcgtggagaccgtgcacagaggcatcaagggcgtggtgaccgacaagttcggcaagcccgtgaagaacgccagaatcagcgtgaagggcatcagacacgacatcaccaccgcccccgacggcgactactggagactgctgccccccggcatccacatcgtgatcgcccaggcccccggctacgccaaggtgatcaagaaggtgatcatccccgccagaatgaagagagccggcagagtggacttcatcctgcagcccctgggcatgggccccaagaacttcatccacggcctgagaagaaccggcccccacgaccccctgggcggcgccagcagcctgggcgaggccaccgagcccgaccccctgagagccagaagacagcccagcgccgacggcagcaagccctggtggtggagctacttcaccagcctgagcacccacagacccagatggctgctgaagtactag

SEQ ID NO: 25953 - DNA, 1959 bp, Artificial Sequence
  derived and/or modified sequence
atgccccctccactgcctctgcttctcctgaccgtgctagtcgtggcagctgcccgccctggttgcgaatttgaaaggaaccccgccggggagtgccaccgcccacccgcagccgacagtgcgacctgcgtggatctacagctaaggacctgctcagacgccgcttacaaccacaccacatttcccaacctgctgcagcatcgtagctgggaggtggtcgaagccagtagtgagtatatcctacttagcgttctgcaccaactgcttgaggggcagtgtaacccagatctgcgacttctcggatgcgctgtcctggcccctcggtgtgaggggggatgggtgcggagaccctgcaggcatatttgtgaggggctccgcgaggtctgccagcccgccttcgacgcaatagacatggcctggccatacttcctagattgccatcgctatttcactcgggaggatgaaggatgctacgatcctcttgagaagttacggggcggcctggaagccgacgaggcattgccctccggtcttcccccgacatttattaggttctctcaccattcctacgcacagatggtacgtgtcttaagacggaccgctagcaggtgtgcgcatgtggcccggacatactccattgggcgctcttttgatggaagggaactcctagtcatcgagtttagctctaggccgggtcaacacgaactcatggaacccgaggtgaagctcatcggtaatattcatggaaatgaggtggccggtagagagatgctgatctatttggcccagtatctgtgctcagaatacctgctcggaaaccccaggatccagagattgctcaatactaccagaatccatctcctcccctcaatgaacccagatgggtatgaggtagctgcagctgagggagcgggctataacggctggacatccggccgacaaaatgcccagaacctagatctgaatagaaatttccccgacctgaccagtgaatattaccggctcgccgaaacgagaggagctagatcggatcatatccccatccctcagcactattggtggggcaaggttgcgccagaaacgaaagctatcatgaagtggatgcagacaatcccttttgtgttgagcgcgtctttgcatgggggagatctcgttgtgagctatccctttgacttctccaagcatcctcaggaggagaaaatgttctctccaacccctgatgagaagatgttcaaactgctgtcccgtgcttatgccgatgtacatcccatgatgatggaccgaagtgagaatcgatgtggagggaacttcttgaagagagggagtatcattaatggggccgattggtattccttcacaggtggaatgagcgacttcaattatctgcatactaactgctttgaaatcaccgtggaactcggatgtgtcaagtttccaccagaggaggcattgtatatcttatggcagcacaataaagaatcattgctcaatttcgtggaaaccgtccatcgcgggattaagggggtagtgactgacaagtttggaaagcccgtgaagaacgcacgcatttcagtcaagggcatccgccacgatatcactaccgctccagacggagactattggcggctgctgccacccggtatacatattgtgattgcacaagccccgggctatgctaaggtcatcaagaaagtgattatacctgcaagaatgaaaagagctggccgtgtggatttcatcctgcagcccctcggcatgggccctaaaaatttcatccatggactgcggcgcacaggccctcacgaccctttgggcggcgcttcctccctgggcgaagcaaccgaacccgatccactaagggctaggcggcagccatccgcggatgggagtaagccgtggtggtggagctattttactagcctgtccactcaccgccctaggtggctccttaagtactag

SEQ ID NO: 25954 - DNA, 1548 bp, Artificial Sequence
  derived and/or modified sequence
atggcatggccatattttctggactgccacaggtactttactagagaagacgaaggatgttacgacccgctggaaaaactgcgcggcgggctcgaggcagacgaggctctgccatccgggctgccacctaccttcatacgatttagccaccatagttatgcacagatggtgcgagtcctcagacgcactgcaagtcgctgtgctcacgtggcccgaacctattccattggccgttcttttgacggtagggagctcctcgttattgaattttcaagtcgacccggtcagcatgagctgatggaacccgaagtcaaactaatcgggaatatccacggcaacgaagtcgcaggacgggagatgctgatctatttggcgcaatatttatgttccgaatacctgctgggcaacccacggatacagcgcctgttgaacacgactcggattcacctgctgcccagcatgaacccggatggatacgaggtggctgcagccgaaggcgcagggtacaacggctggacgtcaggccgacaaaacgctcaaaatctggatctcaataggaattttcccgatcttacctcagagtattatcggttggccgaaacccgaggtgcacggagtgaccatatacccatcccacagcactattggtggggcaaagttgccccggaaactaaggccatcatgaagtggatgcagacaatcccattcgtgttgtctgcgtccctgcatgggggggatctggttgtctcgtatccattcgatttttccaagcatcctcaagaggaaaagatgttttcccctacgcctgacgagaaaatgtttaagctgctgtcccgggcttacgcagacgttcatcccatgatgatggaccgctctgagaatagatgcggggggaactttctaaagaggggatctataatcaacggagccgactggtatagctttaccggggggatgagcgattttaattacctgcatacgaactgcttcgaaatcaccgtggaacttgggtgtgtgaagtttccacctgaggaggccctgtatattttgtggcaacacaataaggaaagtctgctcaactttgttgaaactgtgcacagaggaatcaaaggcgttgtcaccgacaagtttggaaagcccgtgaagaacgccaggatatcagttaaaggcattagacatgatattaccacagccccagacggtgactattggaggctcctgcctcccggaatccacatcgtgatagcccaagcacctggatacgctaaggttattaagaaggttatcatcccagccagaatgaaaagagccgggcgtgtggacttcattctgcagcccctgggaatgggccctaagaacttcatacacggccttaggagaacaggtcctcatgaccccttgggcggtgcctctagtctgggcgaagcaacagagcctgacccactccgggctagacgacagccatcggctgatggaagtaagccctggtggtggtcctattttactagcttatccacacaccgaccacgatggctgcttaaatactag

SEQ ID NO: 25955 - DNA, 2267 bp, Artificial Sequence
  derived and/or modified sequence
agcggcatcctctctctagcttctggcgctgcccactgtaacccgactccggcatttgcgtttggggcgccctccctgcgccgggggcgggagcccagcgagcgcagagccccggccccgcgcggcccgagtgccacatcactgcgctggccgtccaaggtccgccgccccaccatgccgcccccgctgccgctgctgctccttacagtcctggtcgtcgccgctgcccggccggggtgcgagtttgagcggaaccccgccggtgaatgccacaggccaccagctgcagacagcgccacctgcgtggacctgcagctcaggacctgcagtgatgccgcctacaaccacaccaccttccccaacctgcttcagcaccggtcatgggaggtggtggaggccagctccgagtacatcctgctgagcgttctacaccagctcctggaaggccagtgcaacccggacctgcggctgctgggctgtgctgtgctggccccccggtgtgagggcggctgggtgcgcagaccctgccggcacatctgcgagggcctgcgggaggtctgccagcccgccttcgacgccattgacatggcctggccctacttccttgactgccaccgctacttcacgagagaggacgagggctgctatgacccgctggagaagcttcggggaggcctggaggctgacgaggcactgccctcagggctgccgcccaccttcatccgcttcagccaccactcctacgcccagatggtgcgtgtgctgaggcggacggcctcccgctgcgcccacgtggccaggacctacagcatcgggcgcagcttcgacggcagggagctgctggtcatcgagttctccagccgccccggccagcacgagctgatggagcccgaggtgaagctcatcggcaacattcatggcaacgaggtggcgggccgggagatgctcatctacctagcccagtacctgtgctctgagtacctgcttggtaacccccgcatccagcgcctgctcaacaccacccgcatccacctgctgccctccatgaaccctgacggctatgaggtggcagctgccgagggtgccggctacaacgggtggacgagcgggaggcagaacgcgcagaacctggatctgaaccgaaatttcccggacctgacgtccgagtactaccggctggcggagacccgcggcgcacgcagcgaccacatccccatcccccagcactactggtggggtaaggtggccccggagacaaaggcaatcatgaagtggatgcagaccataccctttgtgctctcagccagccttcatgggggcgacctggtggtgtcctaccccttcgacttctccaagcacccccaggaggagaagatgttttctcccacgcccgacgagaagatgttcaagctgctgtccagagcctacgctgacgtccaccccatgatgatggacaggtcggagaataggtgtggaggcaatttcctgaagagggggagcatcatcaacggggcggactggtacagcttcacgggaggcatgtccgatttcaactacctgcacaccaactgctttgagatcacggtagagctgggctgtgtgaagttcccccccgaggaggccctgtacatactctggcagcacaacaaggagtcactcctgaatttcgtggagacggtgcaccggggcatcaaaggtgtggtgacagataaattcggcaagccagtcaaaaacgcccggatctcagtcaaaggcattcgccacgacatcaccacagccccagatggtgactactggagactgctgcccccaggtatccacattgtcattgcccaagcccctggctacgccaaagtcatcaagaaagtcatcatccccgcccggatgaagagggctggccgtgtggacttcattctgcaacctctggggatgggacccaagaactttattcatgggctgcggaggactgggccccacgacccactgggaggtgccagctctttgggggaggccacggagcccgacccgctccgggcgcgcaggcagccctcggccgacgggagtaagccctggtggtggtcctacttcacatcgctgagcacccacaggccacgctggctgctcaagtactagccccggccccagcacccgccaggatgtggagaccgaggcccatctccgcatcccgggctcctggctcttgattttgtctgccacagacatcccacaaagccgctgccattttattaaagtgttttgatccactt

SEQ ID NO: 25956 - DNA, 1959 bp, Artificial Sequence
  derived and/or modified sequence
atgcccccacccctgcccctgctgctgctgactgtgctggtggtggccgccgcccggcccggctgtgaatttgagaggaacccagctggggagtgccacaggcctcctgctgctgacagcgccacctgtgtggacctgcagctgcggacctgcagtgatgctgcctacaaccacaccaccttccccaacctgctgcagcaccgctcctgggaggtggtggaggccagcagcgagtacatcctgctgtctgtgctgcaccagctgctggagggccagtgcaacccagacctgcggctgctgggctgtgctgtgctggccccccgctgtgagggcggctgggtgagaagaccctgccgccacatctgtgagggcctgcgggaggtgtgccagcctgcctttgatgccatcgacatggcctggccctacttcctggactgccaccgctacttcaccagagaagatgagggctgctatgaccccctggagaagctgcggggcggcctggaggctgatgaggccctgcccagcggcctgccccccaccttcatccgcttcagccaccacagctatgcccagatggtgcgggtgctgcggaggacagccagccgctgtgcccacgtggcccggacctacagcatcggccgcagctttgatggccgggagctgctggtgattgagttcagcagcaggcctggccagcacgagctgatggagcctgaggtgaagctgattggcaacatccacggcaatgaggtggccggccgggagatgctgatctacctggcccagtacctgtgcagcgagtacctgctgggcaacccccgcatccagaggctgctgaacaccacccgcatccacctgctgcccagcatgaacccagatggctatgaggtggccgctgctgagggcgccggctacaacggctggaccagcggccggcagaatgcccagaacctggacctgaacagaaacttcccagacctgaccagcgagtactaccgcctggccgagaccaggggggcccggagtgaccacatccccatcccccagcactactggtggggcaaggtggcccctgagaccaaggccatcatgaagtggatgcagaccatcccctttgtgctgagcgccagcctgcacggcggggacctggtggtgtcctacccctttgacttcagcaagcacccccaggaggagaagatgttcagccccaccccagatgagaagatgttcaagctgctgagccgggcctatgcagatgtgcaccccatgatgatggacagaagtgagaacagatgtggcggcaacttcctgaagaggggcagcatcatcaatggagctgactggtacagcttcaccggcggcatgtctgacttcaactacctgcacaccaactgctttgagatcaccgtggagctgggctgtgtgaagtttcctcctgaggaggccctgtacatcctgtggcagcacaacaaggagagcctgctgaactttgtggagaccgtgcaccggggcatcaagggcgtggtgacagacaagtttgggaagcctgtgaagaatgcccgcatctctgtgaagggcatcagacatgacatcaccacagccccagatggagactactggaggctgctgcccccaggcatccacatcgtcatcgcccaggcccctggctacgccaaggtgatcaagaaggtgatcatcccagccaggatgaagagagctggccgggtggacttcatcctgcagcccctgggcatgggccccaagaacttcatccacggcctgcggaggacaggcccccatgaccccctgggcggggccagcagcctgggggaggccacagagccagaccccctgcgggcccggcggcagcccagcgcagatggcagcaagccctggtggtggagctacttcaccagcctgagcacccaccggccccgctggctgctgaagtactag

SEQ ID NO: 25957 - DNA, 1548 bp, Artificial Sequence
  derived and/or modified sequence
atggcctggccctacttcctggactgccaccgctacttcacccgggaggatgagggctgctatgaccccctggagaagctgcggggcggcctggaggctgatgaggccctgcccagcggcctgccccccaccttcatccgcttcagccaccacagctatgcccagatggtgcgggtgctgcggaggacagccagccgctgtgcccacgtggcccggacctacagcatcggccgcagctttgatggccgggagctgctggtgattgagttcagcagccggcccggccagcacgagctgatggagcctgaggtgaagctgattggcaacatccatggaaatgaggtggccggccgggagatgctgatctacctggcccagtacctgtgcagcgagtacctgctgggcaacccccgcatccagaggctgctgaacaccacccgcatccacctgctgcccagcatgaacccagatggctatgaggtggccgctgctgagggcgccggctacaacggctggaccagcggccggcagaatgcccagaacctggacctgaacagaaacttcccagacctgaccagcgagtactaccgcctggccgagaccaggggggcccggagtgaccacatccccatcccccagcactactggtggggcaaggtggcccctgagaccaaggccatcatgaagtggatgcagaccatcccctttgtgctgagcgccagcctgcatggaggagacctggtggtgtcctacccctttgacttcagcaagcacccccaggaggagaagatgttcagccccaccccagatgagaagatgttcaagctgctgagccgggcctatgcagatgtgcaccccatgatgatggacagaagtgaaaatagatgtggcggcaacttcctgaagaggggcagcatcatcaacggggctgactggtacagcttcaccggcggcatgtctgacttcaactacctgcacaccaactgctttgagatcaccgtggagctgggctgtgtgaagttccccccagaggaggccctgtacatcctgtggcagcacaacaaggagagcctgctgaactttgtggagaccgtgcaccggggcatcaagggcgtggtgacagacaagtttgggaagcctgtgaagaatgcccgcatctctgtgaagggcatcagacatgacatcaccacagccccagatggagactactggaggctgctgcccccaggcatccacatcgtgattgcccaggcccctggctacgccaaggtgatcaagaaggtgatcatcccagccaggatgaagagagctggccgggtggacttcatcctgcagcccctgggcatgggccccaagaacttcatccacggcctgcggaggacaggcccccatgaccccctgggcggggccagcagcctgggggaggccacagagccagaccccctgcgggcccggcggcagcccagcgcagatggcagcaagccctggtggtggagctacttcaccagcctgagcacccaccggccccgctggctgctgaagtactag

SEQ ID NO: 25958 - DNA, 1959 bp, Artificial Sequence
  derived and/or modified sequence
atgcccccccccctgcccctgctgctgctgaccgtgctggtggtggctgcagcccgcccgggctgtgagtttgagagaaacccagccggggagtgtcatcgcccccccgccgccgatagtgctacatgtgtagacctgcagctgcgcacttgttctgatgccgcctacaaccacaccacgttccccaacctattgcaacataggtcctgggaggtcgtggaggcatcatccgagtacattctgctttcagtgctgcaccagctgttagaaggccaatgcaaccccgacctgcgcctgcttggctgtgcagtgttggccccacgctgtgaagggggatgggtgcggcgtccttgtcggcatatctgtgagggattacgggaggtgtgtcagccggcttttgacgctatcgacatggcctggccatactttttagattgccaccggtatttcacaagggaggacgagggctgttacgaccctctggaaaagctcaggggaggcctcgaagctgatgaagcgcttcccagtgggttgcctccaactttcataagattttcccaccacagctacgctcagatggttcgggtcctgagacgcaccgcttcgagatgcgctcatgttgctcgaacttattccatcggaagaagttttgatgggcgggagctacttgtgatcgaatttagctccaggcccggccagcatgaattgatggagccagaggtcaagctgattggtaacattcacggtaacgaggtggccggccgagagatgttgatttatttagcacaatacctctgctcagagtatctactcggaaatcctagaatccaacggctccttaacacaacgcggattcatttgctaccatccatgaacccggatggatacgaggtcgcggccgcagaaggagctggatataatggatggacaagcgggcgtcaaaatgcccagaacctggatctgaaccgaaatttcccagatcttacgtccgagtattacagattggcagaaaccagaggtgccaggtcagaccatataccaattccccagcattattggtgggggaaagtcgctccagagacaaaagcaatcatgaagtggatgcagacgatcccattcgtcctgagtgcgtcactccatggcggcgacctggtcgtatcttaccctttcgatttctccaagcatccacaggaagaaaaaatgttctctccaactccggacgagaagatgttcaaactactgagtagggcatacgcagatgtacatcccatgatgatggatagatctgaaaatagatgtggcggtaatttcttaaaacgcgggtctatcatcaatggagcagattggtacagcttcactgggggaatgtctgatttcaattacttgcacacaaattgttttgagattacggtcgaactgggctgcgttaagttcccgcctgaggaagctttatatatattatggcaacataataaagaatccttactgaacttcgtggagaccgtgcatcgcggcatcaaaggggtggtcacagataagttcgggaagcctgtcaagaacgcacgcatcagcgttaaaggaattagacatgacataaccactgcccccgatggggactactggcgtctcctacctcctgggatacacatcgtgatcgcccaggctcctggatatgccaaagtgattaagaaagtgattatcccagccaggatgaaacgcgccggccgtgtggacttcattcttcagcccctcggaatggggccaaagaatttcattcacggcctcaggcgaacgggcccccatgaccccctgggtggtgcaagcagtctaggcgaagcgacagagcctgatcctttgcgagctcgccggcaaccatcagccgatggttccaagccttggtggtggtcctattttacaagcctgtctacacaccgtcctagatggctcctcaaatattag

SEQ ID NO: 25959 - DNA, 2492 bp, Artificial Sequence
  derived and/or modified sequence
ccggcatttgcgtttggggcgccctccctgcgccgggggcgggagcccagcgagcgcagagccccggccccgcgcggcccgagtgccacatcactgcgctggccgtccaaggtccgccgccccaccatgccgcccccgctgccgctgctgctccttacagtcctggtcgtcgccgctgcccggccggggtgcgagtttgagcggaaccccgccggtgaatgccacaggccaccagctgcagacagcggtacagtaccgggacctccctggcttctgttctgtaggagggctgcagcccccacactgtcagagcactttaggcagctgaatccgtgatttcagaagctctgattcctgcacagtagctgttgtcctggtcctcccctgccagaccgtgggtgcccctccctgcaggccctggccctgcgtggggtcccctacgtaaatgtctgatgcgtgacggtcagggccactgcaggagggactgacctgccgaccctgcctccccagccacctgcgtggacctgcagctcaggacctgcagtgatgccgcctacaaccacaccaccttccccaacctgcttcagcaccggtcatgggaggtggtggaggccagctccgagtacatcctgctgagcgttctacaccagctcctggaaggccagtgcaacccggacctgcggctgctgggctgtgctgtgctggccccccggtgtgagggcggctgggtgcgcagaccctgccggcacatctgcgagggcctgcgggaggtctgccagcccgccttcgacgccattgacatggcctggccctacttccttgactgccaccgctacttcacgagagaggacgagggctgctatgacccgctggagaagcttcggggaggcctggaggctgacgaggcactgccctcagggctgccgcccaccttcatccgcttcagccaccactcctacgcccagatggtgcgtgtgctgaggcggacggcctcccgctgcgcccacgtggccaggacctacagcatcgggcgcagcttcgacggcagggagctgctggtcatcgagttctccagccgccccggccagcacgagctgatggagcccgaggtgaagctcatcggcaacattcatggcaacgaggtggcgggccgggagatgctcatctacctagcccagtacctgtgctctgagtacctgcttggtaacccccgcatccagcgcctgctcaacaccacccgcatccacctgctgccctccatgaaccctgacggctatgaggtggcagctgccgagggtgccggctacaacgggtggacgagcgggaggcagaacgcgcagaacctggatctgaaccgaaatttcccggacctgacgtccgagtactaccggctggcggagacccgcggcgcacgcagcgaccacatccccatcccccagcactactggtggggtaaggtggccccggagacaaaggcaatcatgaagtggatgcagaccataccctttgtgctctcagccagccttcatgggggcgacctggtggtgtcctaccccttcgacttctccaagcacccccaggaggagaagatgttttctcccacgcccgacgagaagatgttcaagctgctgtccagagcctacgctgacgtccaccccatgatgatggacaggtcggagaataggtgtggaggcaatttcctgaagagggggagcatcatcaacggggcggactggtacagcttcacgggaggcatgtccgatttcaactacctgcacaccaactgctttgagatcacggtagagctgggctgtgtgaagttcccccccgaggaggccctgtacatactctggcagcacaacaaggagtcactcctgaatttcgtggagacggtgcaccggggcatcaaaggtgtggtgacagataaattcggcaagccagtcaaaaacgcccggatctcagtcaaaggcattcgccacgacatcaccacagccccagatggtgactactggagactgctgcccccaggtatccacattgtcattgcccaagcccctggctacgccaaagtcatcaagaaagtcatcatccccgcccggatgaagagggctggccgtgtggacttcattctgcaacctctggggatgggacccaagaactttattcatgggctgcggaggactgggccccacgacccactgggaggtgccagctctttgggggaggccacggagcccgacccgctccgggcgcgcaggcagccctcggccgacgggagtaagccctggtggtggtcctacttcacatcgctgagcacccacaggccacgctggctgctcaagtactagccccggccccagcacccgccaggatgtggagaccgaggcccatctccgcatcccgggctcctggctcttgattttgtctgccacagacatcccacaaagccgctgccattttattaaagtgttttgatccactttgcactggaa

SEQ ID NO: 25960 - DNA, 1548 bp, Artificial Sequence
  derived and/or modified sequence
atggcctggccctacttcctggactgccaccggtacttcacccgggaagacgaaggatgttacgacccattggagaagctgagaggcggcctagaggccgatgaggccctcccctctgggctgccaccaacctttatccgattctcccaccactcttacgcccaaatggtgcgtgtcctgcgtagaacggccagcagatgcgcccatgttgcacggacgtacagtattggacggtccttcgacggccgcgaattactggttatcgaattctcatccagacctggacagcatgaactgatggaacccgaggtgaaactgatcggcaacattcacggaaatgaggtcgcaggcagagagatgttgatttacctcgcacagtacctctgctcggaatatctgttgggaaaccccagaattcagagacttcttaatacaacccgaatccatttgctgccatccatgaacccggacggctatgaggttgccgccgccgagggggcaggatacaacggatggacttcaggaagacagaacgcacagaatctggacttgaacaggaattttcctgatttgacctcagaatattatcgcctagcagagacaagaggcgctcggtccgatcacatccctattccccagcactattggtgggggaaagtcgcaccagaaacgaaagcaatcatgaagtggatgcagaccatcccgttcgtgctgtcagcttctctgcacggcggcgacttggtggtttcctaccccttcgactttagcaagcatccccaggaagagaagatgttttctcctacaccagacgagaagatgttcaaactgttgagcagagcatatgctgatgtgcaccctatgatgatggacaggtccgaaaataggtgcggagggaacttcctcaagcgggggtccataatcaacggagcagattggtattcattcacaggcggcatgagcgactttaattaccttcatactaattgcttcgaaatcacagttgagctgggctgcgtcaagtttccgcctgaggaagcgctctacatcctatggcagcataacaaggaatccctactgaattttgtggagactgtgcatcgaggcataaaaggcgtggtgacggacaagtttggcaagcctgtcaagaacgctcggatttctgttaaaggaatcagacacgatatcactactgcgccggacggagattattggagattgcttcctcccggtatccacattgttatcgcccaagccccggggtatgctaaagtcatcaaaaaagtgatcatccccgctcgcatgaagagggccggtagggtagacttcatcctgcaaccgctgggaatgggtcccaagaactttatacacggcctgcgcagaacaggtccccatgatcccctgggtggcgcatcatcccttggcgaagcaaccgagcccgaccctctgcgtgcccggcgtcagccaagtgccgatggaagcaaaccgtggtggtggtcctacttcacctcgctgagtacccaccgccctcgatggttactcaagtattag

SEQ ID NO: 25961 - RNA, 1959 nt, Artificial Sequence
  derived and/or modified sequence
augcccccaccccugccucugcuguuacuaacaguccugguuguagcugccgcucgcccaggaugcgaauuugagcggaauccagccggagagugucauagaccuccagcugccgacucugcuacaugcguggaccuacaacugcgcaccuguagcgaugccgccuacaaucauacgacauucccuaauuuguugcagcauaggucaugggaggugguagaagcaucauccgaguacauuuugcuguccguccuccaccaguugcuggaaggacagugcaauccugaucuuagacuccugggaugcgcgguccuugcaccuaggugcgagggaggcuggguuagacggccaugucggcacauuugcgagggacugagggagguuugccagcccgcauucgacgccauugacauggccuggccauacuuccuagauugucaucgguauuucacaagagaagaugaaggcuguuacgacccauuggaaaagcugaggggaggguuggaggcggaugaagcccuaccuuccggacucccaccaacauuuauccgauuuucacaucauuccuaugcccagauggugaggguguugcgaagaaccgccagccguugcgcccacguggcuagaacuuacaguaucggucggucauuugacgguagagaauuacuggucaucgaauuuagcagccgccccggccaacacgaacugauggagcccgaagucaaacuaaucggaaauauacauggaaaugagguggcuggacgggagauguuaauuuaccuagcgcaguaucuauguucugaguaucuccuggggaaccccagaauucaacgcuuacugaauacaacccggauccaucuucucccuucuaugaaucccgauggguacgaggucgcugcagcagaaggugcaggauacaauggcuggaccucugggcgucagaacgcucaaaaucuugacuugaaucguaacuuccccgaucucaccucugaauauuacagacuggcugaaacaagaggcgcccgaucugaccauauccccaucccucaacauuacuggugggggaagguggccccagaaacaaaagcgaucaugaaguggaugcagaccauccccuuuguccugagugcaucauuacaugggggugaucucguaguguccuauccuuuugauuuuucuaagcauccucaggaggagaagauguucucucccacuccugacgagaaaauguucaaacuguugaguagggcuuacgcagacguccacccaaugaugauggacagaucagagaaccggugcgggggaaauuuucuuaagcggggaucaaucauaaauggcgcagauugguacucauucacgggggguaugucugacuucaauuaccuccacacaaacugcuuugagauuacuguugagcugggcugcguaaaauuccccccggaagaggcccuguacauacuguggcagcacaauaaagaaucucugcuaaacuuuguagaaaccguccaucgggggauaaagggcguggugacggacaaauuuggcaagccuguaaaaaacgcccgcauuuccguaaagggcauucgacaugauauuaccacagccccagauggcgauuacuggaggcuccuaccucccgguauccauauugugauagcucaggcgccaggguaugcuaaggugauuaaaaaggucauuauucccgcccgcaugaagcgcgcuggaagggucgacuuuauauugcagcccuuaggaaugggaccuaagaacuucauucauggacucaggaggacggguccacaugacccauuggguggcgcaucaucccugggagaggcuaccgagccugacccauugcgagcgcgacggcagcccucugccgacggcuccaagccuuggugguggucauauuuuacuagcuuauccacgcaccgcccacgcuggcuccucaaguacuag

SEQ ID NO: 25962 - RNA, 1548 nt, Artificial Sequence
  derived and/or modified sequence
auggcuuggccguacuuucuugauugucaccgauacuucacacgggaggacgaaggaugcuacgauccacuggaaaaacugcgaggcggucuggaagcugacgaggcucuuccuagcggccugccaccaaccuuuauccgcuucucucaccauucauacgcucagauggugcgaguacugagacgcacagccucaagaugugcgcauguggcacgcacauacagcauugguagaagcuuugacggcagggaauuauuaguuauugaguucagcucucguccuggccagcacgaacugauggaaccugaggucaaacugauuggcaacauccaugggaacgaaguugccggccgggagauguugaucuaucuggcccaauaucuuugcuccgaguaccugcugggaaacccgcggauccagcguuuguugaacaccaccaggauucacuuacuaccuucuaugaaccccgauggauaugaagucgccgccgcggagggggcgggguauaauggguggacgaguggccgccagaaugcccagaacuuggaucucaaccgcaauuuuccugaucuaaccagcgaauacuaccgccuagccgaaacucgaggagcacggucugaucacaucccgauuccacagcacuacugguggggaaagguugcccccgaaaccaaggccauaaugaaauggaugcaaaccauuccuuucgugcuuucagcuagccugcaugggggggaccuaguuguauccuaccccuucgauuucuccaaacacccccaggaagaaaagauguuuucacccacucccgacgagaagauguuuaagcugcugagccgggcguaugcggaugugcauccaaugaugauggauagaagcgaaaaucggugcggcggaaacuucuugaagagaggaucuauaaucaauggcgccgacugguacucuuucaccggaggcauguccgauuuuaacuaucuccauaccaacuguuuugagaucacuguagagcugggaugcguaaaauucccuccagaagaggcucucuacauccuguggcagcauaauaaagagucccuguuaaauuuugucgagaccgugcaucgaggcauaaaggguguggucaccgauaaguucggaaagccugugaagaacgcucgcauaaguguuaaggguaucagacaugacauaacuacugcuccugauggggacuacuggcggcuguugccucccgggauccacaucgugauagcacaggcccccgguuaugccaagguuaucaaaaaggugauaauuccugcccguaugaagcgagcaggcaggguggacuuuauacugcagccguuagguauggggccaaagaauuuuauucauggccugcgucgcacaggcccacaugacccguugggcggggccagcucccugggugaagcuacagagcccgacccucuucgcgccagacgccaaccguccgccgaugguuccaagccauggugguggagcuacuuuacaucccuuagcacucaucgaccacgcuggcugcucaaguacuag

SEQ ID NO: 25963 - RNA, 1959 nt, Artificial Sequence
  derived and/or modified sequence
augcccccuccuuugccacugcugcuauugacgguauuagugguugccgccgcuaggccgggcugugaguuugagcggaacccugcuggugaaugccaccgucccccagccgccgacucggcaacuuguguugaucugcagcuccgcacuugcuccgacgcugcuuacaaccauacuacguuucccaaccuucuccaacacagaucgugggaaguuguagaggccucaagugaauacauccugcucucggugcuucaccaacuuuuagagggacaguguaacccagaccugagacuacuggggugugcuguguuagccccaaggugcgaaggcgguugggugagacgacccuguaggcauauuugcgagggcuugagagaaguuugccagcccgccuucgacgcaauagacauggccuggcccuacuuucuggacugucaccgcuacuucacacgugaggaugagggaugcuaugacccacuggaaaaauuacgaggcgguuuggaggccgacgaggcucuaccuucuggucucccaccuacauucauucgauucucucaucauaguuacgcgcagaugguccguguccuucgacgaacugccucacgaugcgcccauguggcccguacuuauagcaucggacgcucuuuugauggacgugaauuacucgugauugaauuuaguagucgcccuggucagcacgagcugauggaacccgaaguuaaauugauuggcaacauccacggcaaugagguugccggucgggagaugcucauuuaccuugcucaauaucugugcucggaauacuuacuugguaacccuaggauccaaaggcuccucaacacuacccgcauucacuuacucccaucgaugaauccagauggguaugaaguugcggcugcggaaggagcaggauauaauggauggacuagcggucggcagaacgcccagaacuuagaccugaacaggaauuuccccgaucugacaucugaauacuauagauuggccgaaacccggggagcucggagcgaucacauuccaaucccccagcacuacugguggggaaaggucgcuccagaaacuaaagcuaucaugaaauggaugcagaccauacccuuuguacucagugccucacuccaugggggagaccuggucgucucuuauccuuuugauuuuagcaaacauccacaggaagagaaaauguucucgccuacuccagacgagaaaauguucaaacugcuuucuagagcuuacgccgauguucacccuaugaugauggauagauccgaaaaccgcugugggggaaacuuucugaaacggggauccauaauuaauggagcugacugguauaguuucacaggcgggaugucagauuuuaacuacuugcauacaaacugcuucgagaucaccgucgagcugggaugugucaaguuuccaccagaagaggcccucuacauccucuggcaacacaauaaggaaucccugcugaauuucguagagacugugcaucgaggaauaaaaggcgugguaacugacaaguucggcaagcccguuaagaacgccagaauuagcgugaaaggcauuagacaugauaucaccacagccccugacggugauuacuggagacucuuaccacccgguauccacaucgugaucgcccaagcuccuggcuacgcuaagguaaucaagaaggugaucaucccugcuagaaugaaacgugccggcagggucgacuuuauccuccagccccucggcauggggccaaaaaacuuuauccacggucugagaagaacugggccucacgauccauuggguggcgcuucauccuugggcgaagccaccgagccugacccucugagagccaggcgccaaccaucagcagacggcagcaaaccuuggugguggaguuacuuuacaucacuuaguacacacagaccucguuggcugcuaaaauauuag

SEQ ID NO: 25964 - RNA, 1548 nt, Artificial Sequence
  derived and/or modified sequence
auggcauggcccuacuuccuagacugccauagauacuuuacgagagaagacgaaggauguuaugacccccuagaaaagcuucgcggcggccuggaagccgacgaagcccugcccagcgggcugccacccacauuuauuagauucucccaccacuccuacgcccagaugguccgggugcugaggagaacugccucccguugcgcucacgucgcaaggacauacucuaucggaagaucguuugauggucgagaauuguuggucauugaauuuaguucccgcccaggacaacacgaguuaauggagcccgaggucaaauuaauugggaacauucauggaaaugaaguugcuggucgcgaaaugcugaucuaucucgcucaauaucuguguucagaauacuugcucgggaacccccgcauacaaaggcugcuuaauaccaccagaauucacuugcuuccgucaaugaaccccgacggauaugagguagcugccgcugagggagcuggcuacaaugguuggacgagcggacgccaaaacgcucagaaccucgaccugaaccggaacuucccagauuuaacaagcgaauacuauagguuggccgagaccagaggagcccgaagcgaucauaucccaaucccucaacacuacuggugggggaagguagcccccgaaaccaaagccaucaugaaauggaugcagacaauuccuuuugugcugucagcaagccugcauggaggugaucuugucgucuccuacccauuugauuucucaaagcacccucaagaagagaagauguucucgcccaccccagaugaaaagauguuuaaacugcugucaagagccuacgcugacguucacccuaugaugauggauagaucagaaaaucgcuguggcgguaacuuccuaaagagaggauccauuauaaacggagcugacugguacucguucaccggcggcaugagcgauuucaauuaccugcacacuaacugcuuugagauuaccgucgaacucgggugugugaaauucccuccagaggaagcccuguacauccuguggcaacacaacaaggaaucuuuauuaaacuucgucgaaacuguucacagagggauaaagggcgugguaacagauaaauucggaaagccagucaagaacgcucgcaucucagucaaagggauucgccacgacauaaccacggcgccagacggggauuauuggcgucuauuaccccccggcauucacauugugauugcgcaggcccccggcuaugccaagguaauaaagaagguuaucauucccgcccggaugaagagagcugggcgagucgauuuuauacuccagccacugggcauggguccaaagaauuucauccacggccuuagacgcacuggcccacacgacccacucggcggcgccuccucccuaggggaagccacagaaccagauccgcuucgugcgcgaagacaacccucugcugauggaucaaaaccuuggugguggucauacuucaccucucuuucuacacaucgaccacgcuggcugcugaaauacuag

SEQ ID NO: 25965 - protein, 515 aa, Artificial Sequence
  derived and/or modified sequence
MAWPYFLDCHRYFTREDEGCYDPLEKLRGGLEADEALPSGLPPTFIRFSHHSYAQMVRVLRRTASRCAHVARTYSIGRSFDGRELLVIEFSSRPGQHELMEPEVKLIGNIHGNEVAGREMLIYLAQYLCSEYLLGNPRIQRLLNTTRIHLLPSMNPDGYEVAAAEGAGYNGWTSGRQNAQNLDLNRNFPDLTSEYYRLAETRGARSDHIPIPQHYWWGKVAPETKAIMKWMQTIPFVLSASLHGGDLVVSYPFDFSKHPQEEKMFSPTPDEKMFKLLSRAYADVHPMMMDRSENRCGGNFLKRGSIINGADWYSFTGGMSDFNYLHTNCFEITVELGCVKFPPEEALYILWQHNKESLLNFVETVHRGIKGVVTDKFGKPVKNARISVKGIRHDITTAPDGDYWRLLPPGIHIVIAQAPGYAKVIKKVIIPARMKRAGRVDFILQPLGMGPKNFIHGLRRTGPHDPLGGASSLGEATEPDPLRARRQPSADGSKPWWWSYFTSLSTHRPRWLLKY

SEQ ID NO: 25966 - protein, 260 aa, Artificial Sequence
  derived and/or modified sequence
MQGEPFACLTHQEPLPKMFKLLSRAYADVHPMMMDRSENRCGGNFLKRGSIINGADWYSFTGGMSDFNYLHTNCFEITVELGCVKFPPEEALYILWQHNKESLLNFVETVHRGIKGVVTDKFGKPVKNARISVKGIRHDITTAPDGDYWRLLPPGIHIVIAQAPGYAKVIKKVIIPARMKRAGRVDFILQPLGMGPKNFIHGLRRTGPHDPLGGASSLGEATEPDPLRARRQPSADGSKPWWWSYFTSLSTHRPRWLLKY

SEQ ID NO: 25967 - DNA, 783 bp, Artificial Sequence
  derived and/or modified sequence
atgcaaggagagcccttcgcttgcctgacccatcaggaacctctgcccaagatgtttaagctactctcgagagcgtacgcagacgtccaccctatgatgatggatagatccgaaaatcggtgcggcggtaactttttgaaacgtggctcaattattaatggagctgattggtattcttttactggaggtatgagtgattttaattatctgcacactaattgtttcgaaattacagtcgagctggggtgtgtgaaattcccacctgaagaggctctctatatcctctggcaacataacaaggagtccctacttaactttgtggagacggtacatcgcggtattaaaggtgttgtcaccgataagtttgggaagccggtgaaaaacgctagaatctcagtgaaaggaataagacatgatatcaccactgcgcctgacggcgactactggagactgctgccgcctggcatccacatcgttatagcccaagcacctgggtacgccaaggtgattaagaaagtgataatacccgctcggatgaagcgggctggtagggtagactttattctgcagccactggggatggggcctaaaaattttattcacggtctgcggaggacgggtccacacgatccactaggtggcgctagctcgctcggggaggccactgagcctgatccattgagggcgagacgccagccctcagccgacggtagtaagccatggtggtggtcctatttcacatccctttccacacaccgtccacgatggcttctgaaatattag

SEQ ID NO: 25968 - DNA, 783 bp, Artificial Sequence
  derived and/or modified sequence
atgcagggagaaccattcgcatgcttgacccaccaggagcctcttcccaagatgttcaagctgttaagccgggcgtacgccgacgtgcatcctatgatgatggaccggtctgaaaataggtgtggcggaaattttctgaaaaggggctctatcataaacggcgccgactggtattcttttactgggggaatgagtgattttaactacctgcatacaaattgctttgagattactgttgaactgggttgcgtaaagtttccgcctgaagaagccctttacatactttggcagcacaataaagaaagcttactcaatttcgttgagaccgtgcataggggaatcaagggagtggtgaccgacaagttcggcaaacccgtgaagaatgcccgaattagcgttaagggcatcagacacgatatcactactgctccagacggcgactattggcgcctcctgcctcccgggatccatatcgtgattgcccaggctcctggatatgcaaaagtgattaagaaggtgatcatccccgctcggatgaaaagggctggtcgggtcgatttcatcctgcaacctctcggaatgggcccaaagaacttcatacacggtctccggagaacaggccctcacgatcctcttggtggtgccagctccctgggcgaagctacagaaccggaccccctgagagctcgccgccagccctccgcggatggaagcaagccatggtggtggtcctattttacttctttgtctacccacagacctcggtggctcttgaagtactag

SEQ ID NO: 25969 - DNA, 783 bp, Artificial Sequence
  derived and/or modified sequence
atgcagggagaaccattcgcatgcttgacccaccaggagcctcttcccaagatgttcaagctgttaagccgggcgtacgccgacgtgcatcctatgatgatggaccggtctgaaaataggtgtggcggaaattttctgaaaaggggctctatcataaacggcgccgactggtattcttttactgggggaatgagtgattttaactacctgcatacaaattgctttgagattactgttgaactgggttgcgtaaagtttccgcctgaagaagccctttacatactttggcagcacaataaagagtccctgcttaactttgtcgagacagtgcatcgcggtatcaaaggggtagttaccgataaattcggaaaacccgtaaagaatgctcgaatttcagtcaaaggaatccgacacgacattaccacggcccctgatggcgactactggcgtttgcttccccccgggattcacattgtgatcgcacaggctcctgggtatgcaaaagtaataaaaaaggttattattccggcaagaatgaagagggccggcagggtagattttatcttacagcctctgggtatgggtccaaagaacttcattcacggactgagacgaacagggcctcatgaccctctgggcggcgcctctagtttgggtgaggcgacagaaccagacccactgagagcaagacgacaaccatccgccgacggctcaaagccatggtggtggtcctattttacgtcactctcaactcatagaccaaggtggctattaaagtactag

SEQ ID NO: 25970 - DNA, 783 bp, Artificial Sequence
  derived and/or modified sequence
atgcagggcgagcccttcgcctgcctgacccaccaggagcccctgcccaagatgttcaagctgctgagcagagcctacgccgacgtgcaccccatgatgatggacagaagcgagaacagatgcggcggcaacttcctgaagagaggcagcatcatcaacggcgccgactggtacagcttcaccggcggcatgagcgacttcaactacctgcacaccaactgcttcgagatcaccgtggagctgggctgcgtgaagttcccccccgaggaggccctgtacatcctgtggcagcacaacaaggagagcctgctgaacttcgtggagaccgtgcacagaggcatcaagggcgtggtgaccgacaagttcggcaagcccgtgaagaacgccagaatcagcgtgaagggcatcagacacgacatcaccaccgcccccgacggcgactactggagactgctgccccccggcatccacatcgtgatcgcccaggcccccggctacgccaaggtgatcaagaaggtgatcatccccgccagaatgaagagagccggcagagtggacttcatcctgcagcccctgggcatgggccccaagaacttcatccacggcctgagaagaaccggcccccacgaccccctgggcggcgccagcagcctgggcgaggccaccgagcccgaccccctgagagccagaagacagcccagcgccgacggcagcaagccctggtggtggagctacttcaccagcctgagcacccacagacccagatggctgctgaagtactag

SEQ ID NO: 25971 - DNA, 783 bp, Artificial Sequence
  derived and/or modified sequence
atgcagggcgagccctttgcctgcctaacacatcaagagcctttgcccaagatgttcaaactgctatcaagggcatacgcagacgttcacccaatgatgatggataggagcgaaaacagatgcggcggaaatttcctgaaacggggcagcatcattaatggggctgactggtatagttttaccggtggaatgtctgactttaactacctccacaccaactgtttcgagattactgtggaactgggttgcgttaaattccctcctgaagaggccttgtatattctatggcaacacaacaaggagagtctgctgaacttcgtggagaccgtgcatcggggaattaagggtgtggtcacagacaaatttggaaaaccagtgaagaatgcccggatctccgtgaaaggcatccggcatgatataaccaccgctcccgacggagactattggcggctgctgccccccggcatacacatcgtcatagctcaggcaccgggctacgcaaaggttataaagaaagtcattattcccgctaggatgaaaagggctggcagggtggacttcatccttcagcccctgggcatgggacctaaaaacttcattcacggactgcggcggaccggaccccatgatccactaggcggggcgtcttccctgggggaagctaccgagcctgatcctctgagagccaggcggcaacccagcgccgacggatcaaagccatggtggtggagctattttactagcctatccacacatagaccccgatggctgctgaagtactag

SEQ ID NO: 25972 - DNA, 783 bp, Artificial Sequence
  derived and/or modified sequence
atgcagggcgagccctttgcctgcctgacccaccaggagcccctgcccaagatgttcaagctgctgagccgggcctatgcagatgtgcaccccatgatgatggacagaagtgagaacagatgtggcggcaacttcctgaagaggggcagcatcatcaatggagctgactggtacagcttcaccggcggcatgtctgacttcaactacctgcacaccaactgctttgagatcaccgtggagctgggctgtgtgaagtttcctcctgaggaggccctgtacatcctgtggcagcacaacaaggagagcctgctgaactttgtggagaccgtgcaccggggcatcaagggcgtggtgacagacaagtttgggaagcctgtgaagaatgcccgcatctctgtgaagggcatcagacatgacatcaccacagccccagatggagactactggaggctgctgcccccaggcatccacatcgtcatcgcccaggcccctggctacgccaaggtgatcaagaaggtgatcatcccagccaggatgaagagagctggccgggtggacttcatcctgcagcccctgggcatgggccccaagaacttcatccacggcctgcggaggacaggcccccatgaccccctgggcggggccagcagcctgggggaggccacagagccagaccccctgcgggcccggcggcagcccagcgcagatggcagcaagccctggtggtggagctacttcaccagcctgagcacccaccggccccgctggctgctgaagtactag

SEQ ID NO: 25973 - DNA, 783 bp, Artificial Sequence
  derived and/or modified sequence
atgcagggcgagcccttcgcctgcctgacccaccaggagcccctgccaaaaatgtttaaactgctgtctcgggcctacgcagacgtgcacccaatgatgatggacaggtccgagaatcgctgtggcgggaacttcctgaaacggggatctataatcaacggagcagattggtacagttttacgggaggcatgtccgattttaattatttacatacaaattgtttcgaaataactgtggagctgggctgcgtgaagtttccaccagaggaggctctgtacattctgtggcagcacaataaggagagcctgcttaattttgtggaaacggtgcacagaggcatcaagggggtggtgaccgacaagttcggaaagccggtgaaaaacgcgcgcattagtgtcaagggaatacgccacgacataactaccgccccagatggcgattattggagacttctgccacctggcatccacatcgtaatcgctcaggcccctgggtacgcaaaggtcatcaaaaaagttatcatcccagccagaatgaaacgagccggaagagtggacttcattctgcagccactagggatgggccctaaaaactttatccacggactgcgacggacaggacctcacgatccactgggaggtgccagttccttgggtgaagccacagaacccgatcccctccgtgctcgccgacagccatcagccgacgggtcaaaaccatggtggtggtcgtactttacgagcttgtcaactcatcgtcctcgatggctgcttaagtattag

SEQ ID NO: 25974 - RNA, 783 nt, Artificial Sequence
  derived and/or modified sequence
augcagggagaaccauucgcaugcuugacccaccaggagccucuucccaagauguucaagcuguuaagccgggcguacgccgacgugcauccuaugaugauggaccggucugaaaauagguguggcggaaauuuucugaaaaggggcucuaucauaaacggcgccgacugguauucuuuuacugggggaaugagugauuuuaacuaccugcauacaaauugcuuugagauuacuguugaacuggguugcguaaaguuuccgccugaagaagcccuuuacauacuuuggcagcacaauaaagaaagcuuacucaauuucguugagaccgugcauaggggaaucaagggaguggugaccgacaaguucggcaaacccgugaagaaugcccgaauuagcguuaagggcaucagacacgauaucacuacugcuccagacggcgacuauuggcgccuccugccucccgggauccauaucgugauugcccaggcuccuggauaugcaaaagugauuaagaaggugaucauccccgcucggaugaaaagggcuggucgggucgauuucauccugcaaccucucggaaugggcccaaagaacuucauacacggucuccggagaacaggcccucacgauccucuugguggugccagcucccugggcgaagcuacagaaccggacccccugagagcucgccgccagcccuccgcggauggaagcaagccaugguggugguccuauuuuacuucuuugucuacccacagaccucgguggcucuugaaguacuag

SEQ ID NO: 25975 - RNA, 783 nt, Artificial Sequence
  derived and/or modified sequence
augcagggagaaccauucgcaugcuugacccaccaggagccucuucccaagauguucaagcuguuaagccgggcguacgccgacgugcauccuaugaugauggaccggucugaaaauagguguggcggaaauuuucugaaaaggggcucuaucauaaacggcgccgacugguauucuuuuacugggggaaugagugauuuuaacuaccugcauacaaauugcuuugagauuacuguugaacuggguugcguaaaguuuccgccugaagaagcccuuuacauacuuuggcagcacaauaaagagucccugcuuaacuuugucgagacagugcaucgcgguaucaaagggguaguuaccgauaaauucggaaaacccguaaagaaugcucgaauuucagucaaaggaauccgacacgacauuaccacggccccugauggcgacuacuggcguuugcuuccccccgggauucacauugugaucgcacaggcuccuggguaugcaaaaguaauaaaaaagguuauuauuccggcaagaaugaagagggccggcaggguagauuuuaucuuacagccucuggguauggguccaaagaacuucauucacggacugagacgaacagggccucaugacccucugggcggcgccucuaguuugggugaggcgacagaaccagacccacugagagcaagacgacaaccauccgccgacggcucaaagccaugguggugguccuauuuuacgucacucucaacucauagaccaagguggcuauuaaaguacuag

SEQ ID NO: 25976 - protein, 346 aa, Artificial Sequence
  derived and/or modified sequence
MYLSLWVTINTVNLRNTLSGLRGAVTTVGMIKSDVPGTQEWLDERRRQGDLPLPTNSNPVLSLELCDPGQGPAPFQAVVVLIQPGRGLALRPPPSCLFPPDPTPSPPAGQIRVKPDRTGVVTDGVKHSMNPFCEIAVEEAVRLKEKKLVKEVIAVSCGPAQCQETIRTALAMGADRGIHVEVPPAEAERLGPLQVARVLAKLAEKEKVDLVLLGKQAIDDDCNQTGQMTAGFLDWPQGTFASQVTLEGDKLKVEREIDGGLETLRLKLPAVVTADLRLNEPRYATLPNIMKAKKKKIEVIKPGDLGVDLTSKLSVISVEDPPQRTAGVKVETTEDLVAKLKEIGRI

SEQ ID NO: 25977 - DNA, 1041 bp, Artificial Sequence
  derived and/or modified sequence
atgtacctcagtttgtgggtcactatcaacaccgtgaacctccgcaacactctgagcggactccggggagccgtcaccactgtgggcatgattaagtccgatgttcctggcacccaggaatggctggacgagcggaggcgccaaggagacctcccactcccgaccaattcaaatccagtcctgagtttggagctgtgtgaccctgggcaggggccagccccattccaggccgtagtggtgctgatccagcccggccgtggcttagcccttcgaccaccccctagttgcctctttcctccggatccaacaccctcccctcctgctggtcagattagagtgaaacctgaccgaacgggcgtggtaaccgatggggtaaaacatagcatgaaccctttctgcgaaatcgccgtagaggaggccgtccgcctcaaggagaagaagctggtcaaggaggtgatagctgtctcatgtggtcccgcccagtgccaagaaacaatccgaaccgcattggcaatgggagcagacagagggatacatgtggaagtgccacccgccgaagccgagagactgggacccctgcaggtggcccgggtattagccaaactggctgaaaaagagaaggtcgatctggttctgctcgggaaacaggccatagacgatgattgcaatcagactggtcagatgaccgccggcttccttgattggccacagggcacattcgcctctcaggtaacactggagggcgataagctgaaggtggaacgtgaaatcgacgggggcctggagacattgcgactgaaattacctgctgtagtgactgcggatttgcggctcaatgagccacgttacgcaacactgccaaatataatgaaagcaaagaagaaaaagatcgaagtgattaaacctggtgacctcggggtggatttgacatccaagttgtcagttatctctgtggaggatcccccccagaggacagcaggcgtgaaggttgagacgactgaagatctggtggcaaagctcaaggaaatagggagaatttag

SEQ ID NO: 25978 - DNA, 1041 bp, Artificial Sequence
  derived and/or modified sequence
atgtacctgagcctgtgggtgaccatcaacacagtgaacctgaggaacaccctgagcggcctgcggggagctgtgaccaccgtgggcatgatcaagagtgatgtgcccggcacccaggagtggctggatgaaagaagacggcagggcgacctgcccctgcccaccaacagcaaccctgtgctgagcctggagctgtgtgaccccggccagggccctgcccccttccaggccgtggtggtgctgatccagcccggccggggcctggccctgcggcccccacccagctgcctcttccccccagaccccacccccagccccccagctggccagatccgggtgaagccagacagaactggagtggtgacagatggagtgaagcacagcatgaaccccttctgtgaaattgctgtggaggaggccgtgcggctgaaggagaagaagctggtgaaggaggtgattgctgtgtcctgtggccctgcccagtgccaggagaccatcagaacagccctggccatgggcgctgaccggggcatccacgtggaggtgcccccagctgaggccgagcggctgggccccctgcaggtggcccgggtgctggccaagctggccgagaaggagaaggtggacctggtgctgctgggcaagcaggccattgatgatgactgcaaccagacaggccagatgacagctggcttcctggactggccccagggcacctttgccagccaggtgaccctggagggggacaagctgaaggtggagcgggagattgatggcggcctggagaccctgcggctgaagctgcctgctgtggtgacagctgacctgcggctgaatgagcccaggtatgccaccctgcccaacatcatgaaggccaagaagaagaagattgaagtcatcaagccaggggacctgggcgtggacctgaccagcaagctgagcgtcatctctgtggaggaccccccccagaggacagctggggtgaaggtggagaccacagaggacctggtggccaagctgaaggagatcggccgcatctag

SEQ ID NO: 25979 - DNA, 1041 bp, Artificial Sequence
  derived and/or modified sequence
atgtacctgagcctgtgggtgaccatcaacaccgtgaacctgcggaacaccttatccggcctacgcggggccgtaaccacagtgggaatgataaaaagcgacgtgcccggcacacaggaatggttggacgagcggaggagacagggagatctcccgctgccgaccaacagcaatcctgtactgtcgctggaactgtgcgatcccggtcaggggccggccccgtttcaggccgtggtggtattgatacagcctggcagggggctggctctgcggccgccacccagctgtctgttcccccctgacccgacgccgagcccccctgctggccagattcgcgtgaagcccgaccggactggcgtggtgaccgacggtgtaaaacactctatgaaccccttttgtgaaatcgccgtagaggaagcagtgagacttaaagagaaaaagctggttaaggaggttatcgctgtgtcctgtggtcccgcccagtgccaggaaactatccgaaccgccctggctatgggcgctgacaggggcattcatgtcgaggtgccacccgcagaagcagaacgtctgggaccacttcaagtggcaagggttctggccaaattagcggagaaggagaaagtggacctcgtgctgctggggaagcaggctatcgatgacgactgcaatcagaccggccaaatgacagcggggtttctcgattggccccagggaacgttcgccagtcaggtcactttggaaggtgacaaacttaaagtggagcgagaaatcgacggtggtctggagacactccggctcaagctacccgccgtagtcaccgccgaccttcggctgaacgagcctaggtatgccacactcccgaatataatgaaggccaaaaagaagaagatcgaggtgatcaaacctggtgaccttggtgttgaccttacaagcaagctgtccgtcatcagcgtcgaagatcccccccaacgcactgccggtgtgaaagtggagacaacggaggacctggttgccaagctgaaagaaattggcagaatctag

SEQ ID NO: 25980 - DNA, 1041 bp, Artificial Sequence
  derived and/or modified sequence
atgtacctttccctgtgggtgacgatcaatacggtaaacctccgcaatactctctccggactgaggggggctgtgactactgtcggaatgatcaaaagtgacgtccccggtacccaagaatggctggacgagcgacgtcgccagggcgacttgcctttgcccaccaattcaaaccctgtgctttcactggagctgtgtgacccgggacaggggccagcaccttttcaggccgtagtggtactgattcaaccagggcgtgggctggccctgcgcccacccccatcatgcctgtttccccctgaccctaccccgagccccccagccggtcagatcagagtgaagcccgatcggacaggggtcgtaactgatggcgttaagcactcaatgaatcccttctgtgagattgccgtggaagaggccgtccggctgaaagagaaaaagctggtgaaggaggtaatagccgtatcctgtggccctgctcagtgccaggagacaatccggacagccctggcaatgggcgcagatcggggaatccacgtagaagtcccaccagctgaagccgaacggctcggcccactgcaagtggcccgtgtgcttgcaaagctggctgaaaaagaaaaagtggaccttgtcctcttaggaaagcaggccattgatgacgattgcaatcagactggacagatgactgccggatttctagactggcctcaaggaactttcgcgtctcaggtaaccttagaaggcgataagctgaaggtggagagagaaattgatgggggactagagacgctccgcctcaagttacctgctgttgtaacagctgatctgagactgaacgaacccaggtatgcaactctgcctaacattatgaaggctaaaaaaaagaaaatagaagtcattaagcccggagatctgggggttgacctcacatcaaaactgtctgtgatcagtgtcgaggatcctccgcagcggacagctggggtgaaagtcgagaccaccgaagatttggtcgctaaactgaaggagataggcaggatttag

SEQ ID NO: 25981 - DNA, 1041 bp, Artificial Sequence
  derived and/or modified sequence
atgtacctgagcctgtgggtgaccatcaacaccgtgaacctgagaaacaccctgagcggcctgagaggcgccgtgaccaccgtgggcatgatcaagagcgacgtgcccggcacccaggagtggctggacgagagaagaagacagggcgacctgcccctgcccaccaacagcaaccccgtgctgagcctggagctgtgcgaccccggccagggccccgcccccttccaggccgtggtggtgctgatccagcccggcagaggcctggccctgagacccccccccagctgcctgttcccccccgaccccacccccagcccccccgccggccagatcagagtgaagcccgacagaaccggcgtggtgaccgacggcgtgaagcacagcatgaaccccttctgcgagatcgccgtggaggaggccgtgagactgaaggagaagaagctggtgaaggaggtgatcgccgtgagctgcggccccgcccagtgccaggagaccatcagaaccgccctggccatgggcgccgacagaggcatccacgtggaggtgccccccgccgaggccgagagactgggccccctgcaggtggccagagtgctggccaagctggccgagaaggagaaggtggacctggtgctgctgggcaagcaggccatcgacgacgactgcaaccagaccggccagatgaccgccggcttcctggactggccccagggcaccttcgccagccaggtgaccctggagggcgacaagctgaaggtggagagagagatcgacggcggcctggagaccctgagactgaagctgcccgccgtggtgaccgccgacctgagactgaacgagcccagatacgccaccctgcccaacatcatgaaggccaagaagaagaagatcgaggtgatcaagcccggcgacctgggcgtggacctgaccagcaagctgagcgtgatcagcgtggaggaccccccccagagaaccgccggcgtgaaggtggagaccaccgaggacctggtggccaagctgaaggagatcggcagaatctag

SEQ ID NO: 25982 - DNA, 1300 bp, Artificial Sequence
  derived and/or modified sequence
aaagaacaaaaggcttctgtgctgggcagcttgagttttccccaggctgctctattgttgcctgtagctgtgatttttcaggcaggctgctcctctgaggaccacccttaactgtctacctaactggtttttccttttcttctcctcatttgtatttatgtatcagtgtattatgtatttatatacacttggagatacagtaaaatgtacctctcactgtgggttaccataaatactgtaaatttgagaaacactctttcaggcctgagaggagcagtgacaacagtagggatgatcaagtcagatgtccctggtacccaggaatggctggatgagagaaggagacagggtgacctgcccctgcctacaaactctaacccagttctgtccctggagctgtgtgaccccggacaaggccctgcccctttccaggctgtcgttgtcctcatccagcctgggagagggttggcgctgaggcccccaccttcttgcctgtttcctcctgaccccaccccttcccctcctgctgggcagatccgagtgaagcctgacaggaccggtgtggtcacggatggtgtgaagcactccatgaaccccttctgtgagatcgcggtggaggaggctgtgcggctcaaggagaagaagctggtgaaggaggtcatcgccgtcagctgtgggcctgcacagtgccaggagacgattcgtaccgccctggccatgggtgcagaccgaggtatccacgtggaggtgcccccagcagaagcagaacgcttgggtcccctgcaggtggctcgggtcctggccaagctggcagagaaggagaaggtggacctggtgctgctgggcaaacaggccatcgatgatgactgtaaccagacagggcagatgacagctggatttcttgactggccacagggcacattcgcctcccaggtgacgctggagggggacaagttgaaagtggagcgggagatcgatgggggcctggagaccctgcgcctgaagctgccagctgtggtgacagctgacctgaggctcaacgagccccgctacgccacgctgcccaacatcatgaaagccaagaagaagaagatcgaggtgatcaagcctggggacctgggtgtggacctgacctccaagctctctgtgatcagtgtggaggacccgccccagcgcacggccggcgtcaaggtggagaccactgaggacctggtggccaagctgaaggagattgggcggatttgagcccctcccagagatggcaataaaactgactctcaacatctatctctgttaactt

SEQ ID NO: 25983 - protein, 452 aa, Artificial Sequence
  derived and/or modified sequence
MDDIFTQCREGNAVAVRLWLDNTENDLNQGDDHGFSPLHWACREGRSAVVEMLIMRGARINVMNRGDDTPLHLAASHGHRDIVQKLLQYKADINAVNEHGNVPLHYACFWGQDQVAEDLVANGALVSICNKYGEMPVDKAKAPLRELLRERAEKMGQNLNRIPYKDTFWKGTTRTRPRNGTLNKHSGIDFKQLNFLTKLNENHSGELWKGRWQGNDIVVKVLKVRDWSTRKSRDFNEECPRLRIFSHPNVLPVLGACQSPPAPHPTLITHWMPYGSLYNVLHEGTNFVVDQSQAVKFALDMARGMAFLHTLEPLIPRHALNSRSVMIDEDMTARISMADVKFSFQCPGRMYAPAWVAPEALQKKPEDTNRRSADMWSFAVLLWELVTREVPFADLSNMEIGMKVALEGLRPTIPPGISPHVCKLMKICMNEDPAKRPKFDMIVPILEKMQDK

SEQ ID NO: 25984 - protein, 318 aa, Artificial Sequence
  derived and/or modified sequence
MPVDKAKAPLRELLRERAEKMGQNLNRIPYKDTFWKGTTRTRPRNGTLNKHSGIDFKQLNFLTKLNENHSGELWKGRWQGNDIVVKVLKVRDWSTRKSRDFNEECPRLRIFSHPNVLPVLGACQSPPAPHPTLITHWMPYGSLYNVLHEGTNFVVDQSQAVKFALDMARGMAFLHTLEPLIPRHALNSRSVMIDEDMTARISMADVKFSFQCPGRMYAPAWVAPEALQKKPEDTNRRSADMWSFAVLLWELVTREVPFADLSNMEIGMKVALEGLRPTIPPGISPHVCKLMKICMNEDPAKRPKFDMIVPILEKMQDK

SEQ ID NO: 25985 - DNA, 1359 bp, Artificial Sequence
  derived and/or modified sequence
atggacgacatcttcacccagtgcagagagggcaacgccgtggccgtgagactgtggctggacaacaccgagaacgacctgaaccagggcgacgaccacggcttcagccccctgcactgggcctgcagagagggcagaagcgccgtggtggagatgctgatcatgagaggcgccagaatcaacgtgatgaacagaggcgacgacacccccctgcacctggccgccagccacggccacagagacatcgtgcagaagctgctgcagtacaaggccgacatcaacgccgtgaacgagcacggcaacgtgcccctgcactacgcctgcttctggggccaggaccaggtggccgaggacctggtggccaacggcgccctggtgagcatctgcaacaagtacggcgagatgcccgtggacaaggccaaggcccccctgagagagctgctgagagagagagccgagaagatgggccagaacctgaacagaatcccctacaaggacaccttctggaagggcaccaccagaaccagacccagaaacggcaccctgaacaagcacagcggcatcgacttcaagcagctgaacttcctgaccaagctgaacgagaaccacagcggcgagctgtggaagggcagatggcagggcaacgacatcgtggtgaaggtgctgaaggtgagagactggagcaccagaaagagcagagacttcaacgaggagtgccccagactgagaatcttcagccaccccaacgtgctgcccgtgctgggcgcctgccagagcccccccgccccccaccccaccctgatcacccactggatgccctacggcagcctgtacaacgtgctgcacgagggcaccaacttcgtggtggaccagagccaggccgtgaagttcgccctggacatggccagaggcatggccttcctgcacaccctggagcccctgatccccagacacgccctgaacagcagaagcgtgatgatcgacgaggacatgaccgccagaatcagcatggccgacgtgaagttcagcttccagtgccccggcagaatgtacgcccccgcctgggtggcccccgaggccctgcagaagaagcccgaggacaccaacagaagaagcgccgacatgtggagcttcgccgtgctgctgtgggagctggtgaccagagaggtgcccttcgccgacctgagcaacatggagatcggcatgaaggtggccctggagggcctgagacccaccatcccccccggcatcagcccccacgtgtgcaagctgatgaagatctgcatgaacgaggaccccgccaagagacccaagttcgacatgatcgtgcccatcctggagaagatgcaggacaagtag

SEQ ID NO: 25986 - DNA, 1359 bp, Artificial Sequence
  derived and/or modified sequence
atggacgacatttttacccagtgcagggaaggaaatgctgtcgcagtgaggctgtggcttgacaatacggaaaacgatctgaatcaaggagatgatcatggtttttcccctctgcactgggcctgcagggagggtaggtccgcagtcgtcgaaatgctcatcatgagaggtgctagaattaatgtgatgaatagaggtgatgacacaccactccacttggcagccagccacgggcaccgcgacatagtgcaaaaactgctgcagtacaaagcggatatcaatgctgtgaacgagcatggtaatgtccccttgcactacgcctgtttctgggggcaggaccaagtggcagaggacttagtggccaacggcgcccttgtctcaatctgcaacaaatacggagaaatgccggttgacaaggcaaaagcacctttgagggaactgctgagagagcgggcggaaaagatgggtcagaacctgaaccgaattccctacaaagataccttctggaaaggcaccacgcgcaccaggcctcggaatggaactttgaataagcactctggaatagactttaaacagctgaatttcttgaccaaattgaatgaaaatcactcgggcgagctctggaaaggacggtggcagggcaatgatattgtcgtgaaggtgctgaaggtcagggattggagtacccgcaagagccgggattttaacgaagagtgcccaagactgagaatcttctcccatcctaatgtgcttccagttttgggtgcgtgtcagtcccctcccgcaccacatccaaccctgatcacccactggatgccgtacggcagcctgtacaacgtgctgcacgagggcaccaattttgtcgtcgaccagagccaagccgtcaaattcgccctggatatggctcggggcatggccttcctccatacgctcgagcctctgattcctaggcatgctctgaatagccgttccgtcatgatcgatgaagatatgacagctcgcataagtatggccgacgtgaagttcagttttcagtgccccggtagaatgtacgctcctgcgtgggtagcacccgaagccttacagaaaaaacccgaggacacgaataggcgctccgcagacatgtggagctttgctgtgctgctgtgggagctagttacgagggaggtgccctttgcagatctgagcaacatggagattggcatgaaggtagcgctagaagggctgcggcctacgataccccccggcatatctccccacgtttgtaagctaatgaagatttgcatgaacgaggatccagccaagagacctaaatttgatatgattgtaccaattctggaaaaaatgcaggataagtag

SEQ ID NO: 25987 - DNA, 1359 bp, Artificial Sequence
  derived and/or modified sequence
atggatgacatattcacacagtgtcgggaaggtaatgccgtcgcggtgagactgtggctggataataccgagaacgatttgaaccagggcgacgatcacgggttctcgcctttgcactgggcctgtagagagggacggagtgccgttgttgaaatgctgattatgcggggcgcgcgcattaacgtgatgaaccgtggcgacgacacccccctccacttggcagcttcccatggacatcgggacatcgtgcagaaattgttacaatataaggcagacattaacgcagtgaatgagcatggcaacgtccctctgcactacgcttgcttttggggccaggaccaggtggctgaggatctcgtggctaacggtgcgctggttagcatctgtaataagtacggtgaaatgcccgtagacaaagccaaggcccctctgagggagcttctgcgagagcgagcagagaagatggggcagaatctcaaccgtattccgtataaggacactttctggaaaggcacaaccaggacacgaccaagaaatggcactctgaataagcactccgggatcgatttcaaacaacttaattttctgactaaactgaacgaaaatcattctggcgagctgtggaagggacggtggcaggggaacgacatcgtggtcaaggttctgaaagtcagggactggtccaccagaaagagccgcgatttcaacgaagaatgtcctcgactccggatattttcccaccccaacgtgctgcctgtgctcggcgcatgccagtccccccctgcgcctcatcccacgctgatcacccactggatgccgtacggttccctgtataacgtcctgcacgaagggactaacttcgttgtggatcagtcgcaggctgtgaagtttgctcttgacatggcccggggcatggctttcctccatactctcgaacctttgataccaagacacgccctgaactcccggtcggttatgattgacgaagatatgacggctcgtatcagcatggcagacgtgaaattttcctttcaatgtcctgggaggatgtatgctcctgcttgggtggcccccgaggccctacagaagaagcctgaggatacaaacaggcgcagcgctgacatgtggagttttgccgtcttgctctgggaactggtgacacgagaggtgccattcgctgatctgtccaacatggagatcggcatgaaggtagccctggagggactgcgacccacaattcctcccgggatctctccccacgtgtgtaaactgatgaagatctgtatgaatgaggacccagctaaacggcctaaattcgacatgatcgtgcctattttagaaaagatgcaggataaatag

SEQ ID NO: 25988 - DNA, 1359 bp, Artificial Sequence
  derived and/or modified sequence
atggacgacatctttactcagtgtagggaggggaatgctgtcgctgtgcggctgtggctcgacaataccgagaatgacctcaatcagggtgatgaccatggcttcagcccccttcactgggcgtgtcgcgagggcaggagcgcagtcgtggaaatgctgatcatgaggggggccaggatcaatgtcatgaataggggcgacgatacccccctgcatctcgccgcatcgcatggccacagggacatagtccaaaaactcctgcagtataaggccgacatcaacgcggtgaatgagcatggaaacgtccccctacactatgcgtgtttctggggccaggaccaggtggcagaggacctggttgctaacggtgctctcgtttcaatctgcaataaatacggggagatgcctgtcgataaagccaaagcccctctacgcgaactcctgcgagaaagggcagagaagatggggcagaatctgaaccggattccctataaggacaccttctggaaaggaacaacccgcaccagacctcggaatgggacactgaacaagcactcgggcatcgatttcaagcaactgaatttcttaacaaaattgaatgaaaaccatagcggtgaactctggaaagggcgctggcagggaaacgatatcgtggtcaaagtgttgaaggtacgggactggagcaccaggaagagccgggatttcaacgaagagtgcccgcggctgcggattttcagccatcctaacgtgctgccagtgctaggggcctgtcagtctccacctgcaccgcatcccactcttataacacattggatgccctacgggagtttatacaatgtgcttcacgaagggacaaactttgtcgttgatcagtcccaggccgttaaattcgctctcgacatggcgcggggcatggcctttctgcatacgctggaaccccttattccgagacatgcccttaatagtcggtctgtaatgattgacgaggacatgactgcccgtatctcaatggccgacgtcaagttctctttccagtgccccggtcggatgtatgctcccgcctgggtcgcccctgaggccttacagaagaaaccagaagataccaacaggaggtccgctgatatgtggtcctttgcagttctgctctgggagttggtgacaagagaggtaccttttgcagacctaagtaacatggaaatcgggatgaaagtggcactggaaggtcttaggccgacaataccccccgggatatcgcctcacgtgtgtaagctgatgaagatatgtatgaatgaagacccagcaaaaaggcccaaattcgatatgatagtacctattctggaaaagatgcaggacaaatag

SEQ ID NO: 25989 - DNA, 1359 bp, Artificial Sequence
  derived and/or modified sequence
atggatgacatcttcacccagtgccgggagggcaatgctgtggccgtgcggctgtggctggacaacacagaaaatgacctgaaccagggagatgaccacggcttcagccccctgcactgggcctgccgggagggccgctctgctgtggtggagatgctgatcatgagaggagcccgcatcaacgtgatgaacagaggagatgacacccccctgcacctggccgccagccacggccaccgggacatcgtgcagaagctgctgcagtacaaggctgacatcaatgctgtgaatgaacatggaaatgtgcccctgcactacgcctgcttctggggccaggaccaggtggccgaggacctggtggccaacggggccctggtgtccatctgcaacaagtacggggagatgcctgtggacaaggccaaggcccccctgcgggagctgctgcgggagcgggcagagaagatgggccagaacctgaaccgcatcccctacaaggacaccttctggaagggcaccaccaggacccggcccagaaatggcaccctgaacaagcacagcggcatcgacttcaagcagctgaacttcctgaccaagctgaatgaaaaccacagcggggagctgtggaagggccgctggcagggcaatgacatcgtggtgaaggtgctgaaggtgcgggactggagcaccaggaagagccgggacttcaatgaggagtgcccccggctgcgcatcttcagccaccccaacgtgctgcctgtgctgggcgcctgccagagccccccagccccccaccccaccctcatcacccactggatgccctacggcagcctgtacaacgtgctgcacgagggcaccaactttgtggtggaccagagccaggccgtgaagtttgccctggacatggcccggggcatggccttcctgcacaccctggagcccctcatccccaggcatgccctgaacagccgctctgtgatgattgatgaggacatgacagcccgcatctccatggctgatgtgaagttctccttccagtgccccggccgcatgtatgccccagcctgggtggcccctgaggccctgcagaagaagccagaggacaccaacagaagatctgctgacatgtggagctttgctgtgctgctgtgggagctggtgacccgggaggtgccctttgctgacctgagcaacatggagatcggcatgaaggtggccctggagggcctgcggcccaccatccccccaggcatcagcccccacgtgtgcaagctgatgaagatctgcatgaatgaagatcctgccaagaggcccaagtttgacatgattgtgcccatcctggagaagatgcaggacaagtag

SEQ ID NO: 25990 - DNA, 1802 bp, Artificial Sequence
  derived and/or modified sequence
aagagcgccacgggcggggcggggccggcggcgggctgcgggcgcggccggacgggagttccccggagaaggatcctgcagcccgagtcccgaggataaagcttggggttcatcctccttccctggatcactccacagtcctcaggcttccccaatccaggggactcggcgccgggacgctgctatggacgacattttcactcagtgccgggagggcaacgcagtcgccgttcgcctgtggctggacaacacggagaacgacctcaaccagggggacgatcatggcttctcccccttgcactgggcctgccgagagggccgctctgctgtggttgagatgttgatcatgcggggggcacggatcaatgtaatgaaccgtggggatgacacccccctgcatctggcagccagtcatggacaccgtgatattgtacagaagctattgcagtacaaggcagacatcaatgcagtgaatgaacacgggaatgtgcccctgcactatgcctgtttttggggccaagatcaagtggcagaggacctggtggcaaatggggcccttgtcagcatctgtaacaagtatggagagatgcctgtggacaaagccaaggcacccctgagagagcttctccgagagcgggcagagaagatgggccagaatctcaaccgtattccatacaaggacacattctggaaggggaccacccgcactcggccccgaaatggaaccctgaacaaacactctggcattgacttcaaacagcttaacttcctgacgaagctcaacgagaatcactctggagagctatggaagggccgctggcagggcaatgacattgtcgtgaaggtgctgaaggttcgagactggagtacaaggaagagcagggacttcaatgaagagtgtccccggctcaggattttctcgcatccaaatgtgctcccagtgctaggtgcctgccagtctccacctgctcctcatcctactctcatcacacactggatgccgtatggatccctctacaatgtactacatgaaggcaccaatttcgtcgtggaccagagccaggctgtgaagtttgctttggacatggcaaggggcatggccttcctacacacactagagcccctcatcccacgacatgcactcaatagccgtagtgtaatgattgatgaggacatgactgcccgaattagcatggctgatgtcaagttctctttccaatgtcctggtcgcatgtatgcacctgcctgggtagcccccgaagctctgcagaagaagcctgaagacacaaacagacgctcagcagacatgtggagttttgcagtgcttctgtgggaactggtgacacgggaggtaccctttgctgacctctccaatatggagattggaatgaaggtggcattggaaggccttcggcctaccatcccaccaggtatttcccctcatgtgtgtaagctcatgaagatctgcatgaatgaagaccctgcaaagcgacccaaatttgacatgattgtgcctatccttgagaagatgcaggacaagtaggactggaaggtccttgcctgaactccagaggtgtcgggacatggttgggggaatgcacctccccaaagcagcaggcctctggttgcctcccccgcctccagtcatggtactaccccagccatggggtccatccccttcccccatccctaccactgtggccccaagaggggcgggctcagagctttgtcacttgccacatggtgtctcccaacatgggagggatcagccccgcctgtcacaataaagtttattatgaaaa

SEQ ID NO: 25991 - DNA, 2074 bp, Artificial Sequence
  derived and/or modified sequence
agtcccggtgagtgcgagaggacccgcgccccctgtcacccctcacttctcctgagtcccaagtaaggaacggagccaaccctggggaggacccccggtcccctctcccagagtatacggagcctgaacctccccacttcccccaactctgttcgcggatagggtctagttgcctgctctcggacatccgttcagcagacactacctcttcgtcaccccctgcccaccctgacccgcctttacctcgcgtctagaggacacagccagggatcatcccgcagccccgaactccttcacagacccccactagccggggacgcagctcaggccccctacccccaacacaaacacttctctcctgtagaggataaagcttggggttcatcctccttccctggatcactccacagtcctcaggcttccccaatccaggggactcggcgccgggacgctgctatggacgacattttcactcagtgccgggagggcaacgcagtcgccgttcgcctgtggctggacaacacggagaacgacctcaaccagggggacgatcatggcttctcccccttgcactgggcctgccgagagggccgctctgctgtggttgagatgttgatcatgcggggggcacggatcaatgtaatgaaccgtggggatgacacccccctgcatctggcagccagtcatggacaccgtgatattgtacagaagctattgcagtacaaggcagacatcaatgcagtgaatgaacacgggaatgtgcccctgcactatgcctgtttttggggccaagatcaagtggcagaggacctggtggcaaatggggcccttgtcagcatctgtaacaagtatggagagatgcctgtggacaaagccaaggcacccctgagagagcttctccgagagcgggcagagaagatgggccagaatctcaaccgtattccatacaaggacacattctggaaggggaccacccgcactcggccccgaaatggaaccctgaacaaacactctggcattgacttcaaacagcttaacttcctgacgaagctcaacgagaatcactctggagagctatggaagggccgctggcagggcaatgacattgtcgtgaaggtgctgaaggttcgagactggagtacaaggaagagcagggacttcaatgaagagtgtccccggctcaggattttctcgcatccaaatgtgctcccagtgctaggtgcctgccagtctccacctgctcctcatcctactctcatcacacactggatgccgtatggatccctctacaatgtactacatgaaggcaccaatttcgtcgtggaccagagccaggctgtgaagtttgctttggacatggcaaggggcatggccttcctacacacactagagcccctcatcccacgacatgcactcaatagccgtagtgtaatgattgatgaggacatgactgcccgaattagcatggctgatgtcaagttctctttccaatgtcctggtcgcatgtatgcacctgcctgggtagcccccgaagctctgcagaagaagcctgaagacacaaacagacgctcagcagacatgtggagttttgcagtgcttctgtgggaactggtgacacgggaggtaccctttgctgacctctccaatatggagattggaatgaaggtggcattggaaggccttcggcctaccatcccaccaggtatttcccctcatgtgtgtaagctcatgaagatctgcatgaatgaagaccctgcaaagcgacccaaatttgacatgattgtgcctatccttgagaagatgcaggacaagtaggactggaaggtccttgcctgaactccagaggtgtcgggacatggttgggggaatgcacctccccaaagcagcaggcctctggttgcctcccccgcctccagtcatggtactaccccagccatggggtccatccccttcccccatccctaccactgtggccccaagaggggcgggctcagagctttgtcacttgccacatggtgtctcccaacatgggagggatcagccccgcctgtcacaataaagtttattatgaaaa

SEQ ID NO: 25992 - DNA, 1692 bp, Artificial Sequence
  derived and/or modified sequence
gcggcgggctgcgggcgcggccggacgggagttccccggagaaggatcctgcagcccgagtcccgtcctcaggcttccccaatccaggggactcggcgccgggacgctgctatggacgacattttcactcagtgccgggagggcaacgcagtcgccgttcgcctgtggctggacaacacggagaacgacctcaaccagggggacgatcatggcttctcccccttgcactgggcctgccgagagggccgctctgctgtggttgagatgttgatcatgcggggggcacggatcaatgtaatgaaccgtggggatgacacccccctgcatctggcagccagtcatggacaccgtgatattgtacagaagctattgcagtacaaggcagacatcaatgcagtgaatgaacacgggaatgtgcccctgcactatgcctgtttttggggccaagatcaagtggcagaggacctggtggcaaatggggcccttgtcagcatctgtaacaagtatggagagatgcctgtggacaaagccaaggcacccctgagagagcttctccgagagcgggcagagaagatgggccagaatctcaaccgtattccatacaaggacacattctggaaggggaccacccgcactcggccccgaaatggaaccctgaacaaacactctggcattgacttcaaacagcttaacttcctgacgaagctcaacgagaatcactctggagagctatggaagggccgctggcagggcaatgacattgtcgtgaaggtgctgaaggttcgagactggagtacaaggaagagcagggacttcaatgaagagtgtccccggctcaggattttctcgcatccaaatgtgctcccagtgctaggtgcctgccagtctccacctgctcctcatcctactctcatcacacactggatgccgtatggatccctctacaatgtactacatgaaggcaccaatttcgtcgtggaccagagccaggctgtgaagtttgctttggacatggcaaggggcatggccttcctacacacactagagcccctcatcccacgacatgcactcaatagccgtagtgtaatgattgatgaggacatgactgcccgaattagcatggctgatgtcaagttctctttccaatgtcctggtcgcatgtatgcacctgcctgggtagcccccgaagctctgcagaagaagcctgaagacacaaacagacgctcagcagacatgtggagttttgcagtgcttctgtgggaactggtgacacgggaggtaccctttgctgacctctccaatatggagattggaatgaaggtggcattggaaggccttcggcctaccatcccaccaggtatttcccctcatgtgtgtaagctcatgaagatctgcatgaatgaagaccctgcaaagcgacccaaatttgacatgattgtgcctatccttgagaagatgcaggacaagtaggactggaaggtccttgcctgaactccagaggtgtcgggacatggttgggggaatgcacctccccaaagcagcaggcctctggttgcctcccccgcctccagtcatggtactaccccagccatggggtccatccccttcccccatccctaccactgtggccccaagaggggcgggctcagagctttgtcacttgccacatggtgtctcccaacatgggaggga

SEQ ID NO: 25993 - DNA, 1591 bp, Artificial Sequence
  derived and/or modified sequence
aagagcgccacgggcggggcggggccggcggcgggctgcgggcgcggccggacgggagttccccggagaaggatcctgcagcccgagtcccgtcctcaggcttccccaatccaggggactcggcgccgggacgctgctatggacgacattttcactcagtgccgggagggcaacgcagtcgccgttcgcctgtggctggacaacacggagaacgacctcaaccagggctattgcagtacaaggcagacatcaatgcagtgaatgaacacgggaatgtgcccctgcactatgcctgtttttggggccaagatcaagtggcagaggacctggtggcaaatggggcccttgtcagcatctgtaacaagtatggagagatgcctgtggacaaagccaaggcacccctgagagagcttctccgagagcgggcagagaagatgggccagaatctcaaccgtattccatacaaggacacattctggaaggggaccacccgcactcggccccgaaatggaaccctgaacaaacactctggcattgacttcaaacagcttaacttcctgacgaagctcaacgagaatcactctggagagctatggaagggccgctggcagggcaatgacattgtcgtgaaggtgctgaaggttcgagactggagtacaaggaagagcagggacttcaatgaagagtgtccccggctcaggattttctcgcatccaaatgtgctcccagtgctaggtgcctgccagtctccacctgctcctcatcctactctcatcacacactggatgccgtatggatccctctacaatgtactacatgaaggcaccaatttcgtcgtggaccagagccaggctgtgaagtttgctttggacatggcaaggggcatggccttcctacacacactagagcccctcatcccacgacatgcactcaatagccgtagtgtaatgattgatgaggacatgactgcccgaattagcatggctgatgtcaagttctctttccaatgtcctggtcgcatgtatgcacctgcctgggtagcccccgaagctctgcagaagaagcctgaagacacaaacagacgctcagcagacatgtggagttttgcagtgcttctgtgggaactggtgacacgggaggtaccctttgctgacctctccaatatggagattggaatgaaggtggcattggaaggccttcggcctaccatcccaccaggtatttcccctcatgtgtgtaagctcatgaagatctgcatgaatgaagaccctgcaaagcgacccaaatttgacatgattgtgcctatccttgagaagatgcaggacaagtaggactggaaggtccttgcctgaactccagaggtgtcgggacatggttgggggaatgcacctccccaaagcagcaggcctctggttgcctcccccgcctccagtcatggtactaccccagccatggggtccatccccttcccccatccctaccactgtggccccaagaggggcgggctcagagctttgtcacttgccacatggtgtctcccaacatgggagggatcagccccgcctgtcacaataaagtttattatgaaaac

SEQ ID NO: 25994 - DNA, 1359 bp, Artificial Sequence
  derived and/or modified sequence
atggacgacatcttcacccagtgccgggagggcaacgccgtggccgtgaggctgtggctggacaatacggaaaatgacctgaatcagggcgacgaccatgggttttcgcctctgcattgggcctgcagggagggaagatccgccgtcgtagaaatgttaattatgaggggcgcaagaataaacgtgatgaatcgcggagatgatactccactgcacctcgcagcttcacacggtcacagggacattgtgcagaaacttctccaatacaaggcagatatcaacgcagtgaacgaacatggaaacgtcccactacactatgcctgcttctggggtcaagatcaggtggctgaggacttagtggcaaacggggctctagtgagcatctgcaacaagtacggagagatgcctgtggataaggccaaggctccgctgcgcgagctcctcagggaacgagcagagaagatgggtcagaacttgaaccgaatcccctataaggatacattttggaaaggaacaactcgaacccgacctaggaatgggaccttgaataagcactcaggaatcgatttcaaacagctgaacttcttaaccaaattaaatgaaaatcattcgggggagctttggaagggacggtggcagggcaacgacatagtggtgaaggtgttgaaagttcgggattggtccaccaggaagtcccgggactttaacgaagagtgccccagactccgaattttcagtcacccaaacgtgctgcccgtcctgggggcctgccagagcccacccgcccctcaccccaccctaataacccattggatgccctatggctccttgtacaacgttctgcacgaagggaccaatttcgtggttgatcaaagccaggccgtaaaatttgcactggatatggccagaggtatggcatttctccacactcttgagccactaatacctcgccatgcgcttaacagtagatcagtgatgattgacgaggatatgaccgcacggatttccatggctgacgtgaaattctcattccagtgccccggacggatgtatgcccctgcatgggtcgcccctgaggcgctgcagaagaaaccagaagataccaacaggcgttcggccgatatgtggagcttcgcggtcctgctttgggagctcgtcacgagagaggtcccgtttgcagacttatccaatatggaaataggcatgaaggtggcactggagggtttaagacctactatcccgcctggcatcagtcctcatgtatgcaagctgatgaagatctgcatgaacgaagacccagcaaaacgtcccaagtttgatatgattgtgcccatcctggagaagatgcaagataaatag

SEQ ID NO: 25995 - DNA, 1359 bp, Artificial Sequence
  derived and/or modified sequence
atggacgacatcttcacccagtgccgggagggcaacgccgtggccgtgcgcctttggctcgacaacaccgaaaatgacctcaaccagggcgatgatcatggattcagcccgttacactgggcatgtagggagggccgtagtgctgttgttgagatgctcatcatgcggggcgcaaggatcaatgtgatgaacagaggtgacgatacgcctcttcaccttgccgcttcccatgggcatcgagatatcgtgcagaaactgctccaatacaaggcagacatcaacgcagtgaacgaacatggcaatgtgcctctgcattacgcgtgtttctgggggcaggatcaggtcgctgaggacctggtggcaaatggggccctagtctcgatttgcaataagtacggcgaaatgcctgtcgataaggctaaggctccactgcgggagctgctccgtgaacgtgccgaaaagatgggccagaaccttaacagaattccatacaaagacactttctggaaagggacaacccggaccagaccacggaacgggaccttgaacaaacattcggggatcgactttaaacagcttaattttttgacaaaactcaacgaaaaccattcaggtgagctctggaagggtagatggcagggtaatgatatcgtcgtcaaagtgctgaaggtccgcgactggtctaccagaaaaagtcgggattttaatgaagagtgcccaaggttacgcatattctctcatcctaacgtgttacccgtcctgggggcctgtcagtccccacccgccccccatccaacccttatcacccactggatgccttatggatctctgtacaacgtgctgcacgagggcaccaattttgtggtcgatcaaagccaggcagtgaagtttgccctggacatggccagaggcatggccttccttcataccctggagccactcatcccgcgtcacgccctgaattcgcggtccgtgatgattgacgaggatatgaccgctaggatctctatggctgacgtcaagttttcctttcaatgccctggaaggatgtacgcaccggcctgggtagcacctgaagctctccagaaaaagcctgaagatactaacaggcgctccgctgatatgtggtcttttgctgttctgctctgggaactggtcacgcgtgaagtgccattcgcggatctgagcaacatggagattggcatgaaggtggccctagaagggcttagacccacaatcccaccaggcatctccccccatgtctgtaaactaatgaaaatctgtatgaacgaggacccagctaaacggcccaagttcgatatgattgtcccaattctggaaaaaatgcaggacaagtag

SEQ ID NO: 25996 - DNA, 1359 bp, Artificial Sequence
  derived and/or modified sequence
atggacgacatcttcacccagtgccgggagggcaacgccgtggccgtcagactctggctggataacacggagaatgatttaaaccaaggagatgaccatgggttcagtcctctgcactgggcatgtagagaaggacggtcagccgtagtggagatgctgataatgcggggggcacggatcaacgtaatgaatagaggagacgacacccccctgcatttggccgcctctcacggacaccgagatattgtccagaagcttctgcagtacaaggccgatatcaatgccgtgaatgagcacggcaatgtcccgctgcattatgcttgcttctggggtcaggaccaggtggccgaagatctagtagcaaacggggccttggtatctatctgtaacaagtatggagagatgcccgtggacaaggcaaaagcacccctcagggaactactgcgggaacgcgctgagaaaatggggcagaatcttaatcgcattccctataaagacaccttctggaaaggtacaacccgcacacgccctcgcaatggcactttgaataagcactcgggcattgattttaaacagctgaacttcctaaccaagctgaacgaaaatcacagcggtgagctgtggaagggtcgttggcagggcaacgacatcgtggtgaaggtgctaaaggtgagagattggtctactcgaaagagccgcgattttaacgaagagtgtccacgattgagaattttcagccatccaaatgtcctccctgtacttggcgcttgtcagtcccccccagccccgcatccgactctgatcacacattggatgccttacggttcactgtacaatgttctgcatgaaggtacaaattttgtggtcgaccagtctcaggcagtgaaattcgccctggacatggccagaggaatggcgttcctgcacacccttgaacctctgattcctagacacgccctgaacagcagatccgtcatgatcgacgaagacatgacagcccgcatttcaatggccgacgtaaagttttcttttcagtgcccaggccgaatgtatgcacccgcctgggtggctcccgaggccctgcagaagaaacctgaggatacgaatcgcagatctgccgatatgtggagctttgccgttctcctgtgggagttagtaaccagagaggtgccatttgctgacctctcaaacatggagatcggcatgaaagtggctctggagggtttgaggcccaccataccgcccggaatttctccccacgtctgtaagctgatgaagatttgcatgaatgaggaccccgccaagagaccaaagtttgatatgattgtccccattctggagaagatgcaggacaagtag

SEQ ID NO: 25997 - DNA, 1359 bp, Artificial Sequence
  derived and/or modified sequence
atggatgacattttcacccagtgccgggagggcaatgctgtggcagtgagactgtggttggacaataccgagaacgatttaaatcagggtgacgaccatggttttagccctctgcactgggcctgccgagaggggaggagtgcggttgtcgaaatgctgataatgaggggtgctcgcatcaatgtgatgaatcgcggtgacgacactccgctccacttggccgctagtcacgggcatcgggatattgtgcagaaactcctgcagtacaaagcagatattaacgccgttaacgaacacgggaatgtgcccttgcattatgcctgcttctggggccaagaccaggtggctgaggatctggtggccaatggagccctggtgtctatctgcaataagtatggcgagatgcctgtggacaaagccaaggctccactgagagagcttctgcgggagagagctgaaaaaatgggccagaatctcaatagaattccttacaaagacacattctggaaaggaaccacccggacccggccaagaaacggaactctaaataaacacagcgggatagacttcaagcagctgaacttcctgaccaaactcaacgagaaccacagtggggagctttggaaaggacggtggcaagggaatgatatcgtcgtcaaggtgctcaaggtacgcgactggagtacgcgtaagtcaagagatttcaacgaagagtgccctcgcctgcgcatattttcacatccaaacgtcctgccagtgttgggcgcatgccagtccccccctgccccacacccgacgctcatcactcactggatgccgtatgggtcgctatataatgtgcttcacgagggaaccaatttcgttgtggaccagtctcaggcggtcaaatttgctctggacatggcaagaggtatggccttcttgcatactcttgagcccctgataccaaggcatgccctgaactcacgcagcgtcatgatcgacgaggacatgaccgccaggatcagcatggcagatgtgaagttctctttccagtgtccaggcagaatgtatgccccagcttgggtcgcccctgaggccctgcaaaaaaaacccgaagacacgaatcgacgctccgcggacatgtggagcttcgcggtgctgctgtgggagttagtgactcgcgaagttcctttcgctgacctttctaacatggagattgggatgaaggtggctctagaggggctgcggcctactatcccgcctggcatcagcccacacgtgtgtaagctgatgaagatctgtatgaacgaagaccccgcaaagagaccgaaatttgatatgatagtgccgatcctggaaaagatgcaggataaatag

SEQ ID NO: 25998 - DNA, 1359 bp, Artificial Sequence
  derived and/or modified sequence
atggatgacatttttacccagtgccgtgaggggaacgcggtggctgtgcggctgtggcttgataatacggagaacgacctaaatcagggtgatgaccatggcttttcacccttgcattgggcttgtagggaaggcaggagcgccgtcgtcgaaatgctcattatgcgcggagccagaatcaacgtgatgaatcgcggagatgacactccgcttcaccttgctgcctcgcacggccatagggatatcgtacagaagctccttcagtataaggccgatattaacgccgtgaatgaacatggcaacgtgcctcttcactatgcatgcttctggggtcaggatcaagttgcggaagatctcgtggccaacggagctctggtttcaatatgtaacaaatacggggagatgccggtcgataaagccaaggctccgctgcgcgaacttctaagagagcgcgctgagaagatgggccaaaacttgaatcgaataccatacaaagatacattttggaaagggacaaccaggacgaggcctcgcaacggcacactcaataagcacagcggcatagactttaaacaactgaactttctcaccaagctcaatgaaaatcacagcggtgagctttggaaggggcgatggcaaggtaatgacatcgtggttaaagtcctcaaagtgagagactggtctacccgaaaatcccgggacttcaatgaagagtgccccagactgaggattttctctcaccctaacgttctcccggtcctgggagcttgtcagtcacccccagcccctcacccaacattgattactcattggatgccctatggatctctgtataatgtgctccacgagggcaccaatttcgtggtggaccagtcacaagcagttaaattcgccttggacatggcccgaggaatggcctttcttcataccttggaacccttaattccacgccacgccctcaattccagaagtgtcatgatcgatgaggatatgactgccagaatctcaatggctgacgtaaagttctcttttcagtgtccaggccgaatgtacgccccagcatgggttgctccggaagccctgcaaaagaagccggaagatactaatcgacggtccgccgacatgtggtccttcgccgtcttgttgtgggagctcgtcacacgcgaggtgcccttcgccgacttgtctaacatggaaattggaatgaaggtggccctggaagggttacgacccactattcccccagggatctcaccgcacgtctgtaaattaatgaaaatctgtatgaatgaggaccccgctaagaggcccaaatttgacatgattgtgcctattcttgaaaagatgcaagacaagtag

SEQ ID NO: 25999 - DNA, 1359 bp, Artificial Sequence
  derived and/or modified sequence
atggatgacatttttactcagtgtagagaaggcaatgctgtcgcggttcgcttgtggctggataacacagagaatgacctaaatcagggggacgaccatggattctccccgcttcactgggcttgtagggaagggcgaagcgctgtcgttgagatgctcatcatgcggggagctcgcataaatgtgatgaatagaggcgatgatacgccgcttcacctcgcagcaagccacggtcatcgtgacatagtccaaaagctgcttcagtataaagctgatatcaatgcagtgaacgaacatggtaatgtcccattgcattacgcttgtttttggggccaggatcaggttgctgaggacctggtggcaaacggtgccctggttagtatctgtaataagtatggtgagatgcctgtggataaagcaaaggcacctctgcgtgagctcctcagagagcgcgctgagaaaatggggcagaatctcaatcgcataccgtacaaggacaccttctggaagggcacaacccggacacgccctagaaacggtactctcaacaagcactcaggtatcgatttcaagcagttgaacttccttacaaagttgaatgagaaccatagcggcgagctgtggaaaggtcgatggcaagggaatgacatcgtcgtgaaggtgctgaaggtgagggattggagtactaggaaatctcgggatttcaatgaagagtgcccacggctgaggattttctctcatccaaatgtgcttccagtgctgggtgcctgccagagccctccggctccacaccccacgcttatcacgcattggatgccctatggttccctgtacaacgttttacacgaagggaccaattttgtggtggaccagagtcaggctgtgaagttcgctctggacatggcccgaggtatggccttcctgcacacattggagccccttatccctaggcacgccctgaatagtcgctccgtgatgatcgacgaggatatgaccgcacggatctccatggctgacgtcaagttctcttttcaatgccctggcaggatgtacgccccagcctgggtggctcccgaggccctccagaaaaaaccggaggataccaatcgtcgctctgctgatatgtggtcgttcgcggtgcttctttgggagctggtcactcgagaagtgcctttcgctgatttatcaaatatggaaataggaatgaaagttgccctggaaggattacggccaacgattcccccaggaatatctcctcatgtgtgtaaattgatgaagatctgcatgaacgaagatccagctaagagacctaagttcgacatgattgtgcccatcctggaaaaaatgcaggacaagtag

SEQ ID NO: 26000 - protein, 686 aa, Artificial Sequence
  derived and/or modified sequence
MADRRRAWNTEDDLPVYLARPGSAAQTPRQKYGGMFAAVEGAYENKTIDFDAYSVGRRGSARTPRSAGRPDAVGLPGPGGSEDTASDVSEPSGSAVSSPGERDERPPTLRIRRPAPRDLPLGRDNGQSDRLLIKGGRIINDDQSLYADVYLEDGLIKQIGENLIVPGGVKTIEANGRMVIPGGIDVNTYLQKPSQGMTAADDFFQGTRAALVGGTTMIIDHVVPEPGSSLLTSFEKWHEAADTKSCCDYSLHVDITSWYDGVREELEVLVQDKGVNSFQVYMAYKDVYQMSDSQLYEAFTFLKGLGAVILVHAENGDLIAQEQKRILEMGITGPEGHALSRPEELEAEAVFRAITIAGRINCPVYITKVMSKSAADIIALARKKGPLVFGEPIAASLGTDGTHYWSKNWAKAAAFVTSPPLSPDPTTPDYLTSLLACGDLQVTGSGHCPYSTAQKAVGKDNFTLIPEGVNGIEERMTVVWDKAVATGKMDENQFVAVTSTNAAKIFNLYPRKGRIAVGSDADVVIWDPDKLKTITAKSHKSAVEYNIFEGMECHGSPLVVISQGKIVFEDGNINVNKGMGRFIPRKAFPEHLYQRVKIRNKVFGLQGVSRGMYDGPVYEVPATPKYATPAPSAKSSPSKHQPPPIRNLHQSNFSLSGAQIDDNNPRRTGHRIVAPPGGRSNITSLG

SEQ ID NO: 26001 - DNA, 2061 bp, Artificial Sequence
  derived and/or modified sequence
atggcagatcggagaagagcatggaatacagaggatgacctgcctgtctacctggcccggcctgggtcagccgcacagactcctagacagaaatatgggggtatgttcgccgccgtcgaaggagcctatgagaacaagacaatagattttgacgcttacagcgtcggaaggcgtggttccgcccggacgccaaggtctgccggccgaccagatgccgttggcctgccaggacctggaggaagtgaagacaccgcatctgatgtgtccgagccctccgggtctgccgtatcaagcccgggcgaaagggatgaacgcccccctactctcaggattagaaggcccgctccacgggatttgcccctcggtcgcgacaacggccaatcagaccgcttgcttattaaaggagggcggatcatcaacgacgatcagagcctgtatgccgatgtatacttagaagacggcctcatcaagcagataggcgaaaacctgatcgtacccggtggcgtgaagaccattgaggcaaatgggaggatggtaatccccggaggcatcgatgttaatacataccttcagaagccctctcagggtatgactgctgcggacgacttctttcaggggacaagagccgcacttgtagggggaacaacaatgattatagatcacgttgtcccggagcccggcagttctttgttgacgtcattcgaaaaatggcatgaagcagccgataccaagtcctgctgcgactatagcctccacgtcgatataactagttggtatgatggtgtcagggaggagcttgaagtactagttcaggataaaggtgtgaactcattccaggtatacatggcatacaaggatgtataccagatgagcgatagccagctgtacgaggcttttacgtttctgaagggactgggagctgtaattctcgtccacgcagagaatggtgacctgattgctcaggagcagaagagaatcctcgaaatgggaattaccggaccagaggggcacgctctttccaggcctgaagaactcgaggccgaggctgtgtttcgtgcaatcacgatcgccggcaggattaattgccccgtgtacattacaaaggtgatgagtaaaagcgccgccgacatcatcgccctggcgcgtaaaaaaggcccactcgtgttcggcgagcccatcgccgcatctctcggcaccgatggcactcattactggtccaaaaactgggcaaaagctgctgcttttgttacatccccccctctgtctcctgatccaaccacaccggactacctgacaagtctgctcgcatgtggcgacctccaggtcacgggcagcggccactgcccctactctactgcccaaaaggccgtgggtaaggacaattttactctaatcccggaaggagtcaatggcatagaggagagaatgacagtggtgtgggataaggccgtcgccaccggcaaaatggatgaaaaccagtttgtcgccgttacatcaacaaatgccgcaaagattttcaatctctacccccgcaagggccggatagcggtaggcagcgatgccgatgttgttatctgggacccagacaaattaaagaccattactgcaaaatcacataaatccgcagtggagtacaatatctttgagggtatggagtgccacggcagccccttagtggtgatttcacaaggaaaaatagtattcgaggatggcaacatcaacgtgaataaaggtatgggccgcttcatacctcgtaaggcctttccagagcacttataccagcgcgtcaaaattagaaataaggtattcgggctgcaaggagtcagccgtgggatgtacgacggaccagtgtatgaggtacctgctactccaaagtatgccaccccggccccatctgctaaatcgagcccctcaaaacatcagccacccccaataagaaacctccaccagagtaacttttcactttccggagcccagatcgatgataacaaccctaggcgcactggccataggattgtcgcaccccctggaggacgttcaaatattacaagcctgggatag

SEQ ID NO: 26002 - DNA, 2061 bp, Artificial Sequence
  derived and/or modified sequence
atggctgacagaagaagagcctggaacacagaagatgacctgcctgtgtacctggcccggcccggcagcgctgcccagaccccccggcagaagtatggaggcatgtttgctgctgtggagggcgcctatgagaacaagaccatcgactttgatgcctacagcgtgggcagaagaggcagcgcccggacccccaggtctgctggccgcccagatgctgtgggcctgcccggccctgggggcagcgaggacacagccagtgatgtgtctgagcccagcggcagcgctgtgagcagccctggagagagagatgagcggccccccaccctgcgcatccggcggcctgccccccgggacctgcccctgggccgggacaatggccagagcgaccggctgctgatcaagggcggccgcatcatcaatgatgaccagagcctgtatgcagatgtgtacctggaggatggcctcatcaagcagattggagaaaatctcatcgtgcctgggggcgtgaagaccatcgaggccaatggaaggatggtgattcctgggggcattgatgtgaacacctacctgcagaagcccagccagggcatgacagctgctgatgacttcttccagggcaccagggctgccctggtgggcggcaccaccatgatcatcgaccacgtggtgcctgagcccggcagcagcctgctgaccagctttgagaagtggcatgaggccgctgacaccaagagctgctgtgactacagcctgcacgtggacatcacctcctggtatgatggagtgcgggaggagctggaggtgctggtgcaggacaagggcgtgaacagcttccaggtgtacatggcctacaaggatgtgtaccagatgtctgacagccagctgtatgaggccttcaccttcctgaagggcctgggcgctgtgatcctggtgcatgctgaaaatggagacctgattgcccaggagcagaagaggatcctggagatgggcatcaccggccctgagggccacgccctgagcaggcctgaggagctggaggccgaggccgtgttccgggccatcaccatcgccggccgcatcaactgccctgtgtacatcaccaaggtgatgagcaagtctgctgctgacatcatcgccctggccaggaagaagggccccctggtgtttggagagcccatcgccgccagcctgggcacagatggcacccactactggagcaagaactgggccaaggctgctgcctttgtgaccagcccccccctgagcccagaccccaccaccccagactacctgaccagcctgctggcctgtggggacctgcaggtgactggaagtggccactgcccctacagcacagcccagaaggctgtgggcaaggacaacttcaccctcatccctgagggcgtgaatggcatcgaggagaggatgacagtggtgtgggacaaggctgtggccaccgggaagatggatgagaaccagtttgtggccgtgaccagcaccaatgctgccaagatcttcaacctgtaccccaggaagggcagaattgctgtgggcagtgatgctgatgtggtgatctgggaccctgacaagctgaagaccatcacagccaagagccacaagtctgctgtggagtacaacatctttgagggcatggagtgccacggcagccccctggtggtgatcagccagggcaagatcgtgtttgaagatggcaacatcaacgtgaacaagggcatgggccgcttcatccccaggaaggccttccctgagcacctgtaccagagggtgaagatccggaacaaggtgtttggcctgcagggcgtgtcccggggcatgtatgatggccctgtgtatgaggtgcctgccacccccaagtatgccaccccagcccccagcgccaagagcagccccagcaagcaccagcccccacccatccggaacctgcaccagagcaacttcagcctgagcggggcccagattgatgacaacaaccccaggagaacaggccaccgcatcgtggcccctcctgggggccgcagcaacatcaccagcctgggctag

SEQ ID NO: 26003 - DNA, 2061 bp, Artificial Sequence
  derived and/or modified sequence
atggccgaccggcggcgggcctggaacaccgaggacgacctgcccgtctatctcgccagaccaggctcagccgctcagacccctcggcaaaagtacggaggcatgtttgctgcagtcgaaggggcctatgagaacaagaccattgacttcgacgcctactccgtgggccgtcgaggctcagcccggaccccgagaagtgcgggtagaccagacgcagtgggcctgcccgggccaggcggttctgaagacaccgcttccgacgtctccgaacctagtggctctgcggtgtcatcgcctggggagagagacgaacggcctcccaccctccgcatacggagaccagcaccccgagacctcccactgggcagagacaacgggcagtcggatcggctgttgatcaagggtggcaggatcatcaacgacgatcagtccctgtatgctgacgtctatctggaggacggactgatcaagcaaatcggagaaaatctgatcgtcccgggcggagtaaaaacgatagaggccaacgggaggatggtgatccccggaggaatagacgtgaacacttatctccagaagcccagtcagggaatgactgccgctgatgatttctttcaggggacaagagcagcactggtcggcggtacaacgatgataatagaccatgtcgttccagagcccggttccagcttactaacctcattcgaaaaatggcatgaggctgctgacactaagtcctgctgtgactacagtttgcatgtcgatattactagttggtatgacggggtgcgggaagaactggaagtcttagtccaggacaaaggagtcaactctttccaagtatatatggcctataaagacgtctatcagatgtccgattcccagctctacgaagccttcactttcctgaaggggctcggggccgtaatattagttcacgccgaaaatggggacctgatcgcccaagaacagaaaaggattctggaaatgggaataacgggccccgaggggcatgcattaagtcggcccgaggaacttgaggccgaagctgtgtttcgggcaataacaatcgccggacgcatcaactgtccagtatacatcaccaaagtgatgtcgaaaagcgcggcagatattattgccttggccaggaagaaaggaccattggtctttggggagcccattgctgcttccctcggcaccgacggcactcattattggagcaagaattgggcgaaagctgcagcattcgttacctctccacccctctcccctgatccaaccacacctgattacttaactagcctgttggcctgcggcgatttgcaggtgactgggtccggccactgtccatactcgaccgcacagaaggccgtggggaaagataactttactttaatacctgaaggcgtgaatggaatcgaggaaagaatgaccgtggtgtgggacaaagccgtggcgactggaaagatggacgaaaaccagtttgtggccgttacctcgactaatgctgccaaaatctttaacctatacccccggaagggaaggattgcggtcgggtccgacgctgatgtggtgatctgggatccggacaaactgaagaccatcacagcgaagagccataagagtgccgtcgaatacaacatctttgagggtatggagtgccatgggagcccgctcgttgtgattagtcaagggaaaattgtttttgaagacgggaatattaacgtgaataagggtatggggcggtttatcccacggaaggcctttccggagcatttatatcagagggtgaagatccggaacaaggtctttggactgcaaggcgtgtccagaggtatgtatgatggccctgtgtacgaggtgcccgccacccctaaatatgcaacccctgcccctagcgcaaaatcctccccgtccaagcatcagccacctccgatccggaacttgcaccagtcaaacttttcactgtctggagcccagatcgacgataacaacccacgaaggaccggacatcgtattgtagcccccccaggggggcggtccaatattacctcattggggtag

SEQ ID NO: 26004 - DNA, 2061 bp, Artificial Sequence
  derived and/or modified sequence
atggctgaccgcaggagggcatggaacacggaggatgatctgcccgtatatctagctaggccaggttcggcagcccagactcccaggcagaagtatggtggaatgtttgccgcagtagagggggcatatgaaaataaaactatcgattttgatgcttacagcgtggggagaaggggctccgcacgcacacccagatcggcgggacgccctgacgccgttgggctgccaggcccagggggaagcgaggatactgccagtgacgtatcagaaccttcagggagtgccgtgtcctcccccggagaacgtgatgaacggcctcctacactcagaatcagacgccctgccccacgggacctgcctctggggagagacaatggtcaatccgatagactcctgattaaagggggtaggataataaacgatgatcagagcctctatgcagacgtctatctcgaagacggactgataaagcaaatcggcgagaatctgatcgtgcccggaggagtcaagacgatcgaagctaatggtcggatggtgatacccggaggaattgatgttaatacatacctgcaaaaaccttcccagggcatgacggccgctgatgattttttccagggaacccgagcagccctggtgggaggtactaccatgattattgaccacgtggtccctgagcctggctcttccctccttacgtcctttgagaagtggcacgaagctgcagacactaagtcctgttgcgactactctttgcacgttgatatcacgagctggtatgacggagtcagagaagagttggaagtgttggtgcaggataaaggggtgaattccttccaagtctacatggcatacaaggacgtgtatcagatgtccgacagtcagctttacgaggccttcacattcctcaaggggctgggagccgtaatcctcgtgcatgccgagaatggcgatttgatcgcccaggaacagaagcgcatccttgaaatgggaattacaggcccagaagggcacgccctgtcacgccctgaagagctggaggcagaagctgtgtttcgtgcgatcactattgcaggcagaattaactgccccgtgtacattacgaaagtgatgagcaaatctgccgctgacattattgctctcgcaagaaagaaagggccactcgtgtttggcgagcctattgcggctagcctcggaacggatggtacccattactggtccaagaattgggccaaggccgctgcatttgtaacatctcccccactgtcaccagaccctacaacaccggattacctaactagcctcctggcctgcggggacctccaggtcaccggcagcggccattgtccatattcaactgcccagaaggccgttggaaaagataacttcacactgataccagagggagtaaacggcatcgaggagagaatgacagtggtgtgggacaaagccgtggccaccggaaaaatggacgagaaccaattcgtcgcagtaaccagtactaacgccgcaaagatcttcaacctttatccgagaaagggtcgcatcgcagtcggaagcgacgccgacgtggtgatatgggatcccgacaagctgaagaccataaccgctaaatcccataagagcgcggtcgagtataatattttcgaagggatggagtgccacggaagccccctcgttgtgatcagccaaggtaagattgtctttgaagacggcaacattaatgtcaataagggaatgggtcggttcatcccgcgaaaggcgtttccagaacacctctaccagcgagtcaagatccgaaacaaggttttcggtctccaaggcgtgtcccgcggtatgtatgatggcccagtgtacgaggtacccgctactcccaaatatgctacaccagccccatctgcgaaatccagcccgtctaagcatcagccacccccaatccggaacttacaccagagtaacttctctctttccggggctcagatcgacgacaacaatccaagacggaccggtcacagaatcgtcgctccccctggcggtcgttccaacattacctctcttggatag

SEQ ID NO: 26005 - DNA, 3146 bp, Artificial Sequence
  derived and/or modified sequence
gcaccgaggcgcggagcgcggcgcacggcggtgcccagggccgcgggcgggcaggcgggagcgcggtgggtggccggccttggacgggtatggcggaccggcggcgcgcgtggaacaccgaggacgacctgcccgtgtacctggcgcggccgggcagcgcggcgcagaccccgcgccagaagtacggcggcatgttcgccgcggtggagggcgcctacgagaacaagaccatcgacttcgacgcctacagtgtgggccgccgcggctcggcgcgcacgccgcgcagcgctggccggcccgacgcggtcgggctgccagggccgggaggcagcgaggacacggccagcgacgtgagcgagccctcgggctccgcggtcagctctcccggagagcgcgacgagcggccgccgacgctgcgcatccgccgccccgcgccccgcgacctgcccctcggccgggacaatggccagagtgaccgactcctcatcaaaggtggacggatcatcaacgatgaccaatccctttatgctgacgtctacctggaggatggacttatcaaacaaataggagagaacttaatcgttcctggtggagtgaagaccattgaagccaacgggcggatggttattcccggaggtattgatgtcaacacgtacctgcagaagccctcccaggggatgactgcggctgatgacttcttccaagggaccagggcggcactggtgggcgggaccacgatgatcattgaccatgttgttcctgaacctgggtccagcctactgacctctttcgagaagtggcacgaagcagctgacaccaaatcctgctgtgattactccctccacgtggacatcacaagctggtacgatggcgttcgggaggagctggaggtgctggtgcaggacaaaggcgtcaattccttccaagtctacatggcctataaggatgtctaccaaatgtccgacagccagctctatgaagcctttaccttccttaagggcctgggagctgtgatcttggtccatgcagaaaatggagatttgatagctcaggaacaaaagcggatcctggagatgggcatcacgggtcccgagggccatgccctgagcagacctgaagagctggaggccgaggcggtgttccgggccatcaccattgcgggccggatcaactgccctgtgtacatcaccaaggtcatgagcaagagtgcagccgacatcatcgctctggccaggaagaaagggcccctagtttttggagagcccattgccgccagcctggggaccgatggcacccattactggagcaagaactgggccaaggctgcggcgttcgtgacttcccctcccctgagcccggaccctaccacgcccgactacttgacctccctactggcctgtggggacttgcaggtcacaggcagcggccactgtccctacagcactgcccagaaggcggtgggcaaggacaactttaccctgatccccgagggtgtcaacgggatagaggagcggatgacggtcgtctgggacaaggcggtggctactggcaaaatggatgagaaccagtttgtcgctgtcaccagcaccaatgcagccaagatctttaacctgtacccaaggaaagggcggattgccgtgggctcggatgccgacgtggtcatctgggaccccgacaagttgaagaccataacagccaaaagtcacaagtcggcggtggagtacaacatcttcgagggtatggagtgccacggctccccactagtggtcatcagccagggcaagatcgtctttgaagacggaaacatcaacgtcaacaagggcatgggccgcttcattccgcggaaggcgttcccggagcacctgtaccagcgcgtcaaaatcaggaataaggtttttggattgcaaggggtttccaggggcatgtatgacggtcctgtgtacgaggtaccagctacacccaaatatgcaactcccgctccttcagccaaatcttcgccttctaaacaccagcccccacccatcagaaacctccaccagtccaacttcagcttatcaggtgcccagatagatgacaacaatcccaggcgcaccggccaccgcatcgtggcgccccctggtggccgctccaacatcaccagcctcggttgaacgtggatgcgcggaggagctagcctgaaggattctgggaatcatgtccatcccttttcctgtcagtgtttttgaaacccacagttttagttggtgctgatggagggagggggaagtcgaaggatgctctttcccttttctgtttaggaagaagtggtactagtgtggtgtgtttgcttggaaattccttgccccacagttgtgttcatgctgaatccacctcggagcatggtgttttcattcccccttcctagtgaaccacaggttttagcattgtcttgttctgtcccttccacttctaactccactggctccatgattctctgagtggtggttcctttgcaccctgtagatgttctaggatagttgatgcatgttactaaattacgtatgcaagtctgtgagtgcgtctgaggggacatcgccaaggactgactgagacacgatgccgagacctcaagccctgaggggcagtcccaaaacccttacagtgaagatgtttactcattgcccccacctctggtccacactagaaagaagctcgccccacctccacctgtgagatccgtgaattctcggaatggcaggggaagccttgcactaggttgcagagaagcatcctccacatcctgtgtcagaaaccctggtctccgtggcacttgtaactcaccgtgctgtcttctggtctgtgtgtgttcttcaagccagctctaggcttcaggccgagccaggttcacactcagaaagaggtctccccatccccattcggggctgacgatggggggctgatggctgcccctgcgtggcctgagtcctggtccctctgaggcagttgacggggcagtcagatttttaaagttttgtacaaagttttcctttgtaatcactcccatttttacttaacaaccaacttgttgtggctcttatttctgaattcaaagcttgtgaaaaaataaagaaaatgaactgcccactgacctgactagggcactttca

SEQ ID NO: 26006 - DNA, 2061 bp, Artificial Sequence
  derived and/or modified sequence
atggccgacagaagaagagcctggaacaccgaggacgacctgcccgtgtacctggccagacccggcagcgccgcccagacccccagacagaagtacggcggcatgttcgccgccgtggagggcgcctacgagaacaagaccatcgacttcgacgcctacagcgtgggcagaagaggcagcgccagaacccccagaagcgccggcagacccgacgccgtgggcctgcccggccccggcggcagcgaggacaccgccagcgacgtgagcgagcccagcggcagcgccgtgagcagccccggcgagagagacgagagaccccccaccctgagaatcagaagacccgcccccagagacctgcccctgggcagagacaacggccagagcgacagactgctgatcaagggcggcagaatcatcaacgacgaccagagcctgtacgccgacgtgtacctggaggacggcctgatcaagcagatcggcgagaacctgatcgtgcccggcggcgtgaagaccatcgaggccaacggcagaatggtgatccccggcggcatcgacgtgaacacctacctgcagaagcccagccagggcatgaccgccgccgacgacttcttccagggcaccagagccgccctggtgggcggcaccaccatgatcatcgaccacgtggtgcccgagcccggcagcagcctgctgaccagcttcgagaagtggcacgaggccgccgacaccaagagctgctgcgactacagcctgcacgtggacatcaccagctggtacgacggcgtgagagaggagctggaggtgctggtgcaggacaagggcgtgaacagcttccaggtgtacatggcctacaaggacgtgtaccagatgagcgacagccagctgtacgaggccttcaccttcctgaagggcctgggcgccgtgatcctggtgcacgccgagaacggcgacctgatcgcccaggagcagaagagaatcctggagatgggcatcaccggccccgagggccacgccctgagcagacccgaggagctggaggccgaggccgtgttcagagccatcaccatcgccggcagaatcaactgccccgtgtacatcaccaaggtgatgagcaagagcgccgccgacatcatcgccctggccagaaagaagggccccctggtgttcggcgagcccatcgccgccagcctgggcaccgacggcacccactactggagcaagaactgggccaaggccgccgccttcgtgaccagcccccccctgagccccgaccccaccacccccgactacctgaccagcctgctggcctgcggcgacctgcaggtgaccggcagcggccactgcccctacagcaccgcccagaaggccgtgggcaaggacaacttcaccctgatccccgagggcgtgaacggcatcgaggagagaatgaccgtggtgtgggacaaggccgtggccaccggcaagatggacgagaaccagttcgtggccgtgaccagcaccaacgccgccaagatcttcaacctgtaccccagaaagggcagaatcgccgtgggcagcgacgccgacgtggtgatctgggaccccgacaagctgaagaccatcaccgccaagagccacaagagcgccgtggagtacaacatcttcgagggcatggagtgccacggcagccccctggtggtgatcagccagggcaagatcgtgttcgaggacggcaacatcaacgtgaacaagggcatgggcagattcatccccagaaaggccttccccgagcacctgtaccagagagtgaagatcagaaacaaggtgttcggcctgcagggcgtgagcagaggcatgtacgacggccccgtgtacgaggtgcccgccacccccaagtacgccacccccgcccccagcgccaagagcagccccagcaagcaccagcccccccccatcagaaacctgcaccagagcaacttcagcctgagcggcgcccagatcgacgacaacaaccccagaagaaccggccacagaatcgtggccccccccggcggcagaagcaacatcaccagcctgggctag

SEQ ID NO: 26007 - protein, 591 aa, Artificial Sequence
  derived and/or modified sequence
MFGKRKKRVEISAPSNFEHRVHTGFDQHEQKFTGLPRQWQSLIEESARRPKPLVDPACITSIQPGAPKTIVRGSKGAKDGALTLLLDEFENMSVTRSNSLRRDSPPPPARARQENGMPEEPATTARGGPGKAGSRGRFAGHSEAGGGSGDRRRAGPEKRPKSSREGSGGPQESSRDKRPLSGPDVGTPQPAGLASGAKLAAGRPFNTYPRADTDHPSRGAQGEPHDVAPNGPSAGGLAIPQSSSSSSRPPTRARGAPSPGVLGPHASEPQLAPPACTPAAPAVPGPPGPRSPQREPQRVSHEQFRAALQLVVDPGDPRSYLDNFIKIGEGSTGIVCIATVRSSGKLVAVKKMDLRKQQRRELLFNEVVIMRDYQHENVVEMYNSYLVGDELWVVMEFLEGGALTDIVTHTRMNEEQIAAVCLAVLQALSVLHAQGVIHRDIKSDSILLTHDGRVKLSDFGFCAQVSKEVPRRKSLVGTPYWMAPELISRLPYGPEVDIWSLGIMVIEMVDGEPPYFNEPPLKAMKMIRDNLPPRLKNLHKVSPSLKGFLDRLLVRDPAQRATAAELLKHPFLAKAGPPASIVPLMRQNRTR

SEQ ID NO: 26008 - protein, 395 aa, Artificial Sequence [sequence omitted]

SEQ ID NO: 26009 - protein, 347 aa, Artificial Sequence
  derived and/or modified sequence
MTWPLTGHQRGAWPSPSPPPPPPGLPPEPEVPPALECWDPTPQSPRSPQREPQRVSHEQFRAALQLVVDPGDPRSYLDNFIKIGEGSTGIVCIATVRSSGKLVAVKKMDLRKQQRRELLFNEVVIMRDYQHENVVEMYNSYLVGDELWVVMEFLEGGALTDIVTHTRMNEEQIAAVCLAVLQALSVLHAQGVIHRDIKSDSILLTHDGRVKLSDFGFCAQVSKEVPRRKSLVGTPYWMAPELISRLPYGPEVDIWSLGIMVIEMVDGEPPYFNEPPLKAMKMIRDNLPPRLKNLHKVSPSLKGFLDRLLVRDPAQRATAAELLKHPFLAKAGPPASIVPLMRQNRTR

SEQ ID NO: 26010 - DNA, 1776 bp, Artificial Sequence
  derived and/or modified sequence
atgttcggcaagagaaagaagagagtggagatcagcgcccccagcaacttcgagcacagagtgcacaccggcttcgaccagcacgagcagaagttcaccggcctgcccagacagtggcagagcctgatcgaggagagcgccagaagacccaagcccctggtggaccccgcctgcatcaccagcatccagcccggcgcccccaagaccatcgtgagaggcagcaagggcgccaaggacggcgccctgaccctgctgctggacgagttcgagaacatgagcgtgaccagaagcaacagcctgagaagagacagcccccccccccccgccagagccagacaggagaacggcatgcccgaggagcccgccaccaccgccagaggcggccccggcaaggccggcagcagaggcagattcgccggccacagcgaggccggcggcggcagcggcgacagaagaagagccggccccgagaagagacccaagagcagcagagagggcagcggcggcccccaggagagcagcagagacaagagacccctgagcggccccgacgtgggcaccccccagcccgccggcctggccagcggcgccaagctggccgccggcagacccttcaacacctaccccagagccgacaccgaccaccccagcagaggcgcccagggcgagccccacgacgtggcccccaacggccccagcgccggcggcctggccatcccccagagcagcagcagcagcagcagaccccccaccagagccagaggcgcccccagccccggcgtgctgggcccccacgccagcgagccccagctggccccccccgcctgcacccccgccgcccccgccgtgcccggcccccccggccccagaagcccccagagagagccccagagagtgagccacgagcagttcagagccgccctgcagctggtggtggaccccggcgaccccagaagctacctggacaacttcatcaagatcggcgagggcagcaccggcatcgtgtgcatcgccaccgtgagaagcagcggcaagctggtggccgtgaagaagatggacctgagaaagcagcagagaagagagctgctgttcaacgaggtggtgatcatgagagactaccagcacgagaacgtggtggagatgtacaacagctacctggtgggcgacgagctgtgggtggtgatggagttcctggagggcggcgccctgaccgacatcgtgacccacaccagaatgaacgaggagcagatcgccgccgtgtgcctggccgtgctgcaggccctgagcgtgctgcacgcccagggcgtgatccacagagacatcaagagcgacagcatcctgctgacccacgacggcagagtgaagctgagcgacttcggcttctgcgcccaggtgagcaaggaggtgcccagaagaaagagcctggtgggcaccccctactggatggcccccgagctgatcagcagactgccctacggccccgaggtggacatctggagcctgggcatcatggtgatcgagatggtggacggcgagcccccctacttcaacgagccccccctgaaggccatgaagatgatcagagacaacctgccccccagactgaagaacctgcacaaggtgagccccagcctgaagggcttcctggacagactgctggtgagagaccccgcccagagagccaccgccgccgagctgctgaagcaccccttcctggccaaggccggcccccccgccagcatcgtgcccctgatgagacagaacagaaccagatag

SEQ ID NO: 26011 - DNA, 1188 bp, Artificial Sequence
  derived and/or modified sequence
atgggctgccagagaagcagacccttcaacacctaccccagagccgacaccgaccaccccagcagaggcgcccagggcgagccccacgacgtggcccccaacggccccagcgccggcggcctggccatcccccagagcagcagcagcagcagcagaccccccaccagagccagaggcgcccccagccccggcgtgctgggcccccacgccagcgagccccagctggccccccccgcctgcacccccgccgcccccgccgtgcccggcccccccggccccagaagcccccagagagagccccagagagtgagccacgagcagttcagagccgccctgcagctggtggtggaccccggcgaccccagaagctacctggacaacttcatcaagatcggcgagggcagcaccggcatcgtgtgcatcgccaccgtgagaagcagcggcaagctggtggccgtgaagaagatggacctgagaaagcagcagagaagagagctgctgttcaacgaggtggtgatcatgagagactaccagcacgagaacgtggtggagatgtacaacagctacctggtgggcgacgagctgtgggtggtgatggagttcctggagggcggcgccctgaccgacatcgtgacccacaccagaatgaacgaggagcagatcgccgccgtgtgcctggccgtgctgcaggccctgagcgtgctgcacgcccagggcgtgatccacagagacatcaagagcgacagcatcctgctgacccacgacggcagagtgaagctgagcgacttcggcttctgcgcccaggtgagcaaggaggtgcccagaagaaagagcctggtgggcaccccctactggatggcccccgagctgatcagcagactgccctacggccccgaggtggacatctggagcctgggcatcatggtgatcgagatggtggacggcgagcccccctacttcaacgagccccccctgaaggccatgaagatgatcagagacaacctgccccccagactgaagaacctgcacaaggtgagccccagcctgaagggcttcctggacagactgctggtgagagaccccgcccagagagccaccgccgccgagctgctgaagcaccccttcctggccaaggccggcccccccgccagcatcgtgcccctgatgagacagaacagaaccagatag

SEQ ID NO: 26012 - DNA, 1776 bp, Artificial Sequence
  derived and/or modified sequence
atgtttggaaaacggaaaaaacgggtcgagattagtgccccttctaattttgaacacagagtgcacactggcttcgaccagcatgaacaaaagttcaccgggctcccgcggcagtggcagtccctgattgaggagagcgccaggagacccaagcctctggtggatcctgcgtgtatcacctccatccaacccggagcaccgaaaacgatcgtacgcgggagcaagggagccaaggatggagcccttacgctgctcctcgatgaattcgaaaacatgagtgtcactagaagcaactccctccgccgggactctcccccaccaccagctcgggcccgccaggaaaacggcatgcccgaagagcctgcaacgactgctagaggcgggcccggcaaagctgggtcaagggggcgtttcgcagggcattccgaggctggtggaggcagcggggaccgccgacgcgcaggaccggagaagagaccaaagagtagtagagagggttccggcggtccgcaggagagttcgcgtgacaagcgccccctgtcaggcccagacgtcgggactcctcagcctgcaggattagcctctggcgcaaaactggctgctggtcgacccttcaacacctacccacgggcagataccgaccatcctagtcgtggcgctcagggtgaaccccatgacgtggcaccgaacggaccctccgcaggtggcctggccatccctcagtcttcctcatcttcctcccgccccccaacacgcgctcgtggtgctccaagcccaggcgtcctaggtcctcatgcctcagaacctcagctcgccccaccggcttgtactcccgccgcccctgcagtgccgggccctccgggccctcggagtccacagcgggaaccccagagggtgtcccatgaacaattcagagctgctcttcagctggtggtcgacccaggcgatccgagaagttatctcgacaacttcatcaagattggagaaggatctaccggcatcgtatgcatcgccacagtcaggagtagcgggaaattagtggccgtcaaaaagatggacctacgtaagcagcagcgccgggaactgttatttaacgaggtcgtgatcatgagggattaccagcatgaaaatgtcgtagagatgtataactcatacttagtcggcgacgagttgtgggtggtgatggagttcttggaggggggagctctcactgacatagtgacacacactagaatgaatgaggagcagattgccgcagtttgcctggcagtcctccaggcattgtccgtgctgcatgcccaaggggtgattcatcgcgacatcaaaagtgactctatccttctgacacacgatggacgggtgaagctgagcgatttcggattctgtgcgcaggtgagcaaagaggtccctaggaggaagagcttagtggggacaccctattggatggccccggagctgatcagcaggctcccctatgggccagaggtggacatttggagcctgggaataatggtgatcgaaatggtggatggcgagcctccatacttcaacgagccacccctgaaagcaatgaaaatgatacgggacaatctgccaccaaggctgaagaatttgcacaaggtgtctcccagtctgaagggattcctggaccgcctgttagtgagggacccagcacagagagccacggccgctgagctcctgaagcaccctttcctggccaaggctggtccacccgcttccatcgtacccctgatgcgccaaaacaggacccgctag

SEQ ID NO: 26013 - DNA, 1188 bp, Artificial Sequence
  derived and/or modified sequence
atgggctgtcaacggtcccgtccattcaatacctacccaagggcagacacagatcacccttcgaggggggcccaaggcgagcctcatgatgtcgcacctaatgggccctctgcagggggactggcaattccccagtcttcaagttcgtcaagccgcccacccacccgggcccggggtgcgcccagtcctggagtcctgggccctcacgccagcgagcctcaattggcccctccagcctgcacaccagctgctcccgccgtacctgggcctcctggccctaggtcccctcagcgggagccacagcgcgtatcacacgaacagttccgggctgctctgcagctggtcgtagaccctggcgacccccggtcttatctcgacaacttcatcaagattggtgagggctcaaccggaattgtgtgcatcgctactgttagatcctccgggaaattggtcgcagtgaaaaaaatggatctgcgaaagcagcagcggcgagagcttttgtttaacgaggtcgtaatcatgcgagactatcagcacgaaaacgtcgtcgagatgtacaacagctacttggtcggcgatgagctgtgggtggttatggagttcctagaagggggggccttgaccgatattgtgacgcacaccaggatgaacgaggagcaaattgcagcagtatgccttgctgtcctccaggcattgtctgtgctgcatgcccagggtgtgatccatcgggacatcaaaagcgacagcatattgctgacacacgatggtcgggtcaagctttctgactttggcttctgcgcccaggtaagtaaggaagtcccccgccggaagtccctcgttggaaccccatactggatggccccagagttgatttccaggctgccctatggaccagaggtggacatctggtctctgggcatcatggtcatcgagatggtagatggcgaacctccttacttcaacgagccgcccctgaaggctatgaagatgattcgggataacctgccacctagactgaaaaatctgcataaggtgtctcccagcttaaagggcttcctggatcgcctgctggttcgggatcctgctcagagggccacagctgccgaacttttgaagcatcctttcctggctaaggctgggccacctgcaagcatagtcccgcttatgcggcagaatagaactagatag

SEQ ID NO: 26014 - DNA, 1776 bp, Artificial Sequence
  derived and/or modified sequence
atgttcggtaaacgtaagaagagagtcgaaatcagcgctccaagcaactttgagcaccgggtacacactggctttgatcagcacgagcagaaatttaccggactcccacgccagtggcagagtctgatcgaggagtccgcgcggcgccccaagcctttagttgacccggcttgcattacctccatacaacctggagcccctaaaactatagtgagggggagtaagggagccaaggatggggcactgactctattgctcgatgagttcgaaaacatgtctgtgactaggagtaatagcctccgtagggattccccaccccctcccgcacgtgctagacaggaaaacggtatgcccgaggaacctgcaaccacagccagaggtggaccgggcaaggctggcagcaggggcaggtttgcaggtcacagcgaagcggggggcggatctggcgatcggagaagggctggcccggagaaacggccaaagagctccagggaaggctctggcggccctcaagaatcttctcgtgataaacgaccattatctgggccggatgtggggacaccacagccagctggcctcgccagtggcgccaagctggctgccgggagaccttttaacacgtacccacgcgcggataccgatcatccaagtcgaggagcccagggcgagccccacgacgtagcacccaatggaccgagcgcaggtgggctagccattcctcaatcgtcaagttcctcatcacgtccaccaacccgggctcgaggagccccatcccctggcgtgctggggcctcacgccagtgagcctcagttagcccccccagcttgtacaccagccgcacctgccgttcccggaccgccgggtcctcgcagcccacagagggagccacagcgggtgtcacacgagcagttccgagcagccctgcagctggtggtggatccaggcgacccacggtcctatcttgataattttatcaaaattggagaggggtcaaccggcatagtgtgtatcgcgaccgtccggtcctcagggaagctggtggccgtgaagaagatggatctccggaagcagcaaaggcgggagctgttgttcaatgaggttgtcatcatgcgggattatcagcacgagaatgtggtggaaatgtataacagctatctagtgggggacgagctttgggtcgtcatggaattcctcgaggggggcgcgctaacagatatcgtgacacatacccgaatgaatgaggagcagatcgccgcggtgtgtctagctgtgctgcaggccctttctgtactgcacgctcagggcgtgattcacagggatattaagtcagactccattttacttacacatgacggcagggtgaaattgagtgacttcggattttgtgctcaggttagcaaagaggtgcctcgaagaaaatccctggtcgggactccctactggatggctccggaactgatatcacggctgccctatggccccgaggtggatatttggagcctcggcataatggtaatcgaaatggtcgatggggagccgccctattttaacgaacctcccctgaaggccatgaagatgatccgagataatctgccaccacgcctgaaaaatctgcacaaggtgagtccgagtctcaaaggctttctggataggctgctggtccgagacccagcccagcgtgcgacagctgccgagttgctgaagcaccccttcctggctaaagccggtcctccagcctcaattgtccccctgatgcggcagaaccgaacaaggtag

SEQ ID NO: 26015 - DNA, 1776 bp, Artificial Sequence
  derived and/or modified sequence
atgttcggcaagagaaagaagagagtagagatctcagccccctctaacttcgagcaccgggtccataccggttttgaccagcatgaacagaagttcaccggactgcctcggcagtggcaatctctgatagaggagtccgcccgtagacccaagcccttagtggaccctgcctgtatcaccagcatccagcccggcgcaccaaagacaatcgtccgcggatctaagggggctaaggacggcgccctcacactgctgttggacgaattcgaaaatatgtccgtgacacggtccaattctctccgtagggatagtcctccacctcccgcccgcgcgagacaggagaacggcatgcctgaggagcctgccacgaccgctcgcggaggacctggcaaggctgggagtcgggggagattcgccggccattctgaagctggcggaggcagcggtgacaggcggagggctggcccggaaaagaggccaaaatcttcgcgtgaaggttcgggcgggccacaggaaagttcacgagacaaacgacctctatccggacctgatgttggcacaccccagccggctggcttagcaagcggagcgaaactggcggcgggtcgccccttcaacacttacccaagggccgacacagatcatccttctcggggggctcagggcgagccccatgacgttgctccgaatggcccctctgcaggagggctggcaatccctcagtcatccagctcttcgtcacggcccccaacacgggcacgcggagccccttccccaggtgtactgggtcctcacgctagcgaaccgcagctagcaccacccgcctgcacccccgcggccccagccgtgcccgggcccccaggccctaggtcccctcagagggaacctcaaagggtgtcccatgaacaatttagagcagccctacagctggtcgttgatcctggcgacccaagaagttacttggacaattttattaagatcggagagggaagtacaggaattgtttgtattgcgacggtacggtcgtctggcaagctcgtagctgtgaagaaaatggatcttcgaaaacagcaacggagggaactattatttaacgaggtcgtgattatgagagactaccagcacgaaaatgtcgtggaaatgtacaatagctacctggtgggcgacgaactctgggtagtgatggagtttctcgaggggggggccttaaccgacattgtgactcacacccgcatgaatgaggagcaaattgctgcagtatgcctggccgttctgcaggcactgtccgtactccatgcacagggggtgatccacagagacattaaatccgattctatcctccttacgcacgatggaagggtaaaactatcagatttcgggttttgcgcacaagtgtctaaggaagtgccccgacgaaagtcgctggttggtaccccatactggatggccccagagctgatttcccgacttccctatggacctgaggtggacatctggagcctgggaattatggttattgaaatggttgatggggagcccccatactttaatgaaccacccttgaaagcaatgaagatgattagggataatctgcccccacgcttaaaaaatctccacaaagtgtcacccagcctgaaggggtttctggataggttgttggtccgggaccctgcacagagagctacagctgcggagctgcttaaacatccgttcctcgccaaagctggccctccagcgagcatcgtaccccttatgcgtcagaacaggacaagatag

SEQ ID NO: 26016 - DNA, 1776 bp, Artificial Sequence
  derived and/or modified sequence
atgttcggcaagcgtaagaaaagggttgagataagcgctcccagtaacttcgagcatcgggtgcacacaggcttcgatcagcatgaacagaagttcacaggactgcccagacagtggcagtcgctgatcgaggagagcgctcgaagacccaagccccttgttgatcctgcttgtatcaccagtatccagcccggcgcacccaagacgatcgtgaggggatcaaaaggagctaaagacggtgccttgacgttgcttcttgacgagtttgaaaatatgtcggtcactcgatccaattctctgaggcgggatagtccacccccccctgcgcgtgcaagacaggaaaacggtatgcccgaagagcccgcgaccaccgcacgagggggcccaggaaaagcaggatctcgaggaagattcgccggccacagtgaagccggagggggcagcggggatcggaggagggcaggtccagagaagcggcctaagtcgagccgcgagggcagcggtggccctcaggaaagtagccgggacaaacgtcctttaagtgggccagatgtaggaactcctcaacccgccggtcttgctagcggcgccaagctggcagcgggccgtcctttcaacacgtacccaagggccgacaccgatcatccgagtaggggtgcccaaggggagccacacgacgtcgcgccaaatggccccagcgctgggggactggcaattccccaaagttcgagtagctcctctaggccgcccaccagggccagaggtgccccgtcacccggagtgctgggaccccacgcaagcgagccacagctggcaccccctgcatgcacgcccgcagccccagctgtgccaggtcctcccgggcctcgaagcccccagcgcgaaccgcagagagtaagccatgagcagttcagggcagcgctgcagctcgtcgttgaccccggcgaccctagatcctacctggacaacttcatcaagattggcgagggatcaactggcatcgtttgcatagctacagttcggtcttctggtaagctcgttgcggtaaagaagatggatctgcggaaacagcagcggcgcgaactactattcaacgaggtcgtaatcatgagggattaccagcatgagaatgtggtggagatgtacaattcctatcttgtgggagatgagctgtgggtagttatggagttcctggaggggggcgccctgacggacattgttacccacaccaggatgaacgaggagcaaatcgccgctgtctgcctggccgtcctgcaggctctgtccgttctccatgcccaaggggttatacacagagacatcaagagtgattccattctcctgacccatgatggcagggtgaagctgagtgacttcggattctgcgcacaagtctccaaagaggtacctaggcgaaaaagtttagtcgggacaccttactggatggcgcctgagctaatcagccggctgccatacggccctgaagtcgatatatggtcccttggtatcatggtaatcgagatggtggacggtgagcccccctacttcaacgagccaccgctgaaggcaatgaaaatgatcagggacaacctgccgccgagacttaagaacctgcacaaagtttcaccatctcttaaggggttcctcgacagactgctcgtgagagatcccgcgcagagggccaccgccgcggaactgcttaagcatccgttcttagcgaaagccggcccacccgccagtatcgtgccactgatgaggcagaaccggactcggtag

SEQ ID NO: 26017 - DNA, 1776 bp, Artificial Sequence
  derived and/or modified sequence
atgtttgggaagaggaagaagagggtggagatcagcgcccccagcaactttgagcaccgggtgcacactggatttgaccagcacgagcagaagttcaccggcctgccccggcagtggcagagcctgattgaggagagcgcccggcggcccaagcccctggtggaccctgcctgcatcaccagcatccagcccggggcccccaagaccatcgtgcggggcagcaaaggagccaaggatggagccctgaccctgctgctggatgaatttgagaacatgtctgtgaccaggagcaacagcctgcggcgggacagccccccacctccagcccgggcccggcaggagaatggcatgcctgaggagcccgccaccacagcccggggcggccctgggaaggccggcagccggggccgctttgctggccacagcgaggccggcggcggcagcggggacagaagaagagctggccctgagaagaggcccaagagcagccgggagggcagcggcggcccccaggagagcagccgggacaagaggcccctgagcggcccagatgtgggcaccccccagcctgctggcctggccagcggggccaagctggccgccggccggcccttcaacacctaccccagggctgacacagaccaccccagcagaggagcccagggcgagccccatgatgtggcccccaacggccccagcgctgggggcctggccatcccccagagcagcagcagcagcagcaggcctcccacccgggcccggggggcccccagccctggggtgctgggcccccacgccagcgagccccagctggcccccccagcctgcaccccagctgccccagctgtgcccggccccccaggccccaggagcccccagcgggagccccagagggtgtcccatgagcagttccgggccgccctgcagctggtggtggaccccggggaccccaggagctacctggacaacttcatcaagattggagagggcagcacaggcatcgtgtgcatcgccaccgtgcgcagcagcggcaagctggtggccgtgaagaagatggacctgaggaagcagcagaggcgggagctgctcttcaatgaggtggtgatcatgagggactaccagcatgaaaatgtggtggagatgtacaacagctacctggtgggagatgagctgtgggtggtgatggagttcctggagggcggggccctgacagacatcgtgacccacaccaggatgaatgaggagcagattgctgctgtgtgcctggccgtgctgcaggccctgtctgtgctgcacgcccagggcgtcatccaccgggacatcaagagtgacagcatcctgctgacccatgatggccgggtgaagctgagtgactttggcttctgtgcccaggtgtccaaggaggtgcccaggaggaagagcctggtgggcaccccctactggatggcccctgagctgatcagccggctgccctacggccctgaggtggacatctggagcctgggcatcatggtgattgagatggtggatggagagcccccctacttcaatgaaccacccctgaaggccatgaagatgatccgggacaacctgcccccccggctgaagaacctgcacaaggtgagccccagcctgaagggcttcctggaccggctgctggtgcgggaccctgcccagagggccacagctgctgagctgctgaagcaccccttcctggccaaggccggccccccagccagcatcgtgcccctgatgaggcagaacagaacaagatag

SEQ ID NO: 26018 - DNA, 1188 bp, Artificial Sequence
  derived and/or modified sequence
atgggctgccagaggagccggcccttcaacacctaccccagggctgacacagaccaccccagcagaggagcccagggcgagccccatgatgtggcccccaacggccccagcgctgggggcctggccatcccccagagcagcagcagcagcagcaggcctcccacccgggcccggggggcccccagccctggggtgctgggcccccacgccagcgagccccagctggcccccccagcctgcaccccagctgccccagctgtgcccggccccccaggccccaggagcccccagcgggagccccagagggtgtcccatgagcagttccgggccgccctgcagctggtggtggaccccggggaccccaggagctacctggacaacttcatcaagattggagagggcagcacaggcatcgtgtgcatcgccaccgtgcgcagcagcggcaagctggtggccgtgaagaagatggacctgaggaagcagcagaggcgggagctgctcttcaatgaggtggtgatcatgagggactaccagcatgaaaatgtggtggagatgtacaacagctacctggtgggagatgagctgtgggtggtgatggagttcctggagggcggggccctgacagacatcgtgacccacaccaggatgaatgaggagcagattgctgctgtgtgcctggccgtgctgcaggccctgtctgtgctgcacgcccagggcgtcatccaccgggacatcaagagtgacagcatcctgctgacccatgatggccgggtgaagctgagtgactttggcttctgtgcccaggtgtccaaggaggtgcccaggaggaagagcctggtgggcaccccctactggatggcccctgagctgatcagccggctgccctacggccctgaggtggacatctggagcctgggcatcatggtgattgagatggtggatggagagcccccctacttcaatgaaccacccctgaaggccatgaagatgatccgggacaacctgcccccccggctgaagaacctgcacaaggtgagccccagcctgaagggcttcctggaccggctgctggtgcgggaccctgcccagagggccacagctgctgagctgctgaagcaccccttcctggccaaggccggccccccagccagcatcgtgcccctgatgaggcagaacagaacaagatag

SEQ ID NO: 26019 - DNA, 1776 bp, Artificial Sequence
  derived and/or modified sequence
atgttcggcaagcggaagaagcgggtggagatcagcgcccccagcaattttgagcacagagtacacacaggatttgatcagcatgaacagaagttcacagggcttcctagacagtggcagagtcttattgaggagtctgcccgtcggcccaagccgttggtcgatccggcttgtattacgtccattcagccaggagcccctaagacaatcgtccggggaagcaagggagccaaggatggcgccctgaccttgttgcttgatgagtttgagaacatgtcggttacacgtagcaattctctgcgccgggattcgcctcctcccccggcccgcgcacgccaggaaaacgggatgccagaggaaccggcgaccaccgcccgtgggggcccaggtaaagctggttctcgggggcgcttcgcggggcattccgaagccgggggcggctccggcgaccggaggagggccggaccagaaaaacgcccgaaatcctcacgagagggctcaggcggacctcaggagtccagcagggacaagcgcccactttccggacccgatgtgggtactcctcagcctgctggactcgcctcaggtgcaaaactagccgcgggcagaccgtttaacacctacccacgcgccgatactgatcatccatcgaggggggcccagggcgagcctcatgacgtagcacccaatggccctagcgctgggggcttggccatcccccagtcctcctccagctcctcacgacctcccacacgagcccggggcgctccatctccgggggtgctgggacctcacgcatcagagccccagttagccccgcctgcatgcactcctgcagcccccgctgttcctgggccccctggccctcggtccccgcagcgcgaaccccagagggttagccacgaacagtttcgggccgctctgcaactggtggtcgatcctggtgacccccgctcatacctggataacttcatcaagataggcgaaggctccaccgggatcgtgtgtatcgccaccgtgagatcgagcggaaaattggtggctgtcaagaagatggacttgaggaagcagcagagaagagaattgctctttaatgaagtggtgataatgagggattatcagcacgaaaatgtggtggagatgtacaacagttatcttgttggcgatgaactgtgggtggtcatggaatttctggagggcggcgcccttactgacatagttacccacactagaatgaacgaggagcagatcgctgcagtatgccttgccgttctgcaggctctgtctgtacttcacgctcagggggtcatacatcgtgacatcaagtccgactccatccttctgacgcatgacggaagagttaaactgagcgacttcggcttttgcgcgcaggtgtccaaagaagtccctaggagaaagagtctcgtggggacaccgtactggatggctcccgagttgataagccgtcttccttacgggcccgaagtggatatatggagcctcggaatcatggtgattgagatggttgacggcgaaccaccctattttaacgagcctccacttaaggcaatgaagatgatcagggacaatttacccccaagactcaagaaccttcacaaagtgtctcccagccttaagggttttctggatcgactgcttgtgcgggatcctgctcagcgtgccaccgccgcagaactgttaaagcaccctttcctggctaaagctgggccccctgcctcaatcgtgccattaatgcgtcagaatcggaccaggtag

SEQ ID NO: 26020 - DNA, 1188 bp, Artificial Sequence
  derived and/or modified sequence
atgggctgccagcggagccggcccttcaacacctacccccgggccgacaccgaccatccgtctcgaggtgcccagggagaaccacatgacgtggcacctaatggcccaagcgctggcggactcgccatccctcaaagttcctctagcagctcgagaccccctacaagggctcgcggagcaccaagtccaggggttctcgggccccatgctagtgaaccccaacttgctccccccgcgtgtacgcccgccgcgccagccgtgcctggtccacctggtcctcgcagccctcagagggaaccgcagagagtttcacatgaacagttcagggcagccctgcagttagtggtcgatccgggcgacccaaggtcatacttagacaacttcattaaaattggggagggtagcacaggcattgtatgcatagcaacggtaaggtcctctgggaagttagttgcggtcaaaaaaatggacctcagaaagcagcagcgccgcgagcttctcttcaacgaggtggttattatgcgggactaccagcatgagaatgttgtcgagatgtacaattcataccttgttggggacgaactctgggttgtgatggagtttctggaaggcggcgcattaaccgatatagttacacatacgaggatgaatgaggagcaaattgctgctgtttgcctggccgtcctacaagccttgagcgtactccacgcccagggggtcattcatcgtgatatcaagagcgatagtatcctgttgacacatgacgggcgggtgaagctgtcagattttggcttttgtgcgcaggtcagtaaagaggtccctcggcggaagtctctagtgggcacaccatactggatggctcccgagcttataagccgactcccgtatgggcccgaggtggacatctggtcactgggcattatggtcattgaaatggtggatggagagcccccctacttcaacgagccccctctgaaggccatgaagatgattcgagataatctgccgccaagactgaagaacttacataaggtctctccatccctcaaaggtttcctagatcgcctcctcgtccgagacccagctcagagggctacagccgctgaactactaaagcaccccttcctggcaaaagcggggcctcccgcatccatcgttcccctaatgcgccagaatcgcacccgctag

SEQ ID NO: 26021 - DNA, 1776 bp, Artificial Sequence
  derived and/or modified sequence
atgttcggcaagcggaagaagcgggtggagatcagcgcccccagcaattttgagcatagggtgcataccggatttgaccagcatgaacaaaaattcacaggactccccaggcagtggcagagtctcattgaggagagtgctcgtaggcccaagcccttggtggaccccgcctgtatcacatccatccagcccggagctccgaagaccatcgtacggggatctaaaggcgccaaagatggggcgttaactctgcttcttgatgagtttgagaacatgagcgtcaccaggtctaactctctgaggagggattcaccccctccccccgcccgggcgcgccaggaaaacggaatgccggaggagcctgccacgacggcacgcggcggtccaggtaaagccggttcacggggccggttcgccggccactctgaggctggggggggatctggcgatagaagacgcgcaggacccgagaaacggcccaaaagtagccgggagggctctggcggcccgcaggagtcgagccgcgataagagacccttgtcagggccagacgtaggcacgccacagcctgctggactcgcctccggggcaaaactcgccgcaggccggcccttcaacacctacccccgcgctgacactgatcacccgtctagaggcgctcagggtgaaccacacgatgtggcccctaatggaccctctgccggtggcctggccattcctcaatcctcgtctagtagcagccgaccacctacaagagctcgtggcgctccgagtcccggcgttttaggcccccacgccagtgagccccaactcgcccccccagcctgtacccccgcggcacccgctgttcctggcccccctggaccaaggtctcctcagagggaacctcagcgggtgagtcatgagcagttcagagccgccctgcagctggtcgtcgaccctggcgatccccgcagttatctggataatttcatcaaaattggagagggttccacaggtatcgtttgcatagcaacagttagaagcagtggcaagctggtggctgttaaaaagatggatctgcgaaagcaacaacgcagggagcttctcttcaatgaagtcgtgatcatgcgtgattaccagcatgaaaacgttgtcgaaatgtacaattcctatcttgtgggggacgaactctgggttgtgatggagttcttggaaggcggggctctgaccgacattgtcacacacacaagaatgaacgaggagcaaattgccgccgtttgcctggctgtcctccaggccctctccgttctgcacgcccagggcgtcattcacagggatatcaagagtgattccatcctcctgactcatgatggcagagttaaactcagcgattttggattctgtgcccaagtcagtaaagaagttccacgacggaagtccctggtcggcactccatattggatggccccagagttaatcagtagactgccatatgggcctgaggtggatatatggagtcttgggattatggtcatcgagatggtggacggtgagccaccctacttcaatgaaccacctctgaaagccatgaaaatgattagagacaacctacccccccggcttaaaaatctgcacaaggtgagcccatccctgaaaggcttcctggatcgtcttctcgtccgggaccctgctcagcgtgccaccgccgccgagcttctcaagcacccatttctcgctaaggcagggccccccgcctcaatcgtaccattgatgagacagaatagaaccagatag

SEQ ID NO: 26022 - DNA, 1776 bp, Artificial Sequence
  derived and/or modified sequence
atgttcggcaagcggaagaagcgggtggagatcagcgcccccagcaacttcgagcaccgagtccatacagggtttgatcagcatgagcaaaagtttaccggactacctcgacagtggcagagtcttattgaggagtcagctcggaggccaaaacctctggtggatccagcctgcatcactagcattcagccgggagcccctaagacgatcgtccgcggcagtaaaggggctaaagatggagcgctgacactcctcctggatgaatttgagaacatgtcagtgacgagatcgaatagcctccgtcgggactctcctcccccacctgctagggcccgacaagagaacggaatgccggaagaaccagctaccacagcgagaggcggcccaggcaaggccgggtccagaggacggtttgccggccactctgaggctggcggggggagtggcgaccggcgccgggccgggcccgaaaagcggcctaaaagctctcgcgaaggtagcggggggcctcaggagtcatctcgggataaacggcctctgtcagggccagacgtcggtaccccccagcctgcaggcctcgcctctggcgctaaactggccgccggcaggccttttaacacctatcccagggctgatacagatcatccatcaagaggagcccagggagaaccgcacgatgtggcccctaacgggccgagcgcaggcggactggccatcccacagagcagttcatcttcgagcaggcctccaacacgagctcgtggcgctccttctccaggagttctgggtccacatgcctcagaaccccaactggcaccgcccgcgtgcactcccgcggcacctgctgtgcctggacccccagggcctagatcacctcaaagagagcctcagagggttagtcatgaacagttcagagcggcgctgcaattggtcgttgaccctggggatcctagatcctatttggacaattttatcaagattggtgagggctctactgggattgtttgtattgccactgtgcgatcttcgggcaaattggtggctgtgaagaaaatggatctgcgcaagcaacaaagaagagagctgctgttcaacgaagtggtgatcatgcgtgattaccagcatgagaacgtggttgaaatgtataacagctacctggtgggtgacgaactgtgggtggtcatggaattcctggagggaggagctctcacggacatcgtgacccacactagaatgaacgaggagcagattgccgccgtttgcctggcagttttacaagcattgtccgttctccacgcccagggcgttatacatcgcgatattaaatcagacagcatactgctgacccacgatggtcgcgttaaactgtccgatttcggcttttgcgctcaggtgtcaaaggaagtgccaaggcggaagtctcttgtgggaactccttactggatggccccggaacttatctctcggctcccctatgggccagaggtagatatctggagtcttggcattatggttattgagatggttgatggtgaacccccttatttcaacgagcccccgctgaaggcaatgaaaatgatacgcgacaacctcccaccacgactaaagaatctacacaaggtctctccgtcccttaagggtttcctcgatagactgctcgtgcgagatcctgcccagcgcgctactgctgccgaactcttgaagcatccattcctggctaaggccggtccccctgcctctatcgtccccctgatgcgccaaaaccgaactagatag

SEQ ID NO: 26023 - DNA, 1776 bp, Artificial Sequence
  derived and/or modified sequence
atgttcggcaagcggaagaagcgggtggagatcagcgcccccagcaattttgaacaccgggtccacaccggctttgatcagcacgaacagaagtttaccgggctgccccggcaatggcagagtcttatcgaagagagcgcacgccggcctaagccccttgtcgacccagcatgtataacgtccattcagccaggcgctccgaaaacgatcgtacgcggatcaaagggcgccaaggacggcgctctgacactgctgctcgatgagtttgaaaatatgtcggtcactcgatcaaattcactgagacgagatagcccgccccctcctgcccgcgccagacaggaaaatgggatgcctgaggagccagcgacaaccgcccgcggtggtcccggaaaagcgggctccaggggcaggttcgctggacattctgaggcaggcggtggatctggagatcgtagaagagccggcccagagaagcgtcccaagagcagcagggagggctccggaggcccccaggagtcctcgagggacaaaaggccgctgagcgggcccgacgtcgggacccctcagccagccggactcgcctccggtgccaagcttgccgcggggcggccatttaacacttaccctcgcgccgataccgatcatccttcccgaggcgcccagggtgaaccacacgatgtggctcccaacgggccctctgctggcggactcgcaatcccacagtcttcctcatcgtcgtcaagacctccgacgagagctaggggcgccccgtcacccggcgttttgggtccgcacgcttctgagcctcaactggcgccgcccgcctgtacacccgccgctcccgcagtgccgggacccccaggacctagaagtccccagcgcgagcctcaacgcgtgtctcacgaacagttcagggcagcactccaacttgtggttgaccccggggacccccgatcctatcttgacaatttcattaaaataggggaggggagtactggcatcgtatgcatcgccactgttcggtcatctggaaagctcgtcgcagtgaagaagatggacttgcgcaagcaacagcgaagggagttgttgttcaatgaagtggtgataatgcgcgattatcagcatgaaaatgtggtagaaatgtataattcatatctggttggcgatgaactgtgggtggtaatggaattcctggaaggaggggcccttaccgatatagtcactcataccaggatgaatgaagaacagatcgctgccgtctgtcttgccgtactgcaggctttatccgttcttcatgcacagggggttatccacagggatattaaaagtgatagcattctgctgacccacgatgggagagtcaagctctcagactttgggttctgtgcccaggtgtctaaagaggtaccccgacgtaaaagtctggtggggactccatattggatggctccagaactgatctcacgtttgccatacggacctgaagtagacatctggagtttaggtattatggtaattgagatggtggacggcgaacctccctacttcaatgagccccccctgaaggcgatgaagatgattcgcgacaatctccccccgaggcttaaaaatctccataaggtctccccaagcctgaaaggcttcctggaccgtctcctggttcgggaccccgctcaacgtgccacggccgctgagctcctgaaacacccattccttgctaaggccggcccccccgcttccatcgtacctttaatgcgtcaaaatcggacccgatag

SEQ ID NO: 26024 - DNA, 2765 bp, Artificial Sequence
  derived and/or modified sequence
agccccggatgttcgttggggattcaacatggcggcgggagtgtccgcggtggtggcggtgcaagagagctgagggaggcgcgagggcgcggagttccaggtcgagcagttaggccgcgagcgactgcggcgccgagccggccgcaccgagtccccggcaccatgtttgggaagaggaagaagcgggtggagatctccgcgccgtccaacttcgagcaccgcgtgcacacgggcttcgaccagcacgagcagaagttcacggggctgccccgccagtggcagagcctgatcgaggagtcggctcgccggcccaagcccctcgtcgaccccgcctgcatcacctccatccagcccggggcccccaagaccatcgtgcggggcagcaaaggtgccaaagatggggccctcacgctgctgctggacgagtttgagaacatgtcggtgacacgctccaactccctgcggagagacagcccgccgccgcccgcccgtgcccgccaggaaaatgggatgccagaggagccggccaccacggccagagggggcccagggaaggcaggcagccgaggccggttcgccggtcacagcgaggcgggtggcggcagtggtgacaggcgacgggcggggccagagaagaggcccaagtcttccagggagggctcagggggtccccaggagtcctcccgggacaaacgccccctctccgggcctgatgtcggcaccccccagcctgctggtctggccagtggggcgaaactggcagctggccggccctttaacacctacccgagggctgacacggaccacccatcccggggtgcccagggggagcctcatgacgtggcccctaacgggccatcagcggggggcctggccatcccccagtcctcctcctcctcctcccggcctcccacccgagcccgaggtgcccccagccctggagtgctgggaccccacgcctcagagccccagctggcccctccagcctgcacccccgccgcccctgctgttcctgggccccctggcccccgctcaccacagcgggagccacagcgagtatcccatgagcagttccgggctgccctgcagctggtggtggacccaggcgacccccgctcctacctggacaacttcatcaagattggcgagggctccacgggcatcgtgtgcatcgccaccgtgcgcagctcgggcaagctggtggccgtcaagaagatggacctgcgcaagcagcagaggcgcgagctgctcttcaacgaggtggtaatcatgagggactaccagcacgagaatgtggtggagatgtacaacagctacctggtgggggacgagctctgggtggtcatggagttcctggaaggaggcgccctcaccgacatcgtcacccacaccaggatgaacgaggagcagatcgcggccgtgtgccttgcagtgctgcaggccctgtcggtgctccacgcccagggcgtcatccaccgggacatcaagagcgactcgatcctgctgacccatgatggcagggtgaagctgtcagactttgggttctgcgcccaggtgagcaaggaagtgccccgaaggaagtcgctggtcggcacgccctactggatggccccagagctcatctcccgccttccctacgggccagaggtagacatctggtcgctggggataatggtgattgagatggtggacggagagcccccctacttcaacgagccacccctcaaagccatgaagatgattcgggacaacctgccaccccgactgaagaacctgcacaaggtgtcgccatccctgaagggcttcctggaccgcctgctggtgcgagaccctgcccagcgggccacggcagccgagctgctgaagcacccattcctggccaaggcagggccgcctgccagcatcgtgcccctcatgcgccagaaccgcaccagatgaggcccagcgcccttcccctcaaccaaagagccccccgggtcacccccgccccactgaggccagtagggggccaggcctcccactcctcccagcccgggagatgctccgcgtggcaccaccctccttgctgggggtagatgagaccctactactgaactccagttttgatctcgtgacttttagaaaaacacagggactcgtgggagcaagcgaggctcccaggacccccaccctctgggacaggccctcccccatgttcttctgtctccaggaagggcagcggccctcccatcactggaagtctgcagtgggggtcgctgggggtggagagaacactaagaggtgaacatgtatgagtgtgtgcacgcgtgtgagtgtgcatgtgtgtgtgtgcaaaggtccagccaccccgtcctccagcctgcaaggggtgtctggcgccttgcctgacacccagccccctctccccctgagccattgtgggggtcgatcatgaatgtccgaagagtggccttttcccgtagccctgcgccccctttctgtggctggatggggagacaggtcagggccccccaccctctccagcccctgcagcaaatgactactgcacctggacagcctcctcttttctagaagtctatttatattgtcattttataacactctagcccctgcccttattgggggacagatggtccctgtcctgcggggtggccctggcagaaccactgcctgaagaaccaggttcctgcccggtcagcgcagccccagcccgcccacccctgcctcgagttagttttacaattaaaacattgtcttgttttgtg

SEQ ID NO: 26025 - DNA, 1814 bp, Artificial Sequence
  derived and/or modified sequence
atgttcgttggggattcaacatggcggcgggagtgtccgcggtggtggcggtgcaagagagctgagggaggcgcgagggcgcggagttccaggtcgagcagttaggccgcgagcgactgcggcgccgagccggccgcaccgagtccccggcaccatgtttgggaagaggaagaagcgggtggagatctccgcgccgtccaacttcgagcaccgcgtgcacacgggcttcgaccagcacgagcagaagttcacggggctgccccgccagtggcagagcctgatcgaggagtcggctcgccggcccaagcccctcgtcgaccccgcctgcatcacctccatccagcccggggcccccaagaccatcgtgcggggcagcaaaggtgccaaagatggggccctcacgctgctgctggacgagtttgagaacatgtcggtgacacgctccaactccctgcggagagacagcccgccgccgcccgcccgtgcccgccaggaaaatgggatgccagaggagccggccctttaacacctacccgagggctgacacggaccacccatcccggggtgcccagggggagcctcatgacgtggcccctaacgggccatcagcggggggcctggccatcccccagtcctcctcctcctcctcccggcctcccacccgagcccgaggtgcccccagccctggagtgctgggaccccacgcctcagagccccagctggcccctccagcctgcacccccgccgcccctgctgttcctgggccccctggcccccgctcaccacagcgggagccacagcgagtatcccatgagcagttccgggctgccctgcagctggtggtggacccaggcgacccccgctcctacctggacaacttcatcaagattggcgagggctccacgggcatcgtgtgcatcgccaccgtgcgcagctcgggcaagctggtggccgtcaagaagatggacctgcgcaagcagcagaggcgcgagctgctcttcaacgaggtggtaatcatgagggactaccagcacgagaatgtggtggagatgtacaacagctacctggtgggggacgagctctgggtggtcatggagttcctggaaggaggcgccctcaccgacatcgtcacccacaccaggatgaacgaggagcagatcgcggccgtgtgccttgcagtgctgcaggccctgtcggtgctccacgcccagggcgtcatccaccgggacatcaagagcgactcgatcctgctgacccatgatggcagggtgaagctgtcagactttgggttctgcgcccaggtgagcaaggaagtgccccgaaggaagtcgctggtcggcacgccctactggatggccccagagctcatctcccgccttccctacgggccagaggtagacatctggtcgctggggataatggtgattgagatggtggacggagagcccccctacttcaacgagccacccctcaaagccatgaagatgattcgggacaacctgccaccccgactgaagaacctgcacaaggtgtcgccatccctgaagggcttcctggaccgcctgctggtgcgagaccctgcccagcgggccacggcagccgagctgctgaagcacccattcctggccaaggcagggccgcctgccagcatcgtgcccctcatgcgccagaaccgcaccagatgaggcccagcgcccttcccctcaaccaaagagccccccgggtcacccccgccccactgaggccagtagggggccaggcctcccactcctcccagcccgggagatgctccgcgtggcaccaccctccttgct

SEQ ID NO: 26026 - DNA, 2855 bp, Artificial Sequence
  derived and/or modified sequence
ccatctttctccaggctctctatgggatgccgccatcagaatgtctcttcctcagcccctttgttttttaaagtggctttggtcgaccatttgctctgtgcttggtactgtgtcaagggcccgattgaagaccacagatcctaaagataggggagtgtcgcgacaaggctgcctggggtgccctcttaacccaggggatcagtaaccctgtgctgagtcaatatccaaaggccgcaccgagtccccggcaccatgtttgggaagaggaagaagcgggtggagatctccgcgccgtccaacttcgagcaccgcgtgcacacgggcttcgaccagcacgagcagaagttcacggggctgccccgccagtggcagagcctgatcgaggagtcggctcgccggcccaagcccctcgtcgaccccgcctgcatcacctccatccagcccggggcccccaagaccatcgtgcggggcagcaaaggtgccaaagatggggccctcacgctgctgctggacgagtttgagaacatgtcggtgacacgctccaactccctgcggagagacagcccgccgccgcccgcccgtgcccgccaggaaaatgggatgccagaggagccggccaccacggccagagggggcccagggaaggcaggcagccgaggccggttcgccggtcacagcgaggcgggtggcggcagtggtgacaggcgacgggcggggccagagaagaggcccaagtcttccagggagggctcagggggtccccaggagtcctcccgggacaaacgccccctctccgggcctgatgtcggcaccccccagcctgctggtctggccagtggggcgaaactggcagctggccggccctttaacacctacccgagggctgacacggaccacccatcccggggtgcccagggggagcctcatgacgtggcccctaacgggccatcagcggggggcctggccatcccccagtcctcctcctcctcctcccggcctcccacccgagcccgaggtgcccccagccctggagtgctgggaccccacgcctcagagccccagctggcccctccagcctgcacccccgccgcccctgctgttcctgggccccctggcccccgctcaccacagcgggagccacagcgagtatcccatgagcagttccgggctgccctgcagctggtggtggacccaggcgacccccgctcctacctggacaacttcatcaagattggcgagggctccacgggcatcgtgtgcatcgccaccgtgcgcagctcgggcaagctggtggccgtcaagaagatggacctgcgcaagcagcagaggcgcgagctgctcttcaacgaggtggtaatcatgagggactaccagcacgagaatgtggtggagatgtacaacagctacctggtgggggacgagctctgggtggtcatggagttcctggaaggaggcgccctcaccgacatcgtcacccacaccaggatgaacgaggagcagatcgcggccgtgtgccttgcagtgctgcaggccctgtcggtgctccacgcccagggcgtcatccaccgggacatcaagagcgactcgatcctgctgacccatgatggcagggtgaagctgtcagactttgggttctgcgcccaggtgagcaaggaagtgccccgaaggaagtcgctggtcggcacgccctactggatggccccagagctcatctcccgccttccctacgggccagaggtagacatctggtcgctggggataatggtgattgagatggtggacggagagcccccctacttcaacgagccacccctcaaagccatgaagatgattcgggacaacctgccaccccgactgaagaacctgcacaaggtgtcgccatccctgaagggcttcctggaccgcctgctggtgcgagaccctgcccagcgggccacggcagccgagctgctgaagcacccattcctggccaaggcagggccgcctgccagcatcgtgcccctcatgcgccagaaccgcaccagatgaggcccagcgcccttcccctcaaccaaagagccccccgggtcacccccgccccactgaggccagtagggggccaggcctcccactcctcccagcccgggagatgctccgcgtggcaccaccctccttgctgggggtagatgagaccctactactgaactccagttttgatctcgtgacttttagaaaaacacagggactcgtgggagcaagcgaggctcccaggacccccaccctctgggacaggccctcccccatgttcttctgtctccaggaagggcagcggccctcccatcactggaagtctgcagtgggggtcgctgggggtggagagaacactaagaggtgaacatgtatgagtgtgtgcacgcgtgtgagtgtgcatgtgtgtgtgtgcaaaggtccagccaccccgtcctccagcctgcaaggggtgtctggcgccttgcctgacacccagccccctctccccctgagccattgtgggggtcgatcatgaatgtccgaagagtggccttttcccgtagccctgcgccccctttctgtggctggatggggagacaggtcagggccccccaccctctccagcccctgcagcaaatgactactgcacctggacagcctcctcttttctagaagtctatttatattgtcattttataacactctagcccctgcccttattgggggacagatggtccctgtcctgcggggtggccctggcagaaccactgcctgaagaaccaggttcctgcccggtcagcgcagccccagcccgcccacccctgcctcgagttagttttacaattaaaacattgtcttgttttgtg

SEQ ID NO: 26027 - DNA, 2701 bp, Artificial Sequence
  derived and/or modified sequence
cagatgagtaacccgaagcccctagaggagtggtcacctgcctgagggcacttctgtcccaccagcatcagaccaggccgcaccgagtccccggcaccatgtttgggaagaggaagaagcgggtggagatctccgcgccgtccaacttcgagcaccgcgtgcacacgggcttcgaccagcacgagcagaagttcacggggctgccccgccagtggcagagcctgatcgaggagtcggctcgccggcccaagcccctcgtcgaccccgcctgcatcacctccatccagcccggggcccccaagaccatcgtgcggggcagcaaaggtgccaaagatggggccctcacgctgctgctggacgagtttgagaacatgtcggtgacacgctccaactccctgcggagagacagcccgccgccgcccgcccgtgcccgccaggaaaatgggatgccagaggagccggccaccacggccagagggggcccagggaaggcaggcagccgaggccggttcgccggtcacagcgaggcgggtggcggcagtggtgacaggcgacgggcggggccagagaagaggcccaagtcttccagggagggctcagggggtccccaggagtcctcccgggacaaacgccccctctccgggcctgatgtcggcaccccccagcctgctggtctggccagtggggcgaaactggcagctggccggccctttaacacctacccgagggctgacacggaccacccatcccggggtgcccagggggagcctcatgacgtggcccctaacgggccatcagcggggggcctggccatcccccagtcctcctcctcctcctcccggcctcccacccgagcccgaggtgcccccagccctggagtgctgggaccccacgcctcagagccccagctggcccctccagcctgcacccccgccgcccctgctgttcctgggccccctggcccccgctcaccacagcgggagccacagcgagtatcccatgagcagttccgggctgccctgcagctggtggtggacccaggcgacccccgctcctacctggacaacttcatcaagattggcgagggctccacgggcatcgtgtgcatcgccaccgtgcgcagctcgggcaagctggtggccgtcaagaagatggacctgcgcaagcagcagaggcgcgagctgctcttcaacgaggtggtaatcatgagggactaccagcacgagaatgtggtggagatgtacaacagctacctggtgggggacgagctctgggtggtcatggagttcctggaaggaggcgccctcaccgacatcgtcacccacaccaggatgaacgaggagcagatcgcggccgtgtgccttgcagtgctgcaggccctgtcggtgctccacgcccagggcgtcatccaccgggacatcaagagcgactcgatcctgctgacccatgatggcagggtgaagctgtcagactttgggttctgcgcccaggtgagcaaggaagtgccccgaaggaagtcgctggtcggcacgccctactggatggccccagagctcatctcccgccttccctacgggccagaggtagacatctggtcgctggggataatggtgattgagatggtggacggagagcccccctacttcaacgagccacccctcaaagccatgaagatgattcgggacaacctgccaccccgactgaagaacctgcacaaggtgtcgccatccctgaagggcttcctggaccgcctgctggtgcgagaccctgcccagcgggccacggcagccgagctgctgaagcacccattcctggccaaggcagggccgcctgccagcatcgtgcccctcatgcgccagaaccgcaccagatgaggcccagcgcccttcccctcaaccaaagagccccccgggtcacccccgccccactgaggccagtagggggccaggcctcccactcctcccagcccgggagatgctccgcgtggcaccaccctccttgctgggggtagatgagaccctactactgaactccagttttgatctcgtgacttttagaaaaacacagggactcgtgggagcaagcgaggctcccaggacccccaccctctgggacaggccctcccccatgttcttctgtctccaggaagggcagcggccctcccatcactggaagtctgcagtgggggtcgctgggggtggagagaacactaagaggtgaacatgtatgagtgtgtgcacgcgtgtgagtgtgcatgtgtgtgtgtgcaaaggtccagccaccccgtcctccagcctgcaaggggtgtctggcgccttgcctgacacccagccccctctccccctgagccattgtgggggtcgatcatgaatgtccgaagagtggccttttcccgtagccctgcgccccctttctgtggctggatggggagacaggtcagggccccccaccctctccagcccctgcagcaaatgactactgcacctggacagcctcctcttttctagaagtctatttatattgtcattttataacactctagcccctgcccttattgggggacagatggtccctgtcctgcggggtggccctggcagaaccactgcctgaagaaccaggttcctgcccggtcagcgcagccccagcccgcccacccctgcctcgagttagttttacaattaaaacattgtcttgttttgtg

SEQ ID NO: 26028 - DNA, 3025 bp, Artificial Sequence
  derived and/or modified sequence
gcgggagtgtccgcggtggtggcggtgcaagagagctgagggaggcgcgagggcgcggagttccaggtcgagcagttaggccgcgagcgactgcggcgccgagccgatgagtaacccgaagcccctagaggagtggtcacctgcctgagggcacttctgtcccaccagcatcagaccaggtgtgtgcaggctctctatgggatgccgccatcagaatgtctcttcctcagcccctttgttttttaaagtggctttggtcgaccatttgctctgtgcttggtactgtgtcaagggcccgattgaagaccacagatcctaaagataggggagtgtcgcgacaaggctgcctggggtgccctcttaacccaggggatcagtaaccctgtgctgagtcaatatccaaaggccgcaccgagtccccggcaccatgtttgggaagaggaagaagcgggtggagatctccgcgccgtccaacttcgagcaccgcgtgcacacgggcttcgaccagcacgagcagaagttcacggggctgccccgccagtggcagagcctgatcgaggagtcggctcgccggcccaagcccctcgtcgaccccgcctgcatcacctccatccagcccggggcccccaagaccatcgtgcggggcagcaaaggtgccaaagatggggccctcacgctgctgctggacgagtttgagaacatgtcggtgacacgctccaactccctgcggagagacagcccgccgccgcccgcccgtgcccgccaggaaaatgggatgccagaggagccggccaccacggccagagggggcccagggaaggcaggcagccgaggccggttcgccggtcacagcgaggcgggtggcggcagtggtgacaggcgacgggcggggccagagaagaggcccaagtcttccagggagggctcagggggtccccaggagtcctcccgggacaaacgccccctctccgggcctgatgtcggcaccccccagcctgctggtctggccagtggggcgaaactggcagctggccggccctttaacacctacccgagggctgacacggaccacccatcccggggtgcccagggggagcctcatgacgtggcccctaacgggccatcagcggggggcctggccatcccccagtcctcctcctcctcctcccggcctcccacccgagcccgaggtgcccccagccctggagtgctgggaccccacgcctcagagccccagctggcccctccagcctgcacccccgccgcccctgctgttcctgggccccctggcccccgctcaccacagcgggagccacagcgagtatcccatgagcagttccgggctgccctgcagctggtggtggacccaggcgacccccgctcctacctggacaacttcatcaagattggcgagggctccacgggcatcgtgtgcatcgccaccgtgcgcagctcgggcaagctggtggccgtcaagaagatggacctgcgcaagcagcagaggcgcgagctgctcttcaacgaggtggtaatcatgagggactaccagcacgagaatgtggtggagatgtacaacagctacctggtgggggacgagctctgggtggtcatggagttcctggaaggaggcgccctcaccgacatcgtcacccacaccaggatgaacgaggagcagatcgcggccgtgtgccttgcagtgctgcaggccctgtcggtgctccacgcccagggcgtcatccaccgggacatcaagagcgactcgatcctgctgacccatgatggcagggtgaagctgtcagactttgggttctgcgcccaggtgagcaaggaagtgccccgaaggaagtcgctggtcggcacgccctactggatggccccagagctcatctcccgccttccctacgggccagaggtagacatctggtcgctggggataatggtgattgagatggtggacggagagcccccctacttcaacgagccacccctcaaagccatgaagatgattcgggacaacctgccaccccgactgaagaacctgcacaaggtgtcgccatccctgaagggcttcctggaccgcctgctggtgcgagaccctgcccagcgggccacggcagccgagctgctgaagcacccattcctggccaaggcagggccgcctgccagcatcgtgcccctcatgcgccagaaccgcaccagatgaggcccagcgcccttcccctcaaccaaagagccccccgggtcacccccgccccactgaggccagtagggggccaggcctcccactcctcccagcccgggagatgctccgcgtggcaccaccctccttgctgggggtagatgagaccctactactgaactccagttttgatctcgtgacttttagaaaaacacagggactcgtgggagcaagcgaggctcccaggacccccaccctctgggacaggccctcccccatgttcttctgtctccaggaagggcagcggccctcccatcactggaagtctgcagtgggggtcgctgggggtggagagaacactaagaggtgaacatgtatgagtgtgtgcacgcgtgtgagtgtgcatgtgtgtgtgtgcaaaggtccagccaccccgtcctccagcctgcaaggggtgtctggcgccttgcctgacacccagccccctctccccctgagccattgtgggggtcgatcatgaatgtccgaagagtggccttttcccgtagccctgcgccccctttctgtggctggatggggagacaggtcagggccccccaccctctccagcccctgcagcaaatgactactgcacctggacagcctcctcttttctagaagtctatttatattgtcattttataacactctagcccctgcccttattgggggacagatggtccctgtcctgcggggtggccctggcagaaccactgcctgaagaaccaggttcctgcccggtcagcgcagccccagcccgcccacccctgcctcgagttagttttacaattaaaacattgtcttgtt

SEQ ID NO: 26029 - DNA, 1776 bp, Artificial Sequence
  derived and/or modified sequence
atgttcggcaagcgtaagaagagggttgaaatttcggccccatccaactttgagcaccgggtgcatacggggttcgatcagcatgagcaaaagttcacgggcttgccgaggcagtggcagtcattgatcgaggagtccgcccgtcggccaaagccactcgtagatcccgcttgcatcacatctattcagcccggtgcacccaagaccattgtccgaggatcgaaaggggcaaaagacggggcacttacactcctgctggatgagttcgagaacatgtcagtgactaggtccaacagtctgaggagagactccccaccacccccagccagggctagacaggaaaatggaatgcccgaggagcctgctacgaccgctcggggtggacctggcaaagccggtagtagggggaggtttgccggacactccgaggccggagggggatctggggatcgtcgtagggccggacctgagaagagaccaaaatcgagtcgggaaggaagcggcggtccacaggaatcaagtcgtgataagcggcctctctccggcccagatgtgggcaccccacaacctgctggactcgcctccggcgctaaacttgctgccggtcgtcccttcaatacataccctcgtgccgacacagatcatcctagtagaggggctcagggagaaccccatgatgtagcgcctaatggtccttctgcgggagggctcgcgatcccacagtcttcaagctcatcgagcaggccacccaccagagccagaggcgcaccgtctcccggtgtcctcggaccccacgcaagcgagccacagctggcccctccggcttgcaccccagcagccccagccgtaccaggcccacccggaccacgctctccgcaaagagagccccaacgagtgtctcacgagcaatttagggccgctttgcagctggttgtggaccctggggatccacggtcttatctggacaactttataaagatcggagaggggtccacagggatcgtctgcattgcgacagtgagaagctctggcaagctggtggctgttaagaagatggacctgaggaagcagcaacggagagagttactctttaatgaggttgtcatcatgcgggattatcaacatgagaacgttgtggagatgtataactcttacctcgtgggcgacgaactatgggtggtaatggaattccttgaaggcggagccctcactgatatcgtcacacatactcgaatgaatgaggagcagatcgccgctgtctgcttggcagtgctgcaggctctatccgtgctgcacgcgcagggagtgattcatagggatattaagtcagattccattctcctgactcacgacgggagagtgaagttaagcgactttggattctgcgcgcaggtcagcaaagaagtgccacgtcgaaagagcctggttggaactccatactggatggctccggaactgattagcaggctcccgtacggacccgaggtcgatatctggagcttgggcatcatggttattgaaatggtggatggggaaccaccctattttaatgaacccccactgaaggctatgaagatgatcagagataatcttccccctcggctgaagaacttacacaaagtatcaccatccctcaagggtttcctggatcggttactggttcgggatcctgcccagcgcgcaactgcagccgagctgttaaaacacccttttctcgccaaggcaggcccacccgcatctattgtgccccttatgcgtcaaaaccgtaccaggtag

SEQ ID NO: 26030 - DNA, 1188 bp, Artificial Sequence
  derived and/or modified sequence
atgggctgtcaacgttctcgcccttttaatacatatcccagagccgacaccgaccatccatccaggggggcacagggggagccccacgatgtggcccctaatggcccaagcgcgggaggcctggctatccctcagagctcttctagcagcagccggcctcctaccagggccagaggcgcacccagtcctggcgtgctgggccctcacgcctctgaaccccagctagctccccctgcgtgtactccggctgctcccgctgtgcctgggccacctgggcctcggtccccccagagagaaccgcagagggtgtcacatgaacaatttcgcgctgcattgcagcttgtcgtggatcctggagatcccagaagctacttggacaactttatcaaaattggggaaggctcaacaggcatcgtgtgcatcgcaaccgtgagatcctccggtaaactcgtagcggtgaaaaaaatggacttgaggaagcaacagcgacgggaactgctctttaatgaagtggtgataatgcgagattaccagcatgagaacgtcgtcgagatgtacaactcataccttgtgggggatgagctgtgggtggttatggagtttctcgaaggtggcgcattaaccgacatagtaacccacacccgcatgaacgaagaacagatcgcggctgtctgcttggcagtcctgcaggcattgtccgtcctgcatgcccagggcgtaattcatcgcgacattaaaagcgacagcatactgcttacccatgatggtcgcgttaaactcagcgattttggcttttgtgcgcaggtctctaaggaggtgcccagacggaagtcactggttggaacgccttactggatggcacctgaactgatctcccgcctgccttacgggccagaggtagacatttggagtctgggaataatggtgatcgagatggttgatggcgagcctccttatttcaatgagcctcccctcaaggctatgaaaatgattcgggataacctccccccaagactgaagaacttgcacaaggtgtcgccaagtcttaagggctttttggatcggctcttagtgcgggatcctgcccaacgagctacagccgctgagctgctcaagcacccatttttggcaaaggctggcccacctgcgtcaatcgtgccactgatgagacagaataggacacgctag

SEQ ID NO: 26031 - DNA, 1776 bp, Artificial Sequence
  derived and/or modified sequence
atgttcgggaaacggaagaagcgagtcgagatatctgccccaagcaatttcgagcacagggtgcacactggatttgatcagcatgagcaaaaatttactggcctccctaggcagtggcagagcctaatcgaggaatccgcaaggcggccaaaacctttagtcgatcccgcttgcataacctctatacagccaggggctcccaagacaatcgtacggggatctaaaggagcaaaggacggcgctctgacccttctcttagatgagttcgagaatatgagtgttacccgatccaacagcttacgtcgcgatagtccgcctccccctgcccgagccagacaggaaaacggaatgccggaagagcctgcaaccaccgctcgcggaggaccaggtaaagcagggtctcgcggtagatttgccggacactctgaggccggaggaggctccggtgatcgccgacgtgctggcccagagaagcgtcccaagagctcccgagaaggcagtggtggtccacaggagagtagtcgcgacaaaagacctctatccggacccgatgtgggaacaccccagcccgcaggacttgcctccggagctaaattagctgctggcaggccttttaacacttacccgagggccgataccgaccatcctagccggggagcgcagggcgagccacacgacgtcgctcccaacggccctagtgcagggggtttagccatccctcagagcagtagtagctcttctcggccacctacaagagctcggggagccccatcaccaggcgtgcttgggcctcatgcctcggagccacagctggcaccgcctgcatgcacgccggcagcacccgcagtacccggaccccctggacctcggagtcctcagagggaaccacagcgggtgagtcacgagcaatttagggcagctcttcagcttgttgtggaccctggggacccgaggagctacctcgacaacttcatcaagatcggcgaaggaagtacaggcatagtgtgcattgctactgtgagaagttcagggaagttagtggccgtcaagaaaatggatttgcgaaagcagcaaaggagggaactgctctttaacgaggtggtgattatgcgtgactatcagcacgaaaatgtcgtcgagatgtataatagctacctcgtcggcgatgaattgtgggtggtgatggagtttttggaggggggagccctgaccgatatagtcactcacaccagaatgaatgaggaacagatcgcagccgtctgcctagccgtgctccaggcgctcagcgtgcttcatgcacagggagtgattcatcgcgatattaagagcgacagcatactgttaacacacgacggtagagtgaaactgagcgattttgggttctgcgctcaggtgtctaaagaagtgcctaggaggaaatctctggtaggcaccccatactggatggcgccagaattgatcagccggcttccatacggccctgaagtggacatttggagcctcggcatcatggtcattgaaatggttgatggcgagcctccatactttaatgagccacccttaaaggcaatgaagatgatacgggacaacctcccacccaggctcaaaaacctgcacaaggtgtctccaagtctgaaagggttcctggatcgcctgttagttcgggaccccgctcagcgcgcaacggcggcagagcttcttaagcaccccttcctggcgaaggccggtcccccagcttctattgtgccactcatgcgccagaatcgaacgaggtag

SEQ ID NO: 26032 - DNA, 1776 bp, Artificial Sequence
  derived and/or modified sequence
atgtttggcaaaaggaaaaagagagtcgagattagtgcaccgagcaacttcgaacaccgggttcataccggtttcgatcagcacgagcagaaatttactgggcttcccagacagtggcaatctttaattgaagagtccgcaagacgtcccaaacctttggtcgaccccgcttgcatcaccagcatacagcccggtgctccgaaaaccatcgttaggggaagcaagggagccaaagacggagcgctcacactgctcttggacgagttcgaaaatatgagcgtgacccgatcgaacagtctcaggagagatagccccccaccgccagcccgagctaggcaggaaaatggcatgcctgaagagccagcgaccactgccagggggggacccggtaaagccggttctcgaggcagatttgccggtcattccgaggctgggggtggaagcggtgatcgccgtcgagcagggccagaaaagcggcctaagagtagccgtgaagggtcaggcggtccacaagagagttcgcgggacaagcgaccgctcagtggacctgatgtaggcacacctcagcctgctggtctggcttcgggagctaagctagccgctggccgtccttttaatacctaccccagagccgatactgaccatccgtcaaggggggcacagggtgagccccatgatgtcgcacctaacggcccaagtgcaggcggactggccattccgcagagctcatccagctcctcccggccaccaacgcgagctagaggcgcaccttcgccaggtgtgctcggcccacacgcatcagagccgcagcttgcaccgcctgcatgcactccagccgcacccgcagtacctggacctcccggacccaggagtccccagagggaaccacagcgggtgtcccacgaacagttccgcgcagctcttcagctcgtggtcgaccctggggaccccagaagctatctggataatttcatcaagatcggggaaggatccacaggaatcgtgtgtatcgcaacggtcaggagctcaggcaagctcgtggccgttaaaaaaatggatctacggaagcagcagcggagagagcttctcttcaatgaggtcgtgataatgcgcgattatcagcacgaaaatgtcgtggagatgtacaattcatatctagtgggtgacgaactatgggttgtgatggaattcctcgagggcggagccctgaccgacatcgttacacatacccggatgaatgaggaacagattgcggctgtgtgtttggccgtgctccaggcgctttctgtgctgcatgcccagggagtcatacatagagacatcaaatcagacagcattctccttacacacgatggaagagtgaaattgagcgatttcggcttttgtgctcaagttagtaaggaggtgcctagacgtaagtcgctggtcggaaccccttactggatggcccctgagctaatttcacggttaccttatgggcctgaggttgatatttggtccctaggaatcatggtcattgagatggtggacggtgagcctccttactttaacgaaccccctctgaaggccatgaagatgattcgggacaacctgcctcctaggctgaagaatctgcataaagtctccccttccctgaaggggtttctggacaggctgcttgtgagagaccctgcccagagggctactgctgccgagctccttaaacacccgttcttagctaaggccggaccacctgcctccatcgtccctctgatgcgacagaacagaacccgttag

SEQ ID NO: 26033 - DNA, 1776 bp, Artificial Sequence
  derived and/or modified sequence
atgtttggcaagcggaaaaagagagtcgagatcagcgctccttccaacttcgaacatagagtgcatacaggctttgaccagcatgagcagaaatttacagggctcccacggcagtggcagtcactcattgaggagtctgctagacgtccaaagcccctggtggatccagcctgcataacctccatccagcccggtgcccctaagactattgtgcgcggatccaagggggctaaagacggagccttgaccttgctgcttgatgagttcgagaacatgagcgtgacccgatcgaatagcttgagaagagattcaccccctccgcctgcgagggcacggcaggaaaacggaatgcctgaggagccagctaccaccgctagagggggaccaggcaaggcaggatcccgtggaagattcgccggacactccgaggctggaggagggagcggcgatagacggagggcagggccagagaaaagacccaagtcttctcgcgaaggatccgggggacctcaggagagctcccgtgataagcggccattgtcaggccctgatgtaggcaccccacagccggctggcctggcaagcggcgctaagctagctgccggaaggccattcaacacctacccaagagctgacacagaccatccctcaagaggagcacagggagagccgcatgacgtagcaccgaacggaccgagcgctgggggtttggccatacctcaatcatcctcttcatctagtcgcccacctaccagagctaggggggcaccctcccccggtgttctcgggccacatgcttcagaaccgcagctcgctcccccagcctgtacccccgctgcgcctgccgtccccggaccacccggacctcgcagccctcaacgagaaccacagcgcgtgtcgcacgagcaatttcgcgctgcactacagctggtggtggatcctggggacccacggtcctacctggacaacttcatcaagataggtgagggcagcacggggatcgtgtgtattgccacggttagaagcagtgggaagctggtggctgtaaagaagatggatttgaggaagcagcagcgacgggaactcttgttcaacgaagtagtgatcatgcgcgattaccaacatgagaatgttgtggaaatgtacaactcgtacctggtaggcgacgagctctgggtggtgatggagttcctggaaggcggagctcttaccgacatcgtgactcacacccgcatgaacgaagaacagatcgcagctgtgtgcctagccgtgctgcaggcactgtccgtcttgcatgcccagggagtgatccacagagacatcaagagtgacagtattcttctcactcacgatggcagagtgaaacttagcgatttcggattctgcgcacaggtgagcaaggaagtgccaagaaggaagtcactggttggaactccatactggatggctcccgagctcatcagtcgattgccctacgggcctgaagtcgatatttggtccctggggattatggtcatagagatggtggacggtgagccaccatacttcaacgagccgcctctgaaggctatgaagatgattagagataatctgcccccacgcctgaagaacttgcataaggtgtctcctagcctgaagggttttctggaccgcctgttggtacgcgatcccgcacagcgcgcaacggctgccgaactgctgaaacatcctttccttgccaaggccggacccccagctagtattgtacccctgatgcgccaaaaccgaacccggtag

SEQ ID NO: 26034 - protein, 438 aa, Artificial Sequence
  derived and/or modified sequence
MFGKRKKRVEISAPSNFEHRVHTGFDQHEQKFTGLPRQWQSLIEESARRPKPLVDPACITSIQPGAPKGEPHDVAPNGPSAGGLAIPQSSSSSSRPPTRARGAPSPGVLGPHASEPQLAPPACTPAAPAVPGPPGPRSPQREPQRVSHEQFRAALQLVVDPGDPRSYLDNFIKIGEGSTGIVCIATVRSSGKLVAVKKMDLRKQQRRELLFNEVVIMRDYQHENVVEMYNSYLVGDELWVVMEFLEGGALTDIVTHTRMNEEQIAAVCLAVLQALSVLHAQGVIHRDIKSDSILLTHDGRVKLSDFGFCAQVSKEVPRRKSLVGTPYWMAPELISRLPYGPEVDIWSLGIMVIEMVDGEPPYFNEPPLKAMKMIRDNLPPRLKNLHKVSPSLKGFLDRLLVRDPAQRATAAELLKHPFLAKAGPPASIVPLMRQNRTR

SEQ ID NO: 26035 - DNA, 1317 bp, Artificial Sequence
  derived and/or modified sequence
atgttcggcaagagaaagaagagagtggagatcagcgcccccagcaacttcgagcacagagtgcacaccggcttcgaccagcacgagcagaagttcaccggcctgcccagacagtggcagagcctgatcgaggagagcgccagaagacccaagcccctggtggaccccgcctgcatcaccagcatccagcccggcgcccccaagggcgagccccacgacgtggcccccaacggccccagcgccggcggcctggccatcccccagagcagcagcagcagcagcagaccccccaccagagccagaggcgcccccagccccggcgtgctgggcccccacgccagcgagccccagctggccccccccgcctgcacccccgccgcccccgccgtgcccggcccccccggccccagaagcccccagagagagccccagagagtgagccacgagcagttcagagccgccctgcagctggtggtggaccccggcgaccccagaagctacctggacaacttcatcaagatcggcgagggcagcaccggcatcgtgtgcatcgccaccgtgagaagcagcggcaagctggtggccgtgaagaagatggacctgagaaagcagcagagaagagagctgctgttcaacgaggtggtgatcatgagagactaccagcacgagaacgtggtggagatgtacaacagctacctggtgggcgacgagctgtgggtggtgatggagttcctggagggcggcgccctgaccgacatcgtgacccacaccagaatgaacgaggagcagatcgccgccgtgtgcctggccgtgctgcaggccctgagcgtgctgcacgcccagggcgtgatccacagagacatcaagagcgacagcatcctgctgacccacgacggcagagtgaagctgagcgacttcggcttctgcgcccaggtgagcaaggaggtgcccagaagaaagagcctggtgggcaccccctactggatggcccccgagctgatcagcagactgccctacggccccgaggtggacatctggagcctgggcatcatggtgatcgagatggtggacggcgagcccccctacttcaacgagccccccctgaaggccatgaagatgatcagagacaacctgccccccagactgaagaacctgcacaaggtgagccccagcctgaagggcttcctggacagactgctggtgagagaccccgcccagagagccaccgccgccgagctgctgaagcaccccttcctggccaaggccggcccccccgccagcatcgtgcccctgatgagacagaacagaaccagatag

SEQ ID NO: 26036 - DNA, 1044 bp, Artificial Sequence
  derived and/or modified sequence
atgacctggcccctgaccggccaccagagaggcgcctggcccagccccagcccccccccccccccccccggcctgccccccgagcccgaggtgccccccgccctggagtgctgggaccccaccccccagagccccagaagcccccagagagagccccagagagtgagccacgagcagttcagagccgccctgcagctggtggtggaccccggcgaccccagaagctacctggacaacttcatcaagatcggcgagggcagcaccggcatcgtgtgcatcgccaccgtgagaagcagcggcaagctggtggccgtgaagaagatggacctgagaaagcagcagagaagagagctgctgttcaacgaggtggtgatcatgagagactaccagcacgagaacgtggtggagatgtacaacagctacctggtgggcgacgagctgtgggtggtgatggagttcctggagggcggcgccctgaccgacatcgtgacccacaccagaatgaacgaggagcagatcgccgccgtgtgcctggccgtgctgcaggccctgagcgtgctgcacgcccagggcgtgatccacagagacatcaagagcgacagcatcctgctgacccacgacggcagagtgaagctgagcgacttcggcttctgcgcccaggtgagcaaggaggtgcccagaagaaagagcctggtgggcaccccctactggatggcccccgagctgatcagcagactgccctacggccccgaggtggacatctggagcctgggcatcatggtgatcgagatggtggacggcgagcccccctacttcaacgagccccccctgaaggccatgaagatgatcagagacaacctgccccccagactgaagaacctgcacaaggtgagccccagcctgaagggcttcctggacagactgctggtgagagaccccgcccagagagccaccgccgccgagctgctgaagcaccccttcctggccaaggccggcccccccgccagcatcgtgcccctgatgagacagaacagaaccagatag

SEQ ID NO: 26037 - DNA, 1317 bp, Artificial Sequence
  derived and/or modified sequence
atgttcggaaaacgcaagaaacgggtggagataagcgccccatcaaacttcgagcaccgtgtgcataccggtttcgaccaacacgagcagaaatttacagggctgcctaggcagtggcagtccttaatcgaagagagcgctcggcggcctaaaccactcgttgaccctgcctgcattacttcgattcagcccggagccccgaaaggggagccacatgatgttgcacccaatggcccctctgcaggaggcctggccatcccccagtctagctcatcaagttcacgcccaccgaccagggcaagaggtgcaccctcgcctggggtgttaggacctcatgcctccgaaccccaactggcgcctccagcctgcacgccggctgcccccgctgtgcctggacctccaggcccaagatcccctcagagggagccacaacgcgttagtcatgaacagtttagagccgcgctgcagctggtcgttgaccccggagatccgaggagttaccttgataattttattaagatcggcgaggggtcgacagggattgtatgcatcgctactgtgagatcaagcggaaagctggtggccgtgaaaaagatggacctgcgcaaacagcaacgtcgcgagctccttttcaacgaggtggtcattatgagagactatcaacatgaaaatgtggtagagatgtacaactcatatctggtcggggatgagttgtgggtcgtcatggagtttctcgaaggcggagccctcaccgacatagtgactcatactaggatgaatgaggagcagatcgcagcggtctgcctagctgtcctgcaagccctcagtgtcttgcatgcgcaaggagtgattcatcgggacatcaagagcgattccattctgctcacacacgacggcagggtcaagctatctgattttggtttctgtgcccaggtcagtaaggaggtaccccgccggaagagccttgttggtacgccatactggatggcacccgaacttatctctcgactgccttatggcccagaagtggatatctggagtctcggcataatggttatcgaaatggtcgatggcgagcctccttattttaatgagccgcctcttaaggctatgaaaatgatccgcgataatcttcccccacggcttaagaatctacataaggtgtcgccatctctgaaaggttttctggatcgcctgttggtgcgagatcccgctcaaagagccacggccgctgaactcctgaagcaccctttccttgctaaggccggcccacctgcctctattgttcccctgatgcgacagaaccgcaccagatag

SEQ ID NO: 26038 - DNA, 1044 bp, Artificial Sequence
  derived and/or modified sequence
atgacttggccgctcacgggtcaccaaagaggcgcctggccatccccgtctccaccaccgccgccacccggtctccccccagaaccggaagttccgccggccttggagtgctgggatcctaccccccaaagtccaaggtccccccagcgggagcctcaaagggttagccacgagcaattccgcgctgccctccagttggtcgttgatcccggagatccccgatcctacttagataacttcataaagattggcgaggggagcactgggatcgtctgcattgccaccgtcagaagcagcgggaaactggttgcagtaaaaaaaatggaccttagaaagcagcagcgccgggagcttttgttcaacgaagtggtgatcatgcgagactatcagcacgagaatgtcgtcgagatgtacaactcatatcttgtaggcgacgagctttgggtcgttatggaattcctcgaaggcggcgctttgaccgatatcgtgacccacactcgaatgaatgaggagcagatagccgccgtctgtttggctgtacttcaggccctgagtgtgctccacgcccagggagtgattcatagagatatcaagtccgattccattctgctgacccacgacggccgtgtcaaactgagcgactttggcttctgcgcgcaagtgtcgaaggaggtcccaaggcgcaagtctctggtaggtacgccctactggatggctcctgagctgataagcaggttaccatatgggccggaggtggatatctggagtctcggaattatggttatagaaatggtcgatggcgaacctccttacttcaatgagccgcccctcaaagctatgaagatgatcagggataacctgcccccaagactcaagaatttacataaggtttctccttcattgaaaggcttcctggaccggctactcgttagggatccagcacagcgtgcgactgcggcagaactgctcaagcacccttttttagcgaaggcagggcccccggcctctatcgtgccattaatgaggcagaacagaaccaggtag

SEQ ID NO: 26039 - DNA, 1317 bp, Artificial Sequence
  derived and/or modified sequence
atgttcggcaagcgaaagaagagagtcgagatttcggcaccttctaacttcgagcaccgtgtacacaccggattcgaccagcacgagcagaaattcaccgggctgccgcggcagtggcagagtcttatcgaggaatccgcccgcagacccaaacccctggtcgaccctgcctgcatcacgagtattcagccaggcgcccctaagggcgagccccatgacgtggcaccaaatggaccatccgctggcgggctggccatcccacagagcagttcatccagcagtaggcctcctacaagagctcgcggagccccgagccctggtgtcttggggccgcatgccagtgagccgcagctggcccctcctgcctgtacccctgccgccccagccgtgccaggaccgccgggccccaggtcaccgcagcgggaacctcagagagtgtctcacgaacagttccgagcggctctccagctggtggtcgacccgggggatccaaggtcctacttggacaatttcatcaaaatcggggagggatctactggcatcgtgtgcatcgccactgttcgatcatcggggaagctcgtggctgtgaagaaaatggatctgcggaaacagcagaggagggaactcttatttaatgaggtggtgataatgcgggattatcagcacgagaacgtggtggagatgtacaacagctacctcgtaggagatgagctgtgggtagttatggagtttttggaaggaggggccctcactgacatcgtcacacacaccaggatgaatgaggaacaaatagcggctgtgtgccttgcagtgctgcaggcattgtcagtcctgcatgcacaaggcgtgatccatagagacatcaaatccgattctatattactcacgcacgacggtagagttaaactcagcgactttgggttctgcgcccaagtgtcgaaggaggttccaagacgaaaaagcctagtcggcactccttactggatggcacctgaattaatcagcaggctgccatatggacctgaggtggatatttggtccttagggatcatggtgattgagatggtggacggcgagcctccctacttcaacgagcctccgctgaaggctatgaagatgatccgggataacttgcccccacgcctcaagaatttgcacaaggtgagtccaagtctaaaaggcttcctggaccgcctgttggtgagggatccagcccagagggcaactgccgcagagctcctgaagcacccctttctggctaaggcgggcccccccgcctcaatcgtgcccctgatgaggcagaacagaacaagatag

SEQ ID NO: 26040 - DNA, 1317 bp, Artificial Sequence
  derived and/or modified sequence
atgtttgggaagaggaagaagagggtggagatcagcgcccccagcaactttgagcaccgggtgcacactggatttgaccagcacgagcagaagttcaccggcctgccccggcagtggcagagcctgattgaggagagcgcccggcggcccaagcccctggtggaccctgcctgcatcaccagcatccagcccggggcccccaagggggagccccatgatgtggccccaaatggccccagcgctgggggcctggccatcccccagagcagcagcagcagcagccggccccccacccgggcccggggggcccccagccctggggtgctgggcccccacgccagcgagccccagctggcccccccagcctgcaccccagctgccccagctgtgcccggccccccaggccccaggagcccccagcgggagccccagagggtgtcccatgagcagttccgggccgccctgcagctggtggtggaccccggggaccccaggagctacctggacaacttcatcaagatcggggagggcagcactggaattgtgtgcatcgccaccgtgcgcagcagcggcaagctggtggccgtgaagaagatggacctgaggaagcagcagaggcgggagctgctcttcaatgaggtggtgatcatgagggactaccagcatgaaaatgtggtggagatgtacaacagctacctggtgggagatgagctgtgggtggtgatggagttcctggagggcggggccctgacagacatcgtgacccacaccaggatgaatgaggagcagattgctgctgtgtgcctggccgtgctgcaggccctgtctgtgctgcacgcccagggcgtcatccaccgggacatcaagagtgacagcatcctgctgacccatgatggccgggtgaagctgagtgactttggcttctgtgcccaggtgtccaaggaggtgcccaggaggaagagcctggtgggcaccccctactggatggcccctgagctgatcagccggctgccctacggccctgaggtggacatctggagcctgggcatcatggtgattgagatggtggatggagagcccccctacttcaatgagccccccctgaaggccatgaagatgatccgggacaacctgcccccccggctgaagaacctgcacaaggtgagccccagcctgaagggcttcctggaccggctgctggtgcgggaccctgcccagagggccacagctgctgagctgctgaagcaccccttcctggccaaggccggccccccagccagcatcgtgcccctgatgaggcagaacagaaccaggtag

SEQ ID NO: 26041 - DNA, 1044 bp, Artificial Sequence
  derived and/or modified sequence
atgacctggcccctgaccggccaccagagaggagcctggcccagccccagccccccacctcctcctcctggcctgcccccagagcctgaggtgcccccagccctggagtgctgggaccccaccccccagagccccaggagcccccagcgggagccccagagggtgtcccatgagcagttccgggccgccctgcagctggtggtggaccccggggaccccaggagctacctggacaacttcatcaagattggagagggcagcacaggcatcgtgtgcatcgccaccgtgcgcagcagcggcaagctggtggccgtgaagaagatggacctgaggaagcagcagaggcgggagctgctcttcaatgaggtggtgatcatgagggactaccagcatgaaaatgtggtggagatgtacaacagctacctggtgggagatgagctgtgggtggtgatggagttcctggagggcggggccctgacagacatcgtgacccacaccaggatgaatgaggagcagattgctgctgtgtgcctggccgtgctgcaggccctgtctgtgctgcacgcccagggcgtcatccaccgggacatcaagagtgacagcatcctgctgacccatgatggccgggtgaagctgagtgactttggcttctgtgcccaggtgtccaaggaggtgcccaggaggaagagcctggtgggcaccccctactggatggcccctgagctgatcagccggctgccctacggccctgaggtggacatctggagcctgggcatcatggtgattgagatggtggatggagagcccccctacttcaatgaaccacccctgaaggccatgaagatgatccgggacaacctgcccccccggctgaagaacctgcacaaggtgagccccagcctgaagggcttcctggaccggctgctggtgcgggaccctgcccagagggccacagctgctgagctgctgaagcaccccttcctggccaaggccggccccccagccagcatcgtgcccctgatgaggcagaacagaacaagatag

SEQ ID NO: 26042 - DNA, 1317 bp, Artificial Sequence
  derived and/or modified sequence
atgttcggcaagcggaagaagcgggtggagatcagcgcccccagcaatttcgaacatcgggtccacacggggttcgaccaacatgagcaaaaattcaccggtctgccccgccaatggcagtctttgattgaggaatctgcacggcgccccaagccgctggtagatcctgcttgtataacctctatacagccgggagcccccaagggcgagccccacgacgtggcgcccaacggccccagcgctggcggcctggcaattcctcagagctcttcatcttcctcgcgtcctccaactcgcgctcgcggggccccgagcccaggagtgctaggtccacacgcatccgaaccacagcttgccccccctgcctgcactccggccgccccagccgtcccaggcccacccggccctaggtccccacagagagagcctcagagggtcagtcatgaacaattcagggccgccctacaacttgtagtagatcctggggatcccagatcctatctagacaatttcatcaagataggcgaaggtagcacgggtattgtctgtatcgcgactgtgcgctcatccggaaaactagttgccgtgaagaagatggacctgaggaagcagcagagaagggaactactgtttaacgaggtagtgatcatgcgtgattaccaacacgagaatgtcgttgagatgtataactcctatctcgtgggcgacgagttatgggtggtgatggagttcctggagggaggcgctctgaccgatatcgttacgcacaccaggatgaacgaggagcagattgctgccgtatgtctggcagtgctgcaagccctctcagtgctgcatgctcaaggagtaatacatcgtgacatcaaatctgattcaatcttgctgacccacgatggccgggtgaaattatccgacttcggattttgtgctcaggtgtcaaaggaggttccacgaagaaaaagccttgtcggcacgccatattggatggccccggaactcatctcacgcctcccttatggtccggaagtggatatttggtcgctcggcatcatggtgatcgaaatggtggacggagagccaccatacttcaacgaaccgccccttaaggcaatgaagatgattcgggataacctccccccacgccttaagaacttgcataaggtgtcaccgagcctgaagggcttcctggaccgtcttctggtccgagatccggctcagcgggccactgccgccgagttactgaaacacccctttctggcgaaggccggcccacctgcgagcatcgtcccactgatgcggcagaatcggacaaggtag

SEQ ID NO: 26043 - DNA, 1044 bp, Artificial Sequence
  derived and/or modified sequence
atgacctggcccctgaccggccaccagcggggcgcctggcccagcccttccccccctccaccaccaccagggttgcccccagaacccgaagtgcctccagctttagagtgttgggatcccactccccaatcaccaaggagtccccagcgcgaacctcagcgagtaagccacgaacagttcagggcagccctgcaactggttgtggacccgggtgacccccggtcttatctggataactttatcaagataggagaagggtcaaccgggatcgtttgtatcgctacggtccgctcttcagggaagttagtagcagtgaagaaaatggatcttagaaagcaacagagaagggagctgctgttcaacgaggtggtgataatgcgggactaccaacacgaaaatgtggtagaaatgtacaattcatacctagtgggcgacgagctgtgggtcgtgatggagttcctggaaggtggcgctttgaccgatattgttacccacaccagaatgaatgaagaacagatcgcggctgtctgcctcgccgttctgcaggccctgagcgtccttcacgcgcagggcgtgattcaccgggacataaagtccgattctatattgctgacccatgatggccgtgtgaaactgtctgattttggattctgcgctcaggtctcaaaagaggtgcctcggaggaagagcctggtgggtaccccctattggatggcccctgagcttatttccaggctcccttacggtcctgaggttgatatttggagcctcggcataatggttatcgagatggttgacggcgagcctccttatttcaatgaaccacctttgaaagcaatgaagatgatcagagacaacttacctccaaggctcaaaaacctccataaggtcagcccctcactgaaaggatttcttgataggctgctcgtgagggatccagcacagagagctaccgccgcagagcttctgaagcatccctttctcgctaaagcaggccctcctgcatctatcgtgcccctgatgaggcagaacagaacacgctag

SEQ ID NO: 26044 - DNA, 1317 bp, Artificial Sequence
  derived and/or modified sequence
atgttcggcaagcggaagaagcgggtggagatcagcgcccccagcaactttgaacacagagtgcacaccggatttgaccagcacgaacaaaagttcaccggcttgccccgtcagtggcagagcctcatcgaggaatcagcccgccgccccaaacccctggtggatcctgcctgtattacttctatccagccaggggcgccaaagggagaaccacatgacgtggctcctaatgggccaagtgctgggggtctggccatcccccaatcctccagcagttcctctaggccacctacaagggcacgcggggcgccctcccccggcgtgctggggccgcacgcctccgaaccacagctcgcccctcccgcatgtaccccggccgcaccagctgttccaggaccccccggtccacggtcaccgcagcgggaaccgcagagagtaagccacgaacaattcagggctgctttgcagctggtggtggatcccggcgatccaaggtcatacctggacaatttcattaagatcggcgaaggaagcacaggcatagtttgcatcgcgaccgtgaggtcttcaggtaagctagttgcagttaaaaaaatggacctgaggaaacagcagcggagggagctcctctttaatgaagtcgtcattatgcgagattaccagcatgagaacgtggttgagatgtacaactcttacctggtcggcgatgagctctgggtggtcatggagtttctcgagggtggcgcgctaaccgacattgtgacacatactcggatgaacgaagaacagatcgctgccgtctgcctggccgttttacaagcccttagcgttttacacgcacagggcgttatccaccgagacatcaagagcgattctattctgcttacccatgacgggcgggtgaaactctcagacttcggcttctgtgcccaggtttctaaggaggtgcccaggcggaaaagcctagtagggacaccatactggatggcgccagagctgatctctcggctcccttatggccccgaggtggatatctggagtttgggcatcatggtcatcgagatggtggacggggaacctccctactttaacgagccccctttgaaggccatgaagatgatacgggacaatctgccccctcgcctgaagaatctccataaggtctctccttccctcaagggattcctagataggctgcttgtgagggaccccgcccaaagggctactgctgcagagcttctgaaacacccctttctggcaaaagcgggacctccagccagcattgtgccccttatgcgacagaatcgcacccgctag

SEQ ID NO: 26045 - DNA, 2306 bp, Artificial Sequence
  derived and/or modified sequence
agccccggatgttcgttggggattcaacatggcggcgggagtgtccgcggtggtggcggtgcaagagagctgagggaggcgcgagggcgcggagttccaggtcgagcagttaggccgcgagcgactgcggcgccgagccggccgcaccgagtccccggcaccatgtttgggaagaggaagaagcgggtggagatctccgcgccgtccaacttcgagcaccgcgtgcacacgggcttcgaccagcacgagcagaagttcacggggctgccccgccagtggcagagcctgatcgaggagtcggctcgccggcccaagcccctcgtcgaccccgcctgcatcacctccatccagcccggggcccccaagggggagcctcatgacgtggcccctaacgggccatcagcggggggcctggccatcccccagtcctcctcctcctcctcccggcctcccacccgagcccgaggtgcccccagccctggagtgctgggaccccacgcctcagagccccagctggcccctccagcctgcacccccgccgcccctgctgttcctgggccccctggcccccgctcaccacagcgggagccacagcgagtatcccatgagcagttccgggctgccctgcagctggtggtggacccaggcgacccccgctcctacctggacaacttcatcaagattggcgagggctccacgggcatcgtgtgcatcgccaccgtgcgcagctcgggcaagctggtggccgtcaagaagatggacctgcgcaagcagcagaggcgcgagctgctcttcaacgaggtggtaatcatgagggactaccagcacgagaatgtggtggagatgtacaacagctacctggtgggggacgagctctgggtggtcatggagttcctggaaggaggcgccctcaccgacatcgtcacccacaccaggatgaacgaggagcagatcgcggccgtgtgccttgcagtgctgcaggccctgtcggtgctccacgcccagggcgtcatccaccgggacatcaagagcgactcgatcctgctgacccatgatggcagggtgaagctgtcagactttgggttctgcgcccaggtgagcaaggaagtgccccgaaggaagtcgctggtcggcacgccctactggatggccccagagctcatctcccgccttccctacgggccagaggtagacatctggtcgctggggataatggtgattgagatggtggacggagagcccccctacttcaacgagccacccctcaaagccatgaagatgattcgggacaacctgccaccccgactgaagaacctgcacaaggtgtcgccatccctgaagggcttcctggaccgcctgctggtgcgagaccctgcccagcgggccacggcagccgagctgctgaagcacccattcctggccaaggcagggccgcctgccagcatcgtgcccctcatgcgccagaaccgcaccagatgaggcccagcgcccttcccctcaaccaaagagccccccgggtcacccccgccccactgaggccagtagggggccaggcctcccactcctcccagcccgggagatgctccgcgtggcaccaccctccttgctgggggtagatgagaccctactactgaactccagttttgatctcgtgacttttagaaaaacacagggactcgtgggagcaagcgaggctcccaggacccccaccctctgggacaggccctcccccatgttcttctgtctccaggaagggcagcggccctcccatcactggaagtctgcagtgggggtcgctgggggtggagagaacactaagaggtgaacatgtatgagtgtgtgcacgcgtgtgagtgtgcatgtgtgtgtgtgcaaaggtccagccaccccgtcctccagcctgcaaggggtgtctggcgccttgcctgacacccagccccctctccccctgagccattgtgggggtcgatcatgaatgtccgaagagtggccttttcccgtagccctgcgccccctttctgtggctggatggggagacaggtcagggccccccaccctctccagcccctgcagcaaatgactactgcacctggacagcctcctcttttctagaagtctatttatattgtcattttataacactctagcccctgcccttattgggggacagatggtccctgtcctgcggggtggccctggcagaaccactgcctgaagaaccaggttcctgcccggtcagcgcagccccagcccgcccacccctgcctcgagttagttttacaattaaaacattgtcttgttttgtg

SEQ ID NO: 26046 - DNA, 1827 bp, Artificial Sequence
  derived and/or modified sequence
gattcaacatggcggcgggagtgtccgcggtggtggcggtgcaagagagctgagggaggcgcgagggcgcggagttccaggtcgagcagttaggccgcgagcgactgcggcgccgagccggccgcaccgagtccccggcaccatgtttgggaagaggaagaagcgggtggagatctccgcgccgtccaacttcgagcaccgcgtgcacacgggcttcgaccagcacgagcagaagttcacggggctgccccgccagtggcagagcctgatcgaggagtcggctcgccggcccaagcccctcgtcgaccccgcctgcatcacctccatccagcccggggcccccaagggggagcctcatgacgtggcccctaacgggccatcagcggggggcctggccatcccccagtcctcctcctcctcctcccggcctcccacccgagcccgaggtgcccccagccctggagtgctgggaccccacgcctcagagcccccgctcaccacagcgggagccacagcgagtatcccatgagcagttccgggctgccctgcagctggtggtggacccaggcgacccccgctcctacctggacaacttcatcaagattggcgagggctccacgggcatcgtgtgcatcgccaccgtgcgcagctcgggcaagctggtggccgtcaagaagatggacctgcgcaagcagcagaggcgcgagctgctcttcaacgaggtggtaatcatgagggactaccagcacgagaatgtggtggagatgtacaacagctacctggtgggggacgagctctgggtggtcatggagttcctggaaggaggcgccctcaccgacatcgtcacccacaccaggatgaacgaggagcagatcgcggccgtgtgccttgcagtgctgcaggccctgtcggtgctccacgcccagggcgtcatccaccgggacatcaagagcgactcgatcctgctgacccatgatggcagggtgaagctgtcagactttgggttctgcgcccaggtgagcaaggaagtgccccgaaggaagtcgctggtcggcacgccctactggatggccccagagctcatctcccgccttccctacgggccagaggtagacatctggtcgctggggataatggtgattgagatggtggacggagagcccccctacttcaacgagccacccctcaaagccatgaagatgattcgggacaacctgccaccccgactgaagaacctgcacaaggtgtcgccatccctgaagggcttcctggaccgcctgctggtgcgagaccctgcccagcgggccacggcagccgagctgctgaagcacccattcctggccaaggcagggccgcctgccagcatcgtgcccctcatgcgccagaaccgcaccagatgaggcccagcgcccttcccctcaaccaaagagccccccgggtcacccccgccccactgaggccagtagggggccaggcctcccactcctcccagcccgggagatgctccgcgtggcaccaccctccttgctgggggtagatgagaccctactactgaactccagttttgatctcgtgacttttagaaaaacacagggactcgtgggagcaagcgaggctcccaggacccccaccctctgggacaggccctcccccatgttcttctgtctccaggaagggcagcggccctcccatcactggaagtctgcagtgggggtcgctgggggtggagagaacactaagaggtgaacatgtatgagtgtgtgcacgcgtgtgagtgtgcatgtgtgtgtgtgcaaaggtccagccaccccgtcctccagcctgcaa

SEQ ID NO: 26047 - DNA, 5735 bp, Artificial Sequence
  derived and/or modified sequence
ggcggtgcaagagagctgagggaggcgcgagggcgcggagttccaggtcgagcagttaggccgcgagcgactgcggcgccgagccgatgagtaacccgaagcccctagaggagtggtcacctgcctgagggcacttctgtcccaccagcatcagaccaggccgcaccgagtccccggcaccatgtttgggaagaggaagaagcgggtggagatctccgcgccgtccaacttcgagcaccgcgtgcacacgggcttcgaccagcacgagcagaagttcacggggctgccccgccagtggcagagcctgatcgaggagtcggctcgccggcccaagcccctcgtcgaccccgcctgcatcacctccatccagcccggggcccccaagggggagcctcatgacgtggcccctaacgggccatcagcggggggcctggccatcccccagtcctcctcctcctcctcccggcctcccacccgagcccgaggtgcccccagccctggagtgctgggaccccacgcctcagagccccagctggcccctccagcctgcacccccgccgcccctgctgttcctgggccccctggcccccgctcaccacagcgggagccacagcgagtatcccatgagcagttccgggctgccctgcagctggtggtggacccaggcgacccccgctcctacctggacaacttcatcaagattggcgagggctccacgggcatcgtgtgcatcgccaccgtgcgcagctcgggcaagctggtggccgtcaagaagatggacctgcgcaagcagcagaggcgcgagctgctcttcaacgaggtggtaatcatgagggactaccagcacgagaatgtggtggagatgtacaacagctacctggtgggggacgagctctgggtggtcatggagttcctggaaggaggcgccctcaccgacatcgtcacccacaccaggatgaacgaggagcagatcgcggccgtgtgccttgcagtgctgcaggccctgtcggtgctccacgcccagggcgtcatccaccgggacatcaagagcgactcgatcctgctgacccatgatggcagggtgaagctgtcagactttgggttctgcgcccaggtgagcaaggaagtgccccgaaggaagtcgctggtcggcacgccctactggatggccccagagctcatctcccgccttccctacgggccagaggtagacatctggtcgctggggataatggtgattgagatggtggacggagagcccccctacttcaacgagccacccctcaaagccatgaagatgattcgggacaacctgccaccccgactgaagaacctgcacaaggtgtcgccatccctgaagggcttcctggaccgcctgctggtgcgagaccctgcccagcgggccacggcagccgagctgctgaagcacccattcctggccaaggcagggccgcctgccagcatcgtgcccctcatgcgccagaaccgcaccagatgaggcccagcgcccttcccctcaaccaaagagccccccgggtcacccccgccccactgaggccagtagggggccaggcctcccactcctcccagcccgggagatgctccgcgtggcaccaccctccttgctgggggtagatgagaccctactactgaactccagttttgatctcgtgacttttagaaaaacacagggactcgtgggagcaagcgaggctcccaggacccccaccctctgggacaggccctcccccatgttcttctgtctccaggaagggcagcggccctcccatcactggaagtctgcagtgggggtcgctgggggtggagagaacactaagaggtgaacatgtatgagtgtgtgcacgcgtgtgagtgtgcatgtgtgtgtgtgcaaaggtccagccaccccgtcctccagcctgcaaggggtgtctggcgccttgcctgacacccagccccctctccccctgagccattgtgggggtcgatcatgaatgtccgaagagtggccttttcccgtagccctgcgccccctttctgtggctggatggggagacaggtcagggccccccaccctctccagcccctgcagcaaatgactactgcacctggacagcctcctcttttctagaagtctatttatattgtcattttataacactctagcccctgcccttattgggggacagatggtccctgtcctgcggggtggccctggcagaaccactgcctgaagaaccaggttcctgcccggtcagcgcagccccagcccgcccacccctgcctcgagttagttttacaattaaaacattgtcttgttttgtgtctgtgtgcgatgtgtggggggcagggggccctgcccggctgtcttgggtgggaatttgcagggagagggtctggatctgggagcaaaccacgattccagccaaggcagggcaagggtggggtggggagtggggagttcaggtcatagcagccagtaagctcccccagcctgccactccccagaatggggcaggattgtccccacccctggaagcagccagtttgccacagtccatgtgcagactgatcccagtttgccaaatctgcaatttcctggaaccttttaaaggctgtcttgagcgcgtttggtgagtaggagctaacccaagttagtaaattgaaggccatttggcaaattggtcagtgggcagatgggcttttggggattgactgaggctgactggcctggagctgctggcttcggagagacaccctgtgaagtgtgtccttccacgcaggagcccagagccgagcccacgctggggggaatctgactggcatggaggtggccatgccaccatcgctgctgcagctgcatcctggcactttgcgcctcaggccctgttgggctccactttctgcatcctccccagcccccagggaggcagtggagtggggagagagccaggagtgagcctccgtccccaaagccagccaggcgtcatcagcaccagagacctcagcctggtcctctcgggaagtgagtggccagggcagagattccaggttagtccacgcctcccacccttcacaggtcctgaccccaagaatcagagcactgtgtgtgtggcagggcctatgccaagtgcaaacacagcctagatggatcatcacagagtgaaacccagcggtgcaagcagctgtgctctctgcgatgtattggaggcttaggtgaggtggatgcctttctggaaaaaaaaaaaatgctaacattggcaaaagaagaaatagaaaacaagaccaaaataactgtctcctcactgcacacacactccagaataaataaaaggtttcaggcttgaatgcactttcaaatgagattttttttttttttttgagacggagtatcgctctgtcgcccaggctggagtgcagtggcacgatcttggctcactgcaacttctgcctcctgggttcaagcgattctcctgcctcagcctcccaagtagctgggattacaggcgcttgccaccacgccaggctaattttttgtattttgagtagagactggatttcgccatcttggccagactggtcttgaactcctgacctcgtgatccacccacctcagcctcccaaagtgctgggattacaggcatgagccaccatgcctggcctcaaatgaggtttaccagactttgaaggagcaggtaattccttctaccttgtgaacaagttgttccagaaagatagcagctcaggaggcctctgtgaccatggttccagacccagataaggacggcaaagaacagagcatctcagaaacgcaaggctcacagccagggtgcccggcgaccccacgggcactgagaacagctagctctaggagctccactctcctgctgaagaaaccacgggctcagagacggggagctccctcgcccagccacatctgtgaccccacggtaactctgctggttttggtgccttcagtcactcactgcaggtttgttttgttttgttttgttttgagtttttttgttttttgttttttgtttttagagacaagatgttgctatgttgcctaggctggtttcgaactcctggcctcaagggatcctccctccttggccccgcaaagtgctgggattacaggcgtgagccaccgtgcccagcccgctcactgcagtttgaaggcatggctttgggtggcgtggggtgaaagctgcccgaggccccgttcctccccacgtggctgcctcctgccagagccagtcaggaaaacagaccccaactagagttgtttcaaatggcagggatttggtaccggtggttggatcatgacaaagctctgagaaggctggaggagccacagagtgccaagtgcccagcaatcattagaggaaggaggctgctgccacctgtgtggctagaggaacagaggggccaatggcattccccaaaccccactctcgcctctgtctggccagagcagaatggcttcttccagcttcccaccctggactcccacccaggagcctcctcctggcagacccttcctgaccccaccggcccggggggtctacagatccatgtttcaggcgtccgcctggagcggaacaggggagtgcttaggacaagggtggtgccagaggatccactctgcccacatttagttgaccagctgaggcactccacgggaatgaatgactctcgacaggtgccggaggtgaggaggggcccggaggcccaggaggggcacagggatggattcgtccgcctgggggctggaggtgtgtttacagagccccaaaataaacaatgcaaccaggtcagaccagcggttctcacagtgtggttcccagaccagcagcatcactgggagcttactggacacgcaaataaatccctgtgtgccaccccagctgcatcagatgctggtggggcccagtgatctgtatttaacacaccctccgggggatgccggtgcccactcacgtttgagaacccctgcgatccacgactgccctcccgtgtaaaaggcccacctctgtgggactccaagtcatcagcaccctagggtccttccgtctttttccttcctcctgggacacctgcctctcccatgtcgtattagagaattccttatgctcccaagtgggcacggggagaggaaggcactcctctttaaggaccgacccagaggttttgccattgcttcactggccagagcttagtcacgcagcctcacccagaggcaagggaggttggaaaatgtagtgtttgtgtgtgtctaacacaaattctattaccatgcagtcaggattctccactcttgctctttcattagatttgctgggcttcaccctggactttctgatttagtgacagaacagagaacccagaggcagacccagatgtgtacaagggcttcatatacaatcaggagatttaataatcatgctaggggccgggtgcagtggctcacgcctgtaatcccaagcactttggggagccgaggcaggcagatcacttgaggtcaggagtttgagaccagcctgggcaacaaagtgagaccctgtctctactaaaaataacaaaaattagccgggcgtggtggtgggcgcctgtaatcccagctcctcgggtggctgaggcatgagaatcacttgaacccaggaggcagaggtttcagtgagctgagatcacatcactgcactccagcctgggtgacagagtgagattctgtc

SEQ ID NO: 26048 - DNA, 1317 bp, Artificial Sequence
  derived and/or modified sequence
atgtttggaaagagaaaaaaaagagttgagatatcagctccatccaatttcgagcatagggtgcacaccggcttcgaccaacacgagcagaaattcacggggctgccccgtcagtggcagtcacttattgaggagtctgctaggcgtccaaaacctctggtcgacccagcctgcattacgagtatccagcccggtgctcctaaaggcgagccccatgatgtggctccaaatggacctagtgctgggggtctggccattccacagagctcaagttcctcttcccggccacccacgcgagcgagaggcgctccctcccctggggtgctgggcccacacgccagtgagccacaactcgccccacccgcttgtactcccgcagcacccgctgtgccaggaccaccagggcctagaagcccccagcgtgagccacagcgcgtgtctcatgagcagtttagggctgcactccagcttgtggtggatccaggggaccctcgctcctacctggacaactttatcaaaatcggcgaggggtctacggggatagtgtgcatcgcaaccgtgaggtcatctggcaagttggttgctgtgaagaagatggaccttcggaaacagcagcgaagggagctactgtttaacgaagttgttatcatgcgagactaccagcatgaaaatgtagtagagatgtataatagctatttggtgggagatgaattatgggttgtgatggagttcttagagggtggcgctctgacagacattgttacacatacacggatgaacgaggaacagatagctgccgtgtgcctagctgttctccaggcgctgtcagtactccatgcccaaggcgtaatccatcgagacatcaagtccgattccatcctgcttacacatgacggaagagtcaagctgtccgacttcggattttgtgctcaggtgagcaaagaagtgcccagacggaaaagcctggtaggtacaccttattggatggctcctgagctgatatctcggttgccatatgggccagaagtggacatctggagcctgggcataatggtcattgagatggtagacggagagccaccttactttaatgagcctcctctaaaagctatgaaaatgatccgtgacaatcttcccccacgcctgaaaaatctgcacaaagtgagtccaagccttaaaggtttccttgacaggctgctcgtgcgcgacccagcgcaacgcgctacagctgccgagctgctgaagcatcctttcctggctaaggcagggccacctgccagcattgttccccttatgcgtcaaaaccgcaccagatag

SEQ ID NO: 26049 - DNA, 1044 bp, Artificial Sequence
  derived and/or modified sequence
atgacctggccacttaccgggcatcagcgtggagcttggcctagccccagccccccaccacctcctcccggactaccacccgagcctgaggtccctcccgcacttgaatgctgggaccctactccgcagagtccacggagtccacagcgcgaaccccagagggtgtcacatgagcagttccgcgctgcattgcagctggttgttgaccctggagacccacggagttatctggacaattttattaagattggtgaagggtccacagggattgtttgtatcgcaacagtacgctctagtggaaagctcgtcgcagtaaaaaagatggatctgaggaagcagcaaagaagggagttactgttcaatgaggtggttattatgagagattaccagcacgaaaatgttgtggaaatgtataattcatacctggtaggcgatgagctctgggtggtgatggagtttctcgaaggaggagccctgacggatatagtcacccatacaaggatgaacgaagagcagatcgcagccgtgtgtttggctgtgctgcaggctctgtctgttctgcacgcacagggggtcatccatagggatattaaatctgattctatcctcctgacccacgacggacgagttaagttgtcagactttggcttttgcgcgcaggtgtccaaggaagtcccgcgaagaaagtctttagttggcacaccgtattggatggccccagaacttatctcaagactgccatatggccctgaggtcgacatttggagcctggggatcatggttattgaaatggtggacggcgagcctccttactttaatgaacctccacttaaggccatgaagatgatcagggataatttaccccctaggttaaaaaatcttcacaaagtaagtccaagtctgaaaggctttctggatcgcttgctggtgcgcgatcccgctcagagggcaacagctgctgaactgctcaagcacccatttctcgctaaggccggtccaccagcctccattgtgccacttatgagacagaataggacgagatag

SEQ ID NO: 26050 - DNA, 1317 bp, Artificial Sequence
  derived and/or modified sequence
atgtttggtaaacgtaaaaaacgggtggagattagcgcgccttctaactttgagcatcgagtgcacactgggttcgatcaacacgagcaaaaattcactggcctgcctcgacagtggcagtctctgatcgaggaatctgcacggagacctaagcccctcgttgaccccgcatgcatcacgagtatccagcccggtgcacctaagggcgaaccacatgatgtggccccaaacggaccttccgcagggggtttagccataccccagtcgagctcttcttcatcaagacccccaactcgcgcacgaggggctccctcacccggagtgctaggccctcacgccagcgagccgcagttggcacctccagcttgtacccccgcagcacccgctgttcctgggcctcccggtcccaggtccccccaaagggagccccaacgtgtgtctcacgagcaatttagagcggctctgcagctggtggtcgaccccggagatccgaggtcatacttggacaattttataaagatcggcgagggtagcaccggaatcgtctgtatagcaacagtccgctcgtcggggaaattagttgccgtgaagaaaatggaccttagaaagcaacaaaggagagagttactgttcaatgaagtcgtgataatgcgggactatcagcatgagaatgtggtcgagatgtataattcttacctggtgggtgatgaattgtgggtggtgatggagttcttagagggcggtgcactcacagatattgtcacccatacccggatgaacgaggagcagattgcagctgtgtgtctggccgtgctgcaggccttgagtgttctgcatgctcaaggagtcatccaccgggacatcaagagtgactcaattttgctgacgcacgatggcagagttaaactaagtgacttcggattttgcgcccaagtgtcaaaagaagtgccgagaagaaagagtcttgtgggcaccccgtattggatggcccctgaacttatcagccgccttccatatggccctgaggtcgacatttggagcttaggaatcatggtcattgagatggtggatggcgaacctccatatttcaacgaaccacctctcaaagctatgaagatgatccgggacaacctgcctccccgactgaagaacttgcacaaggtgtcgccaagcctgaagggctttctggaccgcctgttggtcagagaccccgctcaacgcgctactgccgcagagctcctgaagcaccccttccttgccaaagctgggccacccgctagtattgtgcccctcatgaggcagaaccgcacccgctag

SEQ ID NO: 26051 - DNA, 471 bp, Artificial Sequence
  derived and/or modified sequence
atgcccgccctgctgcccgtggccagcagactgctgctgctgcccagagtgctgctgaccatggccagcggcagcccccccacccagcccagccccgccagcgacagcggcagcggctacgtgcccggcagcgtgagcgccgccttcgtgacctgccccaacgagaaggtggccaaggagatcgccagagccgtggtggagaagagactggccgcctgcgtgaacctgatcccccagatcaccagcatctacgagtggaagggcaagatcgaggaggacagcgaggtgctgatgatgatcaagacccagagcagcctggtgcccgccctgaccgacttcgtgagaagcgtgcacccctacgaggtggccgaggtgatcgccctgcccgtggagcagggcaacttcccctacctgcagtgggtgagacaggtgaccgagagcgtgagcgacagcatcaccgtgctgccctag

SEQ ID NO: 26052 - DNA, 471 bp, Artificial Sequence
  derived and/or modified sequence
atgcccgctcttctgcccgtggcttctcgcctgctcttactgccacgcgtgctgctaacaatggcaagcgggtcccctcctactcaaccgagcccagcctccgattcaggctccgggtacgtgccaggcagcgtgagcgcagcctttgttacatgcccaaacgagaaggttgccaaggagatcgcgcgcgccgtggtcgaaaaacgcctggccgcctgcgttaatttaattccccagattactagcatctacgaatggaaggggaagatagaagaagactctgaagtgttaatgatgattaagacacagagttcacttgtgcccgcacttaccgacttcgttagatctgtgcacccatatgaggtggcagaggtgattgcgctgcccgtggagcagggtaacttcccctatctacagtgggtgcggcaggtcactgagagtgtctctgattctatcaccgtgcttccttag

SEQ ID NO: 26053 - DNA, 471 bp, Artificial Sequence
  derived and/or modified sequence
atgcccgccctgctgccagtggcctcacgcctgctgctcctccccagagtgctactcactatggcctctgggtccccacccacgcagccctcaccggccagcgactctggctccggttacgtgcccggctctgtcagcgccgcattcgtcacgtgtccaaacgagaaggtggccaaggagattgcgagggccgtggtggagaaacgtctggctgcttgcgtgaacctgatcccacagattacctctatttatgaatggaaaggcaaaatagaggaggacagcgaagttctgatgatgatcaagacacaatccagtctcgtgccagctctaacggactttgttcgctctgtgcatccttacgaagtcgcagaggttatagctcttcccgtggaacagggcaatttcccctacttgcagtgggtcagacaggtgacagaatctgttagcgactcaattaccgtcctcccctag

SEQ ID NO: 26054 - DNA, 471 bp, Artificial Sequence
  derived and/or modified sequence
atgcctgccctgctgcctgtggccagccggctgctgctgctgccccgggtgctgctgaccatggccagcggcagcccccccacccagcccagccctgccagtgacagcggcagcggctacgtgcccggctctgtgtctgctgcctttgtgacctgccccaatgagaaggtggccaaggagatcgcccgggctgtggtggagaagaggctggccgcctgtgtgaacctgatcccccagatcaccagcatctatgagtggaagggcaagattgaggaggacagcgaggtgctgatgatgatcaagacccagagcagcctggtgcctgccctgacagactttgtgcgctctgtgcacccctatgaggtggccgaggtgattgccctgcctgtggagcagggcaacttcccctacctgcagtgggtgcggcaggtgacagaatctgtgtctgacagcatcaccgtgctgccctag

SEQ ID NO: 26055 - DNA, 471 bp, Artificial Sequence
  derived and/or modified sequence
atgcccgccctgctgcccgtggccagccggctgctgctgctgcccagagtgctcctcaccatggcatccggatctcctccaacccagcccagccccgcatccgacagcggatccggctatgtcccgggctctgtgagcgctgccttcgttacctgcccaaatgaaaaggtcgctaaggaaattgcccgcgctgtagtggaaaaacggttggctgcctgtgtgaacctgattccccagatcactagtatatacgaatggaagggaaaaatcgaagaggatagcgaagtcctcatgatgattaagactcagtcctctctggtgcccgcgctcactgatttcgttcgcagtgtgcacccttatgaggtcgcggaagtcatcgccctaccagtggaacagggcaattttccatatctgcagtgggtgcgccaggtgactgagtcggtctctgattccattacagtcctcccttag

SEQ ID NO: 26056 - DNA, 471 bp, Artificial Sequence
  derived and/or modified sequence
atgcccgccctgctgcccgtggccagccggctgctgctgctgcccagagttctgttgacaatggcttctgggagccctcccactcaaccgagtcctgcttccgactccgggtctggatatgtacccggcagtgtaagcgccgcattcgtgacttgcccaaacgagaaagtggccaaggagatcgcccgcgccgtagtcgagaaacgtctcgccgcctgcgtgaacctgatccctcaaattacgagcatatacgagtggaagggaaaaattgaagaggacagcgaagttctgatgatgatcaagacgcagtcctcacttgtgccagctcttacagacttcgtcagatctgtgcacccatacgaggtggccgaagttatagcgctgcctgtggagcaaggaaactttccctaccttcagtgggtacggcaagtcactgagagcgtctcagactctattactgttctgccttag

SEQ ID NO: 26057 - DNA, 471 bp, Artificial Sequence
  derived and/or modified sequence
atgcccgcattgctgcctgtggcttctcgcctgttgctccttcccagagttctgctcactatggcaagtggatcccctcccacccagccctctcctgcctccgacagcggcagtggttacgtcccgggatctgtgtctgcggctttcgttacatgccccaatgaaaaggtggccaaggaaatagctcgggctgtggtcgagaagcggcttgctgcctgtgtgaacctcatcccacagattacgtctatctatgagtggaagggcaagatcgaagaagattcagaagttctcatgatgattaaaacccagtctagcctcgtgccagccctgaccgacttcgtccggtctgtacacccttacgaagtggccgaggtgattgccctgccggtggagcagggaaattttccctacctgcagtgggtacggcaggtaaccgagagcgtttcagatagtataaccgtgttaccctag

SEQ ID NO: 26058 - DNA, 471 bp, Artificial Sequence
  derived and/or modified sequence
atgcccgctctgctccctgttgcctcccgactcttactactgcctcgagtgctgctgaccatggcatcgggctcgccccctactcaaccatcccctgcctccgattcagggtccggttatgttcctgggagcgtgagcgctgccttcgtaacctgtcccaacgagaaagtggccaaggaaatcgcccgtgccgtcgtggaaaaaagactggccgcatgtgtgaatctgatccctcaaatcacgtctatctacgaatggaagggcaaaatcgaggaagatagtgaagtactgatgatgatcaagacccagtcaagtcttgtacctgccttgaccgatttcgttcggtccgtgcatccatatgaggtcgcagaagtaatagcgttacccgtcgagcagggtaatttcccctacctgcaatgggttcgacaggtgaccgaatctgtcagtgacagtatcaccgttcttccgtag

SEQ ID NO: 26059 - protein, 179 aa, Artificial Sequence
  derived and/or modified sequence
MSGGRAPAVLLGGVASLLLSFVWMPALLPVASRLLLLPRVLLTMASGSPPTQPSPASDSGSGYVPGSVSAAFVTCPNEKVAKEIARAVVEKRLAACVNLIPQITSIYEWKGKIEEDSEVLMMIKTQSSLVPALTDFVRSVHPYEVAEVIALPVEQGNFPYLQWVRQVTESVSDSITVLP

SEQ ID NO: 26060 - protein, 42 aa, Artificial Sequence
  derived and/or modified sequence
MSGGRAPAVLLGGVVSDRPRPAPSGPRSLDRYPHPKSQRLAP

SEQ ID NO: 26061 - DNA, 540 bp, Artificial Sequence
  derived and/or modified sequence
atgagcggcggcagagcccccgccgtgctgctgggcggcgtggccagcctgctgctgagcttcgtgtggatgcccgccctgctgcccgtggccagcagactgctgctgctgcccagagtgctgctgaccatggccagcggcagcccccccacccagcccagccccgccagcgacagcggcagcggctacgtgcccggcagcgtgagcgccgccttcgtgacctgccccaacgagaaggtggccaaggagatcgccagagccgtggtggagaagagactggccgcctgcgtgaacctgatcccccagatcaccagcatctacgagtggaagggcaagatcgaggaggacagcgaggtgctgatgatgatcaagacccagagcagcctggtgcccgccctgaccgacttcgtgagaagcgtgcacccctacgaggtggccgaggtgatcgccctgcccgtggagcagggcaacttcccctacctgcagtgggtgagacaggtgaccgagagcgtgagcgacagcatcaccgtgctgccctag

SEQ ID NO: 26062 - DNA, 129 bp, Artificial Sequence
  derived and/or modified sequence
atgagcggcggcagagcccccgccgtgctgctgggcggcgtggtgagcgacagacccagacccgcccccagcggccccagaagcctggacagatacccccaccccaagagccagagactggccccctag

SEQ ID NO: 26063 - DNA, 870 bp, Artificial Sequence
  derived and/or modified sequence
tgcgcgctgttttctaatcacgtggctgccacccaggtaagaagaggccgctcttcctggggttgtttctccgtgtgacgtgtggcctttgagatcaactctcctgtaccagcgtaggccgcatgagtggggggcgggctcccgcggtcctgctcggcggagtggcctctctgctcctgtcttttgtttggatgccggcgctgctgcctgtggcctcccgccttttgttgctaccccgagtcttgctgaccatggcctctggaagccctccgacccagccctcgccggcctcggattccggctctggctacgttccgggctcggtctctgcagcctttgttacttgccccaacgagaaggtcgccaaggagatcgccagggccgtggtggagaagcgcctagcagcctgcgtcaacctcatccctcagattacatccatctatgagtggaaagggaagatcgaggaagacagtgaggtgctgatgatgattaaaacccaaagttccttggtcccagctttgacagattttgttcgttctgtgcacccttacgaagtggccgaggtaattgcattgcctgtggaacaggggaactttccgtacctgcagtgggtgcgccaggtcacagagtcagtttctgactctatcacagtcctgccatgatgagccctgttcctgctcatcatgaagatccccgcgatacttcaacgccttctgacttccaggtgatgactgggcccccaataaatcccgtctttgggtctctctgccttttgcctgttttttgtcatgtatgcaaatttgttgggagaatataagtgcttctagtccctgtattctctacatctttcagaatgactcagagctgcta

SEQ ID NO: 26064 - DNA, 769 bp, Artificial Sequence
  derived and/or modified sequence
tgcgcgctgttttctaatcacgtggctgccacccaggtaagaagaggccgctcttcctggggttgtttctccgtgtgacgtgtggcctttgagatcaactctcctgtaccagcgtaggccgcatgagtggggggcgggctcccgcggtcctgctcggcggagtggcctctctgctcctgtcttttgtttggatgccggcgctgctgcctgtggcctcccgccttttgttgctaccccgagtcttgctgaccatggcctctggaagccctccgacccagccctcgccggcctcggattccggctctggctacgttccgggctcggtctctgcagcctttgttacttgccccaacgagaaggtcgccaaggagatcgccagggccgtggtggagaagcgcctagcagcctgcgtcaacctcatccctcagattacatccatctatgagtggaaagggaagatcgaggaagacagtgaggtgctgatgatgattaaaacccaaagttccttggtcccagctttgacagattttgttcgttctgtgcacccttacgaagtggccgaggtaattgcattgcctgtggaacaggggaactttccgtacctgcagtgggtgcgccaggtcacagagtcagtttctgactctatcacagtcctgccatgatgagccctgttcctgctcatcatgaagatccccgcgatacttcaacgccttctgacttccaggtgatgactgggcccccaataaatcccgtctttgggtctctctgc

SEQ ID NO: 26065 - DNA, 837 bp, Artificial Sequence
  derived and/or modified sequence
aatcacgtggctgccacccaggtaagaagaggccgctcttcctggggttgtttctccgtgtgacgtgtggcctttgagatcaactctcctgtaccagcgtaggccgcatgagtggggggcgggctcccgcggtcctgctcggcggagtggtgagtgaccggccccgccccgccccttccggtcctcgaagcctcgaccgctacccgcaccctaaatcccagaggttggccccctgaggtgcctctctgctcctgtcttttgtttggatgccggcgctgctgcctgtggcctcccgccttttgttgctaccccgagtcttgctgaccatggcctctggaagccctccgacccagccctcgccggcctcggattccggctctggctacgttccgggctcggtctctgcagcctttgttacttgccccaacgagaaggtcgccaaggagatcgccagggccgtggtggagaagcgcctagcagcctgcgtcaacctcatccctcagattacatccatctatgagtggaaagggaagatcgaggaagacagtgaggtgctgatgatgattaaaacccaaagttccttggtcccagctttgacagattttgttcgttctgtgcacccttacgaagtggccgaggtaattgcattgcctgtggaacaggggaactttccgtacctgcagtgggtgcgccaggtcacagagtcagtttctgactctatcacagtcctgccatgatgagccctgttcctgctcatcatgaagatccccgcgatacttcaacgccttctgacttccaggtgatgactgggcccccaataaatcccgtctttgggtc

SEQ ID NO: 26066 - DNA, 540 bp, Artificial Sequence
  derived and/or modified sequence
atgagcgggggcagggcccccgcggtgttgttggggggggtcgctagcctcctactctcctttgtttggatgcccgctctgctcccggtcgccagtcggttactgcttctgcctagagttctgctaacaatggcctccggctctcctcctactcaacccagccctgctagcgattcaggcagtggttacgtgccagggagcgtgagcgccgcttttgtcacttgtccaaacgaaaaagtcgccaaggagatagctcgcgctgtcgtagaaaagcgtctggcggcttgcgttaatctcataccacagattacttcaatatatgagtggaaagggaaaatcgaggaggactcagaggtgttaatgatgattaaaacgcaatccagtctggtccccgcccttaccgatttcgtacggtcagtgcacccctacgaagtggcggaagtgatagctttgcccgtcgagcaggggaacttcccctatctgcagtgggtcagacaagtgacagagagcgtgtcggactccatcacggtgctgccttag

SEQ ID NO: 26067 - DNA, 540 bp, Artificial Sequence
  derived and/or modified sequence
atgtcaggtggcagagcaccagcagtgcttcttgggggggtggcttcactccttctttctttcgtgtggatgccagccctccttccagtggcgagccgtctgttgctgctgcctcgggtgctgctcacaatggcctctggcagcccaccaactcagccttcaccggcctccgactctggatccggatatgtgcctgggagcgtgagtgctgcgttcgtgacgtgccccaacgaaaaggtggccaaagagatcgcccgagctgttgtggaaaagaggctcgcagcctgcgtcaacttaatcccccaaattacgagtatttatgagtggaagggcaaaattgaggaagacagcgaggtgctgatgatgatcaagacccagagctccctcgtgccagcacttaccgactttgttcggagcgtgcacccttacgaggtagcggaagtgatcgccttgcctgtcgaacagggcaactttccatatctgcagtgggtgcggcaggtcactgagagcgtgtccgattctattaccgttcttccttag

SEQ ID NO: 26068 - DNA, 129 bp, Artificial Sequence
  derived and/or modified sequence
atgagtgggggacgtgcccccgccgttctgttagggggggtcgtgtctgatagaccaaggcccgctccctctgggcctcgttccttggacagatatccccatcccaagtcacagaggctagcaccgtag

SEQ ID NO: 26069 - DNA, 540 bp, Artificial Sequence
  derived and/or modified sequence
atgtctgggggccgggccccagctgtgctgctgggcggcgtggccagcctgctgctgagctttgtgtggatgcctgccctgctgcctgtggccagccggctgctgctgctgccccgggtgctgctgaccatggccagcggcagcccccccacccagcccagccctgccagtgacagcggcagcggctacgtgcccggctctgtgtctgctgcctttgtgacctgccccaatgagaaggtggccaaggagatcgcccgggctgtggtggagaagaggctggccgcctgtgtgaacctgatcccccagatcaccagcatctatgagtggaagggcaagattgaagaagattctgaggtgctgatgatgatcaagacccagagcagcctggtgcctgccctgacagactttgtgcgctctgtgcacccctatgaggtggccgaggtgattgccctgcctgtggagcagggcaacttcccctacctgcagtgggtgcggcaggtgacagagagcgtgtctgacagcatcaccgtgctgccctag

SEQ ID NO: 26070 - DNA, 129 bp, Artificial Sequence
  derived and/or modified sequence
atgtctgggggccgggccccagctgtgctgctgggcggcgtggtgtctgaccggcccaggcctgcccccagcggccccaggagcctggaccgctacccccaccccaagagccagaggctggccccctag

SEQ ID NO: 26071 - DNA, 540 bp, Artificial Sequence
  derived and/or modified sequence
atgagcggcggccgggcccccgccgtgctgctgggcggcgtggcctctctgctgctttcttttgtctggatgcccgctctgctgcctgtggcgagtcgcctattgttactgcctagggttctcttaactatggcctccgggagcccccctacacagccttcccccgcatcagactctggttccggttatgttccaggctccgtgagtgcagccttcgtgacttgcccgaacgagaaagtggcaaaggagatcgcacgggccgtggtcgagaaacgacttgccgcatgcgtgaacctgattccccagattacctccatatacgaatggaagggcaaaattgaggaggactcagaggtgttgatgatgatcaagactcagtcctcactggttccagccctaaccgatttcgtacgctccgttcatccgtatgaggtagcagaggtgatagctctacctgtggaacagggaaattttccctacctccaatgggtgcggcaggtaactgaatctgtgtccgatagcatcaccgtcctgccttag

SEQ ID NO: 26072 - DNA, 540 bp, Artificial Sequence
  derived and/or modified sequence
atgagcggcggccgggcccccgccgtgctgctgggcggcgtggccagtctgttgctgtccttcgtgtggatgcccgccctgttacccgtggctagcaggctcctgctgctgccacgggtcttgctgacaatggcatcagggagtccacccacgcaaccatctcccgcgtccgattcagggtcagggtatgtgccaggcagtgtctccgctgccttcgtgacctgtcctaatgaaaaggtcgctaaggagatcgctcgggccgtggttgagaaacgtctcgcggcctgcgtcaacctcatcccgcagattaccagcatttacgaatggaaggggaaaatcgaggaggactcagaagtccttatgatgatcaagactcagagctctttggtcccggccttgaccgattttgtgagatcggtgcatccctacgaagtggccgaggtgatcgccttgccagtggagcagggaaattttccataccttcaatgggtcaggcaggtgacagagagcgtgtcggattccattaccgtacttccttag

SEQ ID NO: 26073 - DNA, 129 bp, Artificial Sequence
  derived and/or modified sequence
atgagcggcggccgggcccccgccgtgctgctgggcggcgtggtgtccgacagaccacgccccgcgccatcaggccccaggtcacttgataggtatccccacccaaagtctcagagattggcaccctag

SEQ ID NO: 26074 - DNA, 540 bp, Artificial Sequence
  derived and/or modified sequence
atgtcaggaggtagggccccagccgttctgctggggggagttgccagcctcctgctgtcctttgtttggatgccggctctgcttccagtggcatcgcgcctgcttctccttccgagagtcctcctgactatggccagtggatccccaccaacccagccgtccccggcaagcgactctggcagcgggtatgtgccagggtctgtctctgctgcattcgtgacctgtcccaacgaaaaggtggccaaagagatagcacgggctgtagtggaaaaaagattagccgcttgcgtaaatctgataccccaaattacatctatctacgaatggaaaggaaaaatcgaggaagatagtgaagtgttgatgatgattaagacgcagagctcactggtgccagcacttaccgattttgtacgcagcgtgcacccttacgaggtggctgaggtcatcgctttacccgttgagcaaggcaatttcccctacctgcagtgggtgcgccaggttactgagagcgtctctgatagcataacagtgctgccatag

SEQ ID NO: 26075 - DNA, 540 bp, Artificial Sequence
  derived and/or modified sequence
atgtctggtggcagagctcccgctgtactgttgggcggtgtggcttcgctcctgctaagctttgtctggatgcccgcactcctaccagtggcatctagactgctgcttctgcccagggtactgctgactatggcaagcggttctcctcctactcagccctcacccgcaagcgatagcggatcagggtatgtgccaggcagtgtctctgctgccttcgtgacttgtcccaacgagaaggttgctaaggagattgcacgagccgtggtagagaagcgtctcgccgcttgcgtcaacctcatacctcagatcaccagcatttatgagtggaagggtaagatcgaggaggacagcgaggtgctcatgatgataaagactcagtcctctctggttcccgcactcacggactttgtgagaagcgtgcatccatacgaagtggctgaggtaatagctctaccggtagagcaagggaacttcccctacctgcagtgggtgcgtcaagtaacggagtctgtgagtgatagtattacagtcctgccatag

SEQ ID NO: 26076 - DNA, 129 bp, Artificial Sequence
  derived and/or modified sequence
atgtccggaggtcgagcgccagcggttctcctgggaggagtggtgagtgaccgccctcgcccagccccatccggccctcggtctctcgacagatacccacaccctaaatcacagagactcgccccttag

SEQ ID NO: 26077 - protein, 449 aa, Artificial Sequence
  derived and/or modified sequence
MRLLAKIICLMLWAICVAEDCNELPPRRNTEILTGSWSDQTYPEGTQAIYKCRPGYRSLGNVIMVCRKGEWVALNPLRKCQKRPCGHPGDTPFGTFTLTGGNVFEYGVKAVYTCNEGYQLLGEINYRECDTDGWTNDIPICEVVKCLPVTAPENGKIVSSAMEPDREYHFGQAVRFVCNSGYKIEGDEEMHCSDDGFWSKEKPKCVEISCKSPDVINGSPISQKIIYKENERFQYKCNMGYEYSERGDAVCTESGWRPLPSCEEKSCDNPYIPNGDYSPLRIKHRTGDEITYQCRNGFYPATRGNTAKCTSTGWIPAPRCTLKPCDYPDIKHGGLYHENMRRPYFPVAVGKYYSYYCDEHFETPSGSYWDHIHCTQDGWSPAVPCLRKCYFPYLENGYNQNHGRKFVQGKSIDVACHPGYALPKAQTTVTCMENGWSPTPRCIRVSFTL

SEQ ID NO: 26078 - DNA, 1347 bp, Artificial Sequence
  derived and/or modified sequence
atgcgcctgctggccaagatcatctgcctgatgctgtgggccatctgcgtggccgaggactgcaacgagctgcccccccgccgcaacaccgagatcctgaccggcagctggagcgaccagacctaccccgagggcacccaggccatctacaagtgccgccccggctaccgcagcctgggcaacgtgatcatggtgtgccgcaagggcgagtgggtggccctgaaccccctgcgcaagtgccagaagcgcccctgcggccaccccggcgacacccccttcggcaccttcaccctgaccggcggcaacgtgttcgagtacggcgtgaaggccgtgtacacctgcaacgagggctaccagctgctgggcgagatcaactaccgcgagtgcgacaccgacggctggaccaacgacatccccatctgcgaggtggtgaagtgcctgcccgtgaccgcccccgagaacggcaagatcgtgagcagcgccatggagcccgaccgcgagtaccacttcggccaggccgtgcgcttcgtgtgcaacagcggctacaagatcgagggcgacgaggagatgcactgcagcgacgacggcttctggagcaaggagaagcccaagtgcgtggagatcagctgcaagagccccgacgtgatcaacggcagccccatcagccagaagatcatctacaaggagaacgagcgcttccagtacaagtgcaacatgggctacgagtacagcgagcgcggcgacgccgtgtgcaccgagagcggctggcgccccctgcccagctgcgaggagaagagctgcgacaacccctacatccccaacggcgactacagccccctgcgcatcaagcaccgcaccggcgacgagatcacctaccagtgccgcaacggcttctaccccgccacccgcggcaacaccgccaagtgcaccagcaccggctggatccccgccccccgctgcaccctgaagccctgcgactaccccgacatcaagcacggcggcctgtaccacgagaacatgcgccgcccctacttccccgtggccgtgggcaagtactacagctactactgcgacgagcacttcgagacccccagcggcagctactgggaccacatccactgcacccaggacggctggagccccgccgtgccctgcctgcgcaagtgctacttcccctacctggagaacggctacaaccagaaccacggccgcaagttcgtgcagggcaagagcatcgacgtggcctgccaccccggctacgccctgcccaaggcccagaccaccgtgacctgcatggagaacggctggagccccaccccccgctgcatccgcgtgagcttcaccctg

SEQ ID NO: 26079 - DNA, 1350 bp, Artificial Sequence
  derived and/or modified sequence
atgagactgctggccaagatcatctgcctgatgctgtgggccatctgcgtggccgaggactgcaacgagctgccccccagaagaaacaccgagatcctgaccggcagctggagcgaccagacctaccccgagggcacccaggccatctacaagtgcagacccggctacagaagcctgggcaacgtgatcatggtgtgcagaaagggcgagtgggtggccctgaaccccctgagaaagtgccagaagagaccctgcggccaccccggcgacacccccttcggcaccttcaccctgaccggcggcaacgtgttcgagtacggcgtgaaggccgtgtacacctgcaacgagggctaccagctgctgggcgagatcaactacagagagtgcgacaccgacggctggaccaacgacatccccatctgcgaggtggtgaagtgcctgcccgtgaccgcccccgagaacggcaagatcgtgagcagcgccatggagcccgacagagagtaccacttcggccaggccgtgagattcgtgtgcaacagcggctacaagatcgagggcgacgaggagatgcactgcagcgacgacggcttctggagcaaggagaagcccaagtgcgtggagatcagctgcaagagccccgacgtgatcaacggcagccccatcagccagaagatcatctacaaggagaacgagagattccagtacaagtgcaacatgggctacgagtacagcgagagaggcgacgccgtgtgcaccgagagcggctggagacccctgcccagctgcgaggagaagagctgcgacaacccctacatccccaacggcgactacagccccctgagaatcaagcacagaaccggcgacgagatcacctaccagtgcagaaacggcttctaccccgccaccagaggcaacaccgccaagtgcaccagcaccggctggatccccgcccccagatgcaccctgaagccctgcgactaccccgacatcaagcacggcggcctgtaccacgagaacatgagaagaccctacttccccgtggccgtgggcaagtactacagctactactgcgacgagcacttcgagacccccagcggcagctactgggaccacatccactgcacccaggacggctggagccccgccgtgccctgcctgagaaagtgctacttcccctacctggagaacggctacaaccagaaccacggcagaaagttcgtgcagggcaagagcatcgacgtggcctgccaccccggctacgccctgcccaaggcccagaccaccgtgacctgcatggagaacggctggagccccacccccagatgcatcagagtgatcttccagctgtag

SEQ ID NO: 26080 - DNA, 1350 bp, Artificial Sequence
  derived and/or modified sequence
atgagactgctggccaagatcatctgcctgatgctgtgggccatctgcgtggccgaggactgcaacgagctgccccccagaagaaacaccgagatcctgaccggcagctggagcgaccagacctaccccgagggcacccaggccatctacaagtgcagacccggctacagaagcctgggcaacgtgatcatggtgtgcagaaagggcgagtgggtggccctgaaccccctgagaaagtgccagaagagaccctgcggccaccccggcgacacccccttcggcaccttcaccctgaccggcggcaacgtgttcgagtacggcgtgaaggccgtgtacacctgcaacgagggctaccagctgctgggcgagatcaactacagagagtgcgacaccgacggctggaccaacgacatccccatctgcgaggtggtgaagtgcctgcccgtgaccgcccccgagaacggcaagatcgtgagcagcgccatggagcccgacagagagtaccacttcggccaggccgtgagattcgtgtgcaacagcggctacaagatcgagggcgacgaggagatgcactgcagcgacgacggcttctggagcaaggagaagcccaagtgcgtggagatcagctgcaagagccccgacgtgatcaacggcagccccatcagccagaagatcatctacaaggagaacgagagattccagtacaagtgcaacatgggctacgagtacagcgagagaggcgacgccgtgtgcaccgagagcggctggagacccctgcccagctgcgaggagaagagctgcgacaacccctacatccccaacggcgactacagccccctgagaatcaagcacagaaccggcgacgagatcacctaccagtgcagaaacggcttctaccccgccaccagaggcaacaccgccaagtgcaccagcaccggctggatccccgcccccagatgcaccctgaagccctgcgactaccccgacatcaagcacggcggcctgtaccacgagaacatgagaagaccctacttccccgtggccgtgggcaagtactacagctactactgcgacgagcacttcgagacccccagcggcagctactgggaccacatccactgcacccaggacggctggagccccgccgtgccctgcctgagaaagtgctacttcccctacctggagaacggctacaaccagaaccacggcagaaagttcgtgcagggcaagagcatcgacgtggcctgccaccccggctacgccctgcccaaggcccagaccaccgtgacctgcatggagaacggctggagccccacccccagatgcatcagagtgagcttcaccctgtag

SEQ ID NO: 26081 - DNA, 1350 bp, Artificial Sequence
  derived and/or modified sequence
atgagacttctggctaagataatctgccttatgctatgggctatctgcgtggccgaggactgtaacgagcttcccccgcgtcgtaacactgagattctaaccggctcttggagcgatcaaacataccctgagggtacccaggccatatataaatgtagacccggctataggtcattaggaaacgtgataatggtatgtcggaagggcgagtgggtggctctcaacccccttcggaagtgtcaaaaaagaccctgtgggcacccaggcgacactccatttgggacttttacattaaccggggggaacgtgttcgaatacggagtaaaggccgtgtatacttgtaatgagggataccagcttctcggtgagatcaactatcgcgagtgtgacactgatggatggaccaacgatattcctatttgcgaggtggtgaaatgcctgccagtgactgccccggaaaatgggaagatcgtttcttctgcaatggaacccgaccgggagtaccacttcggccaggcagtccgcttcgtatgcaactctggctataaaatagaaggagatgaggaaatgcattgcagtgatgatggcttctggagtaaagaaaagccaaagtgtgtggaaatctcatgcaagtctcctgatgtgattaacggctccccaatcagccagaagatcatttataaagagaacgagcgcttccaatataagtgcaacatgggctacgagtactcagagaggggtgacgccgtctgcacagaaagtgggtggcggccactcccatcctgcgaagaaaaaagttgcgataatccctacatcccgaatggggactactcaccactcagaattaaacacagaacaggcgacgagatcacatatcagtgtaggaacgggttttatccggcaaccagaggcaatacggccaagtgtaccagtacagggtggatccctgcccccaggtgtacactaaaaccttgcgattacccggacattaaacacggtggattgtaccatgaaaacatgcggcggccttacttccccgtggcagtcgggaagtattatagctattactgcgatgaacactttgaaaccccatcagggtcttactgggatcacatccactgtacccaagacggctggagtcccgccgtcccgtgtctgcgcaaatgctatttcccctatttagagaatggctataatcagaaccacgggagaaagttcgtccagggaaaatcaattgacgttgcatgtcacccaggatacgcgctgccgaaggctcagactacagttacttgcatggaaaatgggtggtcccctacccctcgctgcatccgtgtgatttttcagctgtag

SEQ ID NO: 26082 - DNA, 1350 bp, Artificial Sequence
  derived and/or modified sequence
atgcgccttctcgcaaagattatctgtctgatgctgtgggcaatctgtgtggcggaggactgcaatgaacttcctcctcgcagaaatacggagatactaaccggctcttggagtgatcagacctatccggagggaacgcaggcgatttataaatgtcggcctggatatagaagcttgggaaatgtgataatggtgtgccgcaagggcgagtgggtcgcccttaaccccctgcgcaaatgccagaaacgcccatgcggacaccccggtgacaccccctttggcacattcacgctgaccgggggaaacgtctttgaatatggcgtgaaagcggtctacacatgtaatgagggctaccagctgttaggcgaaatcaactatcgggaatgcgacacagatggctggacaaatgatatccctatttgcgaagtggtcaagtgtctccccgtgactgccccagagaatgggaagatcgtgtcttcagccatggagcctgacagagagtaccattttggacaggcggttcgtttcgtttgtaacagcgggtacaagatcgagggtgatgaggaaatgcattgtagcgacgacggattttggtctaaagagaaaccgaagtgtgtggaaatttcctgtaagtccccagacgtgatcaacggtagtccgataagccaaaagattatttacaaggaaaatgagaggttccaatacaagtgcaatatgggctacgaatatagcgaaagaggtgacgctgtgtgcaccgagtctggttggcggccccttccatcatgcgaggagaaatcatgtgataatccctatattcctaatggtgactattccccacttcgcatcaaacacaggaccggtgacgagatcacataccagtgtagaaatggtttttaccctgcgacaaggggtaacactgcgaagtgtacctcaaccgggtggatcccagccccgcggtgtactcttaagccatgtgactacccggatatcaaacatggaggtctataccacgagaacatgaggaggccatattttcccgttgccgtgggaaaatattatagctactactgtgacgagcattttgaaactcctagcggcagttactgggatcatattcactgtactcaagacgggtggtcccctgccgtgccgtgcctccgtaagtgctatttcccctacctagagaacggctacaatcagaatcacggcagaaaatttgtgcaaggcaaatcgattgacgtggcgtgccatccaggatacgctttacccaaggcgcaaaccacagtcacctgcatggagaacggctggtcacctacgccgcgatgcatcagggtgagctttacactatag

SEQ ID NO: 26083 - DNA, 1350 bp, Artificial Sequence
  derived and/or modified sequence
atgaggctgctggccaagatcatctgcctgatgctgtgggccatctgtgtggccgaggactgcaatgagctgcccccaagaagaaacacagagatcctgaccggctcctggagcgaccagacctacccagagggcacccaggccatctacaagtgccggcccggctaccgcagcctgggcaatgtcatcatggtgtgcaggaagggggagtgggtggccctgaaccccctgaggaagtgccagaagaggccctgtggccaccctggggacaccccatttggcaccttcaccctgactggaggaaatgtgtttgaatatggagtgaaggctgtgtacacctgcaatgaaggctaccagctgctgggggagatcaactaccgggagtgtgacacagatggctggaccaatgacatccccatctgtgaggtggtgaagtgcctgcctgtgacagccccagaaaatggcaagatcgtgagcagcgccatggagccagaccgggagtaccacttcggccaggccgtgcgctttgtgtgcaacagcggctacaagattgaaggagatgaggagatgcactgcagtgatgatggcttctggagcaaggagaagcccaagtgtgtggagatcagctgcaagagcccagatgtgatcaatggcagccccatcagccagaagatcatctacaaggaaaatgaacgcttccagtacaagtgcaacatgggctatgagtacagcgagagaggagatgctgtgtgcacagagagcggctggaggcccctgcccagctgtgaggagaagagctgtgacaacccctacatccccaacggggactacagccccctgcgcatcaagcacaggactggagatgagatcacctaccagtgcagaaatggcttctacccagccacccggggcaacacagccaagtgcaccagcacaggctggatcccagccccccgctgcaccctgaagccctgtgactacccagacatcaagcacggcggcctgtaccacgagaacatgagaagaccctacttccctgtggccgtgggcaagtactacagctactactgtgatgagcactttgagaccccatctggcagctactgggaccacatccactgcacccaggacggctggagccctgctgtgccctgcctgaggaagtgctacttcccctacctggagaatggctacaaccagaaccacggcaggaagtttgtgcagggcaagagcattgatgtggcctgccaccctggctacgccctgcccaaggcccagaccaccgtgacctgcatggagaatggctggagccccaccccccgctgcatccgggtcatcttccagctgtag

SEQ ID NO: 26084 - DNA, 1350 bp, Artificial Sequence
  derived and/or modified sequence
atgaggctgctggccaagatcatctgcctgatgctgtgggccatctgtgtggccgaggactgcaatgagctgcccccaagaagaaacacagagatcctgaccggctcctggagcgaccagacctacccagagggcacccaggccatctacaagtgccggcccggctaccgcagcctgggcaatgtcatcatggtgtgcaggaagggggagtgggtggccctgaaccccctgaggaagtgccagaagaggccctgtggccaccctggggacaccccatttggcaccttcaccctgactggaggaaatgtgtttgaatatggagtgaaggctgtgtacacctgcaatgaaggctaccagctgctgggggagatcaactaccgggagtgtgacacagatggctggaccaatgacatccccatctgtgaggtggtgaagtgcctgcctgtgacagccccagaaaatggcaagatcgtgagcagcgccatggagccagaccgggagtaccacttcggccaggccgtgcgctttgtgtgcaacagcggctacaagattgaaggagatgaggagatgcactgcagtgatgatggcttctggagcaaggagaagcccaagtgtgtggagatcagctgcaagagcccagatgtgatcaatggcagccccatcagccagaagatcatctacaaggaaaatgaacgcttccagtacaagtgcaacatgggctatgagtacagcgagagaggagatgctgtgtgcacagagagcggctggaggcccctgcccagctgtgaggagaagagctgtgacaacccctacatccccaacggggactacagccccctgcgcatcaagcacaggactggagatgagatcacctaccagtgcagaaatggcttctacccagccacccggggcaacacagccaagtgcaccagcacaggctggatcccagccccccgctgcaccctgaagccctgtgactacccagacatcaagcacggcggcctgtaccacgagaacatgagaagaccctacttccctgtggccgtgggcaagtactacagctactactgtgatgagcactttgagaccccatctggcagctactgggaccacatccactgcacccaggacggctggagccctgctgtgccctgcctgaggaagtgctacttcccctacctggagaatggctacaaccagaaccacggcaggaagtttgtgcagggcaagagcattgatgtggcctgccaccctggctacgccctgcccaaggcccagaccaccgtgacctgcatggagaatggctggagccccaccccccgctgcatccgggtgtccttcaccctgtag

SEQ ID NO: 26085 - DNA, 1587 bp, Artificial Sequence
  derived and/or modified sequence
acagcattaacatttagtgggagtgcagtgagaattgggtttaacttctggcatttctgggcttgtggcttgtggttgattttttatttactttgcaaaagtttctgataggcggagcatctagtttcaacttccttttgcagcaagttctttcctgcactaatcacaattcttggaagaggagaactggacgttgtgaacagagttagctggtaaatgtcctcttaaaagatccaaaaaatgagacttctagcaaagattatttgccttatgttatgggctatttgtgtagcagaagattgcaatgaacttcctccaagaagaaatacagaaattctgacaggttcctggtctgaccaaacatatccagaaggcacccaggctatctataaatgccgccctggatatagatctcttggaaatgtaataatggtatgcaggaagggagaatgggttgctcttaatccattaaggaaatgtcagaaaaggccctgtggacatcctggagatactccttttggtacttttacccttacaggaggaaatgtgtttgaatatggtgtaaaagctgtgtatacatgtaatgaggggtatcaattgctaggtgagattaattaccgtgaatgtgacacagatggatggaccaatgatattcctatatgtgaagttgtgaagtgtttaccagtgacagcaccagagaatggaaaaattgtcagtagtgcaatggaaccagatcgggaataccattttggacaagcagtacggtttgtatgtaactcaggctacaagattgaaggagatgaagaaatgcattgttcagacgatggtttttggagtaaagagaaaccaaagtgtgtggaaatttcatgcaaatccccagatgttataaatggatctcctatatctcagaagattatttataaggagaatgaacgatttcaatataaatgtaacatgggttatgaatacagtgaaagaggagatgctgtatgcactgaatctggatggcgtccgttgccttcatgtgaagaaaaatcatgtgataatccttatattccaaatggtgactactcacctttaaggattaaacacagaactggagatgaaatcacgtaccagtgtagaaatggtttttatcctgcaacccggggaaatacagcaaaatgcacaagtactggctggatacctgctccgagatgtaccttgaaaccttgtgattatccagacattaaacatggaggtctatatcatgagaatatgcgtagaccatactttccagtagctgtaggaaaatattactcctattactgtgatgaacattttgagactccgtcaggaagttactgggatcacattcattgcacacaagatggatggtcgccagcagtaccatgcctcagaaaatgttattttccttatttggaaaatggatataatcaaaatcatggaagaaagtttgtacagggtaaatctatagacgttgcctgccatcctggctacgctcttccaaaagcgcagaccacagttacatgtatggagaatggctggtctcctactcccagatgcatccgtgtcatttttcaactg

SEQ ID NO: 26086 - DNA, 1822 bp, Artificial Sequence
  derived and/or modified sequence
acagcattaacatttagtgggagtgcagtgagaattgggtttaacttctggcatttctgggcttgtggcttgtggttgattttttatttactttgcaaaagtttctgataggcggagcatctagtttcaacttccttttgcagcaagttctttcctgcactaatcacaattcttggaagaggagaactggacgttgtgaacagagttagctggtaaatgtcctcttaaaagatccaaaaaatgagacttctagcaaagattatttgccttatgttatgggctatttgtgtagcagaagattgcaatgaacttcctccaagaagaaatacagaaattctgacaggttcctggtctgaccaaacatatccagaaggcacccaggctatctataaatgccgccctggatatagatctcttggaaatgtaataatggtatgcaggaagggagaatgggttgctcttaatccattaaggaaatgtcagaaaaggccctgtggacatcctggagatactccttttggtacttttacccttacaggaggaaatgtgtttgaatatggtgtaaaagctgtgtatacatgtaatgaggggtatcaattgctaggtgagattaattaccgtgaatgtgacacagatggatggaccaatgatattcctatatgtgaagttgtgaagtgtttaccagtgacagcaccagagaatggaaaaattgtcagtagtgcaatggaaccagatcgggaataccattttggacaagcagtacggtttgtatgtaactcaggctacaagattgaaggagatgaagaaatgcattgttcagacgatggtttttggagtaaagagaaaccaaagtgtgtggaaatttcatgcaaatccccagatgttataaatggatctcctatatctcagaagattatttataaggagaatgaacgatttcaatataaatgtaacatgggttatgaatacagtgaaagaggagatgctgtatgcactgaatctggatggcgtccgttgccttcatgtgaagaaaaatcatgtgataatccttatattccaaatggtgactactcacctttaaggattaaacacagaactggagatgaaatcacgtaccagtgtagaaatggtttttatcctgcaacccggggaaatacagcaaaatgcacaagtactggctggatacctgctccgagatgtaccttgaaaccttgtgattatccagacattaaacatggaggtctatatcatgagaatatgcgtagaccatactttccagtagctgtaggaaaatattactcctattactgtgatgaacattttgagactccgtcaggaagttactgggatcacattcattgcacacaagatggatggtcgccagcagtaccatgcctcagaaaatgttattttccttatttggaaaatggatataatcaaaatcatggaagaaagtttgtacagggtaaatctatagacgttgcctgccatcctggctacgctcttccaaaagcgcagaccacagttacatgtatggagaatggctggtctcctactcccagatgcatccgtgtcagctttaccctctgaacttctgatcgaaggtcatccctctccagcttgagtggatcaaagatgacaagggccaatggaaccaagtttgagtcttgccaggtcaatacttgggtcctgagtatggtgactagtatctgttttgttatgtgtgtattattccagccagaatgggaaatgctaattcagctcctccaggcagcccaatggggctggtggctttgagattattaaactctttctctgctgc

SEQ ID NO: 26087 - DNA, 1350 bp, Artificial Sequence
  derived and/or modified sequence
atgcggctgctggccaagatcatctgcctgatgctgtgggccatctgcgtcgccgaagactgcaatgaactgcctccacggagaaacactgagatcttaactggctcctggagtgaccagacataccctgaaggcacccaggccatatacaaatgccggcccggataccgtagtctgggtaatgtcataatggtttgccgcaaaggtgagtgggttgcacttaacccccttagaaaatgtcagaaaagaccatgcggtcatcctggggatacaccgtttgggactttcacccttacaggaggtaatgtgttcgagtatggggtcaaggctgtgtatacatgtaatgagggctatcagcttctcggagagattaattaccgggaatgtgataccgacggctggaccaatgacattccaatttgtgaggtggtcaaatgtctgcctgtcaccgcaccggaaaacggaaagattgtgagttctgccatggaaccagacagggaataccatttcggtcaggcagtacgctttgtttgcaactcaggttacaagatcgagggagacgaggaaatgcactgttcagacgatggcttttggagcaaggagaaaccaaaatgcgtcgaaatcagttgtaagagccccgatgtcatcaacggctctcccatttctcagaaaatcatttacaaggagaatgaacggtttcagtacaaatgcaatatgggctatgaatatagtgaaagaggagatgccgtgtgtaccgagtcaggctggcggcctctgcccagttgcgaggagaagagttgcgacaatccttacatccccaacggtgactactctccacttaggataaagcataggactggcgatgagatcacgtatcaatgtagaaatggattttatcctgcgactcgcggaaatactgctaaatgcacttctaccgggtggatacccgccccacggtgcactctgaagccttgtgattacccagatatcaagcacggcggcctgtaccacgagaacatgcgacggccgtattttcctgtcgctgtcggcaagtattactcgtattactgcgatgagcacttcgagaccccatccgggtcctactgggatcacatacactgtactcaggatggctggtctcccgccgttccctgtctgcgaaagtgttacttcccatacttagaaaacggatacaaccaaaaccacggccggaaatttgtacagggtaaatccattgatgttgcctgtcacccaggatacgccctgcctaaggcacaaaccacagtgacgtgcatggaaaatggctggtcacctacccccagatgcattagagtcatcttccagttgtag

SEQ ID NO: 26088 - DNA, 1350 bp, Artificial Sequence
  derived and/or modified sequence
atgcggctgctggccaagatcatctgcctgatgctgtgggccatctgcgtagcagaggactgcaatgagcttcccccgcggcgtaacacagagatactaactggatcatggagcgatcagacatacccggaaggcacccaggcgatctataagtgccgccccgggtaccggtctctgggaaatgtgatcatggtgtgccggaagggggagtgggtcgctctcaaccctctgcgaaagtgccaaaaaagaccgtgcggacatccaggcgatactccatttgggacctttactctgacggggggtaatgtgtttgaatatggggtgaaggcagtgtacacctgcaacgagggttatcagctgctgggtgaaatcaattatcgtgagtgtgacaccgatggctggacaaatgatatccccatctgtgaggtggtgaagtgtttacctgttaccgcccccgagaacgggaagatcgtcagctccgctatggagccagatagggagtaccattttggtcaggcagtcaggttcgtttgcaacagcgggtacaagatcgagggcgatgaagaaatgcactgcagtgacgacggcttttggagcaaagagaagccaaaatgtgttgagatctcttgcaagagtcccgatgttatcaatggcagcccaatcagccaaaaaatcatctacaaagagaacgagcggttccaatacaagtgtaacatggggtatgagtacagtgaacgcggtgacgccgtgtgcactgaatccggctggaggcccctgccaagctgcgaggagaagagttgtgacaacccttatattccaaatggggactactcacccctgcggatcaagcataggacaggtgacgaaatcacttaccagtgccggaacggcttttaccctgccacacggggaaacactgccaaatgcacgagcacaggttggatacccgcccccaggtgcaccttaaagccatgtgattatcctgatataaagcatggcgggctctaccacgagaatatgcgccggccatattttccagtagccgtgggcaagtattattcatattactgcgacgaacatttcgagaccccaagcggttcgtattgggaccatatccactgtacacaggatggctggtccccggctgtcccatgtcttaggaaatgttacttcccatatctggaaaacggctacaaccaaaatcacggcagaaagttcgtgcaaggaaagtctatcgacgtggcctgtcatcccggatacgctttacccaaagcacaaaccactgtcacctgcatggaaaacgggtggtcacccaccccacgttgcatcagggtgtcttttaccctgtag

SEQ ID NO: 26089 - DNA, 1350 bp, Artificial Sequence
  derived and/or modified sequence
atgcgactcctggcaaagatcatctgcttaatgctctgggccatctgtgtcgccgaggactgtaatgaacttccacccagaaggaatacagaaatcctgactggctcctggagcgatcaaacctatcccgaaggtactcaggctatctataagtgtaggcctggctaccgatccctcggaaatgtcattatggtgtgccgaaagggcgagtgggtggctctaaacccactgcggaaatgtcaaaaacgtccgtgtggccacccgggtgatactcctttcgggacattcacactaaccggcggtaacgtgttcgagtatggcgtcaaagccgtgtacacttgcaatgagggctatcagctcctaggcgagataaattatcgcgagtgcgacactgatggctggactaatgatatcccaatttgcgaagtggtgaaatgtctgccagtgacagcccctgaaaacggcaaaatagtgtccagtgctatggagcctgacagagaatatcatttcggacaggcggtccgtttcgtgtgtaatagcggctataagattgagggcgatgaagaaatgcactgttccgatgatggcttctggtctaaggagaagcctaagtgcgtcgaaatttcctgtaagtcccccgacgtgatcaacggtagtcccatcagccaaaaaattatatataaggagaatgaacgtttccagtacaagtgcaatatgggttatgaatacagcgaacgcggagacgccgtgtgtacagaaagtggttggagaccactgcctagttgtgaggagaagtcatgcgataacccgtacattccaaacggggactactccccactgagaatcaagcatagaaccggtgatgagatcacctatcagtgcagaaacggcttttatcctgctacacgcggaaacacagctaagtgtacatcaaccggatggattccggcaccacggtgcaccttgaaaccctgcgactatcctgatatcaagcacgggggtctctatcacgaaaacatgagacggccatatttcccagtggcagtgggaaaatactattcctactactgtgacgaacactttgagacacctagcggcagctactgggatcatattcactgcacccaggacggctggagtccggctgttccgtgcttgcggaagtgctacttcccttatttggagaacggatataatcagaatcatggccgaaaatttgttcagggtaagagcattgacgtggcctgccatcccggttatgccctgcccaaggcccaaactaccgtgacgtgtatggagaatgggtggtcaccaacccctcggtgtatcagagtgattttccagttgtag

SEQ ID NO: 26090 - DNA, 1350 bp, Artificial Sequence
  derived and/or modified sequence
atgagactcttagctaagataatctgtctgatgctgtgggctatttgcgttgcggaggattgtaatgaactccccccacgcagaaacacggaaattctcactggctcctggtcagatcagacttacccagaagggacccaagccatctacaagtgccggcctggctatcggagcttgggcaatgttatcatggtgtgtagaaagggagaatgggtagcgctgaatccacttagaaagtgtcagaaacgtccctgcggccatccaggcgatacaccctttggaaccttcacactcacaggcggtaatgttttcgagtatggagtgaaggccgtctatacttgcaatgagggctatcagctgctgggggagatcaattacagagagtgtgacacagacggctggaccaatgatatccctatatgcgaggttgtgaaatgcttgccagtcactgccccagaaaacgggaagattgtctcctctgccatggagcccgaccgggaataccacttcggccaagccgtgcggtttgtgtgcaattcaggctataagatcgaaggggatgaggaaatgcactgctccgacgatggattctggtctaaggaaaagcccaaatgtgtagaaatcagctgtaaatctccagatgtgatcaatggatccccaatctcccaaaagattatctataaggagaacgaacggtttcaatacaagtgcaatatgggatatgaatacagcgagcggggagatgcagtgtgcaccgaatcaggctggagaccccttccatcatgtgaggagaagtcgtgtgataacccctacatccctaatggggattacagtcctcttcgtataaaacaccggactggcgatgagatcacgtaccagtgcagaaacggattctaccccgcaaccagggggaatacggctaaatgtacatcgacgggatggatacctgcaccacgatgcactctgaagccctgcgattaccctgatattaaacacggaggtctgtaccacgaaaatatgagacgaccgtatttccctgtcgctgtcgggaagtactacagctattactgcgacgaacactttgagacaccgtcaggcagctattgggatcatatccattgcacccaggacggctggagtccagccgttccttgtctcagaaaatgctatttcccttacctcgagaatgggtataaccagaaccacggacgtaaattcgtacagggtaagtcgattgacgtggcttgtcatccaggctacgccttgcctaaggcgcaaacgacggtgacatgcatggaaaacggatggtcacctacgcctaggtgcatccgcgtatcttttactctatag

SEQ ID NO: 26091 - DNA, 1350 bp, Artificial Sequence
  derived and/or modified sequence
atgcgcctcctcgcaaagatcatctgcctgatgctctgggccatctgtgtggcggaagactgcaatgaacttcccccaagaaggaacaccgagatcttgacgggctcatggagtgatcagacataccctgaaggaacccaggctatttacaagtgtagacctggctatcggagtcttggcaacgtgatcatggtgtgcagaaaaggggaatgggtggctctgaaccctctaagaaagtgccagaaaaggccctgcggtcatcctggggatacaccattcggaacgtttacacttacaggaggtaacgtgtttgaatacggggtcaaagccgtctacacctgcaacgaaggttaccagcttctgggagagatcaattaccgcgaatgcgacaccgacggatggactaatgacatcccgatctgcgaggtagtcaagtgtcttcctgtaactgcaccggagaatggaaagattgtgtcttcagcaatggaacccgaccgggaataccatttcggccaggcagtgcggttcgtctgcaactccggatacaaaattgagggtgacgaggagatgcattgctcagacgacggtttttggagcaaagaaaagccaaagtgcgtggaaatttcctgtaaaagtcctgatgtgattaatgggagtcctatttcccaaaaaatcatctataaagaaaatgagcggttccagtacaaatgcaatatggggtacgagtatagtgaaagaggcgatgccgtgtgtacagagtcaggctggagacccctgccctcatgtgaagagaaaagctgcgataacccttatatacctaacggtgactactccccccttcgcatcaagcatcgcacaggtgacgaaatcacttatcaatgccgcaatgggttctatccagctacgcgggggaataccgcaaagtgtacatctactggctggatacccgcaccacgatgcaccctgaagccctgcgactatcctgacataaagcatggtggcctatatcacgagaacatgagaaggccctatttccccgttgcggtcgggaaatattatagttattactgtgatgaacactttgagacaccaagcggctcctattgggatcacatccattgcacccaagatggttggagtccagccgtgccctgcctgaggaaatgttacttcccatatctggaaaatgggtacaatcagaaccacgggcgtaaatttgttcagggaaaatctatcgacgtggcttgtcacccgggatacgccctcccgaaagcacagacaacagtgacctgcatggaaaacggatggtctcctactccacgctgcatcagggtaatcttccagctgtag

SEQ ID NO: 26092 - DNA, 1350 bp, Artificial Sequence
  derived and/or modified sequence
atgcggctactggccaagatcatctgcctaatgttgtgggccatctgcgtggccgaggattgcaatgaactgccgcctcggaggaataccgagattctgaccggatcttggagtgaccagacataccccgaaggcacccaagctatctacaaatgcaggcccggatatcgttctcttggtaatgttatcatggtatgcagaaaaggcgagtgggtggcacttaatcctcttagaaagtgccaaaaacggccttgcgggcacccaggcgacaccccttttgggacttttaccctcaccggtggaaatgtgttcgaatatggcgtgaaggctgtgtacacatgtaacgagggttaccagttactcggtgaaataaactatcgggaatgtgacactgatgggtggacgaatgatattccaatttgcgaagtggtgaaatgtctaccagtcacagcccctgaaaatggcaaaatagtctcatccgccatggaacctgaccgcgaatatcacttcgggcaggccgtccggttcgtatgcaactccggctacaagattgagggtgacgaagagatgcattgtagtgacgatgggttttggtcaaaggagaagcctaagtgcgtagagatctcctgtaagtctccagacgtcattaatggcagccctatttcacagaagattatttacaaagaaaacgaaagatttcaatacaaatgcaacatgggttacgagtattccgagagaggcgatgcggtgtgcacagaaagcggctggagaccacttccctcatgcgaagagaagagttgcgataatccatacattccaaacggagactattctccgctccggatcaagcaccgtacaggagacgagattacctatcaatgccggaatggattctaccccgctactcgaggtaacacagctaagtgcacgtctaccggctggattcctgccccacgttgcaccttaaaaccttgcgattatcctgatattaaacacggtggcttgtaccacgaaaacatgagacgcccatacttcccagtcgctgttgggaaatactactcttactactgcgatgaacactttgaaaccccctccgggtcttattgggaccatatacattgtacgcaggatggatggtcacccgccgtcccatgcttacgaaaatgttacttcccctatctcgaaaatggttataaccagaatcacggtagaaaatttgtacagggaaaatcaattgacgtagcatgccatcccggctacgctctgcctaaggcccagacgaccgtgacctgcatggagaatggatggtcgcccacgcctcgttgtatcagggttagtttcacactatag

SEQ ID NO: 26093 - DNA, 1350 bp, Artificial Sequence
  derived and/or modified sequence
atgaggcttctcgcaaaaattatctgtctaatgttatgggctatctgcgtagcggaggactgcaatgagctgcccccacgccgaaataccgagatcttgaccggtagttggtctgatcagacttatcctgaaggtacgcaagctatctacaaatgccggccagggtaccgcagcctgggcaacgtcatcatggtttgtagaaagggcgaatgggtggctctgaacccacttaggaagtgtcaaaagcgtccatgcggtcacccaggggatacaccatttggaacctttacccttactggtgggaacgtgttcgagtacggagtaaaggcagtttacacctgtaacgaaggttatcaactactaggggaaattaattatagggaatgcgacacggatggttggaccaatgatattcccatctgcgaggtcgtcaaatgccttcctgttacagcacccgagaacggaaaaattgtgtcctctgccatggagccagatagagagtatcacttcggtcaagcggtaaggttcgtttgcaattcagggtataagattgagggagacgaggaaatgcactgctctgatgacgggttctggtccaaagagaagcctaaatgcgtagagatctcttgcaagagccctgacgtcatcaatggttcacccatcagccagaagataatatataaggaaaacgaaaggttccaatataagtgcaatatgggttacgaatatagtgagagaggcgatgctgtgtgtactgaaagtggttggcgtccactaccatcctgcgaagagaagtcttgcgataacccctatatacctaacggagactattctcctctacggattaaacatagaaccggagatgaaattacttaccagtgtcggaatggattctacccggcaacaaggggtaataccgcaaaatgcacttcaaccggctggatccccgcacctagatgcacactgaagccctgtgattacccagacattaagcatggaggactttatcatgaaaatatgagacggccctatttccccgtggcagtcggcaaatactacagctattactgcgatgaacactttgagacgccaagcggatcttattgggatcatatccactgcacacaagacggatggagtccagccgtcccttgcctgcgtaaatgttatttcccctacctcgagaatggctacaaccagaatcatggcagaaaattcgtccaaggtaaatcaatcgatgtggcctgccatccaggatatgccctccctaaagctcaaactactgttacatgtatggaaaatggatggagccccacacccaggtgcatccgagtgatctttcagctgtag

SEQ ID NO: 26094 - DNA, 1350 bp, Artificial Sequence
  derived and/or modified sequence
atgcggctgctagctaaaattatatgcctgatgttgtgggctatctgcgtggcggaagactgcaacgagcttcctcccagacgtaatacagagattttaacgggttcctggagtgatcaaacatatccagaaggaacacaagcaatttataagtgccgtccaggctatagatcattaggtaatgtcattatggtgtgcagaaagggagaatgggtcgccctgaatcctctgcgcaaatgtcagaaacgcccttgcggccatcccggagatacaccttttggcacatttaccctcaccggggggaatgtgttcgaatatggtgtgaaggctgtatatacctgtaacgagggttaccagttgctgggagagattaactaccgtgaatgcgatacagatggatggactaacgacattcccatatgcgaagttgtcaaatgcctgcccgttacagccccagaaaacggaaaaatcgtctcaagcgcaatggagccagacagggaataccactttggccaggcggtcaggttcgtgtgcaattctggatacaaaatcgagggcgatgaggagatgcattgtagcgatgatggattttggtcgaaagagaagccaaagtgtgtggaaatctcatgtaaaagtcctgacgtgattaacggcagtcctatttcccagaagataatctacaaggaaaatgaaagatttcagtacaaatgtaacatgggctacgagtactctgagagaggcgacgccgtgtgtacagagtcaggctggaggccgttaccgtcctgcgaagagaagtcctgtgataacccctatattcccaacggcgactacagccccctaaggattaaacatagaacaggcgacgagatcacctaccagtgccggaatggattctaccctgctactcgaggtaacacagctaagtgcacgtctaccggctggattcctgccccacgttgcaccttaaaaccttgcgattatcctgatattaaacacggtggcttgtaccacgaaaacatgagacgcccatacttcccagtcgctgttgggaaatactactcttactactgcgatgaacactttgaaaccccctccgggtcttattgggaccatatacattgtacgcaggatggatggtcacccgccgtcccatgcttacgaaaatgttacttcccctatctcgaaaatggttataaccagaatcatggccgcaaattcgttcagggtaagagtattgacgtggcatgtcacccaggttacgcactccccaaggcgcagacaaccgtcacttgcatggaaaacggatggtcaccaacgccgagatgcattcgagttagttttacactttag

SEQ ID NO: 26095 - RNA, 1350 nt, Artificial Sequence
  derived and/or modified sequence
augcgccuccucgcaaagaucaucugccugaugcucugggccaucuguguggcggaagacugcaaugaacuucccccaagaaggaacaccgagaucuugacgggcucauggagugaucagacauacccugaaggaacccaggcuauuuacaaguguagaccuggcuaucggagucuuggcaacgugaucauggugugcagaaaaggggaauggguggcucugaacccucuaagaaagugccagaaaaggcccugcggucauccuggggauacaccauucggaacguuuacacuuacaggagguaacguguuugaauacggggucaaagccgucuacaccugcaacgaagguuaccagcuucugggagagaucaauuaccgcgaaugcgacaccgacggauggacuaaugacaucccgaucugcgagguagucaagugucuuccuguaacugcaccggagaauggaaagauugugucuucagcaauggaacccgaccgggaauaccauuucggccaggcagugcgguucgucugcaacuccggauacaaaauugagggugacgaggagaugcauugcucagacgacgguuuuuggagcaaagaaaagccaaagugcguggaaauuuccuguaaaaguccugaugugauuaaugggaguccuauuucccaaaaaaucaucuauaaagaaaaugagcgguuccaguacaaaugcaauaugggguacgaguauagugaaagaggcgaugccguguguacagagucaggcuggagaccccugcccucaugugaagagaaaagcugcgauaacccuuauauaccuaacggugacuacuccccccuucgcaucaagcaucgcacaggugacgaaaucacuuaucaaugccgcaauggguucuauccagcuacgcgggggaauaccgcaaaguguacaucuacuggcuggauacccgcaccacgaugcacccugaagcccugcgacuauccugacauaaagcaugguggccuauaucacgagaacaugagaaggcccuauuuccccguugcggucgggaaauauuauaguuauuacugugaugaacacuuugagacaccaagcggcuccuauugggaucacauccauugcacccaagaugguuggaguccagccgugcccugccugaggaaauguuacuucccauaucuggaaaauggguacaaucagaaccacgggcguaaauuuguucagggaaaaucuaucgacguggcuugucacccgggauacgcccucccgaaagcacagacaacagugaccugcauggaaaacggauggucuccuacuccacgcugcaucaggguaaucuuccagcuguag

SEQ ID NO: 26096 - RNA, 1350 nt, Artificial Sequence
  derived and/or modified sequence
augcggcuacuggccaagaucaucugccuaauguugugggccaucugcguggccgaggauugcaaugaacugccgccucggaggaauaccgagauucugaccggaucuuggagugaccagacauaccccgaaggcacccaagcuaucuacaaaugcaggcccggauaucguucucuugguaauguuaucaugguaugcagaaaaggcgaguggguggcacuuaauccucuuagaaagugccaaaaacggccuugcgggcacccaggcgacaccccuuuugggacuuuuacccucaccgguggaaauguguucgaauauggcgugaaggcuguguacacauguaacgaggguuaccaguuacucggugaaauaaacuaucgggaaugugacacugauggguggacgaaugauauuccaauuugcgaaguggugaaaugucuaccagucacagccccugaaaauggcaaaauagucucauccgccauggaaccugaccgcgaauaucacuucgggcaggccguccgguucguaugcaacuccggcuacaagauugagggugacgaagagaugcauuguagugacgauggguuuuggucaaaggagaagccuaagugcguagagaucuccuguaagucuccagacgucauuaauggcagcccuauuucacagaagauuauuuacaaagaaaacgaaagauuucaauacaaaugcaacauggguuacgaguauuccgagagaggcgaugcggugugcacagaaagcggcuggagaccacuucccucaugcgaagagaagaguugcgauaauccauacauuccaaacggagacuauucuccgcuccggaucaagcaccguacaggagacgagauuaccuaucaaugccggaauggauucuaccccgcuacucgagguaacacagcuaagugcacgucuaccggcuggauuccugccccacguugcaccuuaaaaccuugcgauuauccugauauuaaacacgguggcuuguaccacgaaaacaugagacgcccauacuucccagucgcuguugggaaauacuacucuuacuacugcgaugaacacuuugaaacccccuccgggucuuauugggaccauauacauuguacgcaggauggauggucacccgccgucccaugcuuacgaaaauguuacuuccccuaucucgaaaaugguuauaaccagaaucacgguagaaaauuuguacagggaaaaucaauugacguagcaugccaucccggcuacgcucugccuaaggcccagacgaccgugaccugcauggagaauggauggucgcccacgccucguuguaucaggguuaguuucacacuauag

SEQ ID NO: 26097 - RNA, 1350 nt, Artificial Sequence
  derived and/or modified sequence
augaggcuucucgcaaaaauuaucugucuaauguuaugggcuaucugcguagcggaggacugcaaugagcugcccccacgccgaaauaccgagaucuugaccgguaguuggucugaucagacuuauccugaagguacgcaagcuaucuacaaaugccggccaggguaccgcagccugggcaacgucaucaugguuuguagaaagggcgaauggguggcucugaacccacuuaggaagugucaaaagcguccaugcggucacccaggggauacaccauuuggaaccuuuacccuuacuggugggaacguguucgaguacggaguaaaggcaguuuacaccuguaacgaagguuaucaacuacuaggggaaauuaauuauagggaaugcgacacggaugguuggaccaaugauauucccaucugcgaggucgucaaaugccuuccuguuacagcacccgagaacggaaaaauuguguccucugccauggagccagauagagaguaucacuucggucaagcgguaagguucguuugcaauucaggguauaagauugagggagacgaggaaaugcacugcucugaugacggguucugguccaaagagaagccuaaaugcguagagaucucuugcaagagcccugacgucaucaaugguucacccaucagccagaagauaauauauaaggaaaacgaaagguuccaauauaagugcaauauggguuacgaauauagugagagaggcgaugcuguguguacugaaagugguuggcguccacuaccauccugcgaagagaagucuugcgauaaccccuauauaccuaacggagacuauucuccucuacggauuaaacauagaaccggagaugaaauuacuuaccagugucggaauggauucuacccggcaacaagggguaauaccgcaaaaugcacuucaaccggcuggauccccgcaccuagaugcacacugaagcccugugauuacccagacauuaagcauggaggacuuuaucaugaaaauaugagacggcccuauuuccccguggcagucggcaaauacuacagcuauuacugcgaugaacacuuugagacgccaagcggaucuuauugggaucauauccacugcacacaagacggauggaguccagccgucccuugccugcguaaauguuauuuccccuaccucgagaauggcuacaaccagaaucauggcagaaaauucguccaagguaaaucaaucgauguggccugccauccaggauaugcccucccuaaagcucaaacuacuguuacauguauggaaaauggauggagccccacacccaggugcauccgagugaucuuucagcuguag

SEQ ID NO: 26098 - RNA, 1350 nt, Artificial Sequence
  derived and/or modified sequence
augcggcugcuagcuaaaauuauaugccugauguugugggcuaucugcguggcggaagacugcaacgagcuuccucccagacguaauacagagauuuuaacggguuccuggagugaucaaacauauccagaaggaacacaagcaauuuauaagugccguccaggcuauagaucauuagguaaugucauuauggugugcagaaagggagaaugggucgcccugaauccucugcgcaaaugucagaaacgcccuugcggccaucccggagauacaccuuuuggcacauuuacccucaccggggggaauguguucgaauauggugugaaggcuguauauaccuguaacgaggguuaccaguugcugggagagauuaacuaccgugaaugcgauacagauggauggacuaacgacauucccauaugcgaaguugucaaaugccugcccguuacagccccagaaaacggaaaaaucgucucaagcgcaauggagccagacagggaauaccacuuuggccaggcggucagguucgugugcaauucuggauacaaaaucgagggcgaugaggagaugcauuguagcgaugauggauuuuggucgaaagagaagccaaaguguguggaaaucucauguaaaaguccugacgugauuaacggcaguccuauuucccagaagauaaucuacaaggaaaaugaaagauuucaguacaaauguaacaugggcuacgaguacucugagagaggcgacgccguguguacagagucaggcuggaggccguuaccguccugcgaagagaaguccugugauaaccccuauauucccaacggcgacuacagcccccuaaggauuaaacauagaacaggcgacgagaucaccuaccagugccggaauggauucuacccugcuacucgagguaacacagcuaagugcacgucuaccggcuggauuccugccccacguugcaccuuaaaaccuugcgauuauccugauauuaaacacgguggcuuguaccacgaaaacaugagacgcccauacuucccagucgcuguugggaaauacuacucuuacuacugcgaugaacacuuugaaacccccuccgggucuuauugggaccauauacauuguacgcaggauggauggucacccgccgucccaugcuuacgaaaauguuacuuccccuaucucgaaaaugguuauaaccagaaucauggccgcaaauucguucaggguaagaguauugacguggcaugucacccagguuacgcacuccccaaggcgcagacaaccgucacuugcauggaaaacggauggucaccaacgccgagaugcauucgaguuaguuuuacacuuuag

SEQ ID NO: 26099 - protein, 719 aa, Artificial Sequence
  derived and/or modified sequence
MWNLLHETDSAVATARRPRWLCAGALVLAGGFFLLGFLFGWFIKSSNEATNITPKHNMKAFLDELKAENIKKFLYNFTQIPHLAGTEQNFQLAKQIQSQWKEFGLDSVELAHYDVLLSYPNKTHPNYISIINEDGNEIFNTSLFEPPPPGYENVSDIVPPFSAFSPQGMPEGDLVYVNYARTEDFFKLERDMKINCSGKIVIARYGKVFRGNKVKNAQLAGAKGVILYSDPADYFAPGVKSYPDGWNLPGGGVQRGNILNLNGAGDPLTPGYPANEYAYRRGIAEAVGLPSIPVHPIGYYDAQKLLEKMGGSAPPDSSWRGSLKVPYNVGPGFTGNFSTQKVKMHIHSTNEVTRIYNVIGTLRGAVEPDRYVILGGHRDSWVFGGIDPQSGAAVVHEIVRSFGTLKKEGWRPRRTILFASWDAEEFGLLGSTEWAEENSRLLQERGVAYINADSSIEGNYTLRVDCTPLMYSLVHNLTKELKSPDEGFEGKSLYESWTKKSPSPEFSGMPRISKLGSGNDFEVFFQRLGIASGRARYTKNWETNKFSGYPLYHSVYETYELVEKFYDPMFKYHLTVAQVRGGMVFELANSIVLPFDCRDYAVVLRKYADKIYSISMKHPQEMKTYSVSFDSLFSAVKNFTEIASKFSERLQDFDKSKHVIYAPSSHNKYAGESFPGIYDALFDIESKVDPSKAWGEVKRQIYVAAFTVQAAAETLSEVA

SEQ ID NO: 26100 - protein, 545 aa, Artificial Sequence
  derived and/or modified sequence
MWNLLHETDSAVATARRPRWLCAGALVLAGGFFLLGFLFGWFIKSSNEATNITPKHNMKAFLDELKAENIKKFLYNFTQIPHLAGTEQNFQLAKQIQSQWKEFGLDSVELAHYDVLLSYPNKTHPNYISIINEDGNEIFNTSLFEPPPPGYENVSDIVPPFSAFSPQGMPEGDLVYVNYARTEDFFKLERDMKINCSGKIVIARYGKVFRGNKVKNAQLAGAKGVILYSDPADYFAPGVKSYPDGWNLPGGGVQRGNILNLNGAGDPLTPGYPANEYAYRRGIAEAVGLPSIPVHPIGYYDAQKLLEKMGGSAPPDSSWRGSLKVPYNVGPGFTGNFSTQKVKMHIHSTNEVTRIYNVIGTLRGAVEPDRYVILGGHRDSWVFGGIDPQSGAAVVHEIVRSFGTLKKEDILGWRPRRTILFASWDAEEFGLLGSTEWAEENSRLLQERGVAYINADSSIEGNYTLRVDCTPLMYSLVHNLTKELKSPDEGFEGKSLYESWTKKSPSPEFSGMPRISKLGSGNDFEVFFQRLGIASGRARYTKKKK

SEQ ID NO: 26101 - DNA, 2403 bp, Artificial Sequence
  derived and/or modified sequence
ggctgataagcgaggcattagtgagattgagagagactttaccccgccgtggtggttggagggcgcgcagtagagcagcagcacaggcgcgggtcccgggaggccggctctgctcgcgccgagatgtggaatctccttcacgaaaccgactcggctgtggccaccgcgcgccgcccgcgctggctgtgcgctggggcgctggtgctggcgggtggcttctttctcctcggcttcctcttcgggtggtttataaaatcctccaatgaagctactaacattactccaaagcataatatgaaagcatttttggatgaattgaaagctgagaacatcaagaagttcttatataattttacacagataccacatttagcaggaacagaacaaaactttcagcttgcaaagcaaattcaatcccagtggaaagaatttggcctggattctgttgagctagcacattatgatgtcctgttgtcctacccaaataagactcatcccaactacatctcaataattaatgaagatggaaatgagattttcaacacatcattatttgaaccacctcctccaggatatgaaaatgtttcggatattgtaccacctttcagtgctttctctcctcaaggaatgccagagggcgatctagtgtatgttaactatgcacgaactgaagacttctttaaattggaacgggacatgaaaatcaattgctctgggaaaattgtaattgccagatatgggaaagttttcagaggaaataaggttaaaaatgcccagctggcaggggccaaaggagtcattctctactccgaccctgctgactactttgctcctggggtgaagtcctatccagatggttggaatcttcctggaggtggtgtccagcgtggaaatatcctaaatctgaatggtgcaggagaccctctcacaccaggttacccagcaaatgaatatgcttataggcgtggaattgcagaggctgttggtcttccaagtattcctgttcatccaattggatactatgatgcacagaagctcctagaaaaaatgggtggctcagcaccaccagatagcagctggagaggaagtctcaaagtgccctacaatgttggacctggctttactggaaacttttctacacaaaaagtcaagatgcacatccactctaccaatgaagtgacaagaatttacaatgtgataggtactctcagaggagcagtggaaccagacagatatgtcattctgggaggtcaccgggactcatgggtgtttggtggtattgaccctcagagtggagcagctgttgttcatgaaattgtgaggagctttggaacactgaaaaaggaagggtggagacctagaagaacaattttgtttgcaagctgggatgcagaagaatttggtcttcttggttctactgagtgggcagaggagaattcaagactccttcaagagcgtggcgtggcttatattaatgctgactcatctatagaaggaaactacactctgagagttgattgtacaccgctgatgtacagcttggtacacaacctaacaaaagagctgaaaagccctgatgaaggctttgaaggcaaatctctttatgaaagttggactaaaaaaagtccttccccagagttcagtggcatgcccaggataagcaaattgggatctggaaatgattttgaggtgttcttccaacgacttggaattgcttcaggcagagcacggtatactaaaaattgggaaacaaacaaattcagcggctatccactgtatcacagtgtctatgaaacatatgagttggtggaaaagttttatgatccaatgtttaaatatcacctcactgtggcccaggttcgaggagggatggtgtttgagctagccaattccatagtgctcccttttgattgtcgagattatgctgtagttttaagaaagtatgctgacaaaatctacagtatttctatgaaacatccacaggaaatgaagacatacagtgtatcatttgattcacttttttctgcagtaaagaattttacagaaattgcttccaagttcagtgagagactccaggactttgacaaaagcaagcatgtcatctatgctccaagcagccacaacaagtatgcaggggagtcattcccaggaatttatgatgctctgtttgatattgaaagcaaagtggacccttccaaggcctggggagaagtgaagagacagatttatgttgcagccttcacagtgcaggcagctgcagagactttgagtgaagtagcctaagaggattctttagagaatccgtattgaatttgtgtggtatgtcactcagaaagaatcgtaatgggtatattgataaattttaaaattggtatatttgaaataaagttgaatattatatat

SEQ ID NO: 26102 - DNA, 2160 bp, Artificial Sequence
  derived and/or modified sequence
atgtggaacctcctacacgagactgactcagccgttgccacagctcgccgaccacgctggctgtgtgctggtgctttggtgctggccgggggattcttcctcttgggctttcttttcgggtggtttattaagtcctccaacgaggcaactaacataactccaaaacacaatatgaaagcatttctggacgagctgaaggctgagaatatcaaaaaatttctgtataacttcactcagatcccacacttggccggaacggaacagaacttccagttggcgaagcaaatccagtctcaatggaaggaatttggcctcgacagtgtggagctggcacactatgacgtgctgctgtcttaccctaataaaacccaccccaattacattagcatcattaacgaggatggtaacgaaatttttaataccagcttgttcgaacccccaccaccggggtatgagaatgttagcgacattgttccccccttctcagctttctcccctcaggggatgcctgagggagatttagtgtatgtgaattatgctaggactgaagatttctttaaacttgaaagggacatgaagattaactgcagtgggaaaattgttattgccaggtatggtaaggtcttccgaggcaataaggtcaaaaatgcccagctggccggtgccaaaggagtgatattgtattccgatccggctgattatttcgccccaggagtgaagtcttaccctgatggttggaatttgcccggaggcggtgtacagcggggaaatatcctcaatctgaatggcgcaggcgatccactgacaccaggatatccagccaatgaatacgcctaccgcaggggaattgctgaggctgtcggcctccccagcatacccgtgcatccaatagggtactacgatgcccagaagctgctggagaaaatgggaggcagcgcaccacccgacagctcctggcgaggaagcctgaaggttccctacaacgtgggaccaggcttcacaggaaactttagtacccaaaaggtcaaaatgcacatccacagtacaaacgaggtcacaaggatttacaatgtgattgggactttgcgcggcgcggttgaaccggacaggtatgtgattcttggcggacatagggattcctgggtgttcggcggaattgatcctcagagtggtgctgccgtcgtgcatgaaatagtgagatctttcggtacactgaagaaggagggctggcgcccccgccgaaccattctctttgcatcatgggacgccgaagagttcggactcctgggatcaaccgaatgggctgaggagaactcacgccttctccaggaaaggggcgttgcctatatcaacgctgacagcagtatagaaggcaactatacccttcgggtcgattgtaccccactgatgtatagtcttgttcataacttgaccaaggagctaaaatccccagatgagggatttgaggggaaatctctgtacgagtcatggacaaaaaaatctcccagtccagaattctctggcatgcccagaatcagtaagcttggatccggaaatgatttcgaggtgttcttccagaggctgggcatcgcgtccggccgcgctcgctataccaagaattgggaaacaaacaaattctccgggtaccctttataccatagcgtgtacgagacatacgagcttgtggagaaattttacgacccaatgtttaagtaccacttaacagtggcacaggtgaggggtggaatggtcttcgaattagcaaactccattgtgctcccatttgattgcagggattatgccgtagttctgcggaagtacgctgataagatctatagcattagtatgaaacacccacaggaaatgaagacgtatagcgtttcctttgactcattgttctccgctgtgaagaacttcacagagatagcctccaagtttagcgaacgcctgcaggattttgacaagagcaagcatgtcatttacgctccttcctctcacaacaaatacgccggtgagtcgtttcccgggatctacgacgcgctattcgatattgaatctaaagttgatcccagcaaggcctggggagaggtgaagcggcagatttacgtggccgcattcactgtccaggccgcagccgaaacattaagtgaagtcgcatag

SEQ ID NO: 26103 - DNA, 2160 bp, Artificial Sequence
  derived and/or modified sequence
atgtggaacctgctgcacgagacagacagcgctgtggccacagcccggcggccccgctggctgtgtgccggggccctggtgctggccggcggcttcttcctgctgggcttcctgtttggctggttcatcaagagcagcaatgaggccaccaacatcacccccaagcacaacatgaaggccttcctggatgagctgaaggccgagaacatcaagaagttcctgtacaacttcacccagatcccccacctggccggcacagagcagaacttccagctggccaagcagatccagagccagtggaaggagtttggcctggacagcgtggagctggcccactatgatgtgctgctgagctaccccaacaagacccaccccaactacatcagcatcatcaatgaagatggaaatgagatcttcaacaccagcctgtttgagcccccacctcctggctatgaaaatgtgtctgacatcgtgccccccttcagcgccttcagcccccagggcatgcctgagggggacctggtgtatgtgaactatgccaggacagaggacttcttcaagctggagcgggacatgaagatcaactgcagcggcaagatcgtcatcgcccgctatggcaaggtgttccggggcaacaaggtgaagaatgcccagctggccggggccaagggcgtcatcctgtacagcgaccctgctgactactttgcccctggggtgaagagctacccagatggctggaacctgcccggcggcggcgtgcagaggggcaacatcctgaacctgaatggagctggggaccccctgaccccaggctacccagccaatgaatatgcctaccgccggggcattgctgaggccgtgggcctgcccagcatccctgtgcaccccatcggctactatgatgcccagaagctgctggagaagatgggcggcagcgcccccccagacagctcctggaggggcagcctgaaggtgccctacaacgtgggccctggcttcaccggcaacttcagcacccagaaggtgaagatgcacatccacagcaccaatgaggtgacccgcatctacaacgtgattggcaccctgcggggagctgtggagccagacagatatgtgatcctgggcggccaccgggacagctgggtgtttggaggcatcgacccccagagcggggctgctgtggtgcatgagatcgtgcgcagctttggcaccctgaagaaggagggctggaggcccaggaggaccatcctgtttgcctcctgggatgctgaggagtttggcctgctgggcagcacagagtgggccgaggagaacagccggctgctgcaggagcggggcgtggcctacatcaatgctgacagcagcattgagggcaactacaccctgcgggtggactgcacccccctgatgtacagcctggtgcacaacctgaccaaggagctgaagagcccagatgagggctttgagggcaagagcctgtatgagagctggaccaagaagagccccagccctgagttcagcggcatgccccgcatcagcaagctgggcagcggaaatgactttgaggtgttcttccagaggctgggcatcgccagcggccgggcccgctacaccaagaactgggagaccaacaagttcagcggctaccccctgtaccacagcgtgtatgagacctatgagctggtggagaagttctatgaccccatgttcaagtaccacctgactgtggcccaggtgcggggcggcatggtgtttgagctggccaacagcatcgtgctgccctttgactgccgggactatgctgtggtgctgaggaaatatgctgacaagatctacagcatctccatgaagcacccccaggagatgaagacctacagcgtgtcctttgacagcctcttctctgctgtgaagaacttcacagagatcgccagcaagttcagcgagcggctgcaggactttgacaagagcaagcacgtgatctatgcccccagcagccacaacaagtatgctggggagagcttccctggcatctatgatgccctgtttgacatcgagagcaaggtggaccccagcaaggcctggggcgaggtgaagaggcagatctacgtggccgccttcaccgtgcaggccgctgctgagaccctgtctgaggtggcctag

SEQ ID NO: 26104 - DNA, 2160 bp, Artificial Sequence
  derived and/or modified sequence
atgtggaacctgctgcacgagaccgacagcgccgtggccaccgccaggcgtccacgttggctgtgcgcaggagccctcgtgctggccggtgggttctttttacttggcttcctcttcggttggttcatcaagagtagcaacgaggctactaacatcactccgaaacataatatgaaggcctttttggacgaactaaaggccgagaatatcaagaagtttctctacaactttacacaaatcccgcacctggccgggacagagcagaacttccagctggcaaaacagatccagtcacagtggaaagaattcggtctggactctgtagagctggcccattacgacgtgctgctcagctacccaaacaagacacaccccaactacattagcattatcaatgaagatggtaacgagatctttaataccagcctgtttgagccacctccaccagggtacgagaacgtaagtgacattgtacctcctttctctgcgttctctcctcagggaatgccagagggagacctggtctacgtgaattatgctcgcaccgaagatttctttaaactggaacgcgacatgaagattaactgttcgggcaaaatagtcatcgcaaggtatgggaaagtcttccgcggaaataaggtcaagaacgcccagctcgccggggctaagggtgttatcctctatagtgacccagccgattactttgcacctggggtgaagtcctatcccgacggctggaacttgccggggggtggggtgcaacggggaaacattctgaacttgaacggtgcaggagacccactcacccccgggtacccagccaacgaatacgcctaccggcgagggatcgctgaggctgtgggcctgccatctatcccagtgcaccctataggatattatgatgcacagaagctcctcgagaaaatgggtggcagcgcccctccagattcctcatggcggggaagtttaaaggtcccctataatgtggggcctggatttacgggaaacttctccacacagaaggtgaaaatgcacatccactctaccaatgaggttacccgtatttataatgtgatcggcaccctgcggggtgcggttgagcccgatcgctatgtcatccttggaggacaccgcgactcttgggtgtttggaggaatcgatccacagtcaggagcggccgttgtccacgaaatcgtgcgtagcttcggcaccctgaaaaaggagggctggagaccgcggcgcacaatcctatttgctagctgggatgcagaggaattcggcctgctgggcagcacagaatgggctgaagaaaactcacgcttgctacaagaacggggtgtcgcttatatcaatgcagatagcagtattgaaggtaattatactctcagggtggattgtacaccgctaatgtatagccttgtgcacaatttaactaaagaactcaagagccctgacgaaggatttgaggggaagtctttgtacgagagctggactaagaaatccccctcccctgaattttcaggaatgccccggatcagcaaattaggaagtggcaacgacttcgaggttttctttcagaggctcggtattgcatctgggagagctaggtacaccaaaaactgggagacgaacaaattttcaggctacccactgtatcactctgtctatgagacgtatgagctcgtggagaagttctatgatccaatgtttaagtaccacctgacagtcgcgcaggtgcgcggcggcatggtttttgaactggccaactctattgtactgccgtttgactgtcgtgactacgcagtggtcctcaggaaatatgccgataagatctacagcatctcaatgaaacacccacaagaaatgaagacctactccgtgagtttcgatagtctgttttctgcagtgaagaacttcacggagattgccagtaagttttccgagagactccaggactttgacaaatctaagcacgtgatatacgctccatcctcccacaataaatacgctggggaatcctttccgggcatttacgacgctctgttcgacatcgagtccaaggtagacccgagcaaggcatggggggaagtaaaaagacaaatatatgtggcggcatttacggtgcaggctgcagccgagaccctgagcgaagtagcatag

SEQ ID NO: 26105 - DNA, 2160 bp, Artificial Sequence
  derived and/or modified sequence
atgtggaacctcctgcatgaaaccgatagcgcggtggcgacagctcggaggcccagatggttgtgcgctggcgcattagtgctggccggaggattctttctcttggggtttctattcggatggtttatcaaatcatcaaatgaggctactaacatcacacccaagcataacatgaaagccttccttgacgaactgaaggcggaaaacattaaaaagtttctttataacttcacccagatcccccacttagcgggaactgagcagaatttccaactcgcaaagcaaatccaaagccagtggaaggaattcggactcgattccgttgagttggcgcactacgacgtactgttgtcctatccgaacaaaactcaccccaactacatatccatcatcaacgaagatggtaacgagatcttcaacacatccctcttcgagccccctcctccaggctatgagaatgtgtctgatatcgttccccctttcagtgcctttagcccccaaggaatgccggaaggggacctggtgtacgttaactacgcgagaaccgaggacttcttcaagcttgaacgcgatatgaaaattaattgctccggtaagatagtcatcgcaagatatggcaaggtgtttaggggcaacaaggtgaagaatgcccaactcgccggtgctaaaggcgtaattctatattcagatccagccgattactttgccccaggtgtgaagagctatccggacggatggaatcttccaggcggaggcgttcagcgagggaatatcctgaacctgaatggagctggagatcctctgaccccgggttatcccgctaacgaatatgcttacaggagaggaatcgccgaggccgtcggcttgcctagcatacccgtgcacccaattggctattatgacgcccagaaactacttgagaaaatgggcggatctgctcctccagatagcagctggcgaggatcactcaaggtgccgtataatgtgggaccaggctttaccggcaatttctcaactcagaaggttaaaatgcacatccatagcacaaacgaagttaccagaatttacaatgtgattggcaccttaagaggggcagtcgaaccagaccgatatgtgatcctgggtgggcaccgagatagctgggttttcggcggaattgatcctcagtccggcgcagcggtggtgcatgagatcgtgaggagtttcggcactctgaagaaggaaggctggagacctcgccgtacaatcctgttcgcaagttgggatgctgaggaattcggactcttggggagcacggaatgggccgaagagaactctcggctactgcaagagcgcggagtagcttacataaacgctgattcttctatcgagggcaattacaccctgcgcgtggattgtacccctctgatgtactccctagtgcataatttgacaaaagagttgaaatcccctgacgagggatttgagggcaaatcactctacgaaagttggacaaagaaatcaccctctcccgagttttctggtatgcccaggattagtaaactggggagtggcaacgattttgaggtgttcttccagaggcttggtatcgcttccgggagggcacggtacactaagaactgggaaacaaacaagttctccggctatccgctgtaccatagcgtgtatgagacctatgaactggtggagaagttctacgaccccatgttcaaatatcacctgaccgtggcacaggtccggggaggcatggtgttcgagctggccaactctattgtgctgccatttgattgccgggactacgccgtggtgcttaggaagtacgccgacaagatatattctatatcaatgaagcacccccaggaaatgaagacatatagtgtatcctttgactcacttttttccgctgtgaaaaattttactgagattgcctccaagttttccgagcgtctccaagactttgataaatcaaagcatgtcatatacgccccatcaagtcataacaagtatgctggtgagtcctttccaggtatctacgacgctctgttcgatatcgagagcaaggtagacccaagcaaggcttggggggaagtaaaaagacagatctatgtagctgcctttacagttcaggccgctgctgagaccctcagtgaggtggcgtag

SEQ ID NO: 26106 - DNA, 2160 bp, Artificial Sequence
  derived and/or modified sequence
atgtggaacctgctgcacgagaccgacagcgccgtggccaccgccagaagacccagatggctgtgcgccggcgccctggtgctggccggcggcttcttcctgctgggcttcctgttcggctggttcatcaagagcagcaacgaggccaccaacatcacccccaagcacaacatgaaggccttcctggacgagctgaaggccgagaacatcaagaagttcctgtacaacttcacccagatcccccacctggccggcaccgagcagaacttccagctggccaagcagatccagagccagtggaaggagttcggcctggacagcgtggagctggcccactacgacgtgctgctgagctaccccaacaagacccaccccaactacatcagcatcatcaacgaggacggcaacgagatcttcaacaccagcctgttcgagccccccccccccggctacgagaacgtgagcgacatcgtgccccccttcagcgccttcagcccccagggcatgcccgagggcgacctggtgtacgtgaactacgccagaaccgaggacttcttcaagctggagagagacatgaagatcaactgcagcggcaagatcgtgatcgccagatacggcaaggtgttcagaggcaacaaggtgaagaacgcccagctggccggcgccaagggcgtgatcctgtacagcgaccccgccgactacttcgcccccggcgtgaagagctaccccgacggctggaacctgcccggcggcggcgtgcagagaggcaacatcctgaacctgaacggcgccggcgaccccctgacccccggctaccccgccaacgagtacgcctacagaagaggcatcgccgaggccgtgggcctgcccagcatccccgtgcaccccatcggctactacgacgcccagaagctgctggagaagatgggcggcagcgccccccccgacagcagctggagaggcagcctgaaggtgccctacaacgtgggccccggcttcaccggcaacttcagcacccagaaggtgaagatgcacatccacagcaccaacgaggtgaccagaatctacaacgtgatcggcaccctgagaggcgccgtggagcccgacagatacgtgatcctgggcggccacagagacagctgggtgttcggcggcatcgacccccagagcggcgccgccgtggtgcacgagatcgtgagaagcttcggcaccctgaagaaggagggctggagacccagaagaaccatcctgttcgccagctgggacgccgaggagttcggcctgctgggcagcaccgagtgggccgaggagaacagcagactgctgcaggagagaggcgtggcctacatcaacgccgacagcagcatcgagggcaactacaccctgagagtggactgcacccccctgatgtacagcctggtgcacaacctgaccaaggagctgaagagccccgacgagggcttcgagggcaagagcctgtacgagagctggaccaagaagagccccagccccgagttcagcggcatgcccagaatcagcaagctgggcagcggcaacgacttcgaggtgttcttccagagactgggcatcgccagcggcagagccagatacaccaagaactgggagaccaacaagttcagcggctaccccctgtaccacagcgtgtacgagacctacgagctggtggagaagttctacgaccccatgttcaagtaccacctgaccgtggcccaggtgagaggcggcatggtgttcgagctggccaacagcatcgtgctgcccttcgactgcagagactacgccgtggtgctgagaaagtacgccgacaagatctacagcatcagcatgaagcacccccaggagatgaagacctacagcgtgagcttcgacagcctgttcagcgccgtgaagaacttcaccgagatcgccagcaagttcagcgagagactgcaggacttcgacaagagcaagcacgtgatctacgcccccagcagccacaacaagtacgccggcgagagcttccccggcatctacgacgccctgttcgacatcgagagcaaggtggaccccagcaaggcctggggcgaggtgaagagacagatctacgtggccgccttcaccgtgcaggccgccgccgagaccctgagcgaggtggcctag

SEQ ID NO: 26107 - DNA, 702 bp, Artificial Sequence
  derived and/or modified sequence
atggaagaagcaatcctggtaccttgcgttctgggactcttgcttctgcccatcttggccatgctgatggcattgtgcgtgcactgccatcgtcttcctggatcatacgacagcacgtcctccgatagtctgtatcctaggggaatccagttcaagcgaccccacactgtcgccccttggccaccagcatatcctccggtgactagctacccacccctttctcaaccagacctgctgcccatcccaaggtccccacagcccctgggaggaagccatagaaccccttccagccggagggactctgatggtgcaaattcagtggctagctacgaaaacgaggagccagcctgtgaagatgcagacgaagatgaggacgattatcataatccaggctacctcgtcgtcctccccgatagtaccccagccacttccactgccgcccctagtgcccccgcattaagcacaccagggatcagagactccgcgttctcaatggaaagcatagacgactatgtcaatgtgccagagagcggtgagtcggcagaagccagcctggacggatctagagagtacgtgaacgtgtcccaggaactgcaccctggagcagctaagacggagcctgccgcacttagctcacaggaggcggaagaggtggaggaggaaggagctcctgattacgagaatcttcaagagctgaattag

SEQ ID NO: 26108 - DNA, 702 bp, Artificial Sequence
  derived and/or modified sequence
atggaggaggccatcctggtgccctgtgtgctgggcctgctgctgctgcccatcctggccatgctgatggccctgtgtgtgcactgccaccggctgcccggcagctatgacagcaccagcagtgacagcctgtacccccggggcatccagttcaagaggccccacacagtggccccctggcccccagcctacccacctgtgaccagctacccacccctgagccagcctgacctgctgcccatccccaggagcccccagcccctgggcggcagccacaggacccccagcagccggcgggacagtgatggagccaacagcgtggccagctatgaaaatgaggagcccgcctgtgaagatgctgatgaagatgaagatgactaccacaaccctggctacctggtggtgctgcctgacagcaccccagccaccagcacagctgcccccagcgccccagccctgagcaccccaggcatccgggacagcgccttctccatggagagcattgatgattatgtgaatgtgcctgagagcggggagagcgctgaggccagcctggatggcagccgggagtatgtgaatgtgtcccaggagctgcaccctggggccgccaagacagagcctgctgccctgagcagccaggaggccgaggaggtggaggaggagggcgccccagactatgagaacctgcaggagctgaactag

SEQ ID NO: 26109 - DNA, 702 bp, Artificial Sequence
  derived and/or modified sequence
atggaggaggccatcctggtgccctgcgtgctgggcctgctgctgctgcccatcctcgctatgctgatggctctgtgcgtgcactgtcatcgactacctggctcctatgatagcacctcatctgactcactgtaccctcggggcatccagtttaagcggccccacacggtggccccttggcccccggcttacccacccgtaacatcttacccacctttgtctcaacccgatcttctgcccattccaaggagtccacagccccttggcggcagccacaggacccccagcagtcgcagagatagtgacggcgcgaattccgttgcgagctatgaaaacgaggaacccgcttgtgaggacgcggacgaggatgaggacgactaccataatcccggttatctcgtggtgctgcctgatagtacgccagctaccagcacggcagcaccctctgccccagctttgagtacacccgggattcgcgactcagctttctccatggagtctattgatgattacgttaatgtgcccgagtcgggagaaagcgctgaggcttctctggatggtagccgagagtatgttaacgtctcccaggagctgcacccaggcgccgcaaaaaccgagcccgccgccctcagctcacaggaggctgaggaggtcgaagaagagggtgcaccagactacgaaaacttacaggagttaaattag

SEQ ID NO: 26110 - DNA, 702 bp, Artificial Sequence
  derived and/or modified sequence
atggaagaagctatactggtgccatgcgtgctcgggctgctgctgttacccattctggctatgttgatggctttatgcgtccactgccacaggctgcccggaagttacgacagcacttccagcgactccctgtacccccgaggtatccaattcaagagaccgcacaccgtcgctccatggcctcccgcataccccccagtgacctcttacccgcctttgagtcagcctgacttgttacctattccaagatccccacagcccctgggcggatcacacagaacaccgtcctctagacgcgattctgatggggcaaatagcgtggcctcttatgagaatgaagaacctgcatgcgaggatgctgatgaggatgaggatgattaccataaccccggatatctcgttgtgctgccagatagcacccccgcaactagcacagccgctccatccgcacccgcactctccacacccggaattcgagatagcgccttttccatggagtctattgatgactacgtcaacgttccagagagtggtgagagcgctgaagcgagtctagacggcagcagagaatacgtaaacgtgtcgcaagaactgcaccctggagccgctaaaactgaacccgcagccctgtctagccaggaggccgaggaggtggaggaagaaggcgctcccgattatgaaaatctgcaggagctgaactag

SEQ ID NO: 26111 - DNA, 702 bp, Artificial Sequence
  derived and/or modified sequence
atggaggaggccatcctggtgccctgcgtgctgggcctgctgctgctgcccatcctggccatgctgatggccctgtgcgtgcactgccacagactgcccggcagctacgacagcaccagcagcgacagcctgtaccccagaggcatccagttcaagagaccccacaccgtggccccctggccccccgcctacccccccgtgaccagctacccccccctgagccagcccgacctgctgcccatccccagaagcccccagcccctgggcggcagccacagaacccccagcagcagaagagacagcgacggcgccaacagcgtggccagctacgagaacgaggagcccgcctgcgaggacgccgacgaggacgaggacgactaccacaaccccggctacctggtggtgctgcccgacagcacccccgccaccagcaccgccgcccccagcgcccccgccctgagcacccccggcatcagagacagcgccttcagcatggagagcatcgacgactacgtgaacgtgcccgagagcggcgagagcgccgaggccagcctggacggcagcagagagtacgtgaacgtgagccaggagctgcaccccggcgccgccaagaccgagcccgccgccctgagcagccaggaggccgaggaggtggaggaggagggcgcccccgactacgagaacctgcaggagctgaactag

SEQ ID NO: 26112 - protein, 232 aa, Artificial Sequence
  derived and/or modified sequence
MEEAILVPCVLGLLLLPILAMLMALCVHCHRLPGSYDSTSSDSLYPRGIQFKRPHTVAPWPPAYPPVTSYPPLSQPDLLPIPSPQPLGGSHRTPSSRRDSDGANSVASYENEEPACEDADEDEDDYHNPGYLVVLPDSTPATSTAAPSAPALSTPGIRDSAFSMESIDDYVNVPESGESAEASLDGSREYVNVSQELHPGAAKTEPAALSSQEAEEVEEEGAPDYENLQELN

SEQ ID NO: 26113 - DNA, 699 bp, Artificial Sequence
  derived and/or modified sequence
atggaggaagcgatactcgtaccctgtgtgctcggcctccttctgctgcctatcctcgccatgttgatggcactctgcgttcactgtcacaggttgcctggttcctatgatagtacttcctccgactcactctatccaagaggaattcagttcaaacggccgcacactgttgcgccctggcctcctgcctacccccctgttacttcctaccctccactgtctcagcctgatctgttgccaatcccaagccctcaaccgctgggtgggagccaccggacacccagcagcagacgagactcagacggagcgaactccgttgcctcctatgagaacgaagagcctgcctgcgaggacgccgacgaggacgaggatgactatcacaatcctggctacctagtcgtactgcctgattccacaccagctacttctactgccgccccctcagcacccgctctttctacaccaggtattcgcgacagtgcctttagcatggagtccatcgacgattatgttaatgtgcccgagagcggtgaaagtgctgaggcctccctggatggcagccgggagtatgtcaatgtgtcccaggagctgcaccctggcgccgcaaagacagagccagcagccctaagttcacaagaggctgaagaagtggaggaggagggagcccctgactatgaaaacctccaggaactcaattag

SEQ ID NO: 26114 - DNA, 699 bp, Artificial Sequence
  derived and/or modified sequence
atggaggaggccatcctggtgccctgtgtgctgggcctgctgctgctgcccatcctggccatgctgatggccctgtgtgtgcactgccaccggctgcccggcagctatgacagcaccagcagtgacagcctgtacccccggggcatccagttcaagaggccccacacagtggccccctggcccccagcctacccacctgtgaccagctacccacccctgagccagcctgacctgctgcccatccccagcccccagcccctgggcggcagccacaggacccccagcagcagaagagacagtgatggagccaacagcgtggccagctatgaaaatgaggagcccgcctgtgaagatgctgatgaagatgaagatgactaccacaaccctggctacctggtggtgctgcctgacagcaccccagccaccagcacagctgcccccagcgccccagccctgagcaccccaggcatccgggacagcgccttctccatggagagcattgatgattatgtgaatgtgcctgagagcggggagagcgctgaggccagcctggatggcagccgggagtatgtgaatgtgtcccaggagctgcaccctggagctgccaagacagagcctgctgccctgagcagccaggaggccgaggaggtggaggaggagggcgccccagactatgagaacctgcaggagctgaactag

SEQ ID NO: 26115 - DNA, 699 bp, Artificial Sequence
  derived and/or modified sequence
atggaggaggccatcctggtgccctgcgtgctgggcctgctgctgctgcccatcctcgctatgttaatggcgctctgcgtgcattgccacagactacccggatcctacgactccacgtcttctgactcactctacccccggggcatccagttcaaacgtcctcacacagtcgcgccatggcctcctgcatatcctcccgtgacatcctaccctccgctatctcagccagacctcctcccgattccctctccacagcccctgggggggtctcatcggaccccctcttcaaggcgcgattcagacggcgctaactctgtggcctcatacgagaatgaggaacccgcctgtgaagacgccgatgaagatgaggatgactatcataaccctggatatttggtcgtgcttcctgattctacacctgccacaagtaccgccgcaccaagtgccccggctctgagcaccccagggatcagggactctgcttttagcatggaaagtattgacgattacgtgaatgtgccagaaagtggcgagtcagccgaagcctcccttgatggatctagagagtatgttaatgtgtcccaagagcttcaccccggcgccgccaaaacagagccggctgccctgtcttcgcaggaggctgaggaggtggaggaagaaggggccccggactatgaaaacttacaggagctgaattag

SEQ ID NO: 26116 - DNA, 699 bp, Artificial Sequence
  derived and/or modified sequence
atggaagaagctatactcgtcccttgcgtgctcggcctcctgctgctgccgatactcgccatgcttatggccctgtgcgttcattgtcaccgactccctggatcctatgatagcacatccagtgactcgctgtacccacggggaattcagttcaagagaccccacaccgtcgctccgtggccccctgcctacccacccgttacgtcatacccccctcttagccagcctgatctcctccccatcccaagccctcagcctctggggggatctcatcgcacaccttcaagcaggcgcgactccgatggagcgaacagcgttgctagctacgagaacgaggaacctgcttgtgaggatgccgatgaggatgaagatgattaccataaccccggataccttgtcgtgctgcctgatagtactcccgctacttccacagctgcaccctcagcaccggctctgtcaactcctggaatacgagatagcgccttcagtatggagagtatcgatgattacgtcaatgttcctgaatctggagagagcgcagaggcaagtctcgacggttcgagggagtatgtcaatgttagccaagaacttcaccccggtgctgccaaaaccgaacctgcggcactgagttcacaagaggccgaagaagttgaggaggaaggcgctcccgactatgagaacctccaggaactgaactag

SEQ ID NO: 26117 - DNA, 699 bp, Artificial Sequence
  derived and/or modified sequence
atggaggaggccatcctggtgccctgcgtgctgggcctgctgctgctgcccatcctggccatgctgatggccctgtgcgtgcactgccacagactgcccggcagctacgacagcaccagcagcgacagcctgtaccccagaggcatccagttcaagagaccccacaccgtggccccctggccccccgcctacccccccgtgaccagctacccccccctgagccagcccgacctgctgcccatccccagcccccagcccctgggcggcagccacagaacccccagcagcagaagagacagcgacggcgccaacagcgtggccagctacgagaacgaggagcccgcctgcgaggacgccgacgaggacgaggacgactaccacaaccccggctacctggtggtgctgcccgacagcacccccgccaccagcaccgccgcccccagcgcccccgccctgagcacccccggcatcagagacagcgccttcagcatggagagcatcgacgactacgtgaacgtgcccgagagcggcgagagcgccgaggccagcctggacggcagcagagagtacgtgaacgtgagccaggagctgcaccccggcgccgccaagaccgagcccgccgccctgagcagccaggaggccgaggaggtggaggaggagggcgcccccgactacgagaacctgcaggagctgaactag

SEQ ID NO: 26118 - protein, 233 aa, Artificial Sequence
  derived and/or modified sequence
MEEAILVPCVLGLLLLPILAMLMALCVHCHRLPGSYDSTSSDSLYPRGIQFKRPHTVAPWPPAYPPVTSYPPLSQPDLLPIPRSPQPLGGSHRTPSSRRDSDGANSVASYENEEPACEDADEDEDDYHNPGYLVVLPDSTPATSTAAPSAPALSTPGIRDSAFSMESIDDYVNVPESGESAEASLDGSREYVNVSQELHPGAAKTEPAALSSQEAEEVEEEGAPDYENLQELN

SEQ ID NO: 26119 - protein, 269 aa, Artificial Sequence
  derived and/or modified sequence
MEATAASWQVAVPVLGGASRPLGPRGAASLLRAPLQMEEAILVPCVLGLLLLPILAMLMALCVHCHRLPGSYDSTSSDSLYPRGIQFKRPHTVAPWPPAYPPVTSYPPLSQPDLLPIPRSPQPLGGSHRTPSSRRDSDGANSVASYENEEPACEDADEDEDDYHNPGYLVVLPDSTPATSTAAPSAPALSTPGIRDSAFSMESIDDYVNVPESGESAEASLDGSREYVNVSQELHPGAAKTEPAALSSQEAEEVEEEGAPDYENLQELN

SEQ ID NO: 26120 - DNA, 810 bp, Artificial Sequence
  derived and/or modified sequence
atggaagctaccgctgcgagctggcaggtggcagtacctgtactgggaggggcctcaaggcccctgggcccacggggcgctgcttcactgttgagggcccccttacagatggaagaggccatcctggtgccttgcgtcctcgggttgcttctactacccattttggcgatgctgatggccttgtgcgtacattgtcatcgcctccccgggtcatatgactccacgtcatccgattcattataccccagggggattcaattcaagagaccacacacagtcgccccttggcccccggcgtatcctcccgtcacctcataccccccactgagtcagccagacctcctgcccattccacgctcacctcagcccttagggggttctcacaggacaccaagcagcagaagggattctgatggggcaaattccgtggcctcttacgaaaatgaggaacccgcctgtgaagatgcggatgaagatgaggacgattaccataatccaggctatttagtggttctgcctgactctacacctgctacctccactgcggccccaagcgcacccgccctgtcaaccccgggtataagggattctgccttctctatggagagcatcgatgactacgtcaacgtgcctgaaagtggggagagcgccgaagcgagcctggatgggagccgggaatatgtgaacgtgtcccaggagctacatccgggcgccgcaaagacagagccggccgccctcagcagccaggaggctgaggaggttgaggaggaaggcgccccagattacgagaatttacaggaactcaattag

SEQ ID NO: 26121 - DNA, 810 bp, Artificial Sequence
  derived and/or modified sequence
atggaggccacagctgcctcctggcaggtggccgtgcctgtgctgggcggggccagccggcccctgggccccagaggagctgccagcctgctgcgggcccccctgcagatggaggaggccatcctggtgccctgtgtgctgggcctgctgctgctgcccatcctggccatgctgatggccctgtgtgtgcactgccaccggctgcccggcagctatgacagcaccagcagtgacagcctgtacccccggggcatccagttcaagaggccccacacagtggccccctggcccccagcctacccacctgtgaccagctacccacccctgagccagcctgacctgctgcccatccccaggagcccccagcccctgggcggcagccacaggacccccagcagccggcgggacagtgatggagccaacagcgtggccagctatgaaaatgaggagcccgcctgtgaagatgctgatgaagatgaagatgactaccacaaccctggctacctggtggtgctgcctgacagcaccccagccaccagcacagctgcccccagcgccccagccctgagcaccccaggcatccgggacagcgccttctccatggagagcattgatgattatgtgaatgtgcctgagagcggggagagcgctgaggccagcctggatggcagccgggagtatgtgaatgtgtcccaggagctgcaccctggggccgccaagacagagcctgctgccctgagcagccaggaggccgaggaggtggaggaggagggcgccccagactatgagaacctgcaggagctgaactag

SEQ ID NO: 26122 - DNA, 1648 bp, Artificial Sequence
  derived and/or modified sequence
caggcgggcgggagggcgggcacggagaggcgggcgccgaggaggggcaggtagggctgggacgcaggggtaactggatcccccgacttcagcccaggccctggtctgaccaccctgggagcagggactttccacagtcagctggacgcacactcagcccagtaaaagaggggacccatcccgggagccccggggagggcacagctgcctcctcccgggctcccctgccacctggtgcctacctgccccctgctccctgccgggtccggtcctcaccccatcttcatctggccttgactctgcccttgaggggcctaggggtgcagccagcctgctccgagctcccctgcagatggaggaggccatcctggtcccctgcgtgctggggctcctgctgctgcccatcctggccatgttgatggcactgtgtgtgcactgccacagactgccaggctcctacgacagcacatcctcagatagtttgtatccaaggggcatccagttcaaacggcctcacacggttgccccctggccacctgcctacccacctgtcacctcctacccacccctgagccagccagacctgctccccatcccaagatccccgcagccccttgggggctcccaccggacgccatcttcccggcgggattctgatggtgccaacagtgtggcgagctacgagaacgaggaaccagcctgtgaggatgcggatgaggatgaggacgactatcacaacccaggctacctggtggtgcttcctgacagcaccccggccactagcactgctgccccatcagctcctgcactcagcacccctggcatccgagacagtgccttctccatggagtccattgatgattacgtgaacgttccggagagcggggagagcgcagaagcgtctctggatggcagccgggagtatgtgaatgtgtcccaggaactgcatcctggagcggctaagactgagcctgccgccctgagttcccaggaggcagaggaagtggaggaagagggggctccagattacgagaatctgcaggagctgaactgagggcctgtggaggccgagtctgtcctggaaccaggcttgcctgggacggctgagctgggcagctggaagtggctctggggtcctcacatggcgtcctgcccttgctccagcctgacaacagcctgagaaatccccccgtaacttattatcactttggggttcggcctgtgtcccccgaacgctctgcaccttctgacgcagcctgagaatgacctgccctggccccagccctactctgtgtaatagaataaaggcctgcgtgtgtctgtgttgagcgtgcgtctgtgtgtgcctgtgtgcgagtctgagtcagagatttggagatgtctctgtgtgtttgtgtgtatctgtgggtctccatcctccatgggggctcagccaggtgctgtgacaccccccttctgaatgaagccttctgacctgggctggcactgctgggggtgaggacacattgccccatgagacagtcccagaacacggcagctgctggctgtgacaatggtttcaccatccttagaccaagggatgggacctgatgacctgggaggactctcttagttcttaccttttgtggttctcaataaaacagaactt

SEQ ID NO: 26123 - DNA, 1448 bp, Artificial Sequence
  derived and/or modified sequence
gggcctccctgctcgctgcctccccgggtcctggatatggaggccacggctgccagctggcaggtggctgtccccgtcttggggggggccagcagacccttggggcctaggggtgcagccagcctgctccgagctcccctgcagatggaggaggccatcctggtcccctgcgtgctggggctcctgctgctgcccatcctggccatgttgatggcactgtgtgtgcactgccacagactgccaggctcctacgacagcacatcctcagatagtttgtatccaaggggcatccagttcaaacggcctcacacggttgccccctggccacctgcctacccacctgtcacctcctacccacccctgagccagccagacctgctccccatcccaagatccccgcagccccttgggggctcccaccggacgccatcttcccggcgggattctgatggtgccaacagtgtggcgagctacgagaacgaggaaccagcctgtgaggatgcggatgaggatgaggacgactatcacaacccaggctacctggtggtgcttcctgacagcaccccggccactagcactgctgccccatcagctcctgcactcagcacccctggcatccgagacagtgccttctccatggagtccattgatgattacgtgaacgttccggagagcggggagagcgcagaagcgtctctggatggcagccgggagtatgtgaatgtgtcccaggaactgcatcctggagcggctaagactgagcctgccgccctgagttcccaggaggcagaggaagtggaggaagagggggctccagattacgagaatctgcaggagctgaactgagggcctgtggaggccgagtctgtcctggaaccaggcttgcctgggacggctgagctgggcagctggaagtggctctggggtcctcacatggcgtcctgcccttgctccagcctgacaacagcctgagaaatccccccgtaacttattatcactttggggttcggcctgtgtcccccgaacgctctgcaccttctgacgcagcctgagaatgacctgccctggccccagccctactctgtgtaatagaataaaggcctgcgtgtgtctgtgttgagcgtgcgtctgtgtgtgcctgtgtgcgagtctgagtcagagatttggagatgtctctgtgtgtttgtgtgtatctgtgggtctccatcctccatgggggctcagccaggtgctgtgacaccccccttctgaatgaagccttctgacctgggctggcactgctgggggtgaggacacattgccccatgagacagtcccagaacacggcagctgctggctgtgacaatggtttcaccatccttagaccaagggatgggacctgatgacctgggaggactctcttagttcttaccttttgtggttctcaataaaacagaacttaaaaaatt

SEQ ID NO: 26124 - DNA, 1645 bp, Artificial Sequence
  derived and/or modified sequence
caggcgggcgggagggcgggcacggagaggcgggcgccgaggaggggcaggtagggctgggacgcaggggtaactggatcccccgacttcagcccaggccctggtctgaccaccctgggagcagggactttccacagtcagctggacgcacactcagcccagtaaaagaggggacccatcccgggagccccggggagggcacagctgcctcctcccgggctcccctgccacctggtgcctacctgccccctgctccctgccgggtccggtcctcaccccatcttcatctggccttgactctgcccttgaggggcctaggggtgcagccagcctgctccgagctcccctgcagatggaggaggccatcctggtcccctgcgtgctggggctcctgctgctgcccatcctggccatgttgatggcactgtgtgtgcactgccacagactgccaggctcctacgacagcacatcctcagatagtttgtatccaaggggcatccagttcaaacggcctcacacggttgccccctggccacctgcctacccacctgtcacctcctacccacccctgagccagccagacctgctccccatcccatccccgcagccccttgggggctcccaccggacgccatcttcccggcgggattctgatggtgccaacagtgtggcgagctacgagaacgaggaaccagcctgtgaggatgcggatgaggatgaggacgactatcacaacccaggctacctggtggtgcttcctgacagcaccccggccactagcactgctgccccatcagctcctgcactcagcacccctggcatccgagacagtgccttctccatggagtccattgatgattacgtgaacgttccggagagcggggagagcgcagaagcgtctctggatggcagccgggagtatgtgaatgtgtcccaggaactgcatcctggagcggctaagactgagcctgccgccctgagttcccaggaggcagaggaagtggaggaagagggggctccagattacgagaatctgcaggagctgaactgagggcctgtggaggccgagtctgtcctggaaccaggcttgcctgggacggctgagctgggcagctggaagtggctctggggtcctcacatggcgtcctgcccttgctccagcctgacaacagcctgagaaatccccccgtaacttattatcactttggggttcggcctgtgtcccccgaacgctctgcaccttctgacgcagcctgagaatgacctgccctggccccagccctactctgtgtaatagaataaaggcctgcgtgtgtctgtgttgagcgtgcgtctgtgtgtgcctgtgtgcgagtctgagtcagagatttggagatgtctctgtgtgtttgtgtgtatctgtgggtctccatcctccatgggggctcagccaggtgctgtgacaccccccttctgaatgaagccttctgacctgggctggcactgctgggggtgaggacacattgccccatgagacagtcccagaacacggcagctgctggctgtgacaatggtttcaccatccttagaccaagggatgggacctgatgacctgggaggactctcttagttcttaccttttgtggttctcaataaaacagaactt

SEQ ID NO: 26125 - DNA, 810 bp, Artificial Sequence
  derived and/or modified sequence
atggaggccaccgccgccagctggcaggtggccgtgcccgtgctgggcggggcatcaagacctctggggccacggggtgccgcttcactcctcagggcccccttacagatggaggaagctatcctagtcccttgtgtgcttggtttgctgcttttgcctatattggctatgctcatggcgctgtgtgtgcactgtcaccggctccccgggtcctacgactctactagctctgacagtctgtaccccagggggattcagttcaagcggcctcatacggtggccccctggcccccagcctaccctccagtgacatcttacccgcccctgtctcaaccagacctgctcccaataccccgctccccacagcctttaggcggtagccaccgaactccctcctctcggcgtgactctgacggggccaactcggtggcttcatacgagaacgaggagccagcctgtgaggatgccgacgaggatgaagacgactatcataaccctgggtacctcgtggtcctccctgactctactccagcaactagcaccgccgcaccttccgcccccgctctcagcactcccggcatcagagattcagccttttcaatggagtcaattgacgactacgtaaatgtgccagaatcaggcgaatccgccgaggcctctctggatgggtcgagagagtacgtgaatgtgtctcaggaactgcacccaggggctgcaaagaccgagcctgctgccctgtcctcccaggaggcagaagaagtggaggaggagggagccccggattacgaaaacttacaggagcttaattag

SEQ ID NO: 26126 - DNA, 810 bp, Artificial Sequence
  derived and/or modified sequence
atggaggctaccgctgcgtcctggcaagtggctgtgcctgtcctgggtggtgccagccgccctctgggcccacgaggggctgccagtttgcttagggcaccattgcagatggaagaggccattctggtgccatgtgtcttaggactcctgttgctacctatcctggccatgctgatggccctgtgtgtccactgccaccgcctgcccggatcctacgactcaactagctccgacagtctttacccaagaggtatacaattcaagaggccgcatacggttgcgccatggccaccagcctatccgccagtgacctcataccccccactaagtcagcctgatctgctgcctatcccaagatcgccgcagccgctgggagggtcccacagaactcccagctccaggcgggattcggatggcgctaacagcgtggcatcttatgagaacgaagaacctgcttgcgaggacgctgatgaggacgaggatgactatcataatcctgggtacttggtcgtcttgccagactccacgccggcaacaagcactgccgctccaagtgctcccgctctgagcacacccggaattcgggactcagccttttctatggagagcattgacgactacgttaacgttcctgagtcaggagagtcagcagaagccagtctggacgggtccagggaatacgtgaatgtttcacaggagttgcaccccggagccgctaaaactgagccggctgccctatcctctcaggaagcagaagaggtcgaggaggagggcgctccagactacgaaaacttacaagagctgaactag

SEQ ID NO: 26127 - DNA, 810 bp, Artificial Sequence
  derived and/or modified sequence
atggaggccaccgccgccagctggcaggtggccgtgcccgtgctgggcggcgccagcagacccctgggccccagaggcgccgccagcctgctgagagcccccctgcagatggaggaggccatcctggtgccctgcgtgctgggcctgctgctgctgcccatcctggccatgctgatggccctgtgcgtgcactgccacagactgcccggcagctacgacagcaccagcagcgacagcctgtaccccagaggcatccagttcaagagaccccacaccgtggccccctggccccccgcctacccccccgtgaccagctacccccccctgagccagcccgacctgctgcccatccccagaagcccccagcccctgggcggcagccacagaacccccagcagcagaagagacagcgacggcgccaacagcgtggccagctacgagaacgaggagcccgcctgcgaggacgccgacgaggacgaggacgactaccacaaccccggctacctggtggtgctgcccgacagcacccccgccaccagcaccgccgcccccagcgcccccgccctgagcacccccggcatcagagacagcgccttcagcatggagagcatcgacgactacgtgaacgtgcccgagagcggcgagagcgccgaggccagcctggacggcagcagagagtacgtgaacgtgagccaggagctgcaccccggcgccgccaagaccgagcccgccgccctgagcagccaggaggccgaggaggtggaggaggagggcgcccccgactacgagaacctgcaggagctgaactag

SEQ ID NO: 26128 - protein, 356 aa, Artificial Sequence
  derived and/or modified sequence
MRRFLRPGHDPVRERLKRDLFQFNKTVEHGFPHQPSALGYSPSLRILAIGTRSGAIKLYGAPGVEFMGLHQENNAVTQIHLLPGQCQLVTLLDDNSLHLWSLKVKGGASELQEDESFTLRGPPGAAPSATQITVVLPHSSCELLYLGTESGNVFVVQLPAFRALEDRTISSDAVLQRLPEEARHRRVFEMVEALQEHPRDPNQILIGYSRGLVVIWDLQGSRVLYHFLSSQQLENIWWQRDGRLLVSCHSDGSYCQWPVSSEAQQPEPLRSLVPYGPFPCKAITRILWLTTRQGLPFTIFQGGMPRASYGDRHCISVIHDGQQTAFDFTSRVIGFTVLTEADPAASRRASGVGAQG

SEQ ID NO: 26129 - DNA, 1071 bp, Artificial Sequence
  derived and/or modified sequence
atgagaagattcctgagacccggccacgaccccgtgagagagagactgaagagagacctgttccagttcaacaagaccgtggagcacggcttcccccaccagcccagcgccctgggctacagccccagcctgagaatcctggccatcggcaccagaagcggcgccatcaagctgtacggcgcccccggcgtggagttcatgggcctgcaccaggagaacaacgccgtgacccagatccacctgctgcccggccagtgccagctggtgaccctgctggacgacaacagcctgcacctgtggagcctgaaggtgaagggcggcgccagcgagctgcaggaggacgagagcttcaccctgagaggcccccccggcgccgcccccagcgccacccagatcaccgtggtgctgccccacagcagctgcgagctgctgtacctgggcaccgagagcggcaacgtgttcgtggtgcagctgcccgccttcagagccctggaggacagaaccatcagcagcgacgccgtgctgcagagactgcccgaggaggccagacacagaagagtgttcgagatggtggaggccctgcaggagcaccccagagaccccaaccagatcctgatcggctacagcagaggcctggtggtgatctgggacctgcagggcagcagagtgctgtaccacttcctgagcagccagcagctggagaacatctggtggcagagagacggcagactgctggtgagctgccacagcgacggcagctactgccagtggcccgtgagcagcgaggcccagcagcccgagcccctgagaagcctggtgccctacggccccttcccctgcaaggccatcaccagaatcctgtggctgaccaccagacagggcctgcccttcaccatcttccagggcggcatgcccagagccagctacggcgacagacactgcatcagcgtgatccacgacggccagcagaccgccttcgacttcaccagcagagtgatcggcttcaccgtgctgaccgaggccgaccccgccgccagcagaagagccagcggcgtgggcgcccagggctag

SEQ ID NO: 26130 - DNA, 1071 bp, Artificial Sequence
  derived and/or modified sequence
atgagacgattccttcgacctggccacgatccagttagggagcgactgaagcgggacctgttccagttcaacaagaccgtggaacacggctttccacaccagccatcagcactcggctacagcccatccttgcggatcctcgccattgggacaaggtctggtgcgatcaagttatatggggctcccggcgtggagtttatggggctgcaccaggagaacaatgccgtgacccagatccacctcctcccggggcagtgtcagctagttactctgctggacgacaatagccttcatttgtggagcctaaaggtgaaagggggggcttccgaactgcaagaggatgagagttttaccctgcggggtccaccaggcgcggctcctagtgcaacacagattacagtggtcctcccccatagttcatgtgaattattgtatctcggaaccgagagcggcaacgtgttcgtggtccagctgccagctttccgggctttagaggataggacaattagtagtgatgccgtgctgcagaggctgccagaggaggctagacatcggcgagtttttgagatggtggaagccctacaagaacacccccgcgaccccaatcaaatactcatcggctatagcaggggccttgtagtcatatgggatttacagggtagccgtgttttgtaccacttcttgtcttcccagcaactggagaatatttggtggcaacgcgatggcaggctcctagtaagttgtcattctgatggatcctattgccagtggcccgtcagtagcgaggcccagcagcccgagcccctccggagtttggtgccatatggaccatttccttgtaaggcaataacacgcattctgtggctgacaacaagacagggtttgccatttactattttccagggtgggatgcctcgggccagctatggcgaccgtcattgcatctccgtgatccatgatgggcaacagactgcattcgatttcacatcccgggtgatcgggtttaccgtgttgactgaggccgaccccgctgcttcccgacgggccagcggagtaggagcgcagggctag

SEQ ID NO: 26131 - DNA, 1406 bp, Artificial Sequence
  derived and/or modified sequence
ggaggtgagcaggaaggagacggccgcccagcagcccgtgggcaggcgcggcggagcgagcggggccggcggcgggcgccgagggacgccgaggcctcgggcgggggctggcccggggttccaggtctccagtgggggctgcagactaagcaaaatgaggcggttcctgaggccagggcatgaccctgtgcgggagaggctcaagcgggacctgttccagtttaacaagacggtggagcatggcttcccgcaccagcccagcgccctcggctacagcccgtccctgcgcatcctggccatcggcacccgttctggagccatcaagctctacggagccccaggcgtggagttcatggggctgcaccaggagaacaacgctgtgacgcagatccacctcctgcccggccagtgccagctggtcaccctgctggatgacaacagcctgcacctttggagcctgaaggtcaagggcggggcatcggagctgcaggaggatgagagcttcacactgcgtggacccccaggggctgcccccagtgccacacagatcaccgtggtcctgccacattcctcctgcgagctgctctacctgggcaccgagagtggcaacgtgtttgtggtgcagctgccagcttttcgtgcgctggaggaccggaccatcagctcggacgcggtgctgcagcggttgccagaggaggcccgccaccggcgtgtgttcgagatggtggaggcactgcaggagcaccctcgagaccccaaccagatcctgatcggctacagccgaggcctcgttgtcatctgggacctacagggcagccgcgtgctctaccacttcctcagcagccagcaactggagaacatctggtggcagcgggacggccgcctgctcgtcagctgtcactctgacggcagctactgccagtggcccgtgtccagcgaagcccagcaaccagagcccctccgcagcctcgtgccttacggtccctttccttgcaaagcgattaccagaatcctctggctgaccactaggcaggggttgcccttcaccatcttccagggtggcatgccacgggccagctacggggaccgccactgcatctcagtgatccacgatggccagcagacggccttcgacttcacctcccgtgtcatcggcttcactgtcctcacagaggcagaccctgcagccagtaggagagcttcgggagtgggtgcccagggttaggtgtgggaggcatggggcaggaccatcagtaaagacagggccaggtgcagtggctcctgcctgtaaccccagtgctgtgggaggccaaggtggtaggatcgcttgaacccaggagttcaagtccagcctggacaacgtagggagacccttgtctctacaaaaaataaaaaaattagccagg

SEQ ID NO: 26132 - DNA, 1071 bp, Artificial Sequence
  derived and/or modified sequence
atgaggcgcttcctgcggcccggccatgaccctgtgcgggagcggctgaagagggacctcttccagttcaacaagacagtggagcacggcttcccccaccagcccagcgccctgggctacagccccagcctgcgcatcctggccatcggcaccaggtctggggccatcaagctgtatggagcccctggggtggagttcatgggcctgcaccaggagaacaatgctgtgacccagatccacctgctgcccggccagtgccagctggtgaccctgctggatgacaacagcctgcacctgtggagcctgaaggtgaagggcggggccagcgagctgcaggaggatgagagcttcaccctgcggggccccccaggagctgcccccagcgccacccagatcaccgtggtgctgccccacagcagctgtgagctgctgtacctgggcacagagagcggaaatgtgtttgtggtgcagctgcctgccttccgggccctggaggacaggaccatcagcagtgatgctgtgctgcagaggctgcctgaggaggcccggcacagaagagtgtttgagatggtggaggccctgcaggagcacccccgggaccccaaccagatcctgattggctacagccggggcctggtggtgatctgggacctgcagggcagccgggtgctgtaccacttcctgagcagccagcagctggagaacatctggtggcagagagatggccgcctgctggtgtcctgccacagtgatggcagctactgccagtggcctgtgtcctctgaggcccagcagcctgagcccctgcggagcctggtgccctacggccccttcccctgcaaggccatcacccgcatcctgtggctgaccacccggcagggcctgcccttcaccatcttccagggcggcatgccccgggccagctatggagacagacactgcatcagcgtcatccatgatggccagcagacagcctttgacttcaccagccgggtgattggcttcaccgtgctgacagaagctgaccctgctgccagcagaagagccagcggcgtgggcgcccagggctag

SEQ ID NO: 26133 - DNA, 1071 bp, Artificial Sequence
  derived and/or modified sequence
atgcggcggttcctgcggcccggccacgaccccgtgcgggagcggcttaagcgagatctgtttcagtttaacaagacggtagagcatggctttcctcaccagcccagtgccctcggctacagccctagtctacgaatcctcgcaataggcacacggagcggcgcaattaaactctatggcgcgcccggggtggagttcatgggattacaccaggaaaacaacgccgtgacccagatccatttgcttcccgggcaatgtcagctggttacactgctggacgataactcactgcacttgtggagcttaaaagtgaagggcggcgcaagcgagctgcaggaagacgagtcatttacccttcgcggacccccaggcgctgccccttccgccacgcagatcaccgtcgttctgccacactctagctgtgaactcctatacctgggcaccgaaagcgggaatgtcttcgtagttcaacttcccgcttttagggctctggaggacagaacaatcagctccgacgctgtcttgcagcggttgcccgaggaagccagacaccgacgggtttttgagatggtggaggctctgcaagaacatcctcgggatcccaatcagatcttgattggttatagcagaggcttagtggtgatttgggatctacaaggcagccgagttctgtatcactttctgtcctcacagcagctggagaatatctggtggcagagagatggtagactgcttgtttcatgccacagcgatggctcttattgtcagtggcctgtctccagcgaagcccaacaacccgagcccctccggtccttggtgccttatggcccattcccatgtaaagcaattacaagaattctctggctcaccactagacaggggcttccctttacaatttttcagggagggatgcctcgagcctcatacggggatagacattgtatttccgtgatacacgacggacagcaaaccgccttcgactttaccagccgagtcattgggtttacagtgcttaccgaggcggaccctgccgctagtcggcgggcctccggtgtaggcgctcaggggtag

SEQ ID NO: 26134 - DNA, 1071 bp, Artificial Sequence
  derived and/or modified sequence
atgcgcaggttcttgagacctggccacgacccggttagggaaaggttgaagcgcgacctattccagtttaacaaaacagttgagcatggctttcctcaccaaccatcagccctcggatattctccctctctgcggattttggcgatagggaccaggtcgggagccattaaattatacggcgctcctggcgtggagtttatgggtctgcatcaggagaacaacgccgtgactcagatccatctcctccctggacaatgccagttagtaactcttttggacgataactctctccacctgtggtcgttgaaggttaaaggtggcgcttccgagctgcaagaggatgaatcctttacgctacgcggacctcccggtgctgccccttcagcaactcagattactgtagtcctcccacatagcagctgcgagttattatacctggggacagaaagtggaaacgtcttcgtggtgcaactgccagcgttcagggccttggaagatagaaccatcagcagtgacgctgtcctgcagcgcctccccgaggaggccagacatcgtagggtatttgaaatggtagaagccctccaggaacatcccagagacccgaatcagatattaatcgggtattctagaggcctcgtcgtaatctgggacctgcaggggtctagagttttataccactttctatcatcccaacaattagaaaatatctggtggcagagagacggacggctgttagtgtcctgtcattccgacggctcttactgccaatggcccgttagctcagaggcccagcaaccggagccgcttcgtagcttggtcccatacgggccttttccttgcaaagcaataactaggatcctgtggctgacgactcgccagggccttccattcactatatttcagggtggcatgcccagagccagttatggggacagacactgtatttcagtgattcacgatggacagcaaaccgcctttgatttcaccagcagagtgattggtttcaccgtcctgacagaggccgacccagcagctagcagaagggcctctggggttggggctcagggctag

SEQ ID NO: 26135 - protein, 697 aa, Artificial Sequence
  derived and/or modified sequence
MACEIMPLQSSQEDERPLSPFYLSAHVPQVSNVSATGELLERTIRSAVEQHLFDVNNSGGQSSEDSESGTLSASSATSARQRRRQSKEQDEVRHGRDKGLINKENTPSGFNHLDDCILNTQEVEKVHKNTFGCAGERSKPKRQKSSTKLSELHDNQDGLVNMESLNSTRSHERTGPDDFEWMSDERKGNEKDGGHTQHFESPTMKIQEHPSLSDTKQQRNQDAGDQEESFVSEVPQSDLTALCDEKNWEEPIPAFSSWQRENSDSDEAHLSPQAGRLIRQLLDEDSDPMLSPRFYAYGQSRQYLDDTEVPPSPPNSHSFMRRRSSSLGSYDDEQEDLTPAQLTRRIQSLKKKIRKFEDRFEEEKKYRPSHSDKAANPEVLKWTNDLAKFRRQLKESKLKISEEDLTPRMRQRSNTLPKSFGSQLEKEDEKKQELVDKAIKPSVEATLESIQRKLQEKRAESSRPEDIKDMTKDQIANEKVALQKALLYYESIHGRPVTKNERQVMKPLYDRYRLVKQILSRANTIPIIGSPSSKRRSPLLQPIIEGETASFFKEIKEEEEGSEDDSNVKPDFMVTLKTDFSARCFLDQFEDDADGFISPMDDKIPSKCSQDTGLSNLHAASIPELLEHLQEMREEKKRIRKKLRDFEDNFFRQNGRNVQKEDRTPMAEEYSEYKHIKAKLRLLEVLISKRDTDSKSM

SEQ ID NO: 26136 - DNA, 3169 bp, Artificial Sequence
  derived and/or modified sequence
attgcctgaagaagtttggaggctgagagcagcagtagactggccaactgcagagcaagttgtttctccagccgtgcggtgcagcctcatgcccccaacccagcttagccactgtaagaagacgttcactgtacagacgaccaaacttgccgtggaagagacagttgtgagattcccttgcaaatttacatacgagaatggcttgtgaaatcatgcctctgcaaagttcacaggaagatgaaagacctctgtcacctttctatttgagtgctcatgtaccccaagtcagcaatgtgtctgcaaccggagaactcttagaaagaaccatccgatcagctgtagaacaacatctttttgatgttaataactctggaggtcaaagttcagaggactcagaatctggaacactatcagcatcttctgccacatctgccagacagcgccgccgccagtccaaggagcaggatgaagttcgacatgggagagacaagggacttatcaacaaagaaaatactccttctgggttcaaccaccttgatgattgtattttgaatactcaggaagtcgaaaaggtacacaaaaatacttttggttgtgctggagaaaggagcaagcctaaacgtcagaaatccagtactaaactttctgagcttcatgacaatcaggacggtcttgtgaatatggaaagtctcaattccacacgatctcatgagagaactggacctgatgattttgaatggatgtctgatgaaaggaaaggaaatgaaaaagatggtggacacactcagcattttgagagccccacaatgaagatccaggagcatcccagcctatctgacaccaaacagcagagaaatcaagatgccggtgaccaggaggagagctttgtctccgaagtgccccagtcggacctgactgcattgtgtgatgaaaagaactgggaagagcctatccctgctttctcctcctggcagcgggagaacagtgactctgatgaagcccacctctcgccgcaggctgggcgcctgatccgtcagctgctggacgaagacagcgaccccatgctctctcctcggttctacgcttatgggcagagcaggcaatacctggatgacacagaagtgcctccttccccaccaaactcccattctttcatgaggcggcgaagctcctctctggggtcctatgatgatgagcaagaggacctgacacctgcccagctcacacgaaggattcagagccttaaaaagaagatccggaagtttgaagatagattcgaagaagagaagaagtacagaccttcccacagtgacaaagcagccaatccggaggttctgaaatggacaaatgaccttgccaaattccggagacaacttaaagaatcaaaactaaagatatctgaagaggacctaactcccaggatgcggcagcgaagcaacacactccccaagagttttggttcccaacttgagaaagaagatgagaagaagcaagagctggtggataaagcaataaagcccagtgttgaagccacattggaatctattcagaggaagctccaggagaagcgagcggaaagcagccgccctgaggacattaaggatatgaccaaagaccagattgctaatgagaaagtggctctgcagaaagctctgttatattatgaaagcattcatggacggccggtaacaaagaacgaacggcaggtgatgaagccactatacgacaggtaccggctggtcaaacagatcctctcccgagctaacaccatacccatcattggttccccctccagcaagcggagaagccctttgctgcagccaattatcgagggcgaaactgcttccttcttcaaggagataaaggaagaagaggaggggtcagaagacgatagcaatgtgaagccagacttcatggtcactctgaaaaccgatttcagtgcacgatgctttctggaccaattcgaagatgacgctgatggatttatttccccaatggatgataaaataccatcaaaatgcagccaggacacagggctttcaaatctccatgctgcctcaatacctgaactcctggaacacctccaggaaatgagagaagaaaagaaaaggattcgaaagaaacttcgggattttgaagacaactttttcagacagaatggaagaaatgtccagaaggaagaccgcactcctatggctgaagaatacagtgaatataagcacataaaggcgaaactgaggctcctggaggtgctcatcagcaagagagacactgattccaagtccatgtgaggggcatggccaagcacagggggctggcagctgcggtgagagtttactgtccccagagaaagtgcagctctggaaggcagccttggggctggccctgcaaagcatgcagcccttctgcctctagaccatttggcatcggctcctgtttccattgcctgccttagaaactggctggaagaagacaatgtgacctgacttaggcattttgtaattggaaagtcaagactgcagtatgtgcacatgcgcacgcgcatgcacgcacacacacacacagtagtggagctttcctaacactagcagagattaatcactacattagacaacactcatctacagagaatatacactgttcttccctggataactgagaaacaagagaccattctctgtctaactgtgataaaaacaagctcaggactttattctatagagcaaacttgctgtggagggccatgctctccttggacccagttaactgcaaacgtgcattggagccctatttgctgccgctgccattctagtgacctttccacagagctgcgccttcctcacgtgtgtgaaaggttttccccttcagccctcaggtagatggaagctgcatctgcccacgatggcagtgcagtcatcatcttcaggatgtttcttcaggacttcctcagctgacaaggaattttggtccctgcctaggaccgggtcatctgcagaggacagagagatggtaagcagctgtatgaatgctgattttaaaaccaggtcatgggagaagagcctggagattctttcctgaacactgactgcacttaccagtctgattttatcgtcaaacaccaagccaggctagcatgctcatggcaatctgtttggggctgttttgttgt

SEQ ID NO: 26137 - DNA, 2094 bp, Artificial Sequence
  derived and/or modified sequence
atggcttgcgagataatgcctcttcagagctcacaggaggatgagcgccccctgagtccattttacctgtcagcccatgtccctcaggtcagcaacgttagcgctacgggggagctcctggagcgcacaattagaagtgctgtcgagcagcatctgtttgatgtgaacaattcagggggacagtccagcgaggactctgaatccggcaccctgagtgcaagcagtgctacttcagccagacagaggcggagacagtcaaaggagcaggacgaagtccgccacggccgggacaaaggcctgatcaacaaagagaacacaccctctggattcaaccacctggacgactgtatcctaaacacacaggaagtggagaaagtacataagaacacctttggatgtgcaggtgaacgctccaaaccgaagcggcagaagagcagcaccaagctctcagaactccacgacaaccaggatggcctcgtgaacatggagtctctgaattcgacaaggtcacacgagcgtacagggccagacgactttgagtggatgtccgacgagagaaagggcaatgaaaaggatggcggtcacacacagcatttcgaatccccaaccatgaagattcaggagcatccatccctgagtgacaccaaacagcagcggaaccaggacgccggcgaccaggaggaatctttcgtgtcagaagtcccccagtcagacctgacggccttgtgtgatgaaaaaaattgggaggaacctatacccgctttcagcagttggcagcgtgaaaatagcgacagtgacgaggcccatttgagtcctcaggcgggtcggcttatcagacagctcctagatgaagattcagaccctatgctttcaccaagattctacgcctatggacaatccagacagtacctggacgatacagaggtgccaccttctccacctaactcccattcctttatgcgtagacggtcaagctcactggggtcctacgacgacgagcaggaagacctgacccccgcccagcttactagaaggatccaatctctgaaaaagaagattaggaagtttgaggaccgtttcgaagaggaaaaaaagtaccgtccttcccactcagacaaagctgctaacccagaggtcctgaagtggaccaacgatctggccaaattcaggagacagctcaaggagtccaagctgaagatttccgaagaggatctgacccccagaatgagacaacgctccaacacactgcctaagtcatttggttctcagttggagaaggaggatgagaaaaaacaggaactggtggataaagcaatcaaaccaagcgtggaagcaaccttagagtccatccagagaaagctgcaggaaaagcgcgctgaatcctcaagaccagaagatatcaaggacatgacaaaagatcagatcgctaacgagaaggtcgccctacagaaagcactgctgtactacgagagtatccacggccgccccgtgactaaaaatgagagacaggtgatgaaaccactgtacgataggtatcgcctcgtgaaacagattctgagcagggctaacaccattcctatcatcggctcccctagctccaaaaggcggtctccgctactgcaaccaattatcgaaggcgagactgcttccttttttaaagagatcaaggaagaagaagaggggtcagaggacgactctaacgtaaaacccgattttatggttacccttaaaacggacttcagtgcccgttgcttcctggatcagtttgaggatgacgctgatggattcatttcccccatggacgacaagatcccgagtaagtgctctcaagataccggactctccaacttgcacgccgcctccataccagagttattggagcatctgcaggagatgagggaggagaagaaaaggatcaggaagaagctccgtgactttgaagacaactttttccgccaaaacggaagaaacgtccaaaaggaggaccgtactcctatggcagaggaatattcggaatacaaacacattaaggccaaactgcgccttctggaagtacttatctctaagcgtgacactgactctaaatctatgtag

SEQ ID NO: 26138 - DNA, 2094 bp, Artificial Sequence
  derived and/or modified sequence
atggcctgtgagatcatgcccctgcagagcagccaggaggatgagcggcccctgagccccttctacctgagcgcccacgtgccccaggtgtccaatgtgtctgccaccggggagctgctggagaggaccatccgctctgctgtggagcagcacctgtttgatgtgaacaacagcggcggccagagcagcgaggacagcgagagcggcaccctgagcgccagcagcgccaccagcgcccggcagaggcggcggcagagcaaggagcaggatgaggtgcgccacggccgggacaagggcctcatcaacaaggagaacacccccagcggcttcaaccacctggatgactgcatcctgaacacccaggaggtggagaaggtgcacaagaacaccttcggctgtgccggggagaggagcaagcccaagaggcagaagagcagcaccaagctgtctgagctgcatgacaaccaggacggcctggtgaacatggagagcctgaacagcaccaggagccatgagaggacaggcccagatgactttgagtggatgtctgatgagaggaaaggaaatgagaaggatggcggccacacccagcactttgagagccccaccatgaagatccaggagcaccccagcctgagtgacaccaagcagcagaggaaccaggatgctggggaccaggaggagagctttgtgtctgaggtgccccagagcgacctgacagccctgtgtgatgagaagaactgggaggagcccatcccagccttcagctcctggcagagagaaaattctgacagtgatgaggcccacctgagcccccaggccggccgcctcatccggcagctgctggatgaggacagcgaccccatgctgagcccccgcttctacgcctacggccagagccggcagtacctggatgacacagaggtgccccccagcccccccaacagccacagcttcatgagaagaagaagcagcagcctgggcagctatgatgatgagcaggaggacctgaccccagcccagctgacccggcgcatccagagcctgaagaagaagatcaggaagtttgaagatagatttgaggaggagaagaagtaccggcccagccacagcgacaaggccgccaaccctgaggtgctgaagtggaccaatgacctggccaagttccggcggcagctgaaggagagcaagctgaagatcagcgaggaggacctgacccccaggatgaggcagaggagcaacaccctgcccaagagctttggcagccagctggagaaggaggatgagaagaagcaggagctggtggacaaggccatcaagcccagcgtggaggccaccctggagagcatccagaggaagctgcaggagaagagagctgagagcagcaggcctgaggacatcaaggacatgaccaaggaccagatcgccaatgagaaggtggccctgcagaaggccctgctgtactatgagagcatccacggccggcctgtgaccaagaatgaaaggcaggtgatgaagcccctgtatgaccgctaccgcctggtgaagcagatcctgagccgggccaacaccatccccatcatcggcagccccagcagcaagagaagaagccccctgctgcagcccatcatcgagggggagacagccagcttcttcaaggagatcaaggaggaggaggagggctctgaagatgacagcaatgtgaagccagacttcatggtgaccctgaagacagacttcagcgcccgctgcttcctggaccagtttgaagatgatgctgatggcttcatcagccccatggatgacaagatccccagcaagtgcagccaggacaccggcctgagcaacctgcatgctgccagcatccctgagctgctggagcacctgcaggagatgagggaggagaagaagaggatcaggaagaagctgcgggactttgaggacaacttcttccggcagaatggaagaaatgtgcagaaggaggacaggacccccatggccgaggagtacagcgagtacaagcacatcaaggccaagctgcggctgctggaggtgctgatcagcaagagggacacagacagcaagtccatgtag

SEQ ID NO: 26139 - DNA, 2094 bp, Artificial Sequence
  derived and/or modified sequence
atggcctgcgagatcatgcccctgcagagcagccaggaggacgagcggcccctttctcctttctatctcagtgcccacgttcctcaagtctccaacgttagtgccaccggggagctcttggagagaacaatccgaagcgcggtcgagcaacacttgttcgatgtaaacaacagtggcgggcaatctagcgaagactccgagtctgggacattatccgcttcatcagccacatcagcccgacagcggagacggcagagcaaggaacaggacgaagtgcgacacggccgggacaaaggcctgatcaataaggagaacacgcccagcggatttaaccacctagatgactgcattctgaatacacaggaggtagagaaagttcacaaaaacaccttcggatgtgccggagagcgaagcaagcctaaacgccaaaagtcatccacaaaattaagcgagcttcatgataatcaggacggtttagttaatatggaaagcttaaatagtacccgaagccatgagcggacagggcctgacgactttgagtggatgtccgacgagagaaaaggaaatgagaaagacggcggccacacccaacactttgaatctcccacaatgaagatacaagagcaccctagcttaagcgacaccaaacagcagagaaatcaggacgcgggtgaccaggaagaaagtttcgtctccgaggttccacagagtgaccttacagccctgtgcgacgaaaagaactgggaggagcccattcctgccttcagttcctggcagagggagaacagtgacagtgatgaggcacacttgagtccacaggccggtcggttgatccgccagttgctagatgaagactctgatcccatgttaagccccagattctatgcatacggtcagagtcggcagtacctggatgataccgaagtgccaccctccccaccaaattcccatagttttatgcgacggcgctcctccagtctcgggagctacgacgacgaacaggaagacctcacgcccgcccagctcacaagacgtatacaatctctgaaaaagaaaattagaaagttcgaggatcgcttcgaggaggaaaaaaagtaccgaccatctcacagcgacaaggccgctaatccggaggtgttgaagtggacaaatgatcttgcgaaattcagaaggcagctaaaggagtctaagctgaaaatttcagaggaagacctgaccccgcggatgaggcaacggagcaataccctcccgaaaagctttgggtcccagctggagaaggaagacgagaaaaagcaggagctcgttgacaaggccatcaaacccagcgttgaggccaccttggagtccatccagcgtaaattgcaggaaaaaagggccgagtcctcccgccctgaagacatcaaagacatgaccaaggaccaaatcgcaaacgaaaaggtcgcactgcagaaagcccttctgtactacgagagtatccatggcaggcccgtgaccaagaacgaaagacaagtgatgaaaccactctatgaccggtatcgtctggtgaaacaaattctgagccgcgctaacaccatccctattattggcagtccttccagtaaaagacggtcaccgctgctgcaacctatcatcgagggagagacagccagcttctttaaggagattaaggaagaagaggaagggagcgaggatgacagcaatgtcaagcccgatttcatggtaaccttaaaaacagatttctcagctcgttgtttcctggaccagtttgaggatgacgccgacgggttcattagtccgatggatgacaagataccgagtaagtgcagtcaggacactgggctgtcaaacctccacgctgcttccattcccgagttactcgaacacttacaagagatgagggaagaaaagaagcggatcagaaagaagttaagagatttcgaggacaactttttccgccagaacgggaggaatgtgcaaaaggaagatcggacacctatggcagaggagtattcggagtataagcacattaaggcgaaactccgactgctggaagtccttatttctaagcgcgatacagattccaaatctatgtag

SEQ ID NO: 26140 - DNA, 2094 bp, Artificial Sequence
  derived and/or modified sequence
atggcttgcgaaatcatgcccctgcaatcttcacaagaagatgaaagacccctgagccctttttacctctctgctcacgtccctcaggtgagcaacgtctccgctaccggcgagttgttggaacgaaccatccgcagcgccgtggagcagcacctctttgatgtgaataatagtgggggacagtcttccgaggacagcgagtctgggacattatcagcctccagcgctacgagcgcacggcaaagacgacgccagtccaaagagcaagatgaggtacgccatgggcgtgacaagggacttatcaataaggagaatactccgagtggattcaaccacttggacgattgtatcttgaatactcaggaggtggaaaaagtccacaaaaacacgttcggatgtgccggagagagatccaaacctaaacgccagaagagctccaccaaactatccgaactgcacgacaatcaggatggcctcgtcaatatggagtcccttaacagtaccaggagccacgaacggactggaccagatgatttcgaatggatgagcgacgaaaggaaaggaaacgagaaagatggagggcatacccaacactttgagtctcccacaatgaagatccaggaacatcccagtttatctgacacgaagcaacaacgcaaccaggacgcaggtgaccaggaagaatcatttgttagcgaagtgcctcagagcgatttgacagctctgtgcgatgaaaagaattgggaggagcccattcctgccttttcgagctggcaacgcgagaattctgacagtgatgaggcccacctgtcccctcaggcaggccgacttatccgccagctgctcgatgaagactcggacccaatgttgtccccccgtttttacgcctatggccaatcccggcaatatttagacgacaccgaggtgcctccttctcctcccaacagtcatagctttatgcggcgaaggtcgtcttcactggggagctacgacgatgagcaggaggatctgacccctgcccagttgacgaggagaatccagtcattaaagaaaaaaatccgcaagtttgaggaccggttcgaggaagaaaagaagtacagaccatcacatagcgacaaagcggctaatccagaggttctgaaatggaccaacgacctggctaaatttcgccgtcagctgaaagaatccaaacttaaaatttccgaagaggatctgacccctcgcatgaggcagagaagcaacacccttcctaagtctttcggctcccagttggagaaagaagacgagaagaagcaagaattagtcgataaggccattaagccttcagttgaggcaacattggagtcaatacagcgaaaactccaggagaaaagggccgagtccagccggcctgaggatatcaaggacatgacaaaagaccagattgccaacgaaaaggtagccttgcagaaggcactcctgtattacgagtccatacacggccgacccgtgactaagaacgagcgccaggtcatgaaaccactgtacgaccggtatagacttgtgaaacagatcctgtcccgggcaaacaccattcccattatcgggagccccagctcgaaacggcgatcacctttattgcagccgataatagaaggcgaaacagccagcttcttcaaggagatcaaggaagaggaggaaggctccgaggacgactccaacgtaaagcccgactttatggtgaccctgaagactgatttttccgcaagatgctttctggaccaattcgaagatgacgccgacggctttatctccccgatggacgataagatcccatctaaatgctcacaggacaccggactcagtaacctgcacgcagcttccatccctgagctgcttgagcacctacaggagatgcgagaggagaaaaaaagaattagaaaaaagttgagagattttgaggacaactttttccgccagaacggcagaaacgtccagaaggaggatcgcacgcccatggccgaagagtatagcgagtataaacacataaaagccaagctgcgcttactggaggtactgatctcgaagagagacaccgattctaagtcaatgtag

SEQ ID NO: 26141 - DNA, 2094 bp, Artificial Sequence
  derived and/or modified sequence
atggcctgcgagatcatgcccctgcagagcagccaggaggacgagagacccctgagccccttctacctgagcgcccacgtgccccaggtgagcaacgtgagcgccaccggcgagctgctggagagaaccatcagaagcgccgtggagcagcacctgttcgacgtgaacaacagcggcggccagagcagcgaggacagcgagagcggcaccctgagcgccagcagcgccaccagcgccagacagagaagaagacagagcaaggagcaggacgaggtgagacacggcagagacaagggcctgatcaacaaggagaacacccccagcggcttcaaccacctggacgactgcatcctgaacacccaggaggtggagaaggtgcacaagaacaccttcggctgcgccggcgagagaagcaagcccaagagacagaagagcagcaccaagctgagcgagctgcacgacaaccaggacggcctggtgaacatggagagcctgaacagcaccagaagccacgagagaaccggccccgacgacttcgagtggatgagcgacgagagaaagggcaacgagaaggacggcggccacacccagcacttcgagagccccaccatgaagatccaggagcaccccagcctgagcgacaccaagcagcagagaaaccaggacgccggcgaccaggaggagagcttcgtgagcgaggtgccccagagcgacctgaccgccctgtgcgacgagaagaactgggaggagcccatccccgccttcagcagctggcagagagagaacagcgacagcgacgaggcccacctgagcccccaggccggcagactgatcagacagctgctggacgaggacagcgaccccatgctgagccccagattctacgcctacggccagagcagacagtacctggacgacaccgaggtgccccccagcccccccaacagccacagcttcatgagaagaagaagcagcagcctgggcagctacgacgacgagcaggaggacctgacccccgcccagctgaccagaagaatccagagcctgaagaagaagatcagaaagttcgaggacagattcgaggaggagaagaagtacagacccagccacagcgacaaggccgccaaccccgaggtgctgaagtggaccaacgacctggccaagttcagaagacagctgaaggagagcaagctgaagatcagcgaggaggacctgacccccagaatgagacagagaagcaacaccctgcccaagagcttcggcagccagctggagaaggaggacgagaagaagcaggagctggtggacaaggccatcaagcccagcgtggaggccaccctggagagcatccagagaaagctgcaggagaagagagccgagagcagcagacccgaggacatcaaggacatgaccaaggaccagatcgccaacgagaaggtggccctgcagaaggccctgctgtactacgagagcatccacggcagacccgtgaccaagaacgagagacaggtgatgaagcccctgtacgacagatacagactggtgaagcagatcctgagcagagccaacaccatccccatcatcggcagccccagcagcaagagaagaagccccctgctgcagcccatcatcgagggcgagaccgccagcttcttcaaggagatcaaggaggaggaggagggcagcgaggacgacagcaacgtgaagcccgacttcatggtgaccctgaagaccgacttcagcgccagatgcttcctggaccagttcgaggacgacgccgacggcttcatcagccccatggacgacaagatccccagcaagtgcagccaggacaccggcctgagcaacctgcacgccgccagcatccccgagctgctggagcacctgcaggagatgagagaggagaagaagagaatcagaaagaagctgagagacttcgaggacaacttcttcagacagaacggcagaaacgtgcagaaggaggacagaacccccatggccgaggagtacagcgagtacaagcacatcaaggccaagctgagactgctggaggtgctgatcagcaagagagacaccgacagcaagagcatgtag

SEQ ID NO: 26142 - protein, 488 aa, Artificial Sequence
  derived and/or modified sequence
MRFHWLPTLSEPFDRNQELETCIRPLWTPSGSACETEHNKSMDMGNQHPSISRLQEIQKEVKSVEQQVIGFSGLSDDKNYKKLERILTKQLFEIDSVDTEGKGDIQQARKRAAQETERLLKELEQNANHPHRIEIQNIFEEAQSLVREKIVPFYNGGNCVTDEFEEGIQDIILRLTHVKTGGKISLRKARYHTLTKICAVQEIIEDCMKKQPSLPLSEDAHPSVAKINFVMCEVNKARGVLIALLMGVNNNETCRHLSCVLSGLIADLDALDVCGRTEIRNYRREVVEDINKLLKYLDLEEEADTTKAFDLRQNHSILKIEKVLKRMREIKNELLQAQNPSELYLSSKTELQGLIGQLDEVSLEKNPCIREARRRAVIEVQTLITYIDLKEALEKRKLFACEEHPSHKAVWNVLGNLSEIQGEVLSFDGNRTDKNYIRLEELLTKQLLALDAVDPQGEEKCKAARKQAVRLAQNILSYLDLKSDEWEY

SEQ ID NO: 26143 - DNA, 1467 bp, Artificial Sequence
  derived and/or modified sequence
atgagattccactggctgcccaccctgagcgagcccttcgacagaaaccaggagctggagacctgcatcagacccctgtggacccccagcggcagcgcctgcgagaccgagcacaacaagagcatggacatgggcaaccagcaccccagcatcagcagactgcaggagatccagaaggaggtgaagagcgtggagcagcaggtgatcggcttcagcggcctgagcgacgacaagaactacaagaagctggagagaatcctgaccaagcagctgttcgagatcgacagcgtggacaccgagggcaagggcgacatccagcaggccagaaagagagccgcccaggagaccgagagactgctgaaggagctggagcagaacgccaaccacccccacagaatcgagatccagaacatcttcgaggaggcccagagcctggtgagagagaagatcgtgcccttctacaacggcggcaactgcgtgaccgacgagttcgaggagggcatccaggacatcatcctgagactgacccacgtgaagaccggcggcaagatcagcctgagaaaggccagataccacaccctgaccaagatctgcgccgtgcaggagatcatcgaggactgcatgaagaagcagcccagcctgcccctgagcgaggacgcccaccccagcgtggccaagatcaacttcgtgatgtgcgaggtgaacaaggccagaggcgtgctgatcgccctgctgatgggcgtgaacaacaacgagacctgcagacacctgagctgcgtgctgagcggcctgatcgccgacctggacgccctggacgtgtgcggcagaaccgagatcagaaactacagaagagaggtggtggaggacatcaacaagctgctgaagtacctggacctggaggaggaggccgacaccaccaaggccttcgacctgagacagaaccacagcatcctgaagatcgagaaggtgctgaagagaatgagagagatcaagaacgagctgctgcaggcccagaaccccagcgagctgtacctgagcagcaagaccgagctgcagggcctgatcggccagctggacgaggtgagcctggagaagaacccctgcatcagagaggccagaagaagagccgtgatcgaggtgcagaccctgatcacctacatcgacctgaaggaggccctggagaagagaaagctgttcgcctgcgaggagcaccccagccacaaggccgtgtggaacgtgctgggcaacctgagcgagatccagggcgaggtgctgagcttcgacggcaacagaaccgacaagaactacatcagactggaggagctgctgaccaagcagctgctggccctggacgccgtggacccccagggcgaggagaagtgcaaggccgccagaaagcaggccgtgagactggcccagaacatcctgagctacctggacctgaagagcgacgagtgggagtactag

SEQ ID NO: 26144 - DNA, 1960 bp, Artificial Sequence
  derived and/or modified sequence
gggccaagacgcccggagcggctgctgcagccagtagcggccccttcaccggctgccccgctcagacctagtcgggaggggtgcgaggcatgcagctgggggcccagctccggtgccgcaccccgtaaagggctgatcttccacctcgccacctcagccacgggacgccaagaccgcatccaattcagacttcttttgggtaaagggccaagagggaagggcgaggcggggaggaagcagctcgggccgccttccctccgtggcctccaggacatccgccggggatagattatgcgtttccattggttacccaccttgagcgagccgtttgatagaaaccaagagcttgaaacgtgcattaggccattgtggactcccagtgggagtgcttgtgaaactgaacacaacaaaagtatggatatgggaaaccaacatccttctattagtaggcttcaggaaatccaaaaggaagtaaaaagtgtagaacagcaagttatcggcttcagtggtctgtcagatgacaagaattacaagaaactggagaggattctaacaaaacagctttttgaaatagactctgtagatactgaaggaaaaggagatattcagcaagctaggaagcgggcagcacaggagacagaacgtcttctcaaagagttggagcagaatgcaaaccacccacaccggattgaaatacagaacatttttgaggaagcccagtccctcgtgagagagaaaattgtgccattttataatggaggcaactgcgtaactgatgagtttgaagaaggcatccaagatatcattctgaggctgacacatgttaaaactggaggaaaaatctccttgcggaaagcaaggtatcacactttaaccaaaatctgtgcggtgcaagagataatcgaagactgcatgaaaaagcagccttccctgccgctttccgaggatgcacatccttccgttgccaaaatcaacttcgtgatgtgtgaggtgaacaaggcccgaggggtcctgattgcacttctgatgggtgtgaacaacaatgagacctgcaggcacttatcctgtgtgctctcggggctgatcgctgacctggatgctctagatgtgtgcggccggacagaaatcagaaattatcggagggaggtagtagaagatatcaacaaattattgaaatatctggatttggaagaggaagcagacacaactaaagcatttgacctgagacagaatcattccattttaaaaatagaaaaggtcctcaagagaatgagagaaataaaaaatgaacttctccaagcacaaaacccttctgaattgtacctgagctccaaaacagaattgcagggtttaattggacagttggatgaggtaagtcttgaaaaaaacccctgcatccgggaagccaggagaagagcagtgatcgaggtgcaaactctgatcacatatattgacttgaaggaggcccttgagaaaagaaagctgtttgcttgtgaggagcacccatcccataaagccgtctggaacgtccttggaaacttgtctgagatccagggagaagttctttcatttgatggaaatcgaaccgataagaactacatccggctggaagagctgctcaccaagcagctgctagccctggatgctgttgatccgcagggagaagagaagtgtaaggctgccaggaaacaagctgtgaggcttgcgcagaatattctcagctatctcgacctgaaatctgatgaatgggagtactgaaataccagagatctcacttttgatactgttttgcacttcatatgtgcttctatgtatagagagctttcagttcattgatttatacgtgcatatttcagtctcagtatttatgattgaagcaaattctattcagtatctgctgcttttgatgttgcaagacaaatatcattacagcacgttaacttttccattcggatcatta

SEQ ID NO: 26145 - DNA, 1467 bp, Artificial Sequence
  derived and/or modified sequence
atgagatttcattggctgccaactttgtctgaacctttcgacagaaaccaagagttagagacctgtattcgccctctttggaccccctcggggtctgcctgtgagactgagcataataagtccatggacatgggcaaccagcatccttctatcagtcggttgcaggagatccagaaggaagtgaaaagcgtcgagcagcaggtgataggcttttctggtctttccgacgataaaaactataaaaagctggagaggatccttacaaagcagctgtttgaaatcgattcagtagatacagaaggcaaaggcgatatccagcaggctaggaagagagccgcacaggagacggagagactcctgaaggaactcgagcagaacgcaaaccatcctcatagaattgaaattcagaacatctttgaagaagcacagtccttagtaagggagaaaatagtccctttctataacgggggcaattgtgtgaccgatgaatttgaggagggaatacaggacatcatcctaagattaactcacgtcaaaaccggtggaaaaatctcactgaggaaggcacgctatcacactctaacaaaaatttgcgcagtgcaggaaattatcgaggattgcatgaaaaagcagccttccctccccttgagcgaggatgctcacccgtctgttgccaaaatcaatttcgtgatgtgtgaggtcaataaagcgcggggcgtcctcattgctctgctgatgggggtgaataataacgagacgtgtcggcatctgtcctgcgttctctccggattaattgccgacctggatgccctagatgtctgtgggcggacagagatcagaaattatagacgggaggtggtcgaagatataaacaagctcttgaagtacctcgatctcgaggaggaagcagacacgaccaaggccttcgatctgaggcaaaatcacagcatcctgaaaatagaaaaagttctcaagcggatgcgggagattaagaatgaactcctgcaggcccagaacccctctgaattatacctctcctcaaaaactgagctccaagggctaatcggccagctcgatgaggtatccttagagaaaaatccctgcattagagaagcccggaggagagcagttatcgaggtgcagaccctaattacatacatcgatctaaaagaggctctcgaaaaacggaaattgttcgcttgtgaagagcaccctagccacaaagcagtgtggaatgttctgggcaacctgtccgaaattcagggtgaagttctgagctttgatgggaacagaacggacaagaactatattagactcgaggagctgctgacaaaacaacttcttgctttggacgcagtagacccgcagggagaagagaaatgcaaagctgccagaaagcaggcggtgcgactcgctcaaaacatattgagctacctggatctgaaatccgatgagtgggaatactag

SEQ ID NO: 26146 - DNA, 1467 bp, Artificial Sequence
  derived and/or modified sequence
atgaggttccactggctgcccaccctgtctgagccctttgacaggaaccaggagctggagacctgcatccggcccctgtggacccccagcggcagcgcctgtgaaacagagcacaacaagtccatggacatgggcaaccagcaccccagcatcagccggctgcaggagatccagaaggaggtgaagtctgtggagcagcaggtgattggcttcagcggcctgagtgatgacaagaactacaagaagctggagcgcatcctgaccaagcagctgtttgaaattgacagcgtggacacagagggcaagggggacatccagcaggccaggaagagagctgcccaggagacagagcggctgctgaaggagctggagcagaatgccaaccacccccacagaattgagatccagaacatctttgaggaggcccagagcctggtgcgggagaagatcgtgcccttctacaatggaggcaactgtgtgacagatgaatttgaggagggcatccaggacatcatcctgcggctgacccacgtgaagacaggaggcaagatcagcctgaggaaggcccgctaccacaccctgaccaagatctgtgctgtgcaggagatcatcgaggactgcatgaagaagcagcccagcctgcccctgtctgaagatgcccaccccagcgtggccaagatcaactttgtgatgtgtgaggtgaacaaggcccggggcgtgctgattgccctgctgatgggcgtgaacaacaatgagacctgccgccacctgagctgtgtgctgagcggcctgattgctgacctggatgccctggatgtgtgtggccgcacagagatccggaactacagaagagaggtggtggaggacatcaacaagctgctgaagtacctggacctggaggaggaggccgacaccaccaaggcctttgacctgcggcagaaccacagcatcctgaagattgagaaggtgctgaagaggatgagggagatcaagaatgagctgctgcaggcccagaaccccagcgagctgtacctgagcagcaagacagagctgcagggcctgattggccagctggatgaggtgtccctggagaagaacccctgcatccgggaggcccggcggcgggccgtcatcgaggtgcagaccctcatcacctacatcgacctgaaggaggccctggagaagaggaagctgtttgcctgtgaggagcaccccagccacaaggctgtgtggaatgtgctgggcaacctgtctgagatccagggcgaggtgctgagctttgatggcaacagaacagacaagaactacatccggctggaggagctgctgaccaagcagctgctggccctggatgctgtggacccccagggcgaggagaagtgcaaggccgccaggaagcaggccgtgcggctggcccagaacatcctgagctacctggacctgaagagtgatgagtgggagtactag

SEQ ID NO: 26147 - DNA, 1467 bp, Artificial Sequence
  derived and/or modified sequence
atgcggttccactggctgcccaccctgagcgagcccttcgaccggaaccaggagcttgagacgtgcataagacccctgtggacaccaagtggctctgcctgcgagactgagcacaacaaaagtatggacatgggcaaccagcatccatcaatttcacggttgcaggagatacaaaaagaggtgaaatcagtggaacagcaggtaataggattctctggtctctctgacgacaagaactataagaaactggagcggattctaacaaagcagctattcgagatcgactctgtcgatactgaggggaaaggagatatccagcaggcccgtaaacgagcagcccaagagactgaacggcttcttaaggaactcgaacaaaatgctaatcatccccatagaatagagatccagaacatcttcgaagaagcgcagtccctcgtgcgagagaagatcgtacctttttacaacggcggtaattgtgtaaccgacgaattcgaagaagggatccaagatataatcctcaggctgactcatgtaaagacaggcggcaaaattagcctgagaaaagccagatatcatacacttacaaagatttgcgcagtgcaggaaatcatcgaagactgtatgaaaaagcaacctagcctgccattgtctgaggatgcccacccttccgtggccaaaatcaatttcgtcatgtgcgaggtcaataaggcaagaggcgttctcatcgcactcctgatgggcgtgaacaataatgaaacctgccggcacctttcctgtgtgctcagcggccttattgccgacttggacgcgcttgatgtttgcggcagaacagagataaggaattaccgaagagaggtggtggaggatatcaacaagctgttgaaatatctcgacctggaggaggaagccgacacaacaaaagccttcgatttacggcagaaccacagcatcctaaagatcgaaaaggtgctgaagcgaatgagagagattaagaacgagttgctgcaagcccaaaacccgtccgagttgtacttgtcctcgaagaccgagctacagggactgatcggccaacttgatgaagtttcattagagaaaaatccttgcatcagagaagcccgcagacgcgcagttatcgaggtgcaaacgctgattacctatattgatcttaaggaagcactggaaaagcgtaagctcttcgcctgtgaagagcacccgtcacataaggccgtgtggaatgttctggggaatttgtctgaaatacaaggggaagtactgtctttcgatggtaaccgcacagacaagaattacattagactggaagagctgctcactaaacagctactcgcgcttgacgcggttgaccctcagggagaagagaagtgcaaagctgctagaaagcaggcggttagactggcacagaacatcctgagttacctggacctgaaatccgatgaatgggagtattag

SEQ ID NO: 26148 - DNA, 1467 bp, Artificial Sequence
  derived and/or modified sequence
atgagattccactggctgcctaccctgtccgaacccttcgataggaatcaggaattggaaacatgcatcagaccattgtggacccccagtggctcagcatgcgagaccgagcacaataaaagtatggatatgggtaaccagcacccttcgatttcacgcttgcaggaaatacagaaagaggttaagtcggtcgagcagcaagtcattgggtttagcggactgagcgatgataagaactataagaaattggaaaggatactcacaaagcagctattcgagatcgatagtgtggatacagaagggaagggcgacattcaacaagctagaaaacgcgcagctcaggagaccgaacgcctactgaaagaactcgaacagaatgccaatcatcctcacagaattgagattcagaacatcttcgaagaggcccagagtctggtgagagagaagatcgtccccttttataacgggggaaactgcgttacagacgagtttgaagaggggatccaagatatcatcttgcgcctcactcacgttaaaactgggggtaaaatcagcctgaggaaagccagataccatactctcaccaagatttgcgcagtgcaagagatcattgaggattgcatgaaaaagcagccatctttgccactgtcagaggacgcacacccctccgtggctaaaataaactttgtgatgtgcgaggtgaataaagctcgtggcgtgctgattgccttactcatgggagtgaataacaacgaaacgtgcaggcacctgtcttgtgtgctgagcggtctgatagccgatctagacgccctggacgtgtgtggacgcactgagattaggaactacaggcgtgaggtcgtggaagacatcaacaagcttctgaaatacctggatctggaggaagaggccgacacaaccaaagctttcgatcttaggcagaatcattccatcttgaagattgagaaagtgctaaaaagaatgcgggaaattaagaacgagctgctgcaggcccagaacccctcagagttgtacctgagtagcaaaacagaacttcaaggcttgatcggacagctggatgaagtcagcctcgaaaaaaacccatgcattcgcgaagcgaggagaagggccgtgatagaggtgcagaccttaattacctacattgatctgaaagaagcactggaaaagaggaaactattcgcttgcgaagagcatcccagccacaaagctgtgtggaatgtcttgggaaatctgtctgagattcagggcgaagtgctgtctttcgacggtaaccgaactgacaaaaattacattcggcttgaggagttgctaacgaagcagctgctggccttggacgccgtcgatccacagggcgaagaaaagtgcaaagccgcacgcaagcaggccgtgcgtctcgctcagaacattttaagctacctggatctcaaaagtgacgagtgggagtattag

SEQ ID NO: 26149 - DNA, 4867 bp, Artificial Sequence
  derived and/or modified sequence
gcaggcgcgccctggcacccgggccaagacgcccggagcggctgctgcagccagtagcggccccttcaccggctgccccgctcagacctagtcgggaggggtgcgaggcatgcagctgggggcccagctccggtgccgcaccccgtaaagggctgatcttccacctcgccacctcagccacgggacgccaagaccgcatccaattcagacttcttttggtgcttgtgaaactgaacacaacaaaagtatggatatgggaaaccaacatccttctattagtaggcttcaggaaatccaaaaggaagtaaaaagtgtagaacagcaagttatcggcttcagtggtctgtcagatgacaagaattacaagaaactggagaggattctaacaaaacagctttttgaaatagactctgtagatactgaaggaaaaggagatattcagcaagctaggaagcgggcagcacaggagacagaacgtcttctcaaagagttggagcagaatgcaaaccacccacaccggattgaaatacagaacatttttgaggaagcccagtccctcgtgagagagaaaattgtgccattttataatggaggcaactgcgtaactgatgagtttgaagaaggcatccaagatatcattctgaggctgacacatgttaaaactggaggaaaaatctccttgcggaaagcaaggtatcacactttaaccaaaatctgtgcggtgcaagagataatcgaagactgcatgaaaaagcagccttccctgccgctttccgaggatgcacatccttccgttgccaaaatcaacttcgtgatgtgtgaggtgaacaaggcccgaggggtcctgattgcacttctgatgggtgtgaacaacaatgagacctgcaggcacttatcctgtgtgctctcggggctgatcgctgacctggatgctctagatgtgtgcggccggacagaaatcagaaattatcggagggaggtagtagaagatatcaacaaattattgaaatatctggatttggaagaggaagcagacacaactaaagcatttgacctgagacagaatcattccattttaaaaatagaaaaggtcctcaagagaatgagagaaataaaaaatgaacttctccaagcacaaaacccttctgaattgtacctgagctccaaaacagaattgcagggtttaattggacagttggatgaggtaagtcttgaaaaaaacccctgcatccgggaagccaggagaagagcagtgatcgaggtgcaaactctgatcacatatattgacttgaaggaggcccttgagaaaagaaagctgtttgcttgtgaggagcacccatcccataaagccgtctggaacgtccttggaaacttgtctgagatccagggagaagttctttcatttgatggaaatcgaaccgataagaactacatccggctggaagagctgctcaccaagcagctgctagccctggatgctgttgatccgcagggagaagagaagtgtaaggctgccaggaaacaagctgtgaggcttgcgcagaatattctcagctatctcgacctgaaatctgatgaatgggagtactgaaataccagagatctcacttttgatactgttttgcacttcatatgtgcttctatgtatagagagctttcagttcattgatttatacgtgcatatttcagtctcagtatttatgattgaagcaaattctattcagtatctgctgcttttgatgttgcaagacaaatatcattacagcacgttaacttttccattcggatcattatctgtatgatgtggtgtggtttgtttggtttgtccttttttttgcgtttttaatcagaaaacaaaatagaggcagcttttgtagattttaaatgggttgtgcaagcattaaaatgcaggtctttcagaatctagaactaggcataaccttacataatactaggaaaattatgagaaaggggaaatttttggttaaataagagtaaggttcaaacacaagcagtacatgttctgtttcattatgctcgatagaaggcttttttttcacttataaggcctgattggtcctacccagcttaacggggtggggtttttttgtttgttcagacagtctgttcttttgtaaacatttttagttggaaaaacagcatctgcattttccccatcctctacgttttagagaggaatcttgtttttgtgtgcaacataagaaaattatgaaaactaatagccaaaaaacctttgagattgcattaaagagaagggataaaggaccagcaataataccttgtaagttgcttttgtttgtaaaatctgagcttatagttttccttagtgagtaaattcataaggatgggaacatttaaattaagttaatgggcctttaaaaaaaaaaaaaggaaacactcatacctgtagttggaggatgaatactggagacgggttaccaatgtcaggttatactaaaactaaatcagaaagtctgaatgtagcacataatggttctcttctgttgtccaaggctgtaaaatggacagccttgtcacacctccccggtgctgttttacaacgtgagggtagacgctgtcagtaacccagagggaccaggccttcctaggttttctaggcagtcagctgttaaccactcacttagtaaatgtcataactacacctgctccaggaccaatcagtgaaacctgctcggaattaaaggcttcctctgggtgcctgctgaacaactgagctcatgtcatgggcatgtggtggtttctctgttgcctgaaagagccattaaagtcagtcgtgcgtgaagcatctctcttctaaaggatgtgtatttccataaatgctttctgaggatccggtacaaaatgatttcccaaagttctgaagtgccttgagaacatgtgggtccgagtgttataacagactcctcccccgggtcaccttttgcctggtcatcctgttagagtacatctttggaaatccagggtaatattctctttcagagatgctcattgtgtaactctgtgtagggagatagtcactttaaacagctcaaagtagctagctaaaggagtagccttaaatacctaaaagatgacagaagcatagcccttaacaaatcttcagcttgtctctcagtatttcccaatcatgaaaatcccttgctatgtctttcctactagaaatgttctagaatcgctggacggtggggtcagagggcagtcggtatttaggccgtgagcttcccatactactgcaggtccaactcctggcaaccgcgggctcaaggcaggtcattggaatccacgttttggccacagtagttgtaggattgcttttctgtatcataattttagaatgctcttaaaatcttgaggaagagtttttattttttatttatttttgagatggagtctctgttgcccaggctgcagtgcagtggtgccatctcagctcactgcaacctccacctcccaggttcaagcgattctcctgcctcagccacctgagtagctgggagtacaggcatgtggcaccatgcctggctaatttttgtatttttaatagagttgagatttcaccatgatggtcaggctggtctcgaactcctgacctcgtgatccgcccgcctcggccccccaaagtgctgggattaacgggtgtgagccacggcgcccagcccaggaagagtttttaaattagagctctgtttaattataccactgggaaatcatggttacgcttcaggcatattcttccccagagtactacttacattttaaatttcattttgtaaagttaaatgtcagcattccctttaaaagtgtccattgttctttgaaagtagacgtttcagtcattcttttcaaacaagtgtttgtgtaccttttgccaagctgtgggcatcgtgtgtgagtacagggtgctcagctcttccaccgtcattttgaattgttcacatgggtaattggtcatggaaatgatcagattgaccttgattgactgtcaggcatggctttgtttctggtttcaatctgttctcgttccttgtaccggattattctactcctgcaatgaaccctgttgacaccggatttagctcttgtcggccttcgtggggagctgtttgtgttaatatgagctactgcatgtaattcttaaactgggcttgtcacattgtattgtatttttgtgatctgtaatgaaaagaatctgtactgcaagtaaaacctactccccaaaaatgtgtggctttgggtctgcattaaacgctgtagtccatgttcatgccaaaaatggctgggaacgtttgctttatttacattcagtcagcgttgctttcagatcacactttatccacacaggaaagccagtcagcctataatgaagtagttattaaaataaatgtaatgaatatgtctacaaagtatagtttagtggtttattttgctaaaatgcacatatatttgatataatttagtttgagaagttcagctagtttttctcctttgtttgactttgtcaatttctatctggtttttaagggtctgagcttagcttgtgcatgcaaggttttgggtttttttattttttttttgagcacagcttttcaccttttaatttgttgggtatttttctcttaataagagaaatattggccatcgatttttacatataatacaagtgtgtttttccagtacattggttcctgtcccctctctgtgaactgtttgagtattggaacagtatgtcttcaataattcaatgttactttgagatacatgtgttaatatacccttagttattcttgaaataaaaccagtctcttacgcttgcagtggagaaagg

SEQ ID NO: 26150 - DNA, 878 bp, Artificial Sequence
  derived and/or modified sequence
cggccgctccttggtcgcggtcactccaggctgcctcgctgcgccgctggcggtgggcgtggcgctgccggcggctaggcgcggacgccggaggaggtgtccccgggtttaggggtgttcggccaggggcggggctgccgggcccgggcgactgccggagctgcggaagtcgtggaagcgtcggcgacgcatcgcgcgatggcgcgggcgggacagtgcttgtgaaactgaacacaacaaaagtatggatatgggaaaccaacatccttctattagtaggcttcaggaaatccaaaaggaagtaaaaagtgtagaacagcaagttatcggcttcagtggtctgtcagatgacaagaattacaagaaactggagaggattctaacaaaacagctttttgaaatagactctgtagatactgaaggaaaaggagatattcagcaagctaggaagcgggcagcacaggagacagaacgtcttctcaaagagttggagcagaatgcaaaccacccacaccggattgaaatacagaacatttttgaggaagcccagtccctcgtgagagagaaaattgtgccattttataatggaggcaactgcgtaactgatgagtttgaagaaggcatccaagatatcattctgaggctgacacatgttaaaactggaggaaaaatctccttgcggaaagcaaggtatcacactttaaccaaaatctgtgcggtgcaagagataatcgaagactgcatgaaaaagcagccttccctgccgctttccgaggatgcacatccttccgttgccaaaatcaacttcgtgatgtgtgaggtgaacaaggcccgaggggtcctgattgcacttctgatgggtgtgaacaacaatgaga

SEQ ID NO: 26151 - DNA, 4848 bp, Artificial Sequence
  derived and/or modified sequence
cggtcactccaggctgcctcgctgcgccgctggcggtgggcgtggcgctgccggcggctaggcgcggacgccggaggaggtgtccccgggtttaggggtgttcggccaggggcggggctgccgggcccgggcgactgccggagctgcggaagtcgtggaagcgtcggcgacgcatcgcgcgatggcgcgggcgggacagtgcttgtgaaactgaacacaacaaaagtatggatatgggaaaccaacatccttctattagtaggcttcaggaaatccaaaaggaagtaaaaagtgtagaacagcaagttatcggcttcagtggtctgtcagatgacaagaattacaagaaactggagaggattctaacaaaacagctttttgaaatagactctgtagatactgaaggaaaaggagatattcagcaagctaggaagcgggcagcacaggagacagaacgtcttctcaaagagttggagcagaatgcaaaccacccacaccggattgaaatacagaacatttttgaggaagcccagtccctcgtgagagagaaaattgtgccattttataatggaggcaactgcgtaactgatgagtttgaagaaggcatccaagatatcattctgaggctgacacatgttaaaactggaggaaaaatctccttgcggaaagcaaggtatcacactttaaccaaaatctgtgcggtgcaagagataatcgaagactgcatgaaaaagcagccttccctgccgctttccgaggatgcacatccttccgttgccaaaatcaacttcgtgatgtgtgaggtgaacaaggcccgaggggtcctgattgcacttctgatgggtgtgaacaacaatgagacctgcaggcacttatcctgtgtgctctcggggctgatcgctgacctggatgctctagatgtgtgcggccggacagaaatcagaaattatcggagggaggtagtagaagatatcaacaaattattgaaatatctggatttggaagaggaagcagacacaactaaagcatttgacctgagacagaatcattccattttaaaaatagaaaaggtcctcaagagaatgagagaaataaaaaatgaacttctccaagcacaaaacccttctgaattgtacctgagctccaaaacagaattgcagggtttaattggacagttggatgaggtaagtcttgaaaaaaacccctgcatccgggaagccaggagaagagcagtgatcgaggtgcaaactctgatcacatatattgacttgaaggaggcccttgagaaaagaaagctgtttgcttgtgaggagcacccatcccataaagccgtctggaacgtccttggaaacttgtctgagatccagggagaagttctttcatttgatggaaatcgaaccgataagaactacatccggctggaagagctgctcaccaagcagctgctagccctggatgctgttgatccgcagggagaagagaagtgtaaggctgccaggaaacaagctgtgaggcttgcgcagaatattctcagctatctcgacctgaaatctgatgaatgggagtactgaaataccagagatctcacttttgatactgttttgcacttcatatgtgcttctatgtatagagagctttcagttcattgatttatacgtgcatatttcagtctcagtatttatgattgaagcaaattctattcagtatctgctgcttttgatgttgcaagacaaatatcattacagcacgttaacttttccattcggatcattatctgtatgatgtggtgtggtttgtttggtttgtccttttttttgcgtttttaatcagaaaacaaaatagaggcagcttttgtagattttaaatgggttgtgcaagcattaaaatgcaggtctttcagaatctagaactaggcataaccttacataatactaggaaaattatgagaaaggggaaatttttggttaaataagagtaaggttcaaacacaagcagtacatgttctgtttcattatgctcgatagaaggcttttttttcacttataaggcctgattggtcctacccagcttaacggggtggggtttttttgtttgttcagacagtctgttcttttgtaaacatttttagttggaaaaacagcatctgcattttccccatcctctacgttttagagaggaatcttgtttttgtgtgcaacataagaaaattatgaaaactaatagccaaaaaacctttgagattgcattaaagagaagggataaaggaccagcaataataccttgtaagttgcttttgtttgtaaaatctgagcttatagttttccttagtgagtaaattcataaggatgggaacatttaaattaagttaatgggcctttaaaaaaaaaaaaaggaaacactcatacctgtagttggaggatgaatactggagacgggttaccaatgtcaggttatactaaaactaaatcagaaagtctgaatgtagcacataatggttctcttctgttgtccaaggctgtaaaatggacagccttgtcacacctccccggtgctgttttacaacgtgagggtagacgctgtcagtaacccagagggaccaggccttcctaggttttctaggcagtcagctgttaaccactcacttagtaaatgtcataactacacctgctccaggaccaatcagtgaaacctgctcggaattaaaggcttcctctgggtgcctgctgaacaactgagctcatgtcatgggcatgtggtggtttctctgttgcctgaaagagccattaaagtcagtcgtgcgtgaagcatctctcttctaaaggatgtgtatttccataaatgctttctgaggatccggtacaaaatgatttcccaaagttctgaagtgccttgagaacatgtgggtccgagtgttataacagactcctcccccgggtcaccttttgcctggtcatcctgttagagtacatctttggaaatccagggtaatattctctttcagagatgctcattgtgtaactctgtgtagggagatagtcactttaaacagctcaaagtagctagctaaaggagtagccttaaatacctaaaagatgacagaagcatagcccttaacaaatcttcagcttgtctctcagtatttcccaatcatgaaaatcccttgctatgtctttcctactagaaatgttctagaatcgctggacggtggggtcagagggcagtcggtatttaggccgtgagcttcccatactactgcaggtccaactcctggcaaccgcgggctcaaggcaggtcattggaatccacgttttggccacagtagttgtaggattgcttttctgtatcataattttagaatgctcttaaaatcttgaggaagagtttttattttttatttatttttgagatggagtctctgttgcccaggctgcagtgcagtggtgccatctcagctcactgcaacctccacctcccaggttcaagcgattctcctgcctcagccacctgagtagctgggagtacaggcatgtggcaccatgcctggctaatttttgtatttttaatagagttgagatttcaccatgatggtcaggctggtctcgaactcctgacctcgtgatccgcccgcctcggccccccaaagtgctgggattaacgggtgtgagccacggcgcccagcccaggaagagtttttaaattagagctctgtttaattataccactgggaaatcatggttacgcttcaggcatattcttccccagagtactacttacattttaaatttcattttgtaaagttaaatgtcagcattccctttaaaagtgtccattgttctttgaaagtagacgtttcagtcattcttttcaaacaagtgtttgtgtaccttttgccaagctgtgggcatcgtgtgtgagtacagggtgctcagctcttccaccgtcattttgaattgttcacatgggtaattggtcatggaaatgatcagattgaccttgattgactgtcaggcatggctttgtttctggtttcaatctgttctcgttccttgtaccggattattctactcctgcaatgaaccctgttgacaccggatttagctcttgtcggccttcgtggggagctgtttgtgttaatatgagctactgcatgtaattcttaaactgggcttgtcacattgtattgtatttttgtgatctgtaatgaaaagaatctgtactgcaagtaaaacctactccccaaaaatgtgtggctttgggtctgcattaaacgctgtagtccatgttcatgccaaaaatggctgggaacgtttgctttatttacattcagtcagcgttgctttcagatcacactttatccacacaggaaagccagtcagcctataatgaagtagttattaaaataaatgtaatgaatatgtctacaaagtatagtttagtggtttattttgctaaaatgcacatatatttgatataatttagtttgagaagttcagctagtttttctcctttgtttgactttgtcaatttctatctggtttttaagggtctgagcttagcttgtgcatgcaaggttttgggtttttttattttttttttgagcacagcttttcaccttttaatttgttgggtatttttctcttaataagagaaatattggccatcgatttttacatataatacaagtgtgtttttccagtacattggttcctgtcccctctctgtgaactgtttgagtattggaacagtatgtcttcaataattcaatgttactttgagatacatgtgttaatatacccttagttattcttgaaataaaaccagtctcttacgcttgcagtggagaaaggc

SEQ ID NO: 26152 - DNA, 564 bp, Artificial Sequence
  derived and/or modified sequence
atggagagaagcgccttcatggagctggacgccggcagcagactggtgatgcacctgagagagtggcccgccctgctggtgagcagcaccggctggaccgagttcgagcagctgaccctggacggccacaacctgcccagcctggtgtgcgtgatcaccggcagcgtggacctgggcgtgtgcctgcacatgagcagcagcggcctggacctgcccatgaaggtggtggacatgttcggctgctgcctgcccgtgtgcgccgtgaacttcaagtgcctgcacgagctggtgaagcacgaggagaacggcctggtgttcgaggacagcgaggagctggccgccctgcagatgctgttcagcaacttccccgaccccgccggcaagctgaaccagttctggaagaacctgagagagagccagcagctgagatgggacgagagctgggtgcagaccgtgctgcccctggtgatggacatccagctgctgggccagagactgaagcccagagacccctgctgccccagcagaagcttcttcagcgagagccagggcaagcccttctag

SEQ ID NO: 26153 - DNA, 564 bp, Artificial Sequence
  derived and/or modified sequence
atggaaaggagcgctttcatggaactagatgccggtagccggttagtgatgcacctcagggaatggccagcactgctcgtcagcagcacagggtggactgagtttgaacagctcaccctggacggacacaacttacccagtctggtgtgcgtgatcacaggttccgtagatcttggagtctgtctgcatatgagcagctcaggcttggatttgcctatgaaagtagtggatatgttcggctgctgtctgcccgtgtgtgccgttaacttcaaatgccttcacgagcttgtaaagcacgaggagaacggcctggtgttcgaagacagtgaggagcttgcggctcttcagatgttatttagcaattttcccgaccccgccggtaagctgaatcagttctggaaaaatttgcgggagtcccagcagttgcgctgggatgaatcctgggtccaaaccgttcttccactcgtcatggatatacagctcctcggtcagcgcctcaaaccccgagacccttgctgtccatctaggtccttctttagcgaatcacaaggtaagccattctag

SEQ ID NO: 26154 - DNA, 564 bp, Artificial Sequence
  derived and/or modified sequence
atggagaggtctgccttcatggagctggatgctggcagccggctggtgatgcacctgcgggagtggccagccctgctggtgagcagcacaggctggacagaatttgagcagctgaccctggatggccacaacctgcccagcctggtgtgtgtgatcactggatctgtggacctgggcgtgtgcctgcacatgagcagcagcggcctggacctgcccatgaaggtggtggacatgtttggctgctgcctgcctgtgtgtgctgtgaacttcaagtgcctgcacgagctggtgaagcatgaagaaaatggcctggtgtttgaagattctgaggagctggccgccctgcagatgctgttcagcaacttcccagaccctgctgggaagctgaaccagttctggaagaacctgcgggagagccagcagctgcgctgggatgagagctgggtgcagacagtgctgcccctggtgatggacatccagctgctgggccagaggctgaagccccgggacccctgctgccccagccgctccttcttcagcgagagccagggcaagcccttctag

SEQ ID NO: 26155 - DNA, 564 bp, Artificial Sequence
  derived and/or modified sequence
atggagcggagcgccttcatggagctggacgccggcagccggctggtcatgcatctgcgcgaatggccagctttactcgtgtccagcaccggctggactgagttcgaacagctcacactggatggccacaacttgccatccctggtatgtgtcatcaccggaagtgtggacctgggcgtctgtctccacatgtcctcatccgggctcgaccttccaatgaaagtcgtcgacatgtttggatgttgcctgcccgtgtgtgcggtcaatttcaagtgcctgcacgaactcgtgaagcacgaagaaaacggattggtgtttgaagattcggaggaattggctgcactccaaatgctgttcagcaactttccagacccggccgggaagttaaaccagttctggaagaatctgagagaatctcagcagctgagatgggatgaatcttgggtacaaacagtactcccgctggtgatggacatccagctgctcggacagagactgaaaccccgcgatccctgctgtccttcgaggagcttcttcagcgagtcgcagggaaagccgttttag

SEQ ID NO: 26156 - DNA, 564 bp, Artificial Sequence
  derived and/or modified sequence
atggagagatccgctttcatggagttggacgcgggtagcaggttggttatgcacctgcgagaatggcccgctctgttagtgagcagcaccggctggacagagttcgagcagcttactctcgacggtcataatttgcctagcctggtttgcgttattaccgggtccgtcgatcttggggtttgtctccatatgtcttctagcggactggacttacccatgaaagtggttgacatgttcgggtgttgtttacctgtgtgcgccgtaaatttcaaatgcctccacgaactggtgaagcacgaggaaaacggcctggtgttcgaagattctgaggagttagccgctctccagatgttgtttagtaacttccctgaccccgctggaaagttaaaccagttctggaagaatctgcgggagtcccagcaacttcggtgggatgaatcttgggtgcagacagtactgcctctggtgatggatatccagctacttggtcagagactgaagccacgcgacccctgttgtccttccaggagtttctttagcgagagccaggggaaacctttctag

SEQ ID NO: 26157 - protein, 499 aa, Artificial Sequence
  derived and/or modified sequence
MASNSLFSTVTPCQQNFFWDPSTSRRFSPPSSSLQPGKMSDVSPVVAAQQQQQQQQQQQQQQQQQQQQQQQEAAAAAAAAAAAAAAAAAVPRLRPPHDNRTMVEIIADHPAELVRTDSPNFLCSVLPSHWRCNKTLPVAFKVVALGEVPDGTVVTVMAGNDENYSAELRNASAVMKNQVARFNDLRFVGRSGRGKSFTLTITVFTNPPQVATYHRAIKVTVDGPREPRRHRQKLDDSKPSLFSDRLSDLGRIPHPSMRVGVPPQNPRPSLNSAPSPFNPQGQSQITDPRQAQSSPPWSYDQSYPSYLSQMTSPSIHSTTPLSSTRGTGLPAITDVPRRISGASELGPFSDPRQFPSISSLTESRFSNPRMHYPATFTYTPPVTSGMSLGMSATTHYHTYLPPPYPGSSQSQSGPFQTSSTPYLYYGTSSGSYQFPMVPGGDRSPSRMLPPCTTTSNGSTLLNPNLPNQNDGVDADGSHSSSPTVLNSSGRMDESVWRPY

SEQ ID NO: 26158 - DNA, 1500 bp, Artificial Sequence
  derived and/or modified sequence
atggccagcaacagcctgttcagcaccgtgaccccctgccagcagaacttcttctgggaccccagcaccagcagaagattcagcccccccagcagcagcctgcagcccggcaagatgagcgacgtgagccccgtggtggccgcccagcagcagcagcagcagcagcagcagcagcagcagcagcagcagcagcagcagcagcagcagcagcaggaggccgccgccgccgccgccgccgccgccgccgccgccgccgccgccgccgccgtgcccagactgagacccccccacgacaacagaaccatggtggagatcatcgccgaccaccccgccgagctggtgagaaccgacagccccaacttcctgtgcagcgtgctgcccagccactggagatgcaacaagaccctgcccgtggccttcaaggtggtggccctgggcgaggtgcccgacggcaccgtggtgaccgtgatggccggcaacgacgagaactacagcgccgagctgagaaacgccagcgccgtgatgaagaaccaggtggccagattcaacgacctgagattcgtgggcagaagcggcagaggcaagagcttcaccctgaccatcaccgtgttcaccaaccccccccaggtggccacctaccacagagccatcaaggtgaccgtggacggccccagagagcccagaagacacagacagaagctggacgacagcaagcccagcctgttcagcgacagactgagcgacctgggcagaatcccccaccccagcatgagagtgggcgtgcccccccagaaccccagacccagcctgaacagcgcccccagccccttcaacccccagggccagagccagatcaccgaccccagacaggcccagagcagccccccctggagctacgaccagagctaccccagctacctgagccagatgaccagccccagcatccacagcaccacccccctgagcagcaccagaggcaccggcctgcccgccatcaccgacgtgcccagaagaatcagcggcgccagcgagctgggccccttcagcgaccccagacagttccccagcatcagcagcctgaccgagagcagattcagcaaccccagaatgcactaccccgccaccttcacctacaccccccccgtgaccagcggcatgagcctgggcatgagcgccaccacccactaccacacctacctgccccccccctaccccggcagcagccagagccagagcggccccttccagaccagcagcaccccctacctgtactacggcaccagcagcggcagctaccagttccccatggtgcccggcggcgacagaagccccagcagaatgctgcccccctgcaccaccaccagcaacggcagcaccctgctgaaccccaacctgcccaaccagaacgacggcgtggacgccgacggcagccacagcagcagccccaccgtgctgaacagcagcggcagaatggacgagagcgtgtggagaccctactag

SEQ ID NO: 26159 - DNA, 1500 bp, Artificial Sequence
  derived and/or modified sequence
atggcttcgaattcattgttctccacagtgaccccttgtcagcagaatttcttctgggacccttcaacttctaggcggttttctcctccttcttcctcactgcagcccggaaagatgtctgacgtctcccctgtggttgccgcccagcagcagcagcagcagcagcaacagcaacagcaacagcagcagcagcagcagcagcaacaacagcaggaggccgctgcggccgcggccgctgccgcagcggcagcggcggcagcagccgcagtaccaagactccgccccccgcacgataatcggacgatggttgaaatcatcgcagaccaccctgccgagcttgtgagaacagactcccctaattttctctgtagcgttctccctagccattggcgctgcaataaaacactcccagtggcatttaaagtcgtggctctcggagaggttccagatggcacagttgtgacggttatggcgggcaatgatgagaactactccgccgaactgcgcaatgcttcagccgtgatgaagaaccaggtcgcccgttttaacgatctacgtttcgtcggtaggagtgggagaggtaaatctttcaccctgaccattaccgtgtttaccaaccccccccaggtggccacttatcaccgggccattaaagttaccgttgatggccctcgggagcctcgaaggcaccgccaaaagctcgatgattcaaaaccgtccctttttagtgatcgattgagtgaccttggccggataccccatcccagcatgcgcgtgggcgtgcctccacaaaatcccagaccttcgcttaattccgcccccagcccattcaatcctcaaggccaaagtcagattactgatccaaggcaggcacaatccagccctccctggtcttatgaccagtcatatccctcctacctgagccagatgacgtccccatcgatccactccactactcccctctcttccaccaggggcactggacttcctgccataacggacgtcccccgacggatctcaggggccagcgaactgggcccctttagtgaccctcgacagtttcctagtatcagtagtctgaccgaatctagattttccaatccacggatgcattatccggccacctttacctacacccccccggtaacctccggaatgtccctgggtatgtccgccaccacccactaccacacatacctgccacccccttaccccggctcctcccagagtcagagcggtccattccaaacatcatccaccccatacctgtattatggcacgagctccggatcataccagttccccatggtcccaggtggcgatcgctctccctctcgaatgctacctccttgcaccactacgtcaaatggaagcaccttgttaaacccaaacctgcctaatcagaacgacggggtagatgcagacggaagccacagttcctcaccaacagtcctgaattcttctggccgcatggatgagtccgtatggcgcccttactag

SEQ ID NO: 26160 - DNA, 1500 bp, Artificial Sequence
  derived and/or modified sequence
atggccagcaacagcctcttcagcacagtgaccccctgccagcagaacttcttctgggaccccagcaccagccgccgcttcagcccccccagcagcagcctgcagcccgggaagatgtctgatgtgtcccctgtggtggccgcccagcagcagcagcagcagcagcagcagcagcagcagcagcagcagcagcagcagcagcagcagcagcaggaggccgctgctgctgctgctgctgctgctgctgctgctgctgctgctgctgctgtgccccggctgcggccccctcatgacaacagaaccatggtggagatcatcgctgaccaccctgctgagctggtgaggacagacagccccaacttcctgtgcagcgtgctgcccagccactggcgctgcaacaagaccctgcctgtggccttcaaggtggtggccctgggggaggtgcctgatggcaccgtggtgacagtgatggctggaaatgatgagaactacagcgctgagctgagaaatgccagcgctgtgatgaagaaccaggtggcccgcttcaatgacctgcgctttgtgggccgcagcggccggggcaagagcttcaccctgaccatcaccgtcttcaccaaccccccccaggtggccacctaccaccgggccatcaaggtgacagtggatggcccccgggagccccggcggcaccggcagaagctggatgacagcaagcccagcctcttcagtgaccggctgagtgacctgggccgcatcccccaccccagcatgagggtgggcgtgcccccccagaacccccggcccagcctgaacagcgcccccagccccttcaacccccagggccagagccagatcacagacccccggcaggcccagagcagccccccctggagctatgaccagagctaccccagctacctgagccagatgaccagccccagcatccacagcaccacccccctgagcagcacccggggcaccggcctgcctgccatcacagatgtgccccggcgcatcagcggggccagcgagctgggccccttcagtgacccccggcagttccccagcatcagcagcctgacagagagccgcttcagcaaccccaggatgcactacccagccaccttcacctacaccccacctgtgaccagcggcatgagcctgggcatgtctgccaccacccactaccacacctacctgcccccaccctacccaggcagcagccagagccagagcggccccttccagaccagcagcaccccctacctgtactacggcaccagcagcggcagctaccagttccccatggtgcctggaggagacaggagccccagcaggatgctgcccccctgcaccaccaccagcaatggcagcaccctgctgaaccccaacctgcccaaccagaatgatggagtggatgctgatggcagccacagcagcagccccaccgtgctgaacagcagcggccgcatggatgagagcgtgtggaggccctactag

SEQ ID NO: 26161 - DNA, 1500 bp, Artificial Sequence
  derived and/or modified sequence
atggccagcaacagcctgttcagcaccgtgaccccctgccagcagaacttcttctgggatcctagtacatctaggagattcagcccaccaagttcctcgctgcagccaggtaaaatgtcagacgtttcccctgtcgtggctgcccaacagcaacagcagcagcagcaacagcaacaacagcagcagcagcaacagcaacagcagcagcagcaggaggctgcggccgctgcagctgctgccgccgcggcggctgcggccgccgctgctgttcccaggctgcgtccccctcacgataacaggacaatggtggagatcatcgccgaccaccctgcggaattggtccggacagactctcccaactttttatgcagtgtgctccctagccactggcgatgtaataagaccttgccggtcgctttcaaggtcgtagccctgggcgaagtcccagacggcaccgtggtgaccgtgatggcaggcaacgatgaaaattacagcgccgagctccggaatgcctcggcagtgatgaaaaatcaggtggctagatttaacgacctccggttcgtcggtcggtccggcaggggaaaatcctttacgctgacaatcactgtgtttaccaacccgccccaggtggccacgtaccaccgcgccatcaaggtaaccgtcgacgggccaagggagccacgccgccaccggcagaagcttgacgattcaaagccatccctgttcagcgacagactaagtgacctcggaagaattcctcacccatccatgcgggtcggcgtgcctccccagaacccccgcccgtcccttaactcggccccaagtccgttcaatccacagggccaaagccaaatcactgatcctcgccaggctcaatcctctccaccatggtcttacgaccagtcttatccctcctacttatctcaaatgacaagcccatcgatccactctactacccccctaagcagcaccagaggtactggactgcccgctatcaccgatgtacctaggcgaataagtggcgcctcagaactgggccccttctccgatccaaggcagttccccagcataagttccttgacggagtcccggttctccaatccaaggatgcactatccagcaacattcacctatacaccccccgtgactagtggaatgagcttgggcatgagtgcgaccacacattatcacacctacttgccgccaccatatcccgggtccagtcaaagccagtccggtccattccagacctccagcactccatacctgtattatggcacatcatccggatcatatcaattccccatggtccccggcggcgacaggtcacctagtagaatgttgcctccttgcacaacaactagtaacgggtccactcttctaaaccctaatctccccaaccaaaacgatggcgtggatgccgacggctcccattcctcgagcccaacggtgctgaactcaagcggcagaatggacgagtccgtctggaggccgtactag

SEQ ID NO: 26162 - DNA, 1500 bp, Artificial Sequence
  derived and/or modified sequence
atggcctccaactctttgtttagtaccgttacaccatgccagcagaatttcttttgggacccttcaacctccagacgtttttccccaccatcaagctctctgcagccaggtaagatgtccgatgtctcccccgtcgttgccgctcaacagcagcagcagcaacagcagcagcagcaacagcagcagcagcagcaacaacagcagcagcaacaggaagctgcagctgcagccgcagctgcagctgccgcagcagcagccgctgcggcagtcccccgtctcaggcctcctcacgataatagaaccatggtcgagatcattgcagatcaccccgctgagctggtgcggacagactcccccaattttctgtgcagcgttctcccatcacactggcgctgcaataaaacactccctgtggcttttaaggttgttgcgctgggagaggttcccgatggcaccgtcgtgactgtgatggcgggaaacgacgagaactattctgccgagctgagaaacgcgagtgctgttatgaagaatcaggtggcgagatttaacgacctacggttcgtgggcaggagcgggagaggtaagtcttttacattgactatcacagtctttaccaatccgccacaggtggctacttaccacagggccatcaaagtgacagtcgacggcccacgcgaacccaggaggcataggcaaaagctggacgattctaagccctccttgttttcagacaggttatctgacctgggcaggatcccacacccctccatgcgtgtgggtgtaccacctcagaatccaagacccagtctgaacagtgccccatctccctttaatccacaaggccagtcccagatcaccgatcccagacaggcacagtcgtcacccccatggtcttacgatcagtcctacccatcttacctatcccaaatgacatccccttctattcatagtactacaccattgagcagtaccagggggacgggtctgcccgctattactgacgtgccaagacgtatctcaggagcttccgagttgggtcctttctccgatccgcgtcaatttcctagtatctcctcgctgacagagagcaggttctcgaatccacgcatgcactacccggcaacattcacatatactcctcccgtgacaagtgggatgagcctcggtatgtccgctaccacgcattatcacacgtatctgccccctccttatcccggtagctcacagagtcagtccggtccttttcaaactagcagtactccatacttgtactatggtaccagtagcggaagttatcagtttccaatggtgccagggggagaccggagcccatcccgtatgctgccaccttgtacaacaactagcaatggatcgaccctactcaaccccaatttgcctaatcaaaacgatggagtggacgccgacggtagccattctagttcccctaccgtgttgaatagcagtggcaggatggatgagtctgtctggcgcccatattag

SEQ ID NO: 26163 - DNA, 1588 bp, Artificial Sequence
  derived and/or modified sequence
atggcatcaaacagcctcttcagcacagtgacaccatgtcagcaaaacttcttttgggatccgagcaccagccggcgcttcagccccccctccagcagcctgcagcccggcaaaatgagcgacgtgagcccggtggtggctgcgcaacagcagcagcaacagcagcagcagcaacagcagcagcagcagcagcaacagcagcagcagcagcaggaggcggcggcggcggctgcggcggcggcggcggctgcggcggcggcagctgcagtgccccggttgcggccgccccacgacaaccgcaccatggtggagatcatcgccgaccacccggccgaactcgtccgcaccgacagccccaacttcctgtgctcggtgctgccctcgcactggcgctgcaacaagaccctgcccgtggccttcaaggtggtagccctcggagaggtaccagatgggactgtggttactgtcatggcgggtaacgatgaaaattattctgctgagctccggaatgcctctgctgttatgaaaaaccaagtagcaaggttcaacgatctgagatttgtgggccggagtggacgaggcaagagtttcaccttgaccataaccgtcttcacaaatcctccccaagtagctacctatcacagagcaattaaagttacagtagatggacctcgggaacccagaaggcacagacagaagcttgatgactctaaacctagtttgttctctgaccgcctcagtgatttagggcgcattcctcatcccagtatgagagtaggtgtcccgcctcagaacccacggccctccctgaactctgcaccaagtccttttaatccacaaggacagagtcagattacagaccccaggcaggcacagtcttccccgccgtggtcctatgaccagtcttacccctcctacctgagccagatgacgtccccgtccatccactctaccaccccgctgtcttccacacggggcactgggcttcctgccatcaccgatgtgcctaggcgcatttcaggtgcttcagaactgggccctttttcagaccccaggcagttcccaagcatttcatccctcactgagagccgcttctccaacccacgaatgcactatccagccacctttacttacaccccgccagtcacctcaggcatgtccctcggtatgtccgccaccactcactaccacacctacctgccaccaccctaccccggctcttcccaaagccagagtggacccttccagaccagcagcactccatatctctactatggcacttcgtcaggatcctatcagtttcccatggtgccggggggagaccggtctccttccagaatgcttccgccatgcaccaccacctcgaatggcagcacgctattaaatccaaatttgcctaaccagaatgatggtgttgacgctgatggaagccacagcagttccccaactgttttgaattctagtggcagaatggatgaatctgtttggcgaccatattgaaattcctcagcagtggcccagtggtatctgggggccacatcccacacgtatcaatatatacatatatagagagagtgcatatatatgt

SEQ ID NO: 26164 - protein, 293 aa, Artificial Sequence
  derived and/or modified sequence
MPARSGAQFCRRMGQKKQRPARAGQPHSSSDAAQAPAEQPHSSSDAAQAPCPRERCLGPPTTPGPYRSIYFSSPKGHLTRLGLEFFDQPAVPLARAFLGQVLVRRLPNGTELRGRIVETEAYLGPEDEAAHSRGGRQTPRNRGMFMKPGTLYVYIIYGMYFCMNISSQGDGACVLLRALEPLEGLETMRQLRSTLRKGTASRVLKDRELCSGPSKLCQALAINKSFDQRDLAQDEAVWLERGPLEPSEPAVVAAARVGVGHAGEWARKPLRFYVRGSPWVSVVDRVAEQDTQA

SEQ ID NO: 26165 - DNA, 882 bp, Artificial Sequence
  derived and/or modified sequence
atgcccgccagaagcggcgcccagttctgcagaagaatgggccagaagaagcagagacccgccagagccggccagccccacagcagcagcgacgccgcccaggcccccgccgagcagccccacagcagcagcgacgccgcccaggccccctgccccagagagagatgcctgggcccccccaccacccccggcccctacagaagcatctacttcagcagccccaagggccacctgaccagactgggcctggagttcttcgaccagcccgccgtgcccctggccagagccttcctgggccaggtgctggtgagaagactgcccaacggcaccgagctgagaggcagaatcgtggagaccgaggcctacctgggccccgaggacgaggccgcccacagcagaggcggcagacagacccccagaaacagaggcatgttcatgaagcccggcaccctgtacgtgtacatcatctacggcatgtacttctgcatgaacatcagcagccagggcgacggcgcctgcgtgctgctgagagccctggagcccctggagggcctggagaccatgagacagctgagaagcaccctgagaaagggcaccgccagcagagtgctgaaggacagagagctgtgcagcggccccagcaagctgtgccaggccctggccatcaacaagagcttcgaccagagagacctggcccaggacgaggccgtgtggctggagagaggccccctggagcccagcgagcccgccgtggtggccgccgccagagtgggcgtgggccacgccggcgagtgggccagaaagcccctgagattctacgtgagaggcagcccctgggtgagcgtggtggacagagtggccgagcaggacacccaggcctag

SEQ ID NO: 26166 - DNA, 882 bp, Artificial Sequence
  derived and/or modified sequence
atgcctgcccggagtggagctcagttttgtcgtagaatgggacagaagaaacagcgacccgcccgcgccgggcaaccccactcatcgtcagatgcagcccaggccccggcagagcaacctcactctagctccgatgctgcccaggcaccatgcccgcgagaaagatgcctcggccctcctaccactcccggcccctaccgatcaatctacttttcttctcccaaggggcacttgacccgactcggactcgaattttttgaccagcccgcggtgccactagccagagctttcctgggtcaggtcctggtccggagactgccaaatgggacagagctgaggggccgtatcgtcgagactgaggcctacttggggcctgaggatgaggctgctcactctagaggaggacgccagactcccagaaacagaggcatgttcatgaagcccggtacactctacgtgtacataatttatggcatgtatttttgtatgaacatttcaagccagggtgacggggcctgcgtgctgttgcgtgctttagagcctttggaaggacttgaaaccatgagacagcttcgctccacactgcgtaaggggaccgcctcccgggtgttgaaggacagagaactgtgctcagggcccagtaagctgtgtcaggccctcgcaatcaacaaaagtttcgaccagagagacttagctcaggatgaggctgtctggctggaacgaggacccctggagccatctgagcctgctgtcgtggcagctgccagagtgggcgtgggtcatgccggagaatgggcccgcaagccactaaggttttacgtgcgtggaagcccttgggtgtccgtagtggaccgtgtagccgaacaagacacccaggcttag

SEQ ID NO: 26167 - DNA, 882 bp, Artificial Sequence
  derived and/or modified sequence
atgcctgcccggagcggggcccagttctgcaggaggatgggccagaagaagcagaggcctgcccgggccggccagccccacagcagcagtgatgctgcccaggccccagctgagcagccccacagcagcagtgatgctgcccaggccccctgcccccgggagcgctgcctgggcccccccaccaccccaggcccctaccgcagcatctacttcagcagccccaagggccacctgacccggctgggcctggagttctttgaccagcctgctgtgcccctggcccgggccttcctgggccaggtgctggtgcggcggctgcccaacggcacagagctgcggggccgcatcgtggagacagaggcctacctgggcccagaagatgaagctgcccacagccggggcggccggcagacccccaggaacagaggcatgttcatgaagccaggcaccctgtatgtgtacatcatctacggcatgtacttctgcatgaacatcagcagccagggagatggagcctgtgtgctgctgcgggccctggagcccctggagggcctggagaccatgaggcagctgcggagcaccctgaggaaaggaacagccagccgggtgctgaaggaccgggagctgtgcagcggccccagcaagctgtgccaggccctggccatcaacaagagctttgaccagagggacctggcccaggatgaggccgtgtggctggagcggggccccctggagcccagcgagcctgctgtggtggccgccgcccgggtgggcgtgggccacgccggggagtgggccaggaagcccctgcgcttctacgtgcggggcagcccctgggtgtctgtggtggacagagtggccgagcaggacacccaggcctag

SEQ ID NO: 26168 - DNA, 882 bp, Artificial Sequence
  derived and/or modified sequence
atgcccgcccggagcggcgcccagttctgccggcggatgggccagaagaaacaaaggcctgcacgagccgggcagccccattcctcaagtgatgccgcccaggctcctgcagaacagcctcatagcagcagtgacgccgctcaagctccctgccctcgggaaaggtgcctgggacctcccactactcccggcccgtaccggtctatctatttcagctcacctaaagggcacctcacaagactggggttggagtttttcgaccagcccgcagttcccctggctcgtgccttcctggggcaagtgctcgtgagacggttgccgaatggaaccgaactcagaggccggattgtggaaaccgaggcatacctcggtcccgaggacgaggcggcacattcccgcggtggacggcagacacccagaaataggggcatgtttatgaagccaggcacactctatgtctatataatatacggtatgtacttctgcatgaatattagctcccaaggcgacggtgcttgtgtgctgctgagggccctggaacccctggagggcctggaaactatgaggcagctgcgatccactcttcggaagggcacagcctcaagggtgcttaaggacagggaactatgctctgggccaagcaaactctgtcaggccctggctataaataagtccttcgatcaaagggatctggcacaagatgaggctgtgtggctcgagagaggacctttagagccatccgaaccagcagttgtagcagccgcgcgagtcggggttggacatgctggtgagtgggcgaggaaaccattgaggttttatgtgcgggggtccccttgggtttcagtcgtagacagagtggccgaacaggatacccaggcctag

SEQ ID NO: 26169 - DNA, 1205 bp, Artificial Sequence
  derived and/or modified sequence
cgcatcgggcccgggaatcggtccggacctggcggtgggcgctgggaagaggatccacctccacgtggcccgccccgccccgggggcgcagccagttcccggcgctcactgccccccttctcccggcttccgtccccttctgcgcaggcgccgctccgccccggtcctaggggtgcttccgtggtcggcggctgctgggctccgcgccggggtccgagtcccacgaagccccggcccgagccgccggatgcccgcgcgcagcggggcccagttttgccgacggatggggcaaaagaagcagcgaccagctagagcagggcagccacacagctcgtccgacgcagcccaggcacctgcagagcagccacacagctcgtccgatgcagcccaggcaccttgccccagggagcgctgcttgggaccgcccaccactccgggcccataccgcagcatctatttctcaagcccaaagggccaccttacccgactggggttggagttcttcgaccagccggcagtccccctggcccgggcatttctgggacaggtcctagtccggcgacttcctaatggcacagaactccgaggccgcatcgtggagaccgaggcatacctggggccagaggatgaagccgcccactcaaggggtggccggcagaccccccgcaaccgaggcatgttcatgaagccggggaccctgtacgtgtacatcatttacggcatgtacttctgcatgaacatctccagccagggggacggggcttgcgtcttgctgcgagcactggagcccctggaaggtctggagaccatgcgtcagcttcgcagcaccctccggaaaggcaccgccagccgtgtcctcaaggaccgcgagctctgcagtggcccctccaagctgtgccaggccctggccatcaacaagagctttgaccagagggacctggcacaggatgaagctgtatggctggagcgtggtcccctggagcccagtgagccggctgtagtggcagcagcccgggtgggcgtcggccatgcaggggagtgggcccggaaacccctccgcttctatgtccggggcagcccctgggtcagtgtggtcgacagagtggctgagcaggacacacaggcctgagcaaagggcctgcccagacaagattttttaattgtttaaaaaccgaataaatgttttatttctagaaaactgtgcc

SEQ ID NO: 26170 - DNA, 882 bp, Artificial Sequence
  derived and/or modified sequence
atgcctgctagatctggcgcacagttctgccggaggatgggccagaagaagcagcgccctgccagggcagggcaaccgcattcatcaagcgacgccgctcaagcgcctgctgaacagcctcatagctcttccgatgccgcacaggctccttgccccagagaaagatgtttgggtccccctaccacccctggcccataccgctccatctactttagctctccaaaggggcatcttacacggctggggctggaatttttcgaccagcctgctgtgccgctggccagagcattcctgggtcaggtgctggtccgcagactgcctaatgggaccgagcttcggggacggatagtcgagacggaggcgtaccttggacctgaagacgaggccgcacactcacgtggaggtagacagacgccaaggaaccggggtatgtttatgaaacccggaaccctgtacgtttatatcatatacggcatgtatttctgtatgaatatttcaagccagggcgatggggcttgtgtgctgttacgcgcactcgaaccgctcgagggattagagactatgagacagctgcgctctactctgcgaaagggaacagcttccagggttctgaaggatcgtgagctgtgtagtggacccagcaagttgtgtcaggcgctcgccatcaacaagtcgttcgatcaacgtgatctcgcacaggatgaggccgtttggcttgaacgcggtccactcgaaccgagtgagccggctgtcgtggccgctgccagagtgggcgtcgggcacgcaggagagtgggcaagaaagccccttcgcttttacgtgcggggaagcccatgggtatccgtcgtagatagggtggccgaacaggacacgcaggcctag

SEQ ID NO: 26171 - DNA, 846 bp, Artificial Sequence
  derived and/or modified sequence
atgggccagaagaagcagagacccgccagagccggccagccccacagcagcagcgacgccgcccaggcccccgccgagcagccccacagcagcagcgacgccgcccaggccccctgccccagagagagatgcctgggcccccccaccacccccggcccctacagaagcatctacttcagcagccccaagggccacctgaccagactgggcctggagttcttcgaccagcccgccgtgcccctggccagagccttcctgggccaggtgctggtgagaagactgcccaacggcaccgagctgagaggcagaatcgtggagaccgaggcctacctgggccccgaggacgaggccgcccacagcagaggcggcagacagacccccagaaacagaggcatgttcatgaagcccggcaccctgtacgtgtacatcatctacggcatgtacttctgcatgaacatcagcagccagggcgacggcgcctgcgtgctgctgagagccctggagcccctggagggcctggagaccatgagacagctgagaagcaccctgagaaagggcaccgccagcagagtgctgaaggacagagagctgtgcagcggccccagcaagctgtgccaggccctggccatcaacaagagcttcgaccagagagacctggcccaggacgaggccgtgtggctggagagaggccccctggagcccagcgagcccgccgtggtggccgccgccagagtgggcgtgggccacgccggcgagtgggccagaaagcccctgagattctacgtgagaggcagcccctgggtgagcgtggtggacagagtggccgagcaggacacccaggcctag

SEQ ID NO: 26172 - DNA, 756 bp, Artificial Sequence
  derived and/or modified sequence
atgggccagaagaagcagagacccgccagagccggccagccccacagcagcagcgacgccgcccaggcccccgccgagcagccccacagcagcagcgacgccgcccaggccccctgccccagagagagatgcctgggcccccccaccacccccggcccctacagaagcatctacttcagcagccccaagggccacctgaccagactgggcctggagttcttcgaccagcccgccgtgcccctggccagagccttcctgggccaggtgctggtgagaagactgcccaacggcaccgagctgagaggcagaatcgtggagaccgaggcctacctgggccccgaggacgaggccgcccacagcagaggcggcagacagacccccagaaacagaggcatgttcatgaagcccggcaccctgtacgtgtacatcatctacggcatgtacttctgcatgaacatcagcagccagggcgacggcgcctgcgtgctgctgagagccctggagcccctggagggcctggagaccatgagacagctgagaagcaccctgagaaagggcaccgccagcagagtgctgaaggacagagagctgtgcagcggccccagcaagctgtgccaggccctggccatcaacaagagcttcgaccagagagacctggcccaggacgaggccgtgtggctggagagaggccccctggagcccagcgagcccgccgtggtggccgccgccagagtgggcgtgggccacgccggctag

SEQ ID NO: 26173 - DNA, 846 bp, Artificial Sequence
  derived and/or modified sequence
atgggacaaaagaaacagcgacctgccagggctggccagcctcactcctcttctgatgccgctcaagccccagcagaacagcctcactcttcctccgacgcagcgcaggctccttgcccccgcgagcgctgcctgggtccacctactactcccggaccctatagaagcatttactttagtagccccaagggccaccttacccggttaggcctcgaatttttcgaccagcccgctgtaccgctggctcgggccttcctgggtcaggttttggtcagacggctccccaatggcacagagttgcgtgggcgtatcgtggagacagaggcctacttaggtcccgaagacgaagcagctcactctcgcggaggaaggcagaccccccggaaccggggtatgttcatgaaaccagggaccctctatgtgtacatcatatacggaatgtacttttgtatgaacatttccagccagggagacggcgcttgtgtgctgttaagagcgctggagccccttgaaggcctcgagacaatgcgtcagttgagatcgacattacgcaagggcaccgcttctcgagtcctcaaggatcgtgaattgtgcagtggaccctctaagctgtgccaggccctggccattaacaagtcctttgatcagagagatctggcccaggacgaggcagtgtggttagagagaggtcccctcgaacccagtgaacccgctgtagtagctgcggcgagggttggagtcgggcatgcgggcgagtgggctaggaaacccctgagattctacgttcgcggttccccatgggtgtccgtcgttgatcgggtcgctgaacaagacacacaggcgtag

SEQ ID NO: 26174 - DNA, 756 bp, Artificial Sequence
  derived and/or modified sequence
atgggccagaaaaaacaaagaccagcgcgggcaggacagcctcactctagtagcgatgcggcccaggctccggccgagcagccacattcatcatcagacgcagcccaggctccatgtcccagggagcggtgccttgggcctccgactacacctggtccctatagaagcatatatttttccagtcccaaggggcatctcaccagattaggactggaattttttgatcagccagccgtgccactggctagagcttttctggggcaggtcctggttaggcgattacccaatggtactgagctcagaggccggattgttgagaccgaagcttatctcgggcctgaggacgaagccgcccacagccgaggaggtcgccagactccacgtaaccgtggcatgttcatgaaacctggcactctatacgtttacatcatttatggtatgtacttttgtatgaacatctctagccaaggggatggggcctgcgttttgctcagggctctggagccactggagggtctggaaaccatgcgccagctgcggtccaccctgcgaaaaggtaccgcctctagggtactcaaagacagagagttgtgtagcgggccgagtaaactgtgccaggccttggctataaacaagagtttcgatcagcgggatctagctcaggacgaggctgtgtggttggaaagagggcctctcgaacccagcgaacctgctgtggtggcggcagccagggtcggtgtgggccacgcaggatag

SEQ ID NO: 26175 - DNA, 846 bp, Artificial Sequence
  derived and/or modified sequence
atgggccagaagaagcagaggcctgcccgggccggccagccccacagcagcagtgatgctgcccaggccccagctgagcagccccacagcagcagtgatgctgcccaggccccctgcccccgggagcgctgcctgggcccccccaccaccccaggcccctaccgcagcatctacttcagcagccccaagggccacctgacccggctgggcctggagttctttgaccagcctgctgtgcccctggcccgggccttcctgggccaggtgctggtgcggcggctgcccaacggcacagagctgcggggccgcatcgtggagacagaggcctacctgggcccagaagatgaagctgcccacagccggggcggccggcagacccccaggaacagaggcatgttcatgaagccaggcaccctgtatgtgtacatcatctacggcatgtacttctgcatgaacatcagcagccagggagatggagcctgtgtgctgctgcgggccctggagcccctggagggcctggagaccatgaggcagctgcggagcaccctgaggaaaggaacagccagccgggtgctgaaggaccgggagctgtgcagcggccccagcaagctgtgccaggccctggccatcaacaagagctttgaccagagggacctggcccaggatgaggccgtgtggctggagcggggccccctggagcccagcgagcctgctgtggtggccgccgcccgggtgggcgtgggccacgccggggagtgggccaggaagcccctgcgcttctacgtgcggggcagcccctgggtgtctgtggtggacagagtggccgagcaggacacccaggcctag

SEQ ID NO: 26176 - DNA, 756 bp, Artificial Sequence
  derived and/or modified sequence
atgggccagaagaagcagaggcctgcccgggccggccagccccacagcagcagtgatgctgcccaggccccagctgagcagccccacagcagcagtgatgctgcccaggccccctgcccccgggagcgctgcctgggcccccccaccaccccaggcccctaccgcagcatctacttcagcagccccaagggccacctgacccggctgggcctggagttctttgaccagcctgctgtgcccctggcccgggccttcctgggccaggtgctggtgcggcggctgcccaacggcacagagctgcggggccgcatcgtggagacagaggcctacctgggcccagaagatgaagctgcccacagccggggcggccggcagacccccaggaacagaggcatgttcatgaagccaggcaccctgtatgtgtacatcatctacggcatgtacttctgcatgaacatcagcagccagggagatggagcctgtgtgctgctgcgggccctggagcccctggagggcctggagaccatgaggcagctgcggagcaccctgaggaaaggaacagccagccgggtgctgaaggaccgggagctgtgcagcggccccagcaagctgtgccaggccctggccatcaacaagagctttgaccagagggacctggcccaggatgaggccgtgtggctggagcggggccccctggagcccagcgagcctgctgtggtggccgccgcccgggtgggcgtgggccacgccggctag

SEQ ID NO: 26177 - DNA, 846 bp, Artificial Sequence
  derived and/or modified sequence
atgggccagaagaagcagcggcccgcccgggccggccagccccacagctcatcagacgcagcacaggccccagctgagcagcctcatagcagctcagacgccgcacaggccccctgccccagggagcggtgtttaggaccccctaccacacccggcccctaccgctccatatattttagttctcccaaaggccacctcaccaggctggggcttgagttcttcgaccagcccgccgtcccattggccagggcattcctcgggcaggtattggtccggcgcctgcccaacggaactgagcttcggggacgcattgtcgagacagaagcctatctagggccagaggacgaggctgctcactcccgcggcggtagacagacaccacgcaatagagggatgttcatgaagcccgggaccttgtacgtttacatcatttatggcatgtatttttgtatgaacattagctcgcagggagatggtgcatgtgttctgctccgagcgctcgagcccctcgaggggctggagactatgagacaactgcgcagcacactcagaaagggaactgctagtagagtgctgaaagaccgtgagttatgttccggtcccagcaaactgtgtcaagcactggcaatcaataagagtttcgatcagagggacttggcacaggatgaggcagtctggttagagcggggcccgctcgagccatccgagccagcagtggtggccgccgccagagttggggttgggcacgccggggagtgggcgcggaaaccattacgcttctatgtgcgcgggagcccttgggtaagcgttgttgaccgtgttgcggagcaggatacgcaagcgtag

SEQ ID NO: 26178 - DNA, 756 bp, Artificial Sequence
  derived and/or modified sequence
atgggccagaagaagcagcggcccgcccgggccggccagccccacagctcttcggacgctgcacaggctcctgcagaacaaccacactcaagttcggatgcagcacaggcaccctgccctagagaaagatgcctgggaccgcccacaacccctggcccatacaggtctatctatttttccagtcctaagggccacctgacacggctgggtctggagttcttcgaccagcctgcagtcccattggcgagagcattcctggggcaagttctcgtacgacgcctccccaacggaacggaactgagaggccggatcgtggagacagaagcctacctcggacctgaggacgaagccgctcactctcgcggtggccggcagacgccccgcaaccgcggcatgttcatgaagcctggcactctttatgtgtacataatctacggaatgtatttttgcatgaacattagtagccagggcgatggcgcatgcgtactcctacgagcgctggaaccgcttgaaggactggagactatgcggcagctcaggagcacactccgaaaaggcaccgcttccagggtactgaaagaccgtgaactatgttccggaccgagtaagctgtgccaggcactcgccattaataagtcgtttgaccagagagatcttgcacaggatgaggccgtgtggcttgaacgtggaccacttgagccctccgagccggcggtagtggccgctgctcgggtgggagtgggccacgctggctag

SEQ ID NO: 26179 - DNA, 846 bp, Artificial Sequence
  derived and/or modified sequence
atgggacagaaaaaacagcgacctgccagagcaggacagccccacagctcctccgatgcagcgcaggccccagctgagcagccacattcaagctctgacgcagctcaagcgccttgcccgagggagaggtgtctggggccaccaactaccccgggtccttataggagcatctacttttctagcccgaagggtcatctcacccggttaggcctggagtttttcgaccaaccagctgtgccactagcacgggctttccttggccaggtccttgtgcggaggctgcctaatggcactgagcttagagggcgaatcgtcgagacagaagcatatctggggcctgaggacgaggctgctcattcacggggaggcaggcaaacacctcggaatagaggcatgtttatgaagcctgggacattatacgtgtatataatctatggaatgtatttttgtatgaacattagctcacagggggacggtgcttgtgtcctcctccgtgccctcgaaccacttgaaggcctggagactatgcgccagctgagaagtaccctaaggaagggaacagcgtctcgtgtactaaaggatagggaactctgtagtggaccttccaaattgtgccaagcgctggccataaacaaaagttttgatcagagagacttggcgcaggacgaagccgtctggcttgagagaggacctttggagcccagcgagccagctgtggtagcggcagctagagtgggtgttggacacgccggagagtgggccagaaagcctctgaggttctacgttagaggatcaccctgggtctccgtcgtagacagagtggccgaacaggatacgcaggcatag

SEQ ID NO: 26180 - DNA, 756 bp, Artificial Sequence
  derived and/or modified sequence
atgggccaaaagaaacagaggcccgcaagagctgggcagccccactcgagcagcgacgcagctcaggctcccgctgagcagccgcactcttccagcgacgcggctcaggcaccgtgcccccgtgagcggtgtctcggccctccaaccacccctggaccgtataggtccatctacttctccagcccaaagggccaccttactcgcttgggtctggagtttttcgatcaaccagctgtacctttagcacgcgcttttctgggccaagttctcgttagacgtctgcccaacggtaccgagctccgtggcagaatagttgaaacagaagcttacctcggtcccgaggatgaagcagcccacagccgtggcggacggcagactccaaggaaccgagggatgttcatgaagcctgggaccttgtatgtttatataatctacggaatgtatttttgcatgaacatttccagccagggcgatggggcatgtgtgcttttgcgtgctctcgaaccactagaagggctggagacaatgcgacagttgcgaagcaccttgcgtaagggtaccgccagcagagtccttaaggatagagaactgtgtagcggtccatcaaagctgtgccaggctcttgcgattaacaagtcatttgaccagagggatttggctcaggacgaggccgtctggttggaacgaggaccactcgaacccagcgaaccggcagttgtggccgcagcgagggtgggtgttggacatgccggatag

SEQ ID NO: 26181 - DNA, 846 bp, Artificial Sequence
  derived and/or modified sequence
atgggacagaagaaacagaggcctgcgcgggccggtcagccacactcctcatctgatgccgcccaagctcctgcagaacagccgcacagctcaagcgatgctgcccaagccccatgcccacgagagagatgtctgggacccccaacgacgccgggaccttatcgctcaatctatttctcttctcccaagggccatcttacacggttaggccttgagttctttgaccagccagccgtccccttggccagggcattcctgggccaggtgctcgtgagacggttacccaacggcactgaactgagagggaggatcgtggagaccgaagcctacctgggtcctgaagacgaagccgcacattcaagggggggccgccaaactcctcgcaacaggggaatgttcatgaagcccgggacattatacgtgtacattatttatggcatgtacttctgtatgaacatcagttctcagggcgacggtgcctgcgttctccttcgcgctctagaacccctggaagggctcgaaacaatgaggcagctacgctctactctcaggaaaggcaccgcgtctcgtgtcctaaaggatcgcgaactctgttccgggcccagtaagttatgtcaggcccttgctatcaacaagtccttcgaccagagagatcttgcacaggatgaagctgtgtggctcgagcgaggtcctctggagccttcagaaccagcggtggttgccgctgccagggtcggtgtgggccacgcaggagagtgggctagaaagcctttgaggttctacgtcagaggtagcccatgggtgtccgtcgtggatcgggttgccgagcaagacacacaggcctag

SEQ ID NO: 26182 - DNA, 846 bp, Artificial Sequence
  derived and/or modified sequence
atgggccagaagaagcagcggcccgcccgggccggccagccccactcgagcagtgatgcagctcaagcccccgctgaacagcctcacagctcatctgatgccgcccaagccccatgccctagagagaggtgtctggggccaccaacaacccccggcccatatcgttccatctatttttcaagtcctaaggggcacctcacccggctgggcctagagttttttgatcagccagcggtgcctcttgcacgagcatttctgggacaggtgctggtgcgacgtcttcctaacggcacagaactacggggacgaattgtggaaacagaagcctatctgggacctgaggatgaggctgcacacagccgcggcggtaggcagaccccaaggaatcggggaatgtttatgaagcccggcaccttgtatgtatacatcatctacggcatgtacttttgcatgaacatcagtagtcagggggacggtgcctgtgtgctcctgcgcgcactcgaaccactcgaaggccttgagacaatgcgacagctgaggagcacactgagaaaagggacagcttcgcgagtcctaaaagatagggaactgtgttccgggccaagcaagctgtgccaggccctggcaattaacaaatccttcgaccagcgagacctcgcacaagacgaggccgtgtggctggagcgcgggcctctcgaaccctctgagccagccgtggtggccgcggcaagagtgggagtggggcacgctggagaatgggcccgcaagccactgcgtttctacgtacgcgggtcgccttgggtaagcgtggtcgatcgggtggctgagcaggatactcaagcctag

SEQ ID NO: 26183 - DNA, 846 bp, Artificial Sequence
  derived and/or modified sequence
atgggccagaagaagcaaaggcccgctcgggcaggccagccccactcatccagcgatgcagctcaggcacctgccgagcagccacattcgtcgagcgacgcagcacaggcgccttgccccagagagcggtgtttgggccctcccaccacccctggcccttatcgatccatctacttcagctcccccaagggacatcttacgcggctcggtctcgaattttttgaccagcctgccgtgcctcttgcacgagcattcttgggacaagttctggtgagaaggctgcctaacggaaccgaactgcgcggacggatagttgaaactgaagcttatttaggaccggaggacgaggcggctcactcaaggggtggtagacaaacccccagaaaccgcggtatgttcatgaagccaggaacgttgtacgtgtacataatctatgggatgtacttctgcatgaatatttcatcgcagggagacggcgcttgtgtacttttgagagccctcgagccacttgaaggcctggagaccatgcgacagctgagatccactcttaggaagggaactgcgtcccgggtattaaaagatagggagctgtgttccggaccgtccaagctgtgccaggccttggccatcaacaaaagctttgatcagagggacttagctcaggacgaagccgtctggctagagagaggtccactggagccctcagagcctgctgtcgtggcagccgcaagggtcggtgtgggccatgccggagaatgggcaagaaaacctctgcgattttatgtccgcggaagtccgtgggtgtctgtggtggacagggttgcggaacaggatactcaggcatag

SEQ ID NO: 26184 - protein, 563 aa, Artificial Sequence
  derived and/or modified sequence
MFSRNHRSRVTVARGSALEMEFKRGRFRLSLFSDLPEDTELQRKLDHEIRMREGACKLLAACSQREQALEATKSLLVCNSRILSYMGELQRRKEAQVLGKTSRRPSDSGPPAERSPCRGRVCISDLRIPLMWKDTEYFKNKGDLHRWAVFLLLQLGEHIQDTEMILVDRTLTDISFQSNVLFAEAGPDFELRLELYGACVEEEGALTGGPKRLATKLSSSLGRSSGRRVRASLDSAGGSGSSPILLPTPVVGGPRYHLLAHTTLTLAAVQDGFRTHDLTLASHEENPAWLPLYGSVCCRLAAQPLCMTQPTASGTLRVQQAGEMQNWAQVHGVLKGTNLFCYRQPEDADTGEEPLLTIAVNKETRVRAGELDQALGRPFTLSISNQYGDDEVTHTLQTESREALQSWMEALWQLFFDMSQWKQCCDEIMKIETPAPRKPPQALAKQGSLYHEMAIEPLDDIAAVTDILTQREGARLETPPPWLAMFTDQPALPNPCSPASVAPAPDWTHPLPWGRPRTFSLDAVPPDHSPRARSVAPLPPQRSPRTRGLCSKGQPRTWLQSPV

SEQ ID NO: 26185 - protein, 513 aa, Artificial Sequence
  derived and/or modified sequence
MREGACKLLAACSQREQALEATKSLLVCNSRILSYMGELQRRKEAQVLGKTSRRPSDSGPPAERSPCRGRVCISDLRIPLMWKDTEYFKNKGDLHRWAVFLLLQLGEHIQDTEMILVDRTLTDISFQSNVLFAEAGPDFELRLELYGACVEEEGALTGGPKRLATKLSSSLGRSSGRRVRASLDSAGGSGSSPILLPTPVVGGPRYHLLAHTTLTLAAVQDGFRTHDLTLASHEENPAWLPLYGSVCCRLAAQPLCMTQPTASGTLRVQQAGEMQNWAQVHGVLKGTNLFCYRQPEDADTGEEPLLTIAVNKETRVRAGELDQALGRPFTLSISNQYGDDEVTHTLQTESREALQSWMEALWQLFFDMSQWKQCCDEIMKIETPAPRKPPQALAKQGSLYHEMAIEPLDDIAAVTDILTQREGARLETPPPWLAMFTDQPALPNPCSPASVAPAPDWTHPLPWGRPRTFSLDAVPPDHSPRARSVAPLPPQRSPRTRGLCSKGQPRTWLQSPV

SEQ ID NO: 26186 - DNA, 1692 bp, Artificial Sequence
  derived and/or modified sequence
atgttttcgcgcaatcaccgctcgagagtaacggtggcaagagggtccgcccttgagatggaattcaagaggggaaggttccgcctgagccttttctcagacttacctgaggacactgaactgcagcgcaaactggaccacgaaatcagaatgcgcgagggcgcctgtaagctgctggccgcatgcagccaaagagagcaggcgctggaagccaccaagtctctgctggtgtgcaatagccggatactgagttatatgggcgaactgcaacggagaaaagaagcgcaggtcctgggaaaaaccagcagaaggcctagtgactcgggaccaccagccgaacgctcgccatgcagagggcgtgtgtgcattagcgatcttcgcatacccctgatgtggaaggatacagagtatttcaagaataaaggtgatcttcatcgatgggcggtgtttctgctacttcagctcggtgaacatatacaggacacggaaatgatactggtggatcgaactctgactgatataagcttccagagcaatgtgttgtttgcagaggcaggacccgactttgaactgcgtctggagttatacggagcgtgcgttgaagaggagggcgcgctcacaggtggccccaagcggctggccactaagttgagttcaagcctcggtaggtcttcaggaaggcgcgtccgcgcctcactggatagcgccgggggctctggatctagccctatcctgcttcccacaccagtggtaggcgggccgcgatatcacctcctggcccacacaaccctgacactcgccgccgtgcaggacggctttcgaactcacgacctgaccttggcatcacatgaggagaatcccgcttggttgccactgtacggctcggtgtgttgtcgactcgccgcgcagcccttgtgtatgacacagccgaccgcaagtggaacgctccgggtccagcaggcaggagaaatgcaaaattgggcccaggtacacggggttctgaagggaacgaatctcttttgctataggcagcctgaggacgcagacacgggcgaggagcctctcttaacgatcgctgtgaacaaggagactagagttcgcgcgggggaactggaccaggcgttgggacggccttttacgcttagcattagtaaccaatacggcgacgacgaagtgactcatacgctgcagaccgagtcccgtgaggccctccagtcatggatggaagccctgtggcagctttttttcgatatgagtcaatggaagcagtgctgtgacgagattatgaaaatcgagacacccgcgcccagaaagccccctcaggctttagcaaagcagggaagtctgtaccatgagatggcaatcgagcccctcgatgacattgcagctgtcactgacatcttaacccagagagaaggcgcgaggctggagactcccccaccatggcttgcaatgttcacagatcagcccgcactgcctaatccttgctcacctgcttccgtcgcccccgctcccgactggacccatccactgccgtggggccgaccacgaactttctcactagatgctgttcctcctgaccacagtcccagagctaggtcggtagcacctttaccaccgcagcgctcccctcgcacccggggactttgctctaaaggccagccaagaacttggctacagtcacccgtatag

SEQ ID NO: 26187 - DNA, 1692 bp, Artificial Sequence
  derived and/or modified sequence
atgttcagcaggaaccacaggagccgggtgacagtggcccggggcagcgccctggagatggagttcaagaggggccgcttccggctgagcctcttcagtgacctgcctgaggacacagagctgcagaggaagctggaccacgagatccgcatgagggagggcgcctgcaagctgctggccgcctgcagccagcgggagcaggccctggaggccaccaagagcctgctggtgtgcaacagccgcatcctgagctacatgggagagctgcagaggaggaaggaggcccaggtgctgggcaagaccagcagaagacccagcgacagcggccccccagctgagaggagcccctgccggggccgggtgtgcatcagtgacctgcgcatccccctgatgtggaaggacacagagtacttcaagaacaagggggacctgcaccgctgggccgtgttcctgctgctgcagctgggggagcacatccaggacacagagatgatcctggtggacaggaccctgacagacatctccttccagagcaatgtgctgtttgctgaggccggccctgactttgagctgcggctggagctgtatggagcctgtgtggaggaggagggcgccctgactggaggccccaagaggctggccaccaagctgagcagcagcctgggccgcagcagtggaagaagagtgcgggccagcctggacagcgctgggggcagcggcagcagccccatcctgctgcccacccctgtggtgggcggcccccgctaccacctgctggcccacaccaccctgaccctggccgctgtgcaggacggcttccgcacccatgacctgaccctggccagccatgaagaaaatcctgcctggctgcccctgtatggctctgtgtgctgccgcctggccgcccagcccctgtgcatgacccagcccacagccagcggcaccctgcgggtgcagcaggccggggagatgcagaactgggcccaggtgcatggagtgctgaagggcaccaacctcttctgctaccggcagccagaagatgctgacaccggggaggagcccctgctgaccatcgctgtgaacaaggagaccagggtgcgggccggggagctggaccaggccctgggccggcccttcaccctgagcatcagcaaccagtatggagatgatgaggtgacccacaccctgcagacagagagccgggaggccctgcagagctggatggaggccctgtggcagctgttctttgacatgagccagtggaagcagtgctgtgatgagatcatgaagattgagaccccagcccccaggaagccaccccaggccctggccaagcagggcagcctgtaccacgagatggccatcgagcccctggatgacattgctgctgtgacagacatcctgacccagcgggagggcgcccggctggagaccccaccaccctggctggccatgttcacagaccagcctgccctgcccaacccctgcagccctgcctctgtggccccagccccagactggacccaccccctgccctggggccggcccaggaccttcagcctggatgctgtgcccccagaccacagcccccgggcccggtctgtggcccccctgcccccccagaggagccccaggacccggggcctgtgcagcaagggccagcccaggacctggctgcagagccctgtgtag

SEQ ID NO: 26188 - DNA, 1692 bp, Artificial Sequence
  derived and/or modified sequence
atgttcagccggaaccaccggagccgggtgaccgtggcccggggctccgctctggaaatggagtttaaacggggtagattccggctgagcttgttttccgacctgcccgaagatacggaactgcaacgaaagctggatcatgaaattagaatgagggaaggagcctgtaagctgctggcagcgtgcagccagagagaacaggctttagaggctacaaagtctttactggtctgtaattcccgcatcctctcttacatgggcgaactccagcggagaaaggaggcacaggttctggggaaaacttctcggcgtcccagtgatagtggtcctcctgccgaacgcagtccgtgcagggggagagtatgtataagtgacctccgcattccactgatgtggaaagatactgagtattttaagaacaagggtgacctacaccggtgggctgttttcctcttattacagctcggagaacacatacaggacactgaaatgattttggtggataggactttaaccgatatttctttccagagtaatgttctgttcgcagaagcagggccggattttgaattgcggctggagctctacggggcttgcgtggaggaagagggggcactgaccgggggacccaaacggctcgcaactaaactgtcctcctcgctgggaagatcaagcggcagaagggtccgcgcttcacttgacagcgcaggcgggtccggttcgagtcccatattactgcccactcctgtggtgggagggcctcgctatcacctgctggcacacaccacgctgacactggccgccgtgcaggatggtttcaggacccacgacttaaccttggcgagccatgaagagaatcccgcatggctgcccctgtacgggagtgtgtgctgcagattagcagctcaaccattgtgcatgacacagccgactgcctctggcaccctgcgagtgcagcaggccggggagatgcagaattgggcccaagtccacggggtcctgaaaggtaccaatctgttctgttatcgacaaccagaggacgccgatactggagaagagccgttgctcacgattgctgtaaacaaagaaacgcgggttcgagcgggtgagctggaccaagctctgggccgaccatttacactcagcatttctaatcagtacggggatgacgaggtgacacataccctgcagactgaatcccgagaggccctccaatcttggatggaggctctgtggcaactgttttttgacatgagccagtggaaacagtgctgcgatgaaatcatgaagatcgaaactccagcaccgcgcaagcctcctcaggccctagctaaacagggcagcctctaccacgaaatggccatcgagccactggatgacatcgccgccgttactgacatcctgacccagagagagggcgcccgattagaaacaccgcctccatggctcgcgatgtttacagatcaacctgctttaccgaatccatgcagcccagcctctgtggcccctgcccctgactggacccatccgcttccttggggtcggccaaggaccttctctctagatgccgtgccacccgaccacagccccagagcacgctccgtcgctccccttcctccccaacgctctcctcggaccagaggattatgcagtaagggccagccccggacctggcttcagagtccagtctag

SEQ ID NO: 26189 - DNA, 1692 bp, Artificial Sequence
  derived and/or modified sequence
atgttcagtaggaaccatagatccagagtgaccgtggctcgaggaagcgctctggagatggaatttaagcgcggaaggttcagactgtctttattctcagatctgcccgaagacactgagcttcaaaggaagctggaccatgagatcaggatgcgggagggcgcttgcaaacttctggctgcatgcagccagagagagcaggcccttgaagccacaaaaagtctgctcgtgtgcaactctaggatcctgtcctacatgggagaattgcaacgcagaaaggaagcacaagtcctggggaagaccagccgccgaccaagcgattccggcccacccgcagaacgcagcccatgcagggggagagtgtgcatcagcgaccttcgcatccccctcatgtggaaggacaccgaatatttcaagaacaagggggaccttcataggtgggccgtattcttgctgctccagcttggcgagcacatccaggatacagagatgatcctggtcgatcgtaccctgacagatatctccttccagtctaacgtgctgttcgctgaagcgggtcccgactttgagctgaggcttgaattatatggcgcatgcgtagaggaggagggggctctgaccggcggacctaaacgactggcgactaaactctcaagtagtctcggcagatcctcagggagacgggtgcgcgcttcccttgatagcgctgggggatctggcagtagtcctattctattgcccactccagttgtgggaggacctcggtatcaccttctcgcccatacaaccctaactctggccgcagttcaggatgggtttcggacccacgatttgacactcgcttctcacgaagaaaaccccgcttggctccctctgtacgggagcgtgtgttgtcgcctggccgctcagcctctgtgcatgacacagcctacagcctcaggaacccttagggtacagcaggccggtgaaatgcaaaattgggctcaagtgcatggggttcttaaagggaccaaccttttctgctatagacagcccgaagacgccgacactggagaggaacccctactgacaatcgcggtgaacaaggaaacacgcgtgcgtgccggtgaactggatcaggccttggggagaccctttaccctgtcgatctcaaaccagtatggcgatgatgaagtaactcataccctccagactgaatcgcgcgaagctctccagtcatggatggaggccctctggcagttgttctttgacatgtcccagtggaagcagtgctgtgatgagatcatgaaaatcgagacacctgcccctcgaaaaccgccacaggcccttgcgaaacagggatccttatatcatgagatggccatcgagcccctcgatgacatcgcggcagtgactgacatcttaactcagcgggaaggggctagactcgaaacaccacctccctggttggccatgttcactgatcagcctgccctcccgaacccttgctctcccgcaagtgtcgctccggctcctgactggacccacccactgccctggggccgacctcgcacattcagtctcgacgctgttccacctgaccattccccaagagcgaggagcgtggcccctctcccccctcagagatcccccagaactaggggtctctgttctaagggacagccgaggacctggttacagtctccagtatag

SEQ ID NO: 26190 - DNA, 2142 bp, Artificial Sequence
  derived and/or modified sequence
cgagagacagaagccgaggagaggaggctaagccgggcggcgcggggagcgcactgagcaggcaaagtcgcagggccgccagcatgttctcccgaaaccaccggagccgggtcaccgtggccaggggctccgccctggagatggagttcaaacgcggccgcttccgactcagcctcttcagcgacctgcccgaggacacggagttgcagaggaagctagaccatgagatccggatgagggaaggggcctgtaagctgctggcagcctgctcccagcgagagcaggctctggaggccaccaagagcctgctagtgtgcaacagccgcatcctcagctacatgggcgagctgcagcggcgcaaggaggcgcaggtgctggggaagacaagccggcggccttctgacagtggcccgcccgctgagcgctccccctgccgcggccgggtctgcatctctgacctccggattccactcatgtggaaggacacagaatatttcaagaacaaaggtgacttgcaccgctgggctgtgttcctgctgctgcagctgggggaacacatccaggacacagagatgatcctagtggacaggaccctcacagacatctcctttcagagcaatgtgctcttcgctgaggcggggccagactttgaactgcggttagagctgtatggggcctgtgtggaagaagagggggccctgactggcggccccaagaggcttgccaccaaactcagcagctccctgggccgctcctcagggaggcgtgtccgggcatcgctggacagtgctgggggttcagggagcagtcccatcttgctccccaccccagttgttggtggtcctcgttaccacctcttggctcacaccacactcaccctggcagcagtgcaagatggattccgcacacatgacctcacccttgccagtcatgaggagaaccctgcctggctgcccctttatggtagcgtgtgttgccgtctggcagctcagcctctctgcatgactcagcccactgcaagtggtaccctcagggtgcagcaagctggggagatgcagaactgggcacaagtgcatggagttctgaaaggcacaaacctcttctgttaccggcaacctgaggatgcagacactggggaagagccgctgcttactattgctgtcaacaaggagactcgagtccgggcaggggagctggaccaggctctaggacggcccttcaccctaagcatcagtaaccagtatggggatgatgaggtgacacacacccttcagacagaaagtcgggaagcactgcagagctggatggaggctctgtggcagcttttctttgacatgagccaatggaagcagtgctgtgatgaaatcatgaaaattgaaactcctgctccccggaaaccaccccaagcactggcaaagcaggggtccttgtaccatgagatggctattgagccgctggatgacatcgcagcggtgacagacatcctgacccagcgggagggcgcaaggctggagacacccccaccctggctggcaatgtttacagaccagcctgccctgcctaacccctgctcgcctgcctcagtggccccagccccagactggacccaccccctgccctgggggagaccccgaaccttttccctggatgctgtccccccagaccactcccctagggctcgctcggttgcccccctcccacctcagcgatccccacggaccagaggcctctgcagcaaaggccaacctcgcacttggctccagtcaccagtgtgagagagaaaggtgctggcataggatctgcccagaagagaaaatgacccatgcgcagttgggctctggatacggcgctgtctatagcaagttggccagtctggcctcctgttcctctgctggacctggggtaggctgcaggggtgggcagaagcccctcttaaattgtggttgccatggtaccgagggactcattcctggggctcgctgggacctccctaaacccttcctggaagaaaactggaaccaactctgccctacctccctgcactaaccagctttgaggatggcactgaagaacccttggagcaaacatacctcccttgtgactcccacatcaaccattaaagttatttaacagcagccttca

SEQ ID NO: 26191 - DNA, 2220 bp, Artificial Sequence
  derived and/or modified sequence
ggaggggcctgtgagctggggccgcccctgggattagcccggccttcggggacagctcggaggagctggggcggagccgcagggcctggcggccgccgagtgaagtgtgactccgtgggcctggcgtggaggcgggggcgctaggctgcagctggctcggaatcggggctggtttcctgtctggaagggaaggggcctgcagaagggagcggggacagcagcagacaggcacacccctgccttcctctctccctctcctcccttctctggaaaagcgaggacacggagttgcagaggaagctagaccatgagatccggatgagggaaggggcctgtaagctgctggcagcctgctcccagcgagagcaggctctggaggccaccaagagcctgctagtgtgcaacagccgcatcctcagctacatgggcgagctgcagcggcgcaaggaggcgcaggtgctggggaagacaagccggcggccttctgacagtggcccgcccgctgagcgctccccctgccgcggccgggtctgcatctctgacctccggattccactcatgtggaaggacacagaatatttcaagaacaaaggtgacttgcaccgctgggctgtgttcctgctgctgcagctgggggaacacatccaggacacagagatgatcctagtggacaggaccctcacagacatctcctttcagagcaatgtgctcttcgctgaggcggggccagactttgaactgcggttagagctgtatggggcctgtgtggaagaagagggggccctgactggcggccccaagaggcttgccaccaaactcagcagctccctgggccgctcctcagggaggcgtgtccgggcatcgctggacagtgctgggggttcagggagcagtcccatcttgctccccaccccagttgttggtggtcctcgttaccacctcttggctcacaccacactcaccctggcagcagtgcaagatggattccgcacacatgacctcacccttgccagtcatgaggagaaccctgcctggctgcccctttatggtagcgtgtgttgccgtctggcagctcagcctctctgcatgactcagcccactgcaagtggtaccctcagggtgcagcaagctggggagatgcagaactgggcacaagtgcatggagttctgaaaggcacaaacctcttctgttaccggcaacctgaggatgcagacactggggaagagccgctgcttactattgctgtcaacaaggagactcgagtccgggcaggggagctggaccaggctctaggacggcccttcaccctaagcatcagtaaccagtatggggatgatgaggtgacacacacccttcagacagaaagtcgggaagcactgcagagctggatggaggctctgtggcagcttttctttgacatgagccaatggaagcagtgctgtgatgaaatcatgaaaattgaaactcctgctccccggaaaccaccccaagcactggcaaagcaggggtccttgtaccatgagatggctattgagccgctggatgacatcgcagcggtgacagacatcctgacccagcgggagggcgcaaggctggagacacccccaccctggctggcaatgtttacagaccagcctgccctgcctaacccctgctcgcctgcctcagtggccccagccccagactggacccaccccctgccctgggggagaccccgaaccttttccctggatgctgtccccccagaccactcccctagggctcgctcggttgcccccctcccacctcagcgatccccacggaccagaggcctctgcagcaaaggccaacctcgcacttggctccagtcaccagtgtgagagagaaaggtgctggcataggatctgcccagaagagaaaatgacccatgcgcagttgggctctggatacggcgctgtctatagcaagttggccagtctggcctcctgttcctctgctggacctggggtaggctgcaggggtgggcagaagcccctcttaaattgtggttgccatggtaccgagggactcattcctggggctcgctgggacctccctaaacccttcctggaagaaaactggaaccaactctgccctacctccctgcactaaccagctttgaggatggcactgaagaacccttggagcaaacatacctcccttgtgactcccacatcaaccattaaagttatttaacagca

SEQ ID NO: 26192 - DNA, 1692 bp, Artificial Sequence
  derived and/or modified sequence
atgttcagcagaaaccacagaagcagagtgaccgtggccagaggcagcgccctggagatggagttcaagagaggcagattcagactgagcctgttcagcgacctgcccgaggacaccgagctgcagagaaagctggaccacgagatcagaatgagagagggcgcctgcaagctgctggccgcctgcagccagagagagcaggccctggaggccaccaagagcctgctggtgtgcaacagcagaatcctgagctacatgggcgagctgcagagaagaaaggaggcccaggtgctgggcaagaccagcagaagacccagcgacagcggcccccccgccgagagaagcccctgcagaggcagagtgtgcatcagcgacctgagaatccccctgatgtggaaggacaccgagtacttcaagaacaagggcgacctgcacagatgggccgtgttcctgctgctgcagctgggcgagcacatccaggacaccgagatgatcctggtggacagaaccctgaccgacatcagcttccagagcaacgtgctgttcgccgaggccggccccgacttcgagctgagactggagctgtacggcgcctgcgtggaggaggagggcgccctgaccggcggccccaagagactggccaccaagctgagcagcagcctgggcagaagcagcggcagaagagtgagagccagcctggacagcgccggcggcagcggcagcagccccatcctgctgcccacccccgtggtgggcggccccagataccacctgctggcccacaccaccctgaccctggccgccgtgcaggacggcttcagaacccacgacctgaccctggccagccacgaggagaaccccgcctggctgcccctgtacggcagcgtgtgctgcagactggccgcccagcccctgtgcatgacccagcccaccgccagcggcaccctgagagtgcagcaggccggcgagatgcagaactgggcccaggtgcacggcgtgctgaagggcaccaacctgttctgctacagacagcccgaggacgccgacaccggcgaggagcccctgctgaccatcgccgtgaacaaggagaccagagtgagagccggcgagctggaccaggccctgggcagacccttcaccctgagcatcagcaaccagtacggcgacgacgaggtgacccacaccctgcagaccgagagcagagaggccctgcagagctggatggaggccctgtggcagctgttcttcgacatgagccagtggaagcagtgctgcgacgagatcatgaagatcgagacccccgcccccagaaagcccccccaggccctggccaagcagggcagcctgtaccacgagatggccatcgagcccctggacgacatcgccgccgtgaccgacatcctgacccagagagagggcgccagactggagaccccccccccctggctggccatgttcaccgaccagcccgccctgcccaacccctgcagccccgccagcgtggcccccgcccccgactggacccaccccctgccctggggcagacccagaaccttcagcctggacgccgtgccccccgaccacagccccagagccagaagcgtggcccccctgcccccccagagaagccccagaaccagaggcctgtgcagcaagggccagcccagaacctggctgcagagccccgtgtag

SEQ ID NO: 26193 - DNA, 1542 bp, Artificial Sequence
  derived and/or modified sequence
atgagggagggagcctgcaaactattagccgcctgtagccaaagggagcaagctctggaggcaacaaagtcactactggtgtgcaattcaaggatcttaagttatatgggggaactgcagcgacgaaaggaggcccaggtgttggggaaaacatctagacggcctagcgattctggtccaccagcagagcgctccccttgtcgcggaagagtgtgcataagcgacctcagaatccctctgatgtggaaggataccgaatactttaagaataagggggatctgcaccggtgggccgtgttcctgctgctccagcttggtgagcatattcaggataccgagatgatcctcgttgacagaacactgacagacatcagcttccaaagcaatgtgctattcgctgaagctggacctgactttgagctgcgtctggaactctacggcgcttgtgtggaagaggagggagccctcacgggcgggcccaaacgcctagcaaccaagctttcatctagccttggacggagctcaggcaggagggtgagggcctccctggactccgccggggggtcggggtcaagccccatactactgcctactcctgtggtgggcggccctaggtatcacctacttgcccacaccacgctgaccctggcagccgtgcaggacgggtttcgaacgcatgatctcaccttagcttctcacgaagagaatcctgcttggttaccattgtacgggagtgtgtgctgtcgactggcggcccaaccactgtgcatgacccagccgaccgcttccggcacactgcgcgtgcaacaggccggcgagatgcaaaattgggcacaggtgcatggagtactcaaggggacaaacctcttttgctaccggcagccagaggatgctgacacgggcgaagaaccgctgctgaccatcgccgtaaacaaggaaaccagagtcagggcgggggagctcgatcaggccctcggacggccattcacattaagtatctcgaaccagtatggggacgatgaagttactcacaccctgcaaaccgagtcaagagaagcgctgcaatcttggatggaagcgctgtggcaattgtttttcgatatgtctcaatggaagcagtgctgtgatgagatcatgaaaattgaaacacccgcacctagaaaacctcctcaggcactagctaaacaaggctccctgtaccacgagatggctattgagccactggacgacatagcagcagtcactgatatactaacacaaagggagggagcgagactggaaacgcctcccccatggttggcaatgttcacggatcagccagccctgccgaatccgtgctctcccgcgagcgtggccccggctccggactggactcaccccctgccctgggggcgacccaggacttttagtttagatgctgttcctccagaccactcgcctcgcgctcgctccgtagcccctctccctcctcagcggtcacctcgtaccaggggcttgtgctcaaaaggccaaccgaggacatggttacaaagtcctgtatag

SEQ ID NO: 26194 - DNA, 1542 bp, Artificial Sequence
  derived and/or modified sequence
atgagggagggcgcctgcaagctgctggccgcctgcagccagcgggagcaggccctggaggccaccaagagcctgctggtgtgcaacagccgcatcctgagctacatgggagagctgcagaggaggaaggaggcccaggtgctgggcaagaccagcagaagacccagcgacagcggccccccagctgagaggagcccctgccggggccgggtgtgcatcagtgacctgcgcatccccctgatgtggaaggacacagagtacttcaagaacaagggggacctgcaccgctgggccgtgttcctgctgctgcagctgggggagcacatccaggacacagagatgatcctggtggacaggaccctgacagacatctccttccagagcaatgtgctgtttgctgaggccggccctgactttgagctgcggctggagctgtatggagcctgtgtggaggaggagggcgccctgactggaggccccaagaggctggccaccaagctgagcagcagcctgggccgcagcagtggaagaagagtgcgggccagcctggacagcgctgggggcagcggcagcagccccatcctgctgcccacccctgtggtgggcggcccccgctaccacctgctggcccacaccaccctgaccctggccgctgtgcaggacggcttccgcacccatgacctgaccctggccagccatgaagaaaatcctgcctggctgcccctgtatggctctgtgtgctgccgcctggccgcccagcccctgtgcatgacccagcccacagccagcggcaccctgcgggtgcagcaggccggggagatgcagaactgggcccaggtgcatggagtgctgaagggcaccaacctcttctgctaccggcagccagaagatgctgacaccggggaggagcccctgctgaccatcgctgtgaacaaggagaccagggtgcgggccggggagctggaccaggccctgggccggcccttcaccctgagcatcagcaaccagtatggagatgatgaggtgacccacaccctgcagacagagagccgggaggccctgcagagctggatggaggccctgtggcagctgttctttgacatgagccagtggaagcagtgctgtgatgagatcatgaagattgagaccccagcccccaggaagccaccccaggccctggccaagcagggcagcctgtaccacgagatggccatcgagcccctggatgacattgctgctgtgacagacatcctgacccagcgggagggcgcccggctggagaccccaccaccctggctggccatgttcacagaccagcctgccctgcccaacccctgcagccctgcctctgtggccccagccccagactggacccaccccctgccctggggccggcccaggaccttcagcctggatgctgtgcccccagaccacagcccccgggcccggtctgtggcccccctgcccccccagaggagccccaggacccggggcctgtgcagcaagggccagcccaggacctggctgcagagccctgtgtag

SEQ ID NO: 26195 - DNA, 1542 bp, Artificial Sequence
  derived and/or modified sequence
atgcgggagggcgcctgcaagctgctggccgcctgcagccagcgggaacaggcccttgaggccactaaatctctcctcgtatgtaatagccgaatcctctcttacatgggggaactccaaaggcgcaaggaggcacaggtgctgggtaagactagccgcagaccgagtgactccgggccccccgcagaacgatccccgtgccgcggtcgcgtttgtatcagtgatctgaggattcctctcatgtggaaagataccgagtactttaagaataagggcgatttgcatcgatgggcagtcttcttgctgcttcagctaggcgagcatatacaagatacggagatgattttagtcgacaggactctaacagacatcagcttccaatcaaatgtgctgtttgcggaggctggcccggacttcgaacttcgcctcgagctatatggggcatgtgtagaggaagaaggtgcactgactggcggtccaaaacgcctcgctacgaagttatcatcaagccttgggagatcatcaggcaggagagtgagggctagcctggactctgcaggaggaagtggatctagtcctatcctactgcccacgcccgtggtcgggggccctagatatcacttactcgcccataccactctgaccctggccgccgtacaggatgggttcagaacccatgaccttaccctcgccagccacgaagagaacccggcatggttgcccctgtatgggagcgtgtgctgtcggctggccgcccagccgctatgtatgacccaacctacagcgagcgggaccttaagagtgcaacaggccggcgaaatgcagaactgggctcaagtccacggtgtcctgaaaggtaccaacttgttctgctatcggcagcctgaggacgccgacaccggggaagagccccttctcacaatcgcagtgaataaagaaacacgtgtgcgcgctggagagctggatcaggcattaggaaggcccttcaccctctccatctctaaccagtacggcgacgatgaagtaacacataccttgcagaccgagtcacgcgaagcgctgcaatcgtggatggaggccttgtggcaactcttttttgacatgagtcagtggaagcagtgttgcgacgaaataatgaaaatcgaaacacccgcgcctcggaagccacctcaggccctcgctaaacagggttctctgtatcacgagatggccatcgagcccctggatgatatagctgcagtgaccgacatcctgacacagcgcgaaggcgccagactggaaaccccccccccctggctcgccatgtttacggatcagccagcactgcctaatccatgcagcccagcctctgttgcgccagcacctgactggacgcatccgttgccttggggacgcccaagaaccttctcgttggatgccgttcctcccgatcattcacccagggcgaggtcagttgctccacttccgccccagaggagtcctagaacgagagggctgtgtagcaaggggcagcccagaacttggctacagtctcccgtgtag

SEQ ID NO: 26196 - DNA, 1542 bp, Artificial Sequence
  derived and/or modified sequence
atgcgagaaggggcatgcaagcttttggctgcatgttcacaaagagaacaagccctggaagctacgaagtctctgttggtgtgtaattctcgaatcctcagttacatgggcgagcttcagagaagaaaagaagcacaggtgcttggaaagacgagcagacgcccaagtgactccgggcctccagcagagaggagtccctgccgcggacgcgtgtgcattagcgatctccgtatacccttgatgtggaaggatacagaatatttcaaaaacaagggggaccttcacaggtgggctgtgttcctgctcctccaactcggggagcacatccaggatacagaaatgatcctggtcgacagaacattgaccgacatttcttttcaaagtaacgttttgttcgctgaagcgggacccgatttcgagctccggctggaactgtacggcgcttgcgttgaagaggagggtgcgttgacgggaggcccaaagcggctggctaccaaactgagctcgtcgctagggagaagctccggaagacgagtgagagcctcactcgattcagcaggtggcagtggaagctccccaatccttctacccactcccgtcgttgggggtccacgctaccaccttttagctcacactactttgacattggccgctgttcaagacggtttccgaacccacgatctaactctggctagtcacgaagagaatcccgcatggctgccgctgtacggaagcgtgtgctgtcggctggccgctcagcccctctgcatgacccagcctacagcctctggaaccctgagggtgcaacaggccggtgaaatgcagaattgggcccaggtgcatggcgttttaaagggtacgaatctgttctgctatcgtcagcctgaggacgccgatactggagaggagccgctgcttacaatcgcggtgaacaaagagacaagggtccgtgccggtgagctggatcaggcactggggaggccgttcacactgagtatatctaaccaatacggcgatgatgaagtgacacacactctgcagacagagtctagggaggccctgcagagctggatggaggccctgtggcagctgtttttcgacatgtcccagtggaagcaatgctgcgacgagataatgaaaatcgaaactcctgcgcctagaaagcctccacaggcactggccaagcagggaagcctgtaccatgaaatggcaatcgagcccctcgatgatatcgcagccgtaaccgacatacttacccagagagagggagctcgcctcgagacaccccctccttggttagccatgtttacagatcagcctgcactgcctaacccctgcagccccgcatccgtagctcctgcccctgactggacacatcccctgccttggggacggccacgcacatttagcctggatgctgttccacctgatcattcaccccgagcacgcagtgttgcccctttaccccctcagagatctcctcggacacggggactatgttcaaaagggcaacccaggacatggctgcagagccccgtctag

SEQ ID NO: 26197 - DNA, 1542 bp, Artificial Sequence
  derived and/or modified sequence
atgagagagggcgcctgcaagctgctggccgcctgcagccagagagagcaggccctggaggccaccaagagcctgctggtgtgcaacagcagaatcctgagctacatgggcgagctgcagagaagaaaggaggcccaggtgctgggcaagaccagcagaagacccagcgacagcggcccccccgccgagagaagcccctgcagaggcagagtgtgcatcagcgacctgagaatccccctgatgtggaaggacaccgagtacttcaagaacaagggcgacctgcacagatgggccgtgttcctgctgctgcagctgggcgagcacatccaggacaccgagatgatcctggtggacagaaccctgaccgacatcagcttccagagcaacgtgctgttcgccgaggccggccccgacttcgagctgagactggagctgtacggcgcctgcgtggaggaggagggcgccctgaccggcggccccaagagactggccaccaagctgagcagcagcctgggcagaagcagcggcagaagagtgagagccagcctggacagcgccggcggcagcggcagcagccccatcctgctgcccacccccgtggtgggcggccccagataccacctgctggcccacaccaccctgaccctggccgccgtgcaggacggcttcagaacccacgacctgaccctggccagccacgaggagaaccccgcctggctgcccctgtacggcagcgtgtgctgcagactggccgcccagcccctgtgcatgacccagcccaccgccagcggcaccctgagagtgcagcaggccggcgagatgcagaactgggcccaggtgcacggcgtgctgaagggcaccaacctgttctgctacagacagcccgaggacgccgacaccggcgaggagcccctgctgaccatcgccgtgaacaaggagaccagagtgagagccggcgagctggaccaggccctgggcagacccttcaccctgagcatcagcaaccagtacggcgacgacgaggtgacccacaccctgcagaccgagagcagagaggccctgcagagctggatggaggccctgtggcagctgttcttcgacatgagccagtggaagcagtgctgcgacgagatcatgaagatcgagacccccgcccccagaaagcccccccaggccctggccaagcagggcagcctgtaccacgagatggccatcgagcccctggacgacatcgccgccgtgaccgacatcctgacccagagagagggcgccagactggagaccccccccccctggctggccatgttcaccgaccagcccgccctgcccaacccctgcagccccgccagcgtggcccccgcccccgactggacccaccccctgccctggggcagacccagaaccttcagcctggacgccgtgccccccgaccacagccccagagccagaagcgtggcccccctgcccccccagagaagccccagaaccagaggcctgtgcagcaagggccagcccagaacctggctgcagagccccgtgtag

SEQ ID NO: 26198 - protein, 309 aa, Artificial Sequence
  derived and/or modified sequence
MSSPRAVVQLGKAQPAGEELATANQTAQQPSSPAMRRLTVDDFEIGRPLGKGKFGNVYLARLKESHFIVALKVLFKSQIEKEGLEHQLRREIEIQAHLQHPNILRLYNYFHDARRVYLILEYAPRGELYKELQKSEKLDEQRTATIIEELADALTYCHDKKVIHRDIKPENLLLGFRGEVKIADFGWSVHTPSLRRKTMCGTLDYLPPEMIEGRTYDEKVDLWCIGVLCYELLVGYPPFESASHSETYRRILKVDVRFPLSMPLGARDLISRLLRYQPLERLPLAQILKHPWVQAHSRRVLPPCAQMAS

SEQ ID NO: 26199 - protein, 275 aa, Artificial Sequence
  derived and/or modified sequence
MRRLTVDDFEIGRPLGKGKFGNVYLARLKESHFIVALKVLFKSQIEKEGLEHQLRREIEIQAHLQHPNILRLYNYFHDARRVYLILEYAPRGELYKELQKSEKLDEQRTATIIEELADALTYCHDKKVIHRDIKPENLLLGFRGEVKIADFGWSVHTPSLRRKTMCGTLDYLPPEMIEGRTYDEKVDLWCIGVLCYELLVGYPPFESASHSETYRRILKVDVRFPLSMPLGARDLISRLLRYQPLERLPLAQILKHPWVQAHSRRVLPPCAQMAS

SEQ ID NO: 26200 - DNA, 930 bp, Artificial Sequence
  derived and/or modified sequence
atgtctagcccccgcgcggtggtccagcttgggaaagcacagcctgctggagaggagcttgccacggctaatcagaccgcccaacaaccaagcagccccgctatgcgcagattaaccgtggacgactttgaaattgggcggccgcttggtaagggcaaatttggaaatgtgtatttggctcggctgaaagagtctcactttatagtggccctgaaagttttgttcaagagccagatcgagaaagaggggctcgaacaccagctgcgtagggaaatcgagattcaagcacacttgcagcatcccaacattttgagactgtataactactttcatgacgcccggagagtgtatctgattctggaatatgccccacgtggcgagctgtacaaagaactccagaagagtgaaaagcttgacgagcaacgtacagctactattattgaggaactcgccgacgcactgacatactgccatgacaaaaaggttatacaccgcgatatcaaacctgagaacttacttttgggctttagaggggaagtgaagatcgcggattttggttggagtgtccacactcccagcctccgtagaaagacaatgtgtggcacactggactatcttccaccggagatgattgagggtcgcacctatgatgaaaaggtggatctgtggtgtattggggtattgtgctacgaactgctggtgggatacccacccttcgagtctgcctcccatagtgagacttacaggcgcatcctgaaggtagacgtgagattcccactctccatgccgttgggggcacgtgatctaatcagcagactgctcaggtaccagcccctcgagcgcctccctttagctcaaattttgaagcacccttgggtacaggctcattctaggcgggttctgccaccatgtgcccagatggcttcttag

SEQ ID NO: 26201 - DNA, 930 bp, Artificial Sequence
  derived and/or modified sequence
atgagcagccccagggctgtggtgcagctgggcaaggcccagcctgctggggaggagctggccacagccaaccagacagcccagcagcccagcagccctgccatgaggcggctgactgtggatgactttgaaattggccggcccctgggcaagggcaagtttggaaatgtgtacctggcccggctgaaggagagccacttcatcgtggccctgaaggtgctcttcaagagccagatcgagaaggagggcctggagcaccagctgcggcgggagattgagatccaggcccacctgcagcaccccaacatcctgcggctgtacaactacttccatgatgcccggcgggtgtacctgatcctggagtatgcccccagaggagagctgtacaaggagctgcagaagtctgagaagctggatgagcagaggacagccaccatcatcgaggagctggctgatgccctgacctactgccacgacaagaaggtgatccaccgggacatcaagccagagaacctgctgctgggcttccggggggaggtgaagattgctgactttggctggagcgtgcacacccccagcctgcggaggaagaccatgtgtggcaccctggactacctgcccccagagatgattgagggccgcacctatgatgagaaggtggacctgtggtgcattggagtgctgtgctatgagctgctggtgggctaccccccatttgaaagtgccagccacagcgagacctaccgccgcatcctgaaggtggatgtgcgcttccccctgtccatgcccctgggcgcccgggacctgatcagccggctgctgcgctaccagcccctggagcggctgcccctggcccagatcctgaagcacccctgggtgcaggcccacagccggcgggtgctgcccccctgtgcccagatggccagctag

SEQ ID NO: 26202 - DNA, 930 bp, Artificial Sequence
  derived and/or modified sequence
atgagcagcccccgggccgtggtgcagctgggcaaggcccagcccgctggtgaggagctggccactgccaaccaaactgcgcagcaaccatcatcacccgcaatgcggagacttactgtagatgacttcgaaattgggaggcccctgggcaagggtaagtttggtaacgtgtatctggctcgcctgaaagaaagccattttattgtggcactcaaggtactgttcaagagtcagattgagaaggaaggtcttgaacaccagctaaggcgcgaaattgagattcaggctcaccttcagcacccgaacatcctgcggctgtataattactttcacgacgcacggagagtttacctgatcttagagtatgctccccgcggggagctctacaaggagctgcagaaaagcgagaaattggacgaacaaaggacggctacgatcatcgaggaactggccgatgcacttacctactgtcatgacaagaaggtgattcatcgcgatatcaaacccgaaaatctcctattgggctttagaggagaagtcaagatcgccgacttcggatggagcgttcacacacccagtctcaggaggaagaccatgtgcggtacattggactacctgcctccggagatgattgaaggccgcacgtacgatgagaaggtagatctgtggtgcatcggggtcctgtgctacgagctgctggtgggctacccacctttcgagagtgcctcgcattcggagacctatcgacgaattcttaaagttgatgtgcggttcccgctcagtatgccacttggcgccagggacctaattagtaggttactgaggtatcagcccctggagcggttgcctttggcgcagatcttgaagcatccgtgggttcaggctcattccagaagggtgctgcccccctgtgctcagatggcatcatag

SEQ ID NO: 26203 - DNA, 930 bp, Artificial Sequence
  derived and/or modified sequence
atgtcatcccccagggcggtggtacagttgggaaaggcccagccagccggagaagaacttgctacagccaatcagaccgctcagcagccaagctcacctgcaatgcgtaggttgaccgtcgatgacttcgaaataggcaggcccttggggaaagggaaatttggcaacgtgtatttggcccgtttaaaggagagccatttcattgttgcgctgaaggtgctctttaaatcccagatcgagaaggaggggttggaacaccagcttcggagggaaatcgaaatccaggcacacttacagcatccgaatatcttgcgcctttacaactatttccatgacgcgcgacgcgtctatctcattcttgaatacgctcctaggggagagttgtataaggagctgcagaagtctgagaagcttgatgagcagagaacagcaaccatcatcgaggaacttgcagatgctctcacttactgtcatgacaagaaagtcatccaccgcgatatcaaaccggaaaacctgctgctgggatttcggggtgaggtgaagatagccgacttcggatggtctgttcacactccatctctgcggcgaaagacaatgtgcgggaccctggattatctaccccctgagatgatcgaaggtcgcacttatgacgagaaggtggacctttggtgtataggagtcctgtgttatgaactcctcgttggctacccaccgttcgagtcggcttcccactctgaaacctacagacgcattttaaaagtggatgtgaggttcccattatccatgccccttggcgcaagggatcttatttcccgtctcctgcgatatcagccccttgagcggttgccccttgcacagatcttgaaacatccatgggtccaggcacattctaggagagtcctgcctccatgtgcccagatggccagctag

SEQ ID NO: 26204 - DNA, 1249 bp, Artificial Sequence
  derived and/or modified sequence
ccacggctgctcacgacgccgcggatcccgaagcctgtgtagcagtgagacatcagtgaggctgcaggacgagcaggattggaagcgccccggccagaaagtgaccccccacccctttcaggaccctgtgaacgggaacagccatccagagggttcaggaaggcgtccgcgccctcacctcttctccccatgagctcccccagagctgtggtgcagctgggcaaagctcaacctgcaggcgaagagttggctacagcaaaccaaacagcccagcagcccagcagcccagccatgcggcgcctcacagtcgatgactttgaaatcgggcgtcccctgggcaaggggaaatttgggaatgtgtacctggctcggctcaaggaaagccatttcattgtggccctgaaggttctcttcaagtcgcagatagagaaggaaggactggagcaccagctgcgccgggaaattgagatccaggctcatctacaacaccccaatatcctgcgcctgtataactatttccatgatgcacgccgggtgtacctgattctggaatatgctccaaggggtgagctctacaaggagctgcagaaaagcgagaaattagatgaacagcgcacagccacgataatagaggagttggcagatgccctgacctactgccatgacaagaaagtgattcacagagatattaagccagagaacctgctgctggggttcaggggtgaggtgaagattgcagattttggctggtctgtgcacaccccctccctgaggaggaagacaatgtgtgggacactggactacttgccgccagaaatgattgaggggagaacatatgatgaaaaggtggatttgtggtgcattggagtgctctgctatgagctgctggtgggatatccaccctttgagagcgcctcccacagtgagacttacagacgcatcctcaaggtagatgtgaggtttccactatcaatgcctctgggggcccgggacttgatttccaggcttctcagataccagcccttggagagactgcccctggcccagatcctgaagcacccctgggttcaggcccactcccgaagggtgctgcctccctgtgctcagatggcttcctgagccctgtctgcctctgttccctttgtgtgtgttcagggagctctcctggctctgccacctcatttgtctttatttttttctcttttaagatgtaagatgctaattaataaaagctgaatcatttcatacc

SEQ ID NO: 26205 - DNA, 930 bp, Artificial Sequence
  derived and/or modified sequence
atgagcagccccagagccgtggtgcagctgggcaaggcccagcccgccggcgaggagctggccaccgccaaccagaccgcccagcagcccagcagccccgccatgagaagactgaccgtggacgacttcgagatcggcagacccctgggcaagggcaagttcggcaacgtgtacctggccagactgaaggagagccacttcatcgtggccctgaaggtgctgttcaagagccagatcgagaaggagggcctggagcaccagctgagaagagagatcgagatccaggcccacctgcagcaccccaacatcctgagactgtacaactacttccacgacgccagaagagtgtacctgatcctggagtacgcccccagaggcgagctgtacaaggagctgcagaagagcgagaagctggacgagcagagaaccgccaccatcatcgaggagctggccgacgccctgacctactgccacgacaagaaggtgatccacagagacatcaagcccgagaacctgctgctgggcttcagaggcgaggtgaagatcgccgacttcggctggagcgtgcacacccccagcctgagaagaaagaccatgtgcggcaccctggactacctgccccccgagatgatcgagggcagaacctacgacgagaaggtggacctgtggtgcatcggcgtgctgtgctacgagctgctggtgggctacccccccttcgagagcgccagccacagcgagacctacagaagaatcctgaaggtggacgtgagattccccctgagcatgcccctgggcgccagagacctgatcagcagactgctgagataccagcccctggagagactgcccctggcccagatcctgaagcacccctgggtgcaggcccacagcagaagagtgctgcccccctgcgcccagatggccagctag

SEQ ID NO: 26206 - protein, 290 aa, Artificial Sequence
  derived and/or modified sequence
MATANQTAQQPSSPAMRRLTVDDFEIGRPLGKGKFGNVYLARLKESHFIVALKVLFKSQIEKEGLEHQLRREIEIQAHLQHPNILRLYNYFHDARRVYLILEYAPRGELYKELQKSEKLDEQRTATIIEELADALTYCHDKKVIHRDIKPENLLLGFRGEVKIADFGWSVHTPSLRRKTMCGTLDYLPPEMIEGRTYDEKVDLWCIGVLCYELLVGYPPFESASHSETYRRILKVDVRFPLSMPLGARDLISRLLRYQPLERLPLAQILKHPWVQAHSRRVLPPCAQMAS

SEQ ID NO: 26207 - DNA, 873 bp, Artificial Sequence
  derived and/or modified sequence
atggcaactgccaatcagaccgcccagcagccgagctcccccgctatgcggaggctgacagtggacgattttgaaatcgggaggccgcttggcaaggggaagttcgggaacgtatatctggccagactgaaggaatcacacttcatcgtggctctgaaggtcctcttcaagtcccagatcgaaaaggagggcctggaacaccagctgcgccgcgagatcgagattcaggcacacctccaacatcctaacatcctcaggctgtataattacttccacgacgcacggagagtctatttaatactggagtacgctccccgaggggagctctacaaagaattgcagaagtcagagaagttggatgaacagcggacggccactatcattgaagagttggccgacgccctgacatattgccacgataagaaggtaatacatagggacattaaacctgaaaatctcttgctggggttccgcggcgaagtcaagatcgctgactttgggtggtctgtgcacaccccaagcctacgaagaaagacaatgtgtgggaccctggactacctccctcctgagatgatcgagggaagaacatacgatgagaaggtggacctctggtgcattggtgttctctgttacgagcttctggtgggatacccgcctttcgagtccgcctcgcacagtgagacctacaggcgcatcctgaaagtggacgtgcgatttccgctcagcatgccactgggagcccgcgaccttatctccaggctactcagatatcagcccctagaaagactccccctcgcacaaatcctcaagcacccttgggtgcaggcacacagtcgtagagtgctccccccttgcgctcagatggcatcatag

SEQ ID NO: 26208 - DNA, 873 bp, Artificial Sequence
  derived and/or modified sequence
atggccacagccaaccagacagcccagcagcccagcagccctgccatgaggcggctgactgtggatgactttgagatcggccggcccctgggcaagggcaagtttggaaatgtgtacctggcccggctgaaggagagccacttcatcgtggccctgaaggtgctcttcaagagccagatcgagaaggagggcctggagcaccagctgcggcgggagattgagatccaggcccacctgcagcaccccaacatcctgcggctgtacaactacttccatgatgccaggagagtgtacctgatcctggagtatgcccccagaggagagctgtacaaggagctgcagaagtctgagaagctggatgagcagaggacagccaccatcatcgaggagctggctgatgccctgacctactgccacgacaagaaggtgatccaccgggacatcaagccagagaacctgctgctgggcttccggggggaggtgaagattgctgactttggctggagcgtgcacacccccagcctgcggaggaagaccatgtgtggcaccctggactacctgcccccagagatgattgagggccgcacctatgatgagaaggtggacctgtggtgcatcggcgtgctgtgctatgagctgctggtgggctaccccccatttgagagcgccagccacagcgagacctaccgccgcatcctgaaggtggatgtgcgcttccccctgtccatgcccctgggcgcccgggacctgatcagccggctgctgcgctaccagcccctggagcggctgcccctggcccagatcctgaagcacccctgggtgcaggcccacagcagaagagtgctgcccccctgtgcccagatggccagctag

SEQ ID NO: 26209 - DNA, 873 bp, Artificial Sequence
  derived and/or modified sequence
atggccaccgccaaccagaccgcccagcagcccagcagccccgccatgcgacggcttacagtggacgatttcgaaatcggtcggcctttgggtaaaggaaagttcggcaacgtgtacctggcccgcctcaaagaaagccattttatcgtcgccctcaaggtactgttcaagtctcagatcgaaaaggagggactggagcatcaacttagacgcgagattgagattcaggcacatctgcaacacccaaacatccttagactgtacaattacttccacgacgcgcgaagggtgtatctgattcttgagtatgcgcctcggggcgagttgtataaagaattgcagaaatcagagaaactggacgagcagcgcacggcaaccatcatcgaggagctggcagacgctctgacttactgtcatgataaaaaggtgattcatagagatatcaagccagagaacctgcttctaggattccggggagaggtaaagatagccgactttggctggtcagtgcataccccatcccttaggcgcaaaaccatgtgcgggacgttagattacctgcctccagaaatgattgagggaaggacatacgatgagaaagttgacctctggtgtatcggggttctctgttacgaactgttggtgggatacccccctttcgaatccgcctctcactctgaaacatatcgccgcatcctgaaggtagacgtccgcttcccactgtctatgccacttggggctcgggatctcatatcgaggctcctaagatatcagcctctcgaaagactgcccttggcgcagatattgaaacacccttgggtccaggcccacagccgacgggtgctgccaccttgtgcacaaatggcatcttag

SEQ ID NO: 26210 - DNA, 873 bp, Artificial Sequence
  derived and/or modified sequence
atggccacagcgaaccaaaccgcccagcagccatcaagccctgccatgcggaggctgacagtcgacgactttgagatagggagacctctcggcaaaggcaaattcgggaacgtgtatctcgctagactgaaggagagtcactttatcgtggccctgaaagtgctgttcaaatcgcaaatcgagaaagaaggcctggagcaccaactgcggcgagaaatcgagatccaggcgcatctgcagcacccaaatattctgcgcctgtacaactacttccatgatgctcgccgagtctatttgattctggaatacgcgccacgtggagagttatataaggaactgcagaagagcgaaaagctggatgagcagaggacagccacgatcatagaggagctggcagatgccctgacttactgtcacgacaaaaaagtgatccaccgtgatattaaacctgagaacttgctgctgggcttcagaggggaagtgaagatcgccgatttcggctggtccgtgcacacaccctcgctgcgcagaaagactatgtgcggcaccctcgactatctccctccagaaatgattgaggggcgtacttatgatgagaaagtagacttatggtgcattggcgtgttatgctatgagctgctggttggctaccctccttttgaatcagcaagtcattctgaaacgtaccgacgcatattgaaggtggatgtgcgctttcctttgtcaatgccactcggagcgagagacctgatcagccgcttgttaaggtatcaaccactggaacggctgcccttagcacagattctgaagcatccctgggtgcaggcacacagtagacgggtcctgcctccatgtgcccaaatggcctcatag

SEQ ID NO: 26211 - DNA, 1108 bp, Artificial Sequence
  derived and/or modified sequence
ggaagtacctctctgagcggttggtgccgggtataaaagaaggccgcgcagccacggctgctcacgacgccgcggatcccgaagcctgtgtagcagtgagacatcatggctacagcaaaccaaacagcccagcagcccagcagcccagccatgcggcgcctcacagtcgatgactttgaaatcgggcgtcccctgggcaaggggaaatttgggaatgtgtacctggctcggctcaaggaaagccatttcattgtggccctgaaggttctcttcaagtcgcagatagagaaggaaggactggagcaccagctgcgccgggaaattgagatccaggctcatctacaacaccccaatatcctgcgcctgtataactatttccatgatgcacgccgggtgtacctgattctggaatatgctccaaggggtgagctctacaaggagctgcagaaaagcgagaaattagatgaacagcgcacagccacgataatagaggagttggcagatgccctgacctactgccatgacaagaaagtgattcacagagatattaagccagagaacctgctgctggggttcaggggtgaggtgaagattgcagattttggctggtctgtgcacaccccctccctgaggaggaagacaatgtgtgggacactggactacttgccgccagaaatgattgaggggagaacatatgatgaaaaggtggatttgtggtgcattggagtgctctgctatgagctgctggtgggatatccaccctttgagagcgcctcccacagtgagacttacagacgcatcctcaaggtagatgtgaggtttccactatcaatgcctctgggggcccgggacttgatttccaggcttctcagataccagcccttggagagactgcccctggcccagatcctgaagcacccctgggttcaggcccactcccgaagggtgctgcctccctgtgctcagatggcttcctgagccctgtctgcctctgttccctttgtgtgtgttcagggagctctcctggctctgccacctcatttgtctttatttttttctcttttaagatgtaagatgctaattaataaaagctgaatcatttcatacc

SEQ ID NO: 26212 - DNA, 1113 bp, Artificial Sequence
  derived and/or modified sequence
ggaagtacctctctgagcggttggtgccgggtataaaagaaggccgcgcagccacggctgctcacgacgccgcggatcccgaagcctgtgtagcagtgagacatcagtgagtggctacagcaaaccaaacagcccagcagcccagcagcccagccatgcggcgcctcacagtcgatgactttgaaatcgggcgtcccctgggcaaggggaaatttgggaatgtgtacctggctcggctcaaggaaagccatttcattgtggccctgaaggttctcttcaagtcgcagatagagaaggaaggactggagcaccagctgcgccgggaaattgagatccaggctcatctacaacaccccaatatcctgcgcctgtataactatttccatgatgcacgccgggtgtacctgattctggaatatgctccaaggggtgagctctacaaggagctgcagaaaagcgagaaattagatgaacagcgcacagccacgataatagaggagttggcagatgccctgacctactgccatgacaagaaagtgattcacagagatattaagccagagaacctgctgctggggttcaggggtgaggtgaagattgcagattttggctggtctgtgcacaccccctccctgaggaggaagacaatgtgtgggacactggactacttgccgccagaaatgattgaggggagaacatatgatgaaaaggtggatttgtggtgcattggagtgctctgctatgagctgctggtgggatatccaccctttgagagcgcctcccacagtgagacttacagacgcatcctcaaggtagatgtgaggtttccactatcaatgcctctgggggcccgggacttgatttccaggcttctcagataccagcccttggagagactgcccctggcccagatcctgaagcacccctgggttcaggcccactcccgaagggtgctgcctccctgtgctcagatggcttcctgagccctgtctgcctctgttccctttgtgtgtgttcagggagctctcctggctctgccacctcatttgtctttatttttttctcttttaagatgtaagatgctaattaataaaagctgaatcatttcatacc

SEQ ID NO: 26213 - DNA, 873 bp, Artificial Sequence
  derived and/or modified sequence
atggccaccgccaaccagaccgcccagcagcccagcagccccgccatgagaagactgaccgtggacgacttcgagatcggcagacccctgggcaagggcaagttcggcaacgtgtacctggccagactgaaggagagccacttcatcgtggccctgaaggtgctgttcaagagccagatcgagaaggagggcctggagcaccagctgagaagagagatcgagatccaggcccacctgcagcaccccaacatcctgagactgtacaactacttccacgacgccagaagagtgtacctgatcctggagtacgcccccagaggcgagctgtacaaggagctgcagaagagcgagaagctggacgagcagagaaccgccaccatcatcgaggagctggccgacgccctgacctactgccacgacaagaaggtgatccacagagacatcaagcccgagaacctgctgctgggcttcagaggcgaggtgaagatcgccgacttcggctggagcgtgcacacccccagcctgagaagaaagaccatgtgcggcaccctggactacctgccccccgagatgatcgagggcagaacctacgacgagaaggtggacctgtggtgcatcggcgtgctgtgctacgagctgctggtgggctacccccccttcgagagcgccagccacagcgagacctacagaagaatcctgaaggtggacgtgagattccccctgagcatgcccctgggcgccagagacctgatcagcagactgctgagataccagcccctggagagactgcccctggcccagatcctgaagcacccctgggtgcaggcccacagcagaagagtgctgcccccctgcgcccagatggccagctag

SEQ ID NO: 26214 - protein, 618 aa, Artificial Sequence
  derived and/or modified sequence
SGKKQEKEENQQKSTNVVYQAHHVSRNKRGQVVGTRGGFRGCTVWLTGLSGAGKTTISFALEEYLVSHAIPCYSLDGDNVRHGLNRNLGFSPGDREENIRRIAEVAKLFADAGLVCITSFISPFAKDRENARKIHESAGLPFFEIFVDAPLNICESRDVKGLYKRARAGEIKGFTGIDSDYEKPETPERVLKTNLSTVSDCVHQVVELLQEQNIVPYTIIKDIHELFVPENKLDHVRAEAETLPSLSITKLDLQWVQVLSEGWATPLKGFMREKEYLQVMHFDTLLDGMFLLDGVINMSIPIVLPVSAEDKTRLEGCSKFVLAHGGRRVAILRDAEFYEHRKEERCSRVWGTTCTKHPHIKMVMESGDWLVGGDLQVLEKIRWNDGLDQYRLTPLELKQKCKEMNADAVFAFQLRNPVHNGHALLMQDTRRRLLERGYKHPVLLLHPLGGWTKDDDVPLDWRMKQHAAVLEEGVLDPKSTIVAIFPSPMLYAGPTEVQWHCRSRMIAGANFYIVGRDPAGMPHPETKKDLYEPTHGGKVLSMAPGLTSVEIIPFRVAAYNKAKKAMDFYDPARHNEFDFISGTRMRKLAREGENPPDGFMAPKAWKVLTDYYRSLEKN

SEQ ID NO: 26215 - protein, 619 aa, Artificial Sequence
  derived and/or modified sequence
MSGIKKQKTENQQKSTNVVYQAHHVSRNKRGQVVGTRGGFRGCTVWLTGLSGAGKTTISFALEEYLVSHAIPCYSLDGDNVRHGLNRNLGFSPGDREENIRRIAEVAKLFADAGLVCITSFISPFAKDRENARKIHESAGLPFFEIFVDAPLNICESRDVKGLYKRARAGEIKGFTGIDSDYEKPETPERVLKTNLSTVSDCVHQVVELLQEQNIVPYTIIKDIHELFVPENKLDHVRAEAETLPSLSITKLDLQWVQVLSEGWATPLKGFMREKEYLQVMHFDTLLDGMALPDGVINMSIPIVLPVSAEDKTRLEGCSKFVLAHGGRRVAILRDAEFYEHRKEERCSRVWGTTCTKHPHIKMVMESGDWLVGGDLQVLEKIRWNDGLDQYRLTPLELKQKCKEMNADAVFAFQLRNPVHNGHALLMQDTRRRLLERGYKHPVLLLHPLGGWTKDDDVPLDWRMKQHAAVLEEGVLDPKSTIVAIFPSPMLYAGPTEVQWHCRSRMIAGANFYIVGRDPAGMPHPETKKDLYEPTHGGKVLSMAPGLTSVEIIPFRVAAYNKAKKAMDFYDPARHNEFDFISGTRMRKLAREGENPPDGFMAPKAWKVLTDYYRSLEKN

SEQ ID NO: 26216 - DNA, 1857 bp, Artificial Sequence
  derived and/or modified sequence
agcgggaaaaagcaggagaaagaggaaaatcagcaaaagagcacaaatgtcgtataccaggcccaccacgtcagtagaaataagcggggccaggtcgttggtaccaggggtggcttcaggggctgcacagtgtggctgactggtctgtctggagcaggtaagacaaccatctcctttgctctggaagaatacctagtctcacacgcaatcccttgttatagcttggatggggataatgtgcgacacgggctcaataggaaccttggtttctctcctggtgacagggaagaaaacatacgccgcatcgctgaagtggccaaactgtttgcagacgctggccttgtatgcataacaagctttatcagtccattcgcaaaagaccgagaaaacgcgaggaaaattcacgaatctgccggcttacccttttttgagatctttgtagacgcccccctaaatatttgcgagtcccgcgacgtcaagggactctacaagcgagcaagagctggagaaataaaaggctttacagggattgacagtgattacgagaaacccgaaactccagaacgtgttctaaagacgaacctttctacagtgtctgattgtgtgcaccaggtggtggagctgctccaggagcagaacattgtgccatacacaataattaaagacatccacgagctgttcgtccctgaaaacaaattggaccacgtgcgggctgaggctgaaacccttccgagcttaagtatcactaagctggatttacaatgggtgcaagtcctcagtgagggttgggctacgcctttaaagggctttatgcgagagaaagagtacttgcaggtgatgcacttcgacactctgttagacgggatgttcctgctggacggagtgattaatatgagtatcccaatcgttctccccgtctctgccgaggataagacacggctggaaggctgctcgaagttcgttctggcacacggaggccgccgggtggcgatcctcagagatgcggagttttacgaacataggaaagaagagcgttgcagccgggtctggggcacaacttgtacaaaacaccctcatataaagatggttatggaaagcggcgattggctagtggggggcgatctgcaggtactcgagaagatccgctggaacgacggtctggatcaatacaggctcacacccttggaactgaaacagaagtgcaaggagatgaacgccgacgccgtttttgcatttcagctcagaaatccagtgcacaacgggcacgccctgctgatgcaggatacacgacggcgtttgctcgagagaggctataagcaccccgtgcttctgcttcatcctctggggggctggacaaaggatgatgacgtccctctggattggaggatgaagcaacacgcagcagtgctggaagagggcgtgcttgatcctaagagcaccatcgtggccatcttcccatctcccatgctgtacgccggacctactgaggtgcagtggcattgccgatcccgcatgattgctggagccaacttctacatagttggaagggatcccgccggaatgccccacccagaaacaaagaaggatctctatgaaccaacacatggaggtaaagttttgtccatggctccaggactcaccagtgtggaaattatccccttccgggtggctgcttataataaggcaaagaaggctatggatttttacgacccggcacggcacaacgagttcgacttcatcagtgggacgcgaatgagaaaactcgcaagggagggagaaaatccccccgacggatttatggcccccaaggcgtggaaggtgctgactgactactataggtccctggaaaaaaattag

SEQ ID NO: 26217 - DNA, 1860 bp, Artificial Sequence
  derived and/or modified sequence
atgtcaggcatcaaaaaacaaaagactgagaatcagcagaagtccacgaacgtggtgtatcaggcccaccacgtttctaggaacaaacgcggccaggtggtgggaactagaggcgggttcaggggatgcactgtgtggctaactgggctgagcggcgccggcaaaaccacaataagtttcgcacttgaggaatacttggtttcccatgccattccttgttattctctggatggcgacaacgtccgacatggactgaacaggaatttgggtttttcccctggtgacagagaggagaatattcgtcgcatcgcagaagttgcaaagctcttcgcagatgcaggtcttgtgtgtatcacaagcttcatctccccattcgcaaaggatagagagaatgctagaaagattcatgagtctgctggcctgccttttttcgagatatttgtggacgccccgctgaatatctgcgaaagtagagatgtgaaaggcctgtacaagagggcaagagcgggggaaattaagggcttcacgggtatcgattcagactacgagaagcctgaaacacccgaaagagtcctgaaaaccaatctttctaccgtgagtgattgcgtgcaccaggtcgtagaattacttcaggaacagaatattgtgccctacaccattatcaaggacatccacgagctgtttgttcctgagaacaaactagaccatgtacgggcagaggccgagacattaccgagcctgtctatcacaaaactggatttacagtgggttcaagttctgtcagagggctgggctacacctctgaaagggtttatgcgcgagaaagaatatctccaggtgatgcacttcgacaccctgcttgacggtatggctcttccagacggggtgatcaatatgagcatccccatcgttctgcctgtgtccgccgaagacaagacacgcctcgagggatgcagtaaattcgtactcgctcacggaggtcggagagtggccattctgagagatgccgaattctacgagcatcgtaaggaagaacggtgttcccgggtttggggaacaacatgtactaagcacccccacatcaaaatggtgatggaaagtggagactggctagttgggggtgatctgcaggtgctcgagaagattcgctggaacgatggacttgaccaatatagactgacacccctcgagctgaagcagaagtgcaaagaaatgaacgccgacgccgtgtttgccttccaactgcgtaatccagtccacaacgggcacgcactgctgatgcaggatacacggcgacggctacttgaacgtgggtacaagcatccagttctgctcttgcaccctttaggaggctggacgaaggacgacgacgtgcctctggactggcggatgaagcagcatgccgctgttctggaagaaggggtgcttgaccccaaaagtaccattgtagccatcttcccatcgccaatgctgtacgctgggcctactgaagtccaatggcattgtcgctcgagaatgattgccggggcaaatttttatattgttgggagggacccagcaggcatgcctcaccccgagaccaaaaaagatctgtatgagccaacccacggcgggaaggttctttctatggcaccaggattgacatctgtggaaatcatcccattcagagtagcagcgtacaacaaggctaagaaggcaatggacttctacgatcccgcccggcacaacgagtttgactttattagcgggaccagaatgcgaaagctagcccgagaaggggagaatcctcccgacgggttcatggcccccaaggcatggaaggtactgaccgactattatcgctctctagagaaaaactag

SEQ ID NO: 26218 - DNA, 1857 bp, Artificial Sequence
  derived and/or modified sequence
tctgggaagaagcaggagaaggaggagaaccagcagaagagcaccaacgtggtgtaccaggcccaccacgtgtccaggaacaagaggggccaggtggtgggcacccggggcggcttccggggctgcaccgtgtggctgaccggcctgagcggggccggcaagaccaccatcagctttgccctggaggagtacctggtgagccacgccatcccctgctacagcctggatggagacaacgtgcgccacggcctgaacagaaacctgggcttcagccctggggaccgggaggagaacatcagaagaattgctgaggtggccaagctgtttgctgatgctggcctggtgtgcatcaccagcttcatcagcccctttgccaaggacagagaaaatgccaggaagatccatgaatctgctggcctgcccttctttgagatctttgtggatgcccccctgaacatctgtgagagcagagatgtgaagggcctgtacaagagggcccgggccggggagatcaagggcttcaccggcatcgacagcgactatgagaagccagagaccccagagcgggtgctgaagaccaacctgagcacagtgtctgactgtgtgcaccaggtggtggagctgctgcaggagcagaacatcgtgccctacaccatcatcaaggacatccacgagctgtttgtgcctgagaacaagctggaccacgtgcgggcagaggccgagaccctgcccagcctgagcatcaccaagctggacctgcagtgggtgcaggtgctgtctgagggctgggccacccccctgaagggcttcatgagggagaaggagtacctgcaggtgatgcactttgacaccctgctggatggcatgttcctgctggatggagtcatcaacatgagcatccccatcgtgctgcctgtgtctgctgaggacaagacccggctggagggctgcagcaagtttgtgctggcccacggcggcagaagagtggccatcctgagagatgctgagttctatgagcacaggaaggaggagcgctgcagccgggtgtggggcaccacctgcaccaagcacccccacatcaagatggtgatggagagcggggactggctggtgggcggggacctgcaggtgctggagaagatccgctggaatgatggcctggaccagtaccgcctgacccccctggagctgaagcagaagtgcaaggagatgaatgctgatgctgtgtttgccttccagctgagaaatcctgtgcacaacggccacgccctgctgatgcaggacacccggcggcggctgctggagcggggctacaagcaccctgtgctgctgctgcaccccctgggcggctggaccaaggatgatgatgtgcccctggactggaggatgaagcagcacgccgctgtgctggaggagggcgtgctggaccccaagagcaccatcgtggccatcttccccagccccatgctgtatgccggccccacagaggtgcagtggcactgccgcagcaggatgattgctggggccaacttctacatcgtgggccgggaccctgctggcatgccccaccctgagaccaagaaggacctgtatgagcccacccatggaggcaaggtgctgtccatggcccctggcctgacctctgtggagatcatccccttccgggtggccgcctacaacaaggccaagaaggccatggacttctatgaccctgcccggcacaatgaatttgacttcatcagcggcaccaggatgaggaagctggcccgggagggagaaaatcctccagatggcttcatggcccccaaggcctggaaggtgctgacagactactaccgcagcctggagaagaactag

SEQ ID NO: 26219 - DNA, 1860 bp, Artificial Sequence
  derived and/or modified sequence
atgagcggcatcaagaagcagaagacagagaaccagcagaagagcaccaacgtggtgtaccaggcccaccacgtgtccaggaacaagaggggccaggtggtgggcacccggggcggcttccggggctgcaccgtgtggctgaccggcctgtctggagctgggaagaccaccatcagctttgccctggaggagtacctggtgtcccatgccatcccctgctacagcctggatggagacaacgtgagacatggcctgaacagaaacctgggcttcagccctggggaccgggaggagaacatcagaagaattgctgaggtggccaagctgtttgctgatgctggcctggtgtgcatcaccagcttcatcagcccctttgccaaggaccgggagaatgccaggaagatccacgagagcgctggcctgcccttctttgagatctttgtggatgcccccctgaacatctgtgagagcagagatgtgaagggcctgtacaagagggcccgggccggggagatcaagggcttcaccggcatcgacagcgactatgagaagccagagaccccagagcgggtgctgaagaccaacctgagcacagtgtctgactgtgtgcaccaggtggtggagctgctgcaggagcagaacatcgtgccctacaccatcatcaaggacatccacgagctgtttgtgcctgagaacaagctggaccacgtgcgggcagaggccgagaccctgcccagcctgagcatcaccaagctggacctgcagtgggtgcaggtgctgtctgagggctgggccacccccctgaagggcttcatgagggagaaggagtacctgcaggtgatgcactttgacaccctgctggatggcatggccctgcctgatggagtcatcaacatgagcatccccatcgtgctgcctgtgtctgctgaggacaagacccggctggagggctgcagcaagtttgtgctggcccatggaggccggcgggtggccatcctgagagatgctgagttctatgagcacaggaaggaggagcgctgcagccgggtgtggggcaccacctgcaccaagcacccccacatcaagatggtgatggagagcggggactggctggtgggcggggacctgcaggtgctggagaagatccgctggaatgatggcctggaccagtaccgcctgacccccctggagctgaagcagaagtgcaaggagatgaatgctgatgctgtgtttgccttccagctgaggaaccctgtgcacaatggacatgccctgctgatgcaggacacccggcggcggctgctggagcggggctacaagcaccctgtgctgctgctgcaccccctgggcggctggaccaaggatgatgatgtgcccctggactggaggatgaagcagcacgccgctgtgctggaggagggcgtgctggaccccaagagcaccatcgtggccatcttccccagccccatgctgtatgccggccccacagaggtgcagtggcactgccgcagcaggatgattgctggggccaacttctacatcgtgggccgggaccctgctggcatgccccaccctgagaccaagaaggacctgtatgagcccacccacggcggcaaggtgctgtccatggcccctggcctgacctctgtggagatcatccccttccgggtggccgcctacaacaaggccaagaaggccatggacttctatgaccctgcccggcacaatgaatttgacttcatcagcggcaccaggatgaggaagctggcccgggagggggagaaccccccagatggcttcatggcccccaaggcctggaaggtgctgacagactactaccgcagcctggagaagaactag

SEQ ID NO: 26220 - DNA, 1857 bp, Artificial Sequence
  derived and/or modified sequence
agcggcaagaagcaggagaaggaggagaaccagcagaagagcaccaatgtagtataccaggctcaccacgtgagtcgcaataaacgagggcaggtggtgggtacccggggcggatttagaggctgcactgtgtggttgactggactgagtggtgcgggcaagacaaccatttcattcgcattggaggagtacttagtgagccacgccatcccctgctattcccttgacggcgataacgttcgacatgggctgaaccgcaatctaggcttcagccctggcgaccgggaggaaaacattcgtagaatcgcagaagtggccaaactgtttgccgatgccgggctggtatgcattacaagctttatctctcctttcgccaaggaccgtgagaatgctcgcaagattcacgaaagtgcaggactcccgttcttcgaaatttttgtcgatgctccattgaatatttgcgaaagccgcgatgtgaagggcctgtacaagcgggcacgcgccggcgaaatcaaagggttcacaggtatcgatagtgattatgagaaacctgaaacacccgagagagttctgaagacgaacttaagcactgtgtccgactgtgtccaccaggtagtggaacttcttcaggaacagaatattgtaccatacaccatcattaaggacatccacgaactgtttgtccccgaaaacaagcttgatcacgtgagagccgaagcggaaaccctcccgagtttatccatcacaaagcttgacctccagtgggtccaggtactgtccgagggctgggctacaccattaaaaggcttcatgcgcgagaaggaatacctgcaggtcatgcacttcgacacgctattggatggaatgtttctcctggatggagttatcaatatgagcatacccatcgttctacctgtaagcgcagaggataaaacgaggcttgagggatgctcaaaattcgtcctggcgcatgggggccgaagggtggccattctgcgggacgcggaattttatgagcatagaaaggaggagcgatgttcccgcgtatggggtacaacctgtacaaagcacccgcatatcaagatggtgatggaaagcggagattggttggtgggcggcgatctgcaagtattagaaaagattcgctggaacgatggactggatcaatataggttaacaccactcgagctcaaacagaaatgcaaggaaatgaatgcagacgctgtattcgcgtttcagctgcgcaacccggtgcacaacggtcatgctctgctgatgcaggatacacgccgccgcttgcttgaacgcggatataaacaccctgtcctcttgcttcacccactcgggggatggactaaggatgacgacgtgccccttgattggaggatgaaacaacacgccgctgtactagaggagggcgtcctggaccccaagtccacaatcgtggcaatcttcccctctccgatgctctatgccggccctacagaggtgcagtggcactgtcggtctcggatgattgccggcgcaaatttttatatcgtgggaagggatcccgcgggcatgccgcaccctgagactaagaaagatctttacgagcctactcacggggggaaggtgctttctatggcgcctggtttaacgtcagtggagatcattccttttcgcgtagcggcctacaataaggccaaaaaagctatggacttctacgatcctgctaggcacaacgagttcgactttatctccgggacacgcatgcgcaaattggccagggaaggggagaatccacctgacggctttatggccccaaaggcctggaaggtcctgactgattattaccgcagcctggaaaaaaactag

SEQ ID NO: 26221 - DNA, 1860 bp, Artificial Sequence
  derived and/or modified sequence
atgagcggcatcaagaagcagaagaccgagaaccagcagaagagcactaacgtagtatatcaggcccatcatgtctctcggaacaagaggggccaggtggtgggaacacgtggcggatttaggggatgcactgtgtggctgacgggactgagcggggcagggaaaaccaccatctcctttgcccttgaagaatatttagttagccatgcaataccttgttattctctcgacggagataatgtgaggcatggactgaacaggaacctcggtttttcgcctggagaccgcgaagagaacatccgacgcatcgccgaggtcgccaaattgtttgctgacgcaggcctggtctgtattacaagctttatctcaccctttgcaaaggaccgagagaacgccaggaaaatccacgaatctgctggactcccgttctttgagatctttgtggacgcccctctgaacatttgcgaatcacgggacgtaaagggtctgtacaaaagggcccgagcaggggagataaagggcttcacaggcatagattccgactacgagaagccagagaccccagagagggttctgaagaccaatctcagtaccgtgtccgattgtgtgcaccaggtagtggaacttctccaggaacagaatattgtgccttatacgattataaaagacatacatgagctctttgtccctgagaataagctggatcatgttcgcgccgaagcagaaaccctgccttctctgagtataacaaagttggacctgcagtgggtccaggtcctgtccgaaggttgggctactcctctcaagggttttatgcgagaaaaggagtacttgcaagtaatgcactttgacaccctgctggacggtatggcactgcccgacggcgtgatcaacatgtcgattcctattgtgctgccagttagcgctgaggataagacccggctcgaggggtgcagtaagtttgtcttggcccatgggggcagacgagtggcaattcttcgcgatgctgagttctatgaacacagaaaggaagagagatgttctagggtgtggggaacaacctgtaccaagcatccccacatcaagatggtgatggaatctggagattggttagtgggaggggacctgcaggtattggagaagatccgctggaatgacggcctggaccagtatagactgaccccgcttgagctgaagcagaagtgcaaggaaatgaatgccgacgctgttttcgctttccagctgcgcaacccagtgcacaatgggcatgctctcttgatgcaggacaccagacgcagattgctggaacgcgggtacaagcaccctgttctgctattacatccgctaggtggctggaccaaagacgacgacgtcccactggattggagaatgaaacagcatgccgccgtgctggaagagggcgtgcttgaccccaagagtactattgttgcaatttttccttccccaatgttgtacgccgggccgacagaagttcaatggcattgtcgatcacgcatgatcgctggggccaacttttacatcgtcggccgggaccccgctgggatgccccatccagaaactaagaaagatctatatgaaccaacacacggtggcaaggtgctgagcatggcccccggcctgacttccgtcgaaatcatcccatttagggtggctgcttacaacaaagctaaaaaagctatggatttttatgaccccgctcgacataacgagttcgattttatctcggggacaaggatgagaaaactggccagagaaggcgagaaccctcccgacggatttatggcaccaaaggcatggaaagtgctcactgattactatagaagcctggaaaagaactag

SEQ ID NO: 26222 - DNA, 1857 bp, Artificial Sequence
  derived and/or modified sequence
agcggcaaaaagcaggagaaagaggagaatcagcagaagtccaccaatgtggtgtatcaggctcaccacgtgtcccggaacaaacggggacaggtggtcgggacccgcggagggttccggggttgtacagtctggctgaccggcctcagcggggcaggaaaaactaccatctctttcgctttagaagagtacctggtgagccacgccatcccctgctactctcttgatggggacaacgtgaggcacgggcttaacaggaatctgggattctcccccggagatcgcgaagagaatatcaggcgtattgctgaggttgctaagctctttgccgacgcgggacttgtgtgcatcactagctttatttccccgttcgctaaggacagggaaaacgccaggaagattcacgaatctgctggtctgcctttctttgaaatttttgtcgatgctccacttaacatctgcgaaagtcgagacgttaaaggtctatacaaacgagccagagctggggaaattaagggcttcaccgggattgattccgactacgagaagcctgagacaccagaaagggtccttaagactaacttgtccacggtgtccgattgtgtccaccaggtcgtggagctcctccaggagcagaacattgtcccttacactatcattaaggacattcatgaactgttcgtacccgagaataagttagaccacgtgagagccgaagccgagaccttacctagtctctcaatcacaaagctggacttacagtgggtgcaggtactctctgagggatgggcaactcccctgaaagggtttatgagggaaaaagagtacttacaagtgatgcatttcgacaccctcctggacgggatgtttctgctcgatggtgttatcaatatgagtatccccatcgtgttaccagtttctgcggaggacaaaacccgactggaaggctgctcgaaattcgtcctggcacacggagggcgtcgtgtggcaatcttacgcgacgccgagttttacgagcaccgcaaagaggagcgctgcagccgcgtgtggggcaccacctgcacaaaacatccacacatcaagatggtgatggagagtggtgactggctggtgggcggagatcttcaggtcctcgagaagatacggtggaacgacgggctcgaccagtaccgcctaacccccttggagcttaagcagaaatgcaaagagatgaacgcagatgctgtctttgctttccagctgagaaaccccgtgcataatgggcatgccctgctcatgcaagacactcgcagacgactcctggaacgcggatataagcaccctgtgctcctacttcatcctttagggggatggacaaaggatgacgatgtccctttagactggagaatgaaacagcacgccgcagtcttagaggaaggtgtcctggatccaaagtccacgatcgtggccatatttccctctccaatgctgtatgccggtcccactgaagtgcagtggcattgtcgttcccggatgatcgcaggggctaatttctacattgtgggcagagatccagcaggcatgccgcacccagagactaaaaaggacttgtacgagccgactcacggaggaaaggtcctgtccatggcacccggtcttacgtctgtcgaaatcattccattcagagtggcagcttataacaaggccaagaaggcaatggacttttacgatccagctcgccacaatgagttcgacttcatcagtggcacacggatgaggaagctggctagggaaggggaaaacccccctgatggatttatggcacccaaggcatggaaggtcctgacagactactatcggtcacttgagaagaattag

SEQ ID NO: 26223 - DNA, 1860 bp, Artificial Sequence
  derived and/or modified sequence
atgtcagggattaaaaagcaaaaaactgaaaaccagcaaaagagtaccaatgtggtataccaagcccaccacgtgagccgaaataaaagaggccaggtcgtgggaacccgcggaggctttagaggctgcaccgtctggcttacaggattgtctggtgccggtaaaacaaccattagttttgcactggaggagtatctcgtatctcacgccattccttgctacagcctggatggggacaacgttcggcatgggctcaatcgtaatctgggttttagccctggcgatcgagaagaaaacataagacgaatcgcggaagtcgctaaactgttcgcggatgcgggacttgtttgcattacatctttcattagcccatttgcgaaagacagagagaatgcacgcaaaatacacgaatcggccggactgcccttttttgagatcttcgtggacgcccctctcaatatctgtgagagccgcgatgtgaagggcctgtacaagagggctagggcgggagaaatcaagggcttcactggcatagatagcgattacgagaagcctgagaccccagaacgggtgctgaagaccaatctctcaactgtgtcggattgtgtgcaccaggtcgttgaactcctccaggagcagaacattgtcccctacactatcattaaggatatccacgagctgtttgtccctgaaaataagctcgatcacgtaagggccgaggccgagaccctgcccagtctctccatcacaaagcttgatctccaatgggtgcaggttctcagtgaaggatgggccacacccctgaagggtttcatgcgcgagaaggagtacttgcaagtgatgcactttgatacactgttagatggtatggcgctccccgatggcgtgatcaatatgtctatccctattgtgctccccgtgtccgccgaggacaaaacccgactggaaggctgctcaaagttcgttctggcccacggaggcaggcgtgtagctatactgagggacgccgagttttatgagcaccggaaggaggaaaggtgttcacgcgtgtgggggaccacctgcactaagcacccacacatcaaaatggtgatggagtccggggattggctggtaggaggagatctccaagtgctggaaaagatcagatggaatgacggcctcgaccaatatcgtctgactccacttgagctgaaacagaaatgtaaagaaatgaacgccgacgccgtattcgcattccagttacgcaatccggtgcataatgggcatgcgctgttaatgcaggacaccaggcgaaggctcctggagcgaggatacaaacatcccgtcttactgctgcacccgctcggcggttggaccaaagacgatgacgtacctttagactggaggatgaagcaacatgcagccgtgctggaggaaggggtgctggaccccaagagcacaatcgttgcaatatttcctagcccgatgctatacgctggccctacagaagtgcaatggcactgcaggtcccgaatgattgctggcgctaatttctacatagtggggcgtgacccggcaggcatgccccacccggaaaccaagaaggatctctacgagccgacccatggaggcaaagtgctgtccatggcccctggacttacaagtgtcgagatcatcccatttagagttgccgcttacaataaagccaagaaggctatggacttctacgaccctgcaagacacaacgagttcgactttatttccggcactcgcatgcggaaacttgcacgcgagggcgaaaatccacctgatggattcatggcccctaaggcgtggaaagtactgactgattactacagatctctggagaagaactag

SEQ ID NO: 26224 - DNA, 3590 bp, Artificial Sequence
  derived and/or modified sequence
agtgggaagaagcaagaaaaagaggagaaccagcagaaatccaccaatgtagtctatcaggcccaccatgtgagcaggaataagagagggcaagtggttggaacaaggggtgggttccgaggatgtaccgtgtggctaacaggtctctctggtgctggaaaaacaacgataagttttgccctggaggagtaccttgtctcccatgccatcccttgttactccctggatggggacaatgtccgtcatggccttaacagaaatctcggattctctcctggggacagagaggaaaatatccgccggattgctgaggtggctaagctgtttgctgatgctggtctggtctgcattaccagctttatttctccattcgcaaaggatcgtgagaatgcccgcaaaatacatgaatcagcagggctgccattctttgaaatatttgtagatgcacctctaaatatttgtgaaagcagagacgtaaaaggcctctataaaagggccagagctggggagattaaaggatttacaggtattgattctgattatgagaaacctgaaactcctgagcgtgtgcttaaaaccaatttgtccacagtgagtgactgtgtccaccaggtagtggaacttctgcaagagcagaacattgtaccctatactataatcaaagatatccacgaactctttgtgccggaaaacaaacttgaccacgtccgagctgaggctgaaactctcccttcattatcaattactaagctggatctccagtgggtccaggttttgagcgaaggctgggccactcccctcaaaggtttcatgcgggagaaggagtacttacaggttatgcactttgacaccctgctagatggtatgtttttgttagatggcgtgatcaacatgagcatccccattgtactgcccgtctctgcagaggataagacacggctggaagggtgcagcaagtttgtcctggcacatggtggacggagggtagctatcttacgagacgctgaattctatgaacacagaaaagaggaacgctgttcccgtgtttgggggacaacatgtacaaaacacccccatatcaaaatggtgatggaaagtggggactggctggttggtggagaccttcaggtgctggagaaaataagatggaatgatgggctggaccaataccgtctgacacctctggagctcaaacagaaatgtaaagaaatgaatgctgatgcggtgtttgcattccagttgcgcaatcctgtccacaatggccatgccctgttgatgcaggacactcgccgcaggctcctagagaggggctacaagcacccggtcctcctactacaccctctgggcggctggaccaaggatgacgatgtgcctctagactggcggatgaagcagcacgcggctgtgctcgaggaaggggtcctggatcccaagtcaaccattgttgccatctttccgtctcccatgttatatgctggccccacagaggtccagtggcactgcaggtcccggatgattgcgggtgccaatttctacattgtggggagggaccctgcaggaatgccccatcctgaaaccaagaaggatctgtatgaacccactcatgggggcaaggtcttgagcatggcccctggcctcacctctgtggaaatcattccattccgagtggctgcctacaacaaagccaaaaaagccatggacttctatgatccagcaaggcacaatgagtttgacttcatctcaggaactcgaatgaggaagctcgcccgggaaggagagaatcccccagatggcttcatggcccccaaagcatggaaggtcctgacagattattacaggtccctggagaagaactaagcctttggctccagagtttctttctgaagtgctctttgattaccttttctatttttatgattagatgctttgtattaaattgcttctcaatgatgcattttaatcttttataatgaagtaaaagttgtgtctataattaaaaaaaaatatatatatatacacacacacatatacatacaaagtcaaactgaagaccaaatcttagcaggtaaaagcaatattcttatacatttcataataaaattagctctatgtattttctactgcacctgagcaggcaggtcccagatttcttaaggctttgtttgaccatgtgtctagttacttgctgaaaagtgaatatattttccagcatgtcttgacaacctgtactcttccaatgtcatttatcagttgtaaaatatatcagattgtgtcctcttctgtacaattgacaaaaaaaaaaatttttttttctcactctaaaagaggtgtggctcacatcaagattcttcctgatattttacctcatgctgtacaaagccttaatgttgtaatcatatcttacgtgttgaagacctgactggagaaacaaaatgtgcaataacgtgaattttatcttagagatctgtgcagcctatttctgtcacaaaagttatattgtctaataagagaagtcttaatggcctctgtgaataatgtaactccagttacacggtgacttttaatagcatacagtgatttgatgaaaggacgtcaaacaatgtggcgatgtcgtggaaagttatctttcccgctctttgctgtggtcattgtgtcttgcagaaaggatggccctgatgcagcagcagcgccagctgtaataaaaaataattcacactatcagactagcaaggcactagaactggaaaagaccacagaaaacaaagaatccaaccctttcatcttacaggtgaacaaactgtgatgatgcacatgtatgtgttttgtaagctgtgagcaccgtaacaaaatgtaaatttgccattattaggaagtgctggtggcagtgaagaagcacccaggccacttgactcccagtctggtgccctgtctacaccagacaacacaggagctgggtcagattcccctcagctgcttaacaaagttcctcgaacagaaagtgcttacaaagctgccttctcggatactgaaaggtcgagttttctgaactgcactgattttattgcagttgaaaaaaaaaaaaagctattccaaagatttcaagctgttctgagacatcttctgatggctttacttcctgagaggcaatgtttttactttatgcataattcattgttgccaaggaataaagtgaagaaacagcaccttttaatatataggtctctctggaagagacctaaattagaaagagaaaactgtgacaattttcatattctcattcttaaaaaacactaatcttaactaacaaaagttcttttgagaataagttacacacaatggccacagcagtttgtctttaatagtatagtgcctatactcatgtaatcggttactcactactgcctttaaaaaaaaaaaccagcatatttattgaaaacatgagacaggattatagtgccttaaccgatatattttgtgacttaaaaaatacatttaaaactgctcttctgctctagtaccatgcttagtgcaaatgattatttctatgtacaactgatgcttgttcttattttaataaatttatcagagtg

SEQ ID NO: 26225 - DNA, 3856 bp, Artificial Sequence
  derived and/or modified sequence
ctaggcggcggcggccgggtccccaaggctgggcgctgcttgcggaaccgacggggcggagaggagcgtggcgggaggaggagtaggagaagggggctggtcaagggaagtgcgacgtgtctgcggagcctttttatacctccttcccgggagtccggcagccgctgctgctgctgctgctgctgctgccgccgccgccgccgccgtccctgcgtccttcggtctctgctcccgggacccgggctccgccgcagccagccagcatgtcggggatcaagaagcaaaagacggagaaccagcagaaatccaccaatgtagtctatcaggcccaccatgtgagcaggaataagagagggcaagtggttggaacaaggggtgggttccgaggatgtaccgtgtggctaacaggtctctctggtgctggaaaaacaacgataagttttgccctggaggagtaccttgtctcccatgccatcccttgttactccctggatggggacaatgtccgtcatggccttaacagaaatctcggattctctcctggggacagagaggaaaatatccgccggattgctgaggtggctaagctgtttgctgatgctggtctggtctgcattaccagctttatttctccattcgcaaaggatcgtgagaatgcccgcaaaatacatgaatcagcagggctgccattctttgaaatatttgtagatgcacctctaaatatttgtgaaagcagagacgtaaaaggcctctataaaagggccagagctggggagattaaaggatttacaggtattgattctgattatgagaaacctgaaactcctgagcgtgtgcttaaaaccaatttgtccacagtgagtgactgtgtccaccaggtagtggaacttctgcaagagcagaacattgtaccctatactataatcaaagatatccacgaactctttgtgccggaaaacaaacttgaccacgtccgagctgaggctgaaactctcccttcattatcaattactaagctggatctccagtgggtccaggttttgagcgaaggctgggccactcccctcaaaggtttcatgcgggagaaggagtacttacaggttatgcactttgacaccctgctagatggcatggcccttcctgatggcgtgatcaacatgagcatccccattgtactgcccgtctctgcagaggataagacacggctggaagggtgcagcaagtttgtcctggcacatggtggacggagggtagctatcttacgagacgctgaattctatgaacacagaaaagaggaacgctgttcccgtgtttgggggacaacatgtacaaaacacccccatatcaaaatggtgatggaaagtggggactggctggttggtggagaccttcaggtgctggagaaaataagatggaatgatgggctggaccaataccgtctgacacctctggagctcaaacagaaatgtaaagaaatgaatgctgatgcggtgtttgcattccagttgcgcaatcctgtccacaatggccatgccctgttgatgcaggacactcgccgcaggctcctagagaggggctacaagcacccggtcctcctactacaccctctgggcggctggaccaaggatgacgatgtgcctctagactggcggatgaagcagcacgcggctgtgctcgaggaaggggtcctggatcccaagtcaaccattgttgccatctttccgtctcccatgttatatgctggccccacagaggtccagtggcactgcaggtcccggatgattgcgggtgccaatttctacattgtggggagggaccctgcaggaatgccccatcctgaaaccaagaaggatctgtatgaacccactcatgggggcaaggtcttgagcatggcccctggcctcacctctgtggaaatcattccattccgagtggctgcctacaacaaagccaaaaaagccatggacttctatgatccagcaaggcacaatgagtttgacttcatctcaggaactcgaatgaggaagctcgcccgggaaggagagaatcccccagatggcttcatggcccccaaagcatggaaggtcctgacagattattacaggtccctggagaagaactaagcctttggctccagagtttctttctgaagtgctctttgattaccttttctatttttatgattagatgctttgtattaaattgcttctcaatgatgcattttaatcttttataatgaagtaaaagttgtgtctataattaaaaaaaaatatatatatatacacacacacatatacatacaaagtcaaactgaagaccaaatcttagcaggtaaaagcaatattcttatacatttcataataaaattagctctatgtattttctactgcacctgagcaggcaggtcccagatttcttaaggctttgtttgaccatgtgtctagttacttgctgaaaagtgaatatattttccagcatgtcttgacaacctgtactcttccaatgtcatttatcagttgtaaaatatatcagattgtgtcctcttctgtacaattgacaaaaaaaaaaatttttttttctcactctaaaagaggtgtggctcacatcaagattcttcctgatattttacctcatgctgtacaaagccttaatgttgtaatcatatcttacgtgttgaagacctgactggagaaacaaaatgtgcaataacgtgaattttatcttagagatctgtgcagcctatttctgtcacaaaagttatattgtctaataagagaagtcttaatggcctctgtgaataatgtaactccagttacacggtgacttttaatagcatacagtgatttgatgaaaggacgtcaaacaatgtggcgatgtcgtggaaagttatctttcccgctctttgctgtggtcattgtgtcttgcagaaaggatggccctgatgcagcagcagcgccagctgtaataaaaaataattcacactatcagactagcaaggcactagaactggaaaagaccacagaaaacaaagaatccaaccctttcatcttacaggtgaacaaactgtgatgatgcacatgtatgtgttttgtaagctgtgagcaccgtaacaaaatgtaaatttgccattattaggaagtgctggtggcagtgaagaagcacccaggccacttgactcccagtctggtgccctgtctacaccagacaacacaggagctgggtcagattcccctcagctgcttaacaaagttcctcgaacagaaagtgcttacaaagctgccttctcggatactgaaaggtcgagttttctgaactgcactgattttattgcagttgaaaaaaaaaaaaagctattccaaagatttcaagctgttctgagacatcttctgatggctttacttcctgagaggcaatgtttttactttatgcataattcattgttgccaaggaataaagtgaagaaacagcaccttttaatatataggtctctctggaagagacctaaattagaaagagaaaactgtgacaattttcatattctcattcttaaaaaacactaatcttaactaacaaaagttcttttgagaataagttacacacaatggccacagcagtttgtctttaatagtatagtgcctatactcatgtaatcggttactcactactgcctttaaaaaaaaaaaccagcatatttattgaaaacatgagacaggattatagtgccttaaccgatatattttgtgacttaaaaaatacatttaaaactgctcttctgctctagtaccatgcttagtgcaaatgattatttctatgtacaactgatgcttgttcttattttaataaatttatcagagtg

SEQ ID NO: 26226 - DNA, 1857 bp, Artificial Sequence
  derived and/or modified sequence
agcggcaagaagcaggagaaggaggagaaccagcagaagagcaccaacgtggtgtaccaggcccaccacgtgagcagaaacaagagaggccaggtggtgggcaccagaggcggcttcagaggctgcaccgtgtggctgaccggcctgagcggcgccggcaagaccaccatcagcttcgccctggaggagtacctggtgagccacgccatcccctgctacagcctggacggcgacaacgtgagacacggcctgaacagaaacctgggcttcagccccggcgacagagaggagaacatcagaagaatcgccgaggtggccaagctgttcgccgacgccggcctggtgtgcatcaccagcttcatcagccccttcgccaaggacagagagaacgccagaaagatccacgagagcgccggcctgcccttcttcgagatcttcgtggacgcccccctgaacatctgcgagagcagagacgtgaagggcctgtacaagagagccagagccggcgagatcaagggcttcaccggcatcgacagcgactacgagaagcccgagacccccgagagagtgctgaagaccaacctgagcaccgtgagcgactgcgtgcaccaggtggtggagctgctgcaggagcagaacatcgtgccctacaccatcatcaaggacatccacgagctgttcgtgcccgagaacaagctggaccacgtgagagccgaggccgagaccctgcccagcctgagcatcaccaagctggacctgcagtgggtgcaggtgctgagcgagggctgggccacccccctgaagggcttcatgagagagaaggagtacctgcaggtgatgcacttcgacaccctgctggacggcatgttcctgctggacggcgtgatcaacatgagcatccccatcgtgctgcccgtgagcgccgaggacaagaccagactggagggctgcagcaagttcgtgctggcccacggcggcagaagagtggccatcctgagagacgccgagttctacgagcacagaaaggaggagagatgcagcagagtgtggggcaccacctgcaccaagcacccccacatcaagatggtgatggagagcggcgactggctggtgggcggcgacctgcaggtgctggagaagatcagatggaacgacggcctggaccagtacagactgacccccctggagctgaagcagaagtgcaaggagatgaacgccgacgccgtgttcgccttccagctgagaaaccccgtgcacaacggccacgccctgctgatgcaggacaccagaagaagactgctggagagaggctacaagcaccccgtgctgctgctgcaccccctgggcggctggaccaaggacgacgacgtgcccctggactggagaatgaagcagcacgccgccgtgctggaggagggcgtgctggaccccaagagcaccatcgtggccatcttccccagccccatgctgtacgccggccccaccgaggtgcagtggcactgcagaagcagaatgatcgccggcgccaacttctacatcgtgggcagagaccccgccggcatgccccaccccgagaccaagaaggacctgtacgagcccacccacggcggcaaggtgctgagcatggcccccggcctgaccagcgtggagatcatccccttcagagtggccgcctacaacaaggccaagaaggccatggacttctacgaccccgccagacacaacgagttcgacttcatcagcggcaccagaatgagaaagctggccagagagggcgagaacccccccgacggcttcatggcccccaaggcctggaaggtgctgaccgactactacagaagcctggagaagaactag

SEQ ID NO: 26227 - DNA, 1860 bp, Artificial Sequence
  derived and/or modified sequence
atgagcggcatcaagaagcagaagaccgagaaccagcagaagagcaccaacgtggtgtaccaggcccaccacgtgagcagaaacaagagaggccaggtggtgggcaccagaggcggcttcagaggctgcaccgtgtggctgaccggcctgagcggcgccggcaagaccaccatcagcttcgccctggaggagtacctggtgagccacgccatcccctgctacagcctggacggcgacaacgtgagacacggcctgaacagaaacctgggcttcagccccggcgacagagaggagaacatcagaagaatcgccgaggtggccaagctgttcgccgacgccggcctggtgtgcatcaccagcttcatcagccccttcgccaaggacagagagaacgccagaaagatccacgagagcgccggcctgcccttcttcgagatcttcgtggacgcccccctgaacatctgcgagagcagagacgtgaagggcctgtacaagagagccagagccggcgagatcaagggcttcaccggcatcgacagcgactacgagaagcccgagacccccgagagagtgctgaagaccaacctgagcaccgtgagcgactgcgtgcaccaggtggtggagctgctgcaggagcagaacatcgtgccctacaccatcatcaaggacatccacgagctgttcgtgcccgagaacaagctggaccacgtgagagccgaggccgagaccctgcccagcctgagcatcaccaagctggacctgcagtgggtgcaggtgctgagcgagggctgggccacccccctgaagggcttcatgagagagaaggagtacctgcaggtgatgcacttcgacaccctgctggacggcatggccctgcccgacggcgtgatcaacatgagcatccccatcgtgctgcccgtgagcgccgaggacaagaccagactggagggctgcagcaagttcgtgctggcccacggcggcagaagagtggccatcctgagagacgccgagttctacgagcacagaaaggaggagagatgcagcagagtgtggggcaccacctgcaccaagcacccccacatcaagatggtgatggagagcggcgactggctggtgggcggcgacctgcaggtgctggagaagatcagatggaacgacggcctggaccagtacagactgacccccctggagctgaagcagaagtgcaaggagatgaacgccgacgccgtgttcgccttccagctgagaaaccccgtgcacaacggccacgccctgctgatgcaggacaccagaagaagactgctggagagaggctacaagcaccccgtgctgctgctgcaccccctgggcggctggaccaaggacgacgacgtgcccctggactggagaatgaagcagcacgccgccgtgctggaggagggcgtgctggaccccaagagcaccatcgtggccatcttccccagccccatgctgtacgccggccccaccgaggtgcagtggcactgcagaagcagaatgatcgccggcgccaacttctacatcgtgggcagagaccccgccggcatgccccaccccgagaccaagaaggacctgtacgagcccacccacggcggcaaggtgctgagcatggcccccggcctgaccagcgtggagatcatccccttcagagtggccgcctacaacaaggccaagaaggccatggacttctacgaccccgccagacacaacgagttcgacttcatcagcggcaccagaatgagaaagctggccagagagggcgagaacccccccgacggcttcatggcccccaaggcctggaaggtgctgaccgactactacagaagcctggagaagaactag

SEQ ID NO: 26228 - DNA, 234 bp, Artificial Sequence
  derived and/or modified sequence
atggacctggtgaagaaccacctgatgtacgccgtgagagaggaggtggagatcctgaaggagcagatcagagagctggtggagaagaacagccagctggagagagagaacaccctgctgaagaccctggccagccccgagcagctggagaagttccagagctgcctgagccccgaggagcccgcccccgagagcccccaggtgcccgaggcccccggcggcagcgccgtgtag

SEQ ID NO: 26229 - DNA, 78 bp, Artificial Sequence
  derived and/or modified sequence
atggacctggtgaagaaccacctgatgtacgccgtgagagaggaggtggagatcctgaaggagcagatcagagagtag

SEQ ID NO: 26230 - DNA, 234 bp, Artificial Sequence
  derived and/or modified sequence
atggacttagtgaagaaccaccttatgtatgccgttagggaagaagtcgaaatccttaaagagcagatacgggagttggtcgaaaaaaacagtcagctggagcgggagaatactctgctaaagactttagcgtctcccgaacagctggagaagtttcaaagctgcctgagtccagaggaacctgcccctgaatctcctcaggtaccggaggcccccgggggtagcgccgtgtag

SEQ ID NO: 26231 - DNA, 78 bp, Artificial Sequence
  derived and/or modified sequence
atggaccttgtgaaaaatcatctcatgtatgcagtccgagaagaggtcgaaattttaaaagaacagattagggagtag

SEQ ID NO: 26232 - DNA, 234 bp, Artificial Sequence
  derived and/or modified sequence
atggacctggtgaagaaccacctgatgtatgctgtgcgggaggaggtggagatcctgaaggagcagatccgggagctggtggagaagaacagccagctggagcgggagaacaccctgctgaagaccctggccagccctgagcagctggagaagttccagagctgcctgagccctgaggagcccgcccctgagagcccccaggtgcctgaggcccctgggggcagcgctgtgtag

SEQ ID NO: 26233 - DNA, 78 bp, Artificial Sequence
  derived and/or modified sequence
atggacctggtgaagaaccacctgatgtatgctgtgcgggaggaggtggagatcctgaaggagcagatccgggagtag

SEQ ID NO: 26234 - DNA, 234 bp, Artificial Sequence
  derived and/or modified sequence
atggacctggtgaagaaccacctgatgtacgccgtgcgggaggaggtggaaatcctaaaagagcagattagggaactggttgaaaaaaatagtcagctggaacgggagaatacgctcttgaagaccctagcatcccccgagcagctagaaaaattccagtcctgcctaagccccgaagagcctgcgcctgagtctccgcaggttccggaagcacctggcggcagcgctgtctag

SEQ ID NO: 26235 - DNA, 78 bp, Artificial Sequence
  derived and/or modified sequence
atggacctggtgaagaaccacctgatgtacgccgtgcgggaggaggtggagatactcaaagagcagatacgggaatag

SEQ ID NO: 26236 - DNA, 234 bp, Artificial Sequence
  derived and/or modified sequence
atggatctcgttaagaaccacctgatgtatgcagttcgcgaggaggtagagatcctgaaagagcaaattcgggaactggttgaaaaaaatagccaacttgaaagggagaacaccctgctgaagacattggcctcacccgagcagcttgagaaatttcagagctgtctctctccagaggagcctgcgcctgagtctccacaggtgcccgaggcgccagggggaagcgcggtgtag

SEQ ID NO: 26237 - DNA, 78 bp, Artificial Sequence
  derived and/or modified sequence
atggatctcgtaaagaatcacctgatgtacgccgttcgggaagaagtggagatcctgaaggaacaaataagggaatag

SEQ ID NO: 26238 - protein, 431 aa, Artificial Sequence
  derived and/or modified sequence
MTSQRSPLAPLLLLSLHGVAASLEVSESPGSIQVARGQPAVLPCTFTTSAALINLNVIWMVTPLSNANQPEQVILYQGGQMFDGAPRFHGRVGFTGTMPATNVSIFINNTQLSDTGTYQCLVNNLPDIGGRNIGVTGLTVLVPPSAPHCQIQGSQDIGSDVILLCSSEEGIPRPTYLWEKLDNTLKLPPTATQDQVQGTVTIRNISALSSGLYQCVASNAIGTSTCLLDLQVISPQPRNIGLIAGAIGTGAVIIIFCIALILGAFFYWRSKNKEEEEEEIPNEIREDDLPPKCSSAKAFHTEISSSDNNTLTSSNAYNSRYWSNNPKVHRNTESVSHFSDLGQSFSFHSGNANIPSIYANGTHLVPGQHKTLVVTANRGSSPQVMSRSNGSVSRKPRPPHTHSYTISHATLERIGAVPVMVPAQSRAGSLV

SEQ ID NO: 26239 - DNA, 1296 bp, Artificial Sequence
  derived and/or modified sequence
atgaccagccagagaagccccctggcccccctgctgctgctgagcctgcacggcgtggccgccagcctggaggtgagcgagagccccggcagcatccaggtggccagaggccagcccgccgtgctgccctgcaccttcaccaccagcgccgccctgatcaacctgaacgtgatctggatggtgacccccctgagcaacgccaaccagcccgagcaggtgatcctgtaccagggcggccagatgttcgacggcgcccccagattccacggcagagtgggcttcaccggcaccatgcccgccaccaacgtgagcatcttcatcaacaacacccagctgagcgacaccggcacctaccagtgcctggtgaacaacctgcccgacatcggcggcagaaacatcggcgtgaccggcctgaccgtgctggtgccccccagcgccccccactgccagatccagggcagccaggacatcggcagcgacgtgatcctgctgtgcagcagcgaggagggcatccccagacccacctacctgtgggagaagctggacaacaccctgaagctgccccccaccgccacccaggaccaggtgcagggcaccgtgaccatcagaaacatcagcgccctgagcagcggcctgtaccagtgcgtggccagcaacgccatcggcaccagcacctgcctgctggacctgcaggtgatcagcccccagcccagaaacatcggcctgatcgccggcgccatcggcaccggcgccgtgatcatcatcttctgcatcgccctgatcctgggcgccttcttctactggagaagcaagaacaaggaggaggaggaggaggagatccccaacgagatcagagaggacgacctgccccccaagtgcagcagcgccaaggccttccacaccgagatcagcagcagcgacaacaacaccctgaccagcagcaacgcctacaacagcagatactggagcaacaaccccaaggtgcacagaaacaccgagagcgtgagccacttcagcgacctgggccagagcttcagcttccacagcggcaacgccaacatccccagcatctacgccaacggcacccacctggtgcccggccagcacaagaccctggtggtgaccgccaacagaggcagcagcccccaggtgatgagcagaagcaacggcagcgtgagcagaaagcccagacccccccacacccacagctacaccatcagccacgccaccctggagagaatcggcgccgtgcccgtgatggtgcccgcccagagcagagccggcagcctggtgtag

SEQ ID NO: 26240 - DNA, 1296 bp, Artificial Sequence
  derived and/or modified sequence
atgacaagtcagaggagcccactagcaccactcctactgctttcactacacggagtcgcagcaagtttggaggtgtcagagtcccctggctccattcaggtcgctcggggtcagcctgccgtcctcccatgtacattcaccaccagtgctgccctgattaatctgaatgttatttggatggtcaccccattgagcaatgcaaatcaacctgagcaggtgatcctttaccagggtggccaaatgtttgacggagcccctcgcttccatggccgggttggcttcacggggacaatgcctgcaactaacgtttccatattcattaataatacacagctgtcagacactggcacataccagtgcctcgtaaataacctccccgacatcggaggtcgtaacattggtgtgaccggcctcactgtgctcgttccaccctcggccccccactgccagattcagggctctcaggatatcggcagcgatgtgatactgctgtgcagttcagaggaaggcatccctcggcctacctacctgtgggagaagctcgacaacacccttaagctgcctccaactgccacccaggatcaggtgcaagggaccgtcactatcagaaatatatcagctctaagcagtggcctttaccagtgtgtggcttccaatgcaatcggaacgagcacatgcctgctggatctccaggtcattagtccccaaccgaggaacattggactgattgccggcgcgatcggaacaggcgccgtgattatcattttctgcatcgctctcatcctcggcgccttcttctactggcgatcgaaaaataaggaagaggaggaagaggagatccctaacgagatccgagaggatgatttgccccccaagtgtagctcagcaaaggccttccatacagaaattagttcttccgataataataccctgacatctagcaatgcatacaatagcagatactggtccaataaccccaaagtgcatcgtaacaccgagagtgtctcccacttttcagacctgggacagagcttttctttccatagcggcaacgcgaacattccaagtatctacgcaaacggaacccatctggtaccaggacagcataagacgttggtcgtgacagccaacagaggatccagcccccaggtaatgtcaagatctaacgggagcgtgtctcggaagccacgacccccccacacccactcctataccatttcacacgctacactggagcgcataggcgctgtgccagtcatggtccctgctcagtcgcgcgcaggttccttggtctag

SEQ ID NO: 26241 - DNA, 3495 bp, Artificial Sequence
  derived and/or modified sequence
agttggggggagtggctccccggactgcgcgaggggtcggctagtcctggggcagggctgggtggcacggctggcgagcccggaacgcctctggtcacagctcagcgtccgcggagccgggcggcgctgcagctgcacttggctcgtctgtgggtctgacagtcccagctctgcgcggggaacagcggcccggcgctgggtgtgggaggaccaggctgccccaagagcgcggagactcacgcccgctcctctcctgttgcgaccgggagccgggtaggaggcaggcgcgctccctgcggccccgggatgacttctcagcgttcccctctggcgcctttgctgctcctctctctgcacggtgttgcagcatccctggaagtgtcagagagccctgggagtatccaggtggcccggggtcagccagcagtcctgccctgcactttcactaccagcgctgccctcattaacctcaatgtcatttggatggtcactcctctctccaatgccaaccaacctgaacaggtcatcctgtatcagggtggacagatgtttgatggtgccccccggttccacggtagggtaggatttacaggcaccatgccagctaccaatgtctctatcttcattaataacactcagttatcagacactggcacctaccagtgcctggtcaacaaccttccagacatagggggcaggaacattggggtcaccggtctcacagtgttagttcccccttctgccccacactgccaaatccaaggatcccaggatattggcagcgatgtcatcctgctctgtagctcagaggaaggcattcctcgaccaacttacctttgggagaagttagacaataccctcaaactacctccaacagctactcaggaccaggtccagggaacagtcaccatccggaacatcagtgccctgtcttcaggtttgtaccagtgcgtggcttctaatgctattggaaccagcacctgtcttctggatctccaggttatttcaccccagcccaggaacattggactaatagctggagccattggcactggtgcagttattatcattttttgcattgcactaattttaggggcattcttttactggagaagcaaaaataaagaggaggaagaagaagaaattcctaatgaaataagagaggatgatcttccacccaagtgttcttctgccaaagcatttcacactgagatttcctcctcggacaacaacacactaacctcttccaatgcctacaacagtcgatactggagcaacaatccaaaagttcatagaaacacagagtcagtcagccacttcagtgacttgggccaatctttctctttccactcaggcaatgccaacataccatccatttatgctaatgggacccatctggtcccgggtcaacataagactctggtagtgacagccaacagagggtcatcaccacaggtgatgtccaggagcaatggctcagtcagtaggaagcctcggcctccacacactcattcctacaccatcagccacgcaacactggaacgaattggtgcagtacctgtcatggtaccagcccagagtcgggccgggtccttggtataggacatgaggaaatgttgtgttcagaaatgaataaatggaatgccctcatacaagggggagggtggggtggggagtgctgggaaagaaacacttccttataattatattagtaaaatgcacaaagaagaaggcagtgctgttacttggccactaagatgtgtaaaatggactgaaatgctccatcatgaagacttgcttccccaccaaagatgtcctgggattctgctggatctcaaagatgtgccaagccaaggaaaaagatacaagagcagaatagtacttaaaatccaaactgccgcccagatgggcttgttcttcatgcctaacttaataatttttaagagattaaagtgccagatggagtttaaatattgaaattattttaaaaggtaggtgtctttaagaaaataacaagcaaccctgtgatatgttccgtctctcccaattccctcgttatatagagggcttaatggtataaatggttaatattggtcccaacagggctgactcttctatcatataatcaaaactttttacatgagcaaaattcagtaagaaatgggggaagacaaaggaaacgtctttgagaagccccttcatatttatttatttatctcttcctgaaccatgaatttcatatgtggaatattgctatattgacagattcttgcctgtctgtgttattctaggatctgttacaggtccatggcaattactgtttattttttcctggaaaaatatttttttataaaaggcttttttttttttttaaatacatgagaggcattgggctaagaaagaaaagactgttgtataataccttgttcaatggttgtatttagtgagctcatagaggtccatcatatcatgaccgagctaggttgtgtgggcaggaaggtagggctaaggggttgtagccttgctgggcagcctctcagagcaaggttgttcagatctcccttgctattacagtaggttactattaatgagggcagcacctgatgccttttgtactgaggtatgtaactttctccttatttgacaagtagaagttaacttacttgtcagggagggcagacgtttttttgttctgtttcgtttttcaaaataatgctttttgcaaaagaggtaagactgagactaaaggtgttatcttctggtgtgctcctggaagtgtctaccctacatttgtgtcagctcagggttgcagtgttgcccagatgcattttacatcactgtaaagagattacttttgtggttactacctggcttggctggccttgcggttcaccagattaatttacaaactcccccactttattttgtgctatgtagatctggccatacttgcattagtgactgtcttgccttaaccacacttaagcaacccacaaatttcttctcagatttgtttcctagattacttatgatactcatcccatgtctcaataagagtgtcttttctttctggatgtgttctcttactccctcttaccaccatactttttgctctcttctcctgcaagcgtagtcttcacagggagtggcttcctgacatttttttcagttatgtgaatgaatggaaaccaacagctgctgcaaacactgtttttccaagaaggctacactcagaacctaaccattgccaaccatttcagtattgataaaaagctgaatttactttagcattacttatttttttttccatttgatggttcttactttgtaaaaatttaaataaatgaatgtctatactttttataaagaaaagtgaaaataccatgacactgaaaagatgatgctatcagatgctgtttagaaagcatttatcttgcatttctttattctttctaattatctaaaattcaataaaattttattcatataaaataa

SEQ ID NO: 26242 - DNA, 1296 bp, Artificial Sequence
  derived and/or modified sequence
atgaccagccagaggagccccctggcccccctgctgctgctgagcctgcatggagtggccgccagcctggaggtgtctgagagccctggcagcatccaggtggcccggggccagcctgctgtgctgccctgcaccttcaccaccagcgctgccctgatcaacctgaatgtcatctggatggtgacccccctgagcaatgccaaccagcctgagcaggtgatcctgtaccagggcggccagatgtttgatggagccccccgcttccacggccgggtgggcttcaccggcaccatgcctgccaccaacgtgtccatcttcatcaacaacacccagctgagtgacaccggcacctaccagtgcctggtgaacaacctgcctgacatcggcggcagaaatattggagtgacaggcctgactgtgctggtgcccccatctgccccccactgccagatccagggcagccaggacattggaagtgatgtgatcctgctgtgcagcagcgaggagggcatcccccggcccacctacctgtgggagaagctggacaacaccctgaagctgcccccaacagccacccaggaccaggtgcagggcaccgtgaccatccggaacatcagcgccctgagcagcggcctgtaccagtgtgtggccagcaatgccatcggcaccagcacctgcctgctggacctgcaggtgatcagcccccagcccaggaacatcggcctgattgctggggccatcggcactggagctgtgatcatcatcttctgcatcgccctgatcctgggcgccttcttctactggaggagcaagaacaaggaggaggaggaggaggagatccccaatgagatccgggaggatgacctgccccccaagtgcagcagcgccaaggccttccacacagagatcagcagcagtgacaacaacaccctgaccagcagcaatgcctacaacagccgctactggagcaacaaccccaaggtgcacaggaacacagagagcgtgagccacttcagtgacctgggccagagcttctccttccacagcggaaatgccaacatccccagcatctatgccaacggcacccacctggtgcccggccagcacaagaccctggtggtgacagccaacagaggcagcagcccccaggtgatgagccgcagcaatggatctgtgtccaggaagccccggcccccccacacccacagctacaccatcagccacgccaccctggagcgcatcggggctgtgcctgtgatggtgcctgcccagagcagagctggcagcctggtgtag

SEQ ID NO: 26243 - DNA, 1296 bp, Artificial Sequence
  derived and/or modified sequence
atgaccagccagcggagccccctggcccccctgctgctgctgagcctgcatggggtggctgccagcctggaagtttcagaatccccagggtccatccaggtggccagaggccaaccagcagtcctaccttgcactttcactacttccgccgccctcatcaacctcaatgtaatttggatggtgacacctctgtctaacgctaaccagccggagcaggtcatcctctaccaaggagggcagatgtttgatggagcaccgagatttcacgggagagtgggattcactggaaccatgcctgcaacaaacgtctccatctttataaacaatacccagctgtctgacacaggtacctaccaatgcctggtaaataaccttcccgacattggtgggcggaacattggggttaccggcctgacagtgcttgtcccaccctcagccccccactgccagatccagggttcgcaggacatcggcagtgatgtcatactcctgtgctcttccgaggagggtatcccccgcccaacgtacctctgggagaagctggacaacacattgaaactgccacccaccgcaacacaggaccaggtgcagggtaccgtaacgattcgtaatatctctgcactttcttctggactctatcaatgcgtcgcctcaaacgccatcggaaccagcacctgcttactagacctccaggtcatctccccccagccgaggaacattggacttattgctggcgctattggaactggtgctgtcattatcattttctgtatagcgctaattctgggcgctttcttttactggcgctcaaagaataaagaggaagaagaggaggaaatccccaatgaaatacgcgaggacgacttgcctccaaagtgtagcagcgccaaggcgttccatacagagatctctagctccgacaataataccctcacttcctccaacgcatataacagccgctattggtcgaacaacccaaaggttcatcgcaataccgaaagcgtctcccatttctcagatctcgggcaatcgttcagcttccatagtgggaatgctaatatcccctcgatctacgccaacggaacccatctggtgccgggccagcacaagaccctcgtggtgaccgccaaccgtggttccagcccacaggtaatgagccgctctaatggttctgtgagtcggaagccccgtccgcctcacacccattcatacacaatcagtcatgctacactcgagcgcatcggggctgtgcctgttatggtacccgcccagtcacgtgccggcagcctggtgtag

SEQ ID NO: 26244 - DNA, 1296 bp, Artificial Sequence
  derived and/or modified sequence
atgacaagccagaggtcccctctagcaccactgctgctgctttctttgcatggggtagcggcttctctggaggtaagcgagagccctggctcaattcaggtggctagagggcagcccgctgttcttccttgtaccttcaccaccagcgcagcactgatcaacttgaacgtgatctggatggttactcccctgtctaatgcgaatcaaccggagcaagtgattctttaccaggggggtcagatgttcgacggcgctccacgctttcatggacgagtgggcttcaccggcaccatgccagccacaaatgtgtctatctttataaataacacccaactgagcgatacagggacctaccagtgtttggtgaataatctgcccgatattggtggacggaacatcggggtgactgggctgactgttctcgttcccccatccgccccacattgtcagatccagggttctcaagatattgggtctgacgtcatcttgctttgtagtagcgaggaaggcattcctcggccaacatatttatgggagaaactggacaacaccctcaaacttcccccaaccgccacccaggaccaggtccaagggaccgtgaccataaggaacatttccgccctgagtagcggtctgtaccagtgcgttgcctctaatgctatcggaacgtccacctgcctgctcgacttacaggttatatccccgcagccaaggaacataggtctcattgccggagcgattgggactggcgctgttattattatcttctgcatcgccctgattctgggtgcttttttctactggcgctcgaagaacaaagaagaagaagaagaagagattcctaatgagattcgcgaggatgatcttccccctaagtgctcctcagcgaaagcattccacactgagatcagtagcagcgataataacactctcacctccagtaatgcgtataatagcagatactggtcaaataatcccaaagtccatcggaataccgagagtgtgtcacacttttctgacctcggccagagctttagctttcattcagggaatgccaacatcccttctatttacgctaacgggacacatctggttcctggccaacacaagaccctagtggtcacggctaacagaggttcgtccccgcaggtcatgagccgcagtaacggttccgtctcgagaaagcccagaccaccgcatacccactcttacacaatttcacatgcaaccctggagagaatcggcgcagtcccagtgatggtcccagcccagagccgcgctggcagtttggtgtag

SEQ ID NO: 26245 - protein, 169 aa, Artificial Sequence
  derived and/or modified sequence
MCHRKPGTPGVGKTTLGKELASKSGLKYINVGDLAREEQLYDGYDEEYDCPILDEDRVVDELDNQMREGGVIVDYHGCDFFPERWFHIVFVLRTDTNVLYERLETRGYNEKKLTDNIQCEIFQVLYEEATASYKEEIVHQLPSNKPEELENNVDQILKWIEQWIKDHNS

SEQ ID NO: 26246 - DNA, 510 bp, Artificial Sequence
  derived and/or modified sequence
atgtgccacagaaagcccggcacccccggcgtgggcaagaccaccctgggcaaggagctggccagcaagagcggcctgaagtacatcaacgtgggcgacctggccagagaggagcagctgtacgacggctacgacgaggagtacgactgccccatcctggacgaggacagagtggtggacgagctggacaaccagatgagagagggcggcgtgatcgtggactaccacggctgcgacttcttccccgagagatggttccacatcgtgttcgtgctgagaaccgacaccaacgtgctgtacgagagactggagaccagaggctacaacgagaagaagctgaccgacaacatccagtgcgagatcttccaggtgctgtacgaggaggccaccgccagctacaaggaggagatcgtgcaccagctgcccagcaacaagcccgaggagctggagaacaacgtggaccagatcctgaagtggatcgagcagtggatcaaggaccacaacagctag

SEQ ID NO: 26247 - DNA, 510 bp, Artificial Sequence
  derived and/or modified sequence
atgtgccataggaagccaggcacccctggtgtggggaagaccactctgggtaaggagctcgcttccaagtctggcctcaagtatattaatgtcggcgatcttgctcgagaggagcagctgtatgacggttatgacgaggagtatgattgtccgatcctcgacgaggatcgggtcgtcgacgaactggacaaccagatgagagagggcggggtgattgtagattaccatggctgtgacttctttccagaaaggtggttccacatagtgtttgtgctgcgcaccgacactaatgtcctgtacgaacggttagaaacacgaggctacaatgagaaaaaactgactgacaacatccagtgcgagatcttccaggtcctgtacgaagaagcaactgcatcttataaggaagagatagtgcaccaactccccagcaacaagcctgaagagttggagaacaacgttgaccagatccttaaatggatcgaacaatggattaaggaccacaacagttag

SEQ ID NO: 26248 - DNA, 510 bp, Artificial Sequence
  derived and/or modified sequence
atgtgccacaggaagccaggcaccccaggagtgggcaagaccaccctgggcaaggagctggccagcaagagcggcctgaagtacatcaacgtgggggacctggcccgggaggagcagctgtatgatggctatgatgaggagtatgactgccccatcctggatgaagatagagtggtggatgagctggacaaccagatgagggagggcggcgtcatcgtggactaccacggctgtgacttcttccctgagcgctggttccacatcgtgtttgtgctgaggacagacaccaacgtgctgtatgaaaggctggagacccggggctacaatgagaagaagctgacagacaacatccagtgtgagatcttccaggtgctgtatgaggaggccacagccagctacaaggaggagatcgtgcaccagctgcccagcaacaagccagaggagctggagaacaacgtggaccagatcctgaagtggattgagcagtggatcaaggaccacaacagctag

SEQ ID NO: 26249 - DNA, 510 bp, Artificial Sequence
  derived and/or modified sequence
atgtgccaccggaagcccggcacccccggcgtgggcaagaccacccttgggaaggaactggctagcaaatctggcctaaaatatattaacgtcggggacttggctcgggaagagcaactgtatgacggttatgacgaagagtatgattgtcccatattggacgaggatagagttgtcgatgagctcgacaaccaaatgagagaaggaggcgtgatcgttgactatcacggttgcgacttcttccccgagcggtggttccacattgtgtttgtgctcaggaccgatacaaatgtgttgtacgagcgcttagagaccaggggatataacgagaagaagttaacagacaatattcagtgcgagatctttcaagtgctctatgaagaggctacagcaagctacaaagaggagatagtgcaccagctgccctctaataaaccagaggaattggagaataatgttgaccagattcttaaatggatagagcagtggataaaagaccataactcgtag

SEQ ID NO: 26250 - DNA, 510 bp, Artificial Sequence
  derived and/or modified sequence
atgtgccacagaaagcctgggacacctggtgtgggtaagaccacactcggcaaagaactggcctctaaatctgggttgaagtacatcaacgtgggtgacctcgcacgggaagagcaactgtacgacggctacgatgaggagtacgactgtcctatcctagacgaggatagagtagtggacgagctggacaaccagatgagagagggaggcgtgatcgtggactatcacggctgtgatttctttcctgaacgatggtttcacattgtctttgtcctgcgaaccgacacgaacgtactttacgaacgcttggagactcggggttacaatgaaaagaaactgaccgataatatccagtgtgagatattccaggtgctttatgaagaggctactgcaagttacaaagaggagatagtgcaccagctgccttccaacaagccagaagaactggagaataacgtggatcagatactgaagtggattgagcagtggataaaggaccacaattcctag

SEQ ID NO: 26251 - DNA, 1183 bp, Artificial Sequence
  derived and/or modified sequence
cccaggaaagcttgaaggcagagatagactcacgtctctaagacatatacataatatagccgcaaccgcggcggccttactttcccggagctgcatccccttttaggcgaagagcggaggcgaccagggactaccctaggtgaaagggcagccacctggccctacccgggctcaacgccgagcctctcggaggtacggcctcccggggaccttccagactggtcggcgcaagcgaagggcggggaccaccgaaggagtgtgtgacttaggcatccagcgcactgcctgacccgaagtaccgacccgagttatgcccaccctccaactttgcgacggaaatgtgtcatcgaaagccaggtacaccaggggttggaaaaaccacactaggcaaagaacttgcgtcaaaatcaggactgaaatacattaatgtgggtgatttagctcgagaagagcaattgtatgatggctatgatgaagagtatgactgtcccattttagatgaagacagagtagttgatgagttagataaccaaatgagagaaggtggagttattgttgattaccatggttgtgatttcttccctgaacgctggtttcatatagtttttgtgctgagaacagataccaatgtattgtacgaaagacttgaaacaaggggttataatgagaagaaactaacagacaatattcagtgtgagatttttcaagttctttatgaagaagccacagcatcctacaaggaagaaatcgtgcatcagctgcccagtaataaaccagaagagctagaaaataatgtagatcagatcttgaaatggattgagcagtggatcaaagatcataactcttgacttataaggctagctacttaataatcactcttgttgatatctctgccgacatcatagaaattgttcaagtgtcagtaacactttattaaaatcatgttgcagaaccagcaggtggatagtatataggtttatgcctgtgtttctttttctccatgagaaagctaaacatgaaatataatgaatatagtattattaaggattgagacaaaaactgtgattttaatacttaaattgctaaagaataaataaatctgacaaaatgggtggatatcttttaagtttattacagaaaaaaatgcagatgatctcttaaaataaaactaaagataaagcaa

SEQ ID NO: 26252 - protein, 217 aa, Artificial Sequence
  derived and/or modified sequence
MDAPRRFPTLVQLMQPKAMPVEVLGHLPKRFSWFHSEFLKNPKVVRLEVWLVEKIFGRGGERIPHVQGMSQILIHVNRLDPNGEAEILVFGRPSYQEDTIKMIMNLADYHRQLQAKGSGKALAQDVATQKAETQRSSIEVREAGTQRSVEVREAGTQRSVEVQEVGTQGSPVEVQEAGTQQSLQAANKSGTQRSPEAASKAVTQRFREDARDPVTRL

SEQ ID NO: 26253 - DNA, 654 bp, Artificial Sequence
  derived and/or modified sequence
atggatgccccacgtcggttccctaccctggtgcagctgatgcagccaaaagccatgcctgtagaggtcctgggccacctgcccaagagattctcatggttccactccgagtttctgaagaaccctaaagtcgtcagattagaggtctggctagtggaaaagattttcggtagagggggcgaaagaatcccgcacgtccagggcatgtctcagatccttattcacgtcaaccgcctggatcctaacggcgaagcggaaattctagtatttggaagaccttcctaccaggaagacactataaagatgattatgaacttagcggactaccataggcagctgcaggccaagggaagcggtaaggcactcgcacaggacgtggcaacacagaaagctgaaacccagagaagtagtattgaagtgcgggaagccggcactcagcgaagcgttgaggtcagggaagctggcacgcagaggagtgttgaagttcaggaagtggggacacagggatcccccgtggaagtacaggaggctggaacacagcaaagtctacaggccgcaaataagtccgggacgcaaagatccccggaagccgccagcaaagctgtgactcagagatttcgcgaagacgcaagagatcctgtaactaggctctag

SEQ ID NO: 26254 - DNA, 654 bp, Artificial Sequence
  derived and/or modified sequence
atggatgccccccggcgcttccccaccctggtgcagctgatgcagcccaaggccatgcctgtggaggtgctgggccacctgcccaagcgcttctcctggttccacagcgagttcctgaagaaccccaaggtggtgcggctggaggtgtggctggtggagaagatcttcggccggggcggggagcgcatcccccacgtgcagggcatgagccagatcctgattcatgtgaaccggctggaccccaacggggaggccgagatcctggtgtttggccggcccagctaccaggaggacaccatcaagatgatcatgaacctggccgactaccaccggcagctgcaggccaagggcagcggcaaggccctggcccaggatgtggccacccagaaggccgagacccagaggagcagcattgaggtgcgggaggccggcacccagaggtctgtggaggtgcgggaggccggcacccagaggtctgtggaggtgcaggaggtgggcacccagggcagccctgtggaggtgcaggaggccggcacccagcagagcctgcaggccgccaacaagagcggcacccagaggagccctgaggccgccagcaaggctgtgacccagcgcttccgggaggatgcccgggaccctgtgacccggctgtag

SEQ ID NO: 26255 - DNA, 654 bp, Artificial Sequence
  derived and/or modified sequence
atggacgccccccggcggttccccaccctggtgcagctgatgcagccaaaagccatgccggtggaagtgctgggtcacctaccgaagcgcttctcgtggtttcactcagagttcctcaaaaaccctaaagttgtacgcctggaagtgtggctggtcgagaaaatatttggacgaggcggggagaggatcccccatgttcaaggcatgagccagatcctgatccacgtgaatcggctggaccctaatggagaagccgagatcctggttttcggtcgaccctcgtatcaggaggatacaatcaagatgatcatgaacctggcggattaccaccgccaactgcaggccaaaggtagcggtaaagcgctggcccaggatgtggcaacacagaaggcggagacacagcggagctctattgaggttcgtgaggctgggactcagagatctgtggaagtacgcgaagcaggcacacagaggagcgtggaagtgcaggaagtgggcacccaagggagcccggtggaggtccaggaagctggaacacagcagagtttacaagcagctaataaaagcggcacacaacgctcacctgaagcagcaagtaaagccgtcacgcagcgtttcagggaggatgcacgggaccctgttactcgtctttag

SEQ ID NO: 26256 - DNA, 654 bp, Artificial Sequence
  derived and/or modified sequence
atggatgctccgaggcgctttccaactctggtacaactaatgcagcccaaggctatgcctgtggaagtgctgggccacttacccaagcggttttcttggttccatagtgaattcctgaaaaatcccaaagtcgtgagattagaagtttggttggtagagaagatcttcggcagggggggagaaaggatccctcacgtccagggtatgtcccagattttgattcacgtaaacaggcttgatccaaatggggaggccgaaatactcgtgtttggaagacccagttatcaagaagacaccattaaaatgattatgaaccttgccgactatcaccgccagcttcaggctaaggggtccgggaaggccttggctcaggacgtcgctacccagaaggctgaaacacagcggtcctcaatcgaggtcagagaggcaggtacccagcgtagtgtcgaggtgagagaagccggaactcaacggtccgtggaggtccaggaggtcggtacacagggctcacctgttgaagttcaggaagccggaactcaacaaagcctgcaagcagctaataagagtggcacacagaggagtccagaagccgcatccaaagctgtgacccagaggtttagagaggacgcacgggatcccgtgacaagactatag

SEQ ID NO: 26257 - DNA, 1018 bp, Artificial Sequence
  derived and/or modified sequence
tcggcctttgggtttgctgtggtgtccttgtctcctgcaggaccggccgcagcatggacgctcccaggcggtttccgacgctcgtgcaactgatgcagccaaaagcaatgccagtggaggtgctcggtcacctccctaagcggttctcctggttccactctgagttcctgaagaatccgaaggtagttcgccttgaggtttggctggtggaaaagatcttcggccggggcggagaacgcatcccgcacgtccagggtatgtcccaaatcttgattcacgtgaatcgattggaccctaacggcgaggctgagatcttggtatttgggaggccttcttaccaggaggacacaatcaagatgatcatgaacctggctgactatcaccgccagctccaggcgaaaggctcaggaaaggccctcgcccaggatgtcgccactcagaaggccgagacccagcggtcttcaatagaagtccgggaggccgggacgcagcgttcggtggaggtccgggaggccgggacccagcgttcggtggaagtccaggaggtcgggacacagggttctccggtggaggtgcaggaggccgggacccagcagtctctccaggctgccaacaagtcggggacccagcgatcccccgaagctgccagcaaggcagtgacccagcggtttcgcgaggatgcccgggacccagttactagattatgaaggcatctcaggccctggagccagagccagtcaggggttaaagtgaaagcccgtatttccgcccagaagctggggttggggagaggatgtggattttttgttttaccctttctgttgcatggttgcaaacacaaacttgagttctaataaagaattgcaaagtggaagcccgccccccgcctcccccccgcctcacttaagtccaggaagctggggtggcgaggaaggatgatgtggattgtttttgttttacaccttctgttgaatggttgccaacacaaacttgagttctaataaataattgcatttcc

SEQ ID NO: 26258 - DNA, 654 bp, Artificial Sequence
  derived and/or modified sequence
atggacgcccccagaagattccccaccctggtgcagctgatgcagcccaaggccatgcccgtggaggtgctgggccacctgcccaagagattcagctggttccacagcgagttcctgaagaaccccaaggtggtgagactggaggtgtggctggtggagaagatcttcggcagaggcggcgagagaatcccccacgtgcagggcatgagccagatcctgatccacgtgaacagactggaccccaacggcgaggccgagatcctggtgttcggcagacccagctaccaggaggacaccatcaagatgatcatgaacctggccgactaccacagacagctgcaggccaagggcagcggcaaggccctggcccaggacgtggccacccagaaggccgagacccagagaagcagcatcgaggtgagagaggccggcacccagagaagcgtggaggtgagagaggccggcacccagagaagcgtggaggtgcaggaggtgggcacccagggcagccccgtggaggtgcaggaggccggcacccagcagagcctgcaggccgccaacaagagcggcacccagagaagccccgaggccgccagcaaggccgtgacccagagattcagagaggacgccagagaccccgtgaccagactgtag

SEQ ID NO: 26259 - protein, 252 aa, Artificial Sequence
  derived and/or modified sequence
MFFWCACCLMVAWRVSASDAEHCPELPPVDNSIFVAKEVEGQILGTYVCIKGYHLVGKKTLFCNASKEWDNTTTECRLGHCPDPVLVNGEFSSSGPVNVSDKITFMCNDHYILKGSNRSQCLEDHTWAPPFPICKSRDCDPPGNPVHGYFEGNNFTLGSTISYYCEDRYYLVGVQEQQCVDGEWSSALPVCKLIQEAPKPECEKALLAFQESKNLCEAMENFMQQLKESGMTMEELKYSLELKKAELKAKLL

SEQ ID NO: 26260 - protein, 181 aa, Artificial Sequence
  derived and/or modified sequence
MFFWCACCLMVAWRVSASDAEHCPELPPVDNSIFVAKEVEGQILGTYVCIKGYHLVGKKTLFCNASKEWDNTTTECRLGHCPDPVLVNGEFSSSGPVNVSDKITFMCNDHYILKGSNRSQCLEDHTWAPPFPICKSRDCDPPGNPVHGYFEGNNFTLGSTISYYCEDRYYLVGVQEQQCVD

SEQ ID NO: 26261 - DNA, 759 bp, Artificial Sequence
  derived and/or modified sequence
atgtttttttggtgtgcatgttgcttgatggtggcctggcgagtgagcgccagcgatgctgaacactgccccgagctccccccggtggacaattctattttcgtagccaaggaagtcgagggtcagattttggggacttacgtgtgtataaaagggtatcatctggtgggtaagaaaacattgttttgtaacgcgagcaaagaatgggacaacaccactaccgaatgtcgactggggcactgtccggacccagtgctcgtgaatggagagttttctagttcaggtcccgtgaatgtgtccgataaaatcacatttatgtgtaatgaccattacatactgaagggaagtaaccggtctcaatgccttgaagatcatacgtgggcccctccttttcctatttgtaaatctagggactgtgatccacctggaaacccagtgcacggctatttcgaaggaaacaactttacactaggaagtaccatctcttactattgtgaagaccggtactacctggtaggggtgcaggagcagcaatgtgtggacggggagtggtccagtgctttgccggtgtgcaaactgatccaggaagcaccgaagcctgagtgcgaaaaagccctgctagcttttcaggaaagtaagaatctgtgcgaggctatggaaaactttatgcagcagctcaaggagagcggcatgactatggaggagcttaaatattccctcgaacttaagaaggcagagctgaaagcaaagctgctgtag

SEQ ID NO: 26262 - DNA, 759 bp, Artificial Sequence
  derived and/or modified sequence
atgtttttctggtgcgcttgttgtctaatggtagcctggcgagtgagtgcgtcagacgctgaacattgtcccgaattgccccccgtcgacaatagcatctttgtggcaaaggaggtggaaggacagatcctcggaacttatgtctgtatcaaaggctaccacctggtgggaaaaaaaaccctcttctgtaatgcgagtaaggaatgggacaataccactactgagtgccgattgggacattgtccggaccccgtccttgtgaacggggagtttagctcgtccgggccggtaaacgtaagcgataaaatcacgttcatgtgcaacgatcactatattctgaaggggtcaaatagatctcagtgtctcgaggatcacacttgggcacctcccttccccatctgcaagtcgcgggactgtgatccgcctggaaaccctgtacacggctattttgagggcaataacttcactctgggctctacaatatcatattattgtgaagaccggtactacctcgttggagtgcaggagcagcagtgcgtggatggcgagtggtcctccgcattgcccgtgtgtaagctgatccaggaagcacccaaacctgagtgcgaaaaggcattgcttgcttttcaggagtctaaaaatttatgtgaggcaatggagaattttatgcagcagctgaaggagagcggcatgacgatggaggaattaaagtactctctcgagcttaagaaagcagagctgaaagccaaactgttatag

SEQ ID NO: 26263 - DNA, 759 bp, Artificial Sequence
  derived and/or modified sequence
atgtttttttggtgcgcctgttgtttgatggtggcctggcgcgttagcgcttcagacgccgaacactgtcctgagctcccaccagtggataatagtatcttcgtggctaaggaagtggagggccagattctgggaacgtacgtatgcatcaagggataccatttggttggtaaaaagacgctgttctgcaatgccagcaaggagtgggacaatacaacgactgagtgtagattgggacactgtccagaccctgttctcgtcaatggagagttctcctcttcgggacccgttaacgtgtctgataaaatcacatttatgtgcaatgaccactacatattgaagggctccaatcggagccagtgcctggaggaccacacatgggcccctcctttcccaatctgtaagagcagagattgtgatcctccaggaaatcccgttcacggatacttcgagggcaataactttactctggggagtactatttcttactactgcgaggatcgctactacctggttggagttcaggagcagcagtgcgttgatggagagtggagctccgccctgccagtatgcaagctaatccaggaggcacccaagcccgaatgtgaaaaagctcttctggcctttcaggagtctaagaacttatgtgaggccatggaaaactttatgcagcagctcaaagaaagcggaatgactatggaggagctgaagtactccctcgagctgaaaaaagcagagctgaaggccaaactcttatag

SEQ ID NO: 26264 - DNA, 546 bp, Artificial Sequence
  derived and/or modified sequence
atgttcttttggtgtgcttgctgtctcatggttgcgtggcgtgtgtccgcttctgatgccgaacactgcccagaactccctcccgttgataacagtattttcgtggctaaagaagttgaggggcagatactggggacatatgtatgtataaagggataccatttggtgggcaagaagacattgttttgtaatgccagtaaagagtgggacaacacaacaacagagtgcagactggggcactgcccggaccccgtattagtaaatggagagttcagctcatccgggcccgtgaacgtctcagataagatcacatttatgtgtaatgatcattacatcctaaaggggagcaacagatctcagtgtcttgaagatcacacatgggcaccgcccttcccaatctgcaaatccagggattgcgatcctccgggcaacccagtgcatggctatttcgagggcaacaattttacacttgggtcaacaatcagctactactgtgaggatcggtattatctggtgggcgtacaagagcagcagtgcgtcgattag

SEQ ID NO: 26265 - DNA, 759 bp, Artificial Sequence
  derived and/or modified sequence
atgttcttctggtgtgcctgctgcctgatggtggcctggagggtgtctgccagtgatgctgagcactgcccagagctgccccctgtggacaacagcatctttgtggccaaggaggtggagggccagatcctgggcacctacgtgtgcatcaagggctaccacctggtgggcaagaagaccctcttctgcaatgccagcaaggagtgggacaacaccaccacagaatgtcggctgggccactgcccagaccctgtgctggtgaatggagagttcagcagcagcggccctgtgaatgtgtctgacaagatcaccttcatgtgcaatgaccactacatcctgaagggcagcaacagaagccagtgcctggaggaccacacctgggccccacccttccccatctgcaagagccgggactgtgaccccccaggcaaccctgtgcacggctactttgagggcaacaacttcaccctgggcagcaccatctcctactactgtgaggaccgctactacctggtgggcgtgcaggagcagcagtgtgtggatggagagtggagcagcgccctgcctgtgtgcaagctgatccaggaggcccccaagccagaatgtgagaaggccctgctggccttccaggagagcaagaacctgtgtgaggccatggagaacttcatgcagcagctgaaggagagcggcatgaccatggaggagctgaagtacagcctggagctgaagaaggccgagctgaaggccaagctgctgtag

SEQ ID NO: 26266 - DNA, 546 bp, Artificial Sequence
  derived and/or modified sequence
atgttcttctggtgtgcctgctgcctgatggtggcctggagggtgtctgccagtgatgctgagcactgcccagagctgccccctgtggacaacagcatctttgtggccaaggaggtggagggccagatcctgggcacctacgtgtgcatcaagggctaccacctggtgggcaagaagaccctcttctgcaatgccagcaaggagtgggacaacaccaccacagaatgtcggctgggccactgcccagaccctgtgctggtgaatggagagttcagcagcagcggccctgtgaatgtgtctgacaagatcaccttcatgtgcaatgaccactacatcctgaagggcagcaacagaagccagtgcctggaggaccacacctgggccccacccttccccatctgcaagagccgggactgtgaccccccaggcaaccctgtgcacggctactttgagggcaacaacttcaccctgggcagcaccatctcctactactgtgaggaccgctactacctggtgggcgtgcaggagcagcagtgtgtggactag

SEQ ID NO: 26267 - DNA, 759 bp, Artificial Sequence
  derived and/or modified sequence
atgttcttctggtgcgcctgctgcctgatggtggcctggcgggtgagcgcctcagacgctgaacactgtcctgagttgcctcccgtagacaattcgatcttcgtggccaaggaagtggaaggtcaaatcttgggcacatatgtgtgtatcaaaggataccacctagtcgggaagaagacactgttttgtaacgcctccaaggagtgggacaacaccacaaccgaatgcagattgggccactgtccagatcctgtcctcgtgaatggtgagttctcgtctagtggacccgtgaatgtctcggataagatcacattcatgtgcaacgatcattacatcctgaagggctcaaaccgtagccagtgcctggaggaccacacgtgggctcctccattcccgatctgcaaatcccgagattgtgatccgcctggaaatccagtgcatggctattttgagggaaacaatttcactctgggctccaccatctcctattattgcgaagatagatactatctggttggtgtgcaggagcaacagtgtgtggatggcgaatggagcagtgcactgcccgtctgtaaactgatccaggaggcgcctaaacctgaatgcgaaaaggcactcctggcattccaggaaagcaaaaacctgtgcgaggcaatggaaaattttatgcagcaactaaaggagagtggaatgactatggaggagctcaaatacagcttggaactgaaaaaagctgaactgaaagcgaagctgctctag

SEQ ID NO: 26268 - DNA, 759 bp, Artificial Sequence
  derived and/or modified sequence
atgttcttctggtgcgcctgctgcctgatggtggcctggcgggtgtcagcctcagacgcggagcactgccctgaactcccccctgttgataatagcatcttcgtggctaaggaggtcgagggccagattctgggtacatacgtctgcatcaaggggtatcacctcgtgggcaagaagacattgttttgcaatgcaagtaaggaatgggataatacaacaacggaatgccgactgggccactgtcctgatccagttctggttaacggtgaattttcgtcaagcgggcctgttaacgtctctgataaaataacatttatgtgtaatgaccactacattctcaagggttccaatcggagccaatgcttagaggaccatacatgggctccaccattccctatctgcaagtctcgtgattgcgatccccctggaaatcccgtgcacggctatttcgaagggaacaactttactctggggtctaccattagctactactgtgaagataggtactatctcgtcggggtgcaggaacagcagtgtgtggatggagaatggtctagcgcgctgcctgtgtgtaagcttattcaggaagctccaaagcctgaatgtgaaaaggcacttctggcatttcaggagagcaagaatctatgcgaggccatggaaaacttcatgcagcaattgaaggaatctggaatgacaatggaggagcttaaatactcactcgaactgaagaaggccgagctgaaagccaagctcctctag

SEQ ID NO: 26269 - DNA, 759 bp, Artificial Sequence
  derived and/or modified sequence
atgttcttctggtgcgcctgctgcctgatggtggcctggcgggtgagcgcttctgatgctgagcactgccccgaactcccacctgtcgacaatagtattttcgtggcaaaggaagtggaaggacagatcctcgggacctacgtgtgtatcaaaggctaccatctcgtgggcaagaagactctgttctgtaatgcatccaaagagtgggataataccaccacagaatgccgtctggggcactgtcctgaccccgtgctagtcaacggtgagttctccagttctggccccgttaacgtatctgacaagatcacgttcatgtgcaacgaccactacatcttgaaaggctcgaataggtcccagtgtttggaagaccatacctgggccccaccattcccaatatgtaagtccagagattgtgacccccccggcaatccagtgcacggatactttgagggtaacaatttcacgcttggctcaaccatatcttattattgcgaagatagatattatcttgtaggggtccaagaacaacaatgtgtcgatggggaatggagctcagccctgcctgtgtgcaaacttatccaggaagcaccaaaacccgagtgcgaaaaggctctgctcgccttccaggaatctaagaatctttgtgaggccatggagaacttcatgcagcaactcaaggaaagcggcatgactatggaggaattaaaatatagtcttgaactgaaaaaggccgaactgaaggcaaagctgctctag

SEQ ID NO: 26270 - DNA, 546 bp, Artificial Sequence
  derived and/or modified sequence
atgttcttctggtgcgcctgctgcctgatggtggcctggcgggtgtctgccagtgatgccgagcattgtcccgaactcccacctgttgataattccatcttcgtggcaaaggaggtggaaggacaaattcttggaacttatgtgtgcataaagggctaccacctagtgggcaagaagactctgttctgcaacgccagtaaggaatgggacaacacaacaactgagtgtaggctgggacactgcccggatcctgtactggttaatggagagtttagctcctctggccccgtcaatgtgtcggacaaaattacgttcatgtgtaatgaccactatattctgaaggggtctaaccgaagccagtgcctcgaagaccatacttgggcacccccgttcccaatttgcaaatcccgcgactgtgaccctccaggcaatcctgtccacggctatttcgaggggaataacttcaccctcggcagcaccatctcttattactgtgaggatcgctattacttagtgggagtgcaggagcagcagtgtgtggactag

SEQ ID NO: 26271 - DNA, 759 bp, Artificial Sequence
  derived and/or modified sequence
atgtttttctggtgcgcatgctgcttgatggtggcatggagagtcagtgcctctgatgccgagcattgccccgaacttccgccagtggacaattcaatttttgtggctaaggaggtggaagggcagattttgggaacatatgtatgcataaagggataccatctggtagggaaaaaaaccctgttttgcaatgcgagcaaagagtgggataataccacaactgaatgccggctgggccactgtcccgatccagttcttgtcaacggcgaattctccagttccggacctgtgaatgtgagtgacaagatcaccttcatgtgcaatgatcattatatccttaaaggcagcaaccgctcacaatgtctggaggaccacacttgggcccctccatttccaatctgtaagtctcgggactgtgacccacccggtaatcctgtgcacggatattttgaaggcaataattttactctagggtctacgatctcctattactgcgaggaccggtactacctagtgggcgtacaggagcaacagtgcgtggacggcgaatggtccagcgctttacccgtctgcaagctcatccaagaggcgccaaagcctgaatgtgagaaggcccttctcgcgtttcaggagtccaagaacctgtgcgaggccatggaaaatttcatgcaacaattaaaagaatccggcatgaccatggaggaactgaaatacagcctggagttaaagaaggcagagttaaaagctaagcttctctag

SEQ ID NO: 26272 - DNA, 759 bp, Artificial Sequence
  derived and/or modified sequence
atgtttttctggtgcgcctgctgtctgatggtagcgtggcgtgtctcagcttccgacgcagagcattgccctgaactgccacccgtggacaacagtatttttgtagcgaaagaagtggagggtcagattctgggcacttacgtttgtataaagggctaccacctggtgggaaagaagactctgttttgtaacgcgtctaaagagtgggacaacaccacgactgagtgtcggctgggccactgtcccgatccggtgctcgttaatggggagtttagcagtagcgggcctgtcaacgtcagtgataagataacctttatgtgcaacgaccactatattttaaagggctccaatagaagccaatgcctcgaagatcatacctgggcgccacctttccccatttgcaaatcgcgagattgcgacccccctggcaatcccgtgcacggatattttgaaggcaataatttcactctgggcagcacgatttcatattattgtgaggaccgttattacctggtgggcgtgcaagaacaacagtgcgtggacggcgaatggagctcagccctgccagtatgtaagctcattcaggaagctcccaagccagaatgtgaaaaggctctactggccttccaggaatcaaagaacctctgtgaagcaatggagaatttcatgcagcaattaaaggagtcagggatgaccatggaagaactgaagtattcattagaactgaagaaagccgagttgaaggctaaactgctgtag

SEQ ID NO: 26273 - DNA, 759 bp, Artificial Sequence
  derived and/or modified sequence
atgttcttttggtgtgcttgttgtctgatggtggcgtggcgggtgtccgcaagcgatgccgagcactgccctgagttgccccctgtcgacaactcaattttcgttgctaaggaggtggagggtcaaatccttgggacatacgtgtgtataaaaggctatcatctcgttggcaagaagacattattttgcaacgcgtctaaggagtgggacaacactaccactgaatgtcgtctcgggcactgccccgaccccgtgttagtgaacggagaattcagcagctcgggcccagtgaacgtttctgataagatcacctttatgtgtaacgaccattacatactgaagggatcaaataggtcccagtgcctagaagatcatacgtgggcccctccctttcctatctgtaagagccgggattgcgatccccctggtaaccctgtgcatggctatttcgaagggaacaacttcaccctgggcagtactatcagttactactgtgaggaccgctactatttggtgggtgtccaagagcagcagtgtgtcgacggagaatggtcttccgctctgccggtctgtaagctgatccaagaagcaccgaagcccgagtgcgaaaaggccctgctggcattccaggagtccaagaacctgtgcgaagctatggaaaacttcatgcagcagctgaaggaaagtggtatgacaatggaggagctcaagtattctctggagctgaagaaagccgaactaaaggccaagcttctgtag

SEQ ID NO: 26274 - DNA, 546 bp, Artificial Sequence
  derived and/or modified sequence
atgtttttctggtgcgcctgctgcctaatggtggcttggagggtctctgcatccgacgctgaacactgtcccgagctgcccccagtggacaacagtatatttgtcgctaaggaggttgagggtcaaatactggggacctacgtatgtattaagggctaccatcttgttggtaaaaagactcttttttgtaatgcatccaaggaatgggacaacaccacgacagaatgtagactcggccattgcccagatccggtgctggtaaatggagagttttcatctagcggcccagttaacgtcagcgacaaaatcaccttcatgtgcaacgaccactacattttgaaaggctctaacaggagccaatgtttggaggaccacacctgggcaccaccctttcctatttgtaaatcaagagattgtgaccccccaggaaatccagtgcatggttacttcgagggaaataactttacgttgggtagtacaatttcttattattgcgaggacaggtattatctcgtgggcgtccaggaacagcaatgtgtggattag

SEQ ID NO: 26275 - DNA, 1117 bp, Artificial Sequence
  derived and/or modified sequence
cattcccagaaaccaggaaatttctgaaactgagttttaaacctggcaactcttttaccatccctttgtatttttgcagttcctccctataccagcttccttacagctgttctgatttcctgtcgtaagattttttcttttcattttctccagggagggtaaatcaatataacctcttctctagagaggaggtggttaggttggtcttaagcagtgttagaagatctattttttttcaaaccaggtgtctgagctgggtgaattccagcctggggagaggactttgatcaccagatgtttttttggtgtgcgtgctgtcttatggttgcgtggcgagtttctgcttcagatgcagagcactgtccagagcttcctccagtggacaatagcatatttgtcgcaaaggaggtggaaggacagattctggggacttacgtttgtatcaagggctaccacctggtaggaaagaagacccttttttgcaatgcctctaaggagtgggataacaccactactgagtgccgcttgggccactgtcctgatcctgtgctggtgaatggagagttcagttcttcagggcctgtgaatgtaagtgacaaaatcacgtttatgtgcaatgaccactacatcctcaagggcagcaatcggagccagtgtctagaggaccacacctgggcacctccctttcccatctgcaaaagtagggactgtgaccctcctgggaatccagttcatggctattttgaaggaaataacttcaccttaggatccaccattagttattactgtgaagacaggtactacttagtgggcgtgcaggagcagcaatgcgttgatggggagtggagcagtgcacttccagtctgcaagttgatccaggaagctcccaaaccagagtgtgagaaggcacttcttgcctttcaggagagtaagaacctctgcgaagccatggagaactttatgcaacaattaaaggaaagtggcatgacaatggaggagctaaaatattctctggagctgaagaaagctgagttgaaggcaaaattgttgtaacactacagctgagcagatgtaatagaaataaacctatgaataaattttcttcttggttctgaaa

SEQ ID NO: 26276 - DNA, 978 bp, Artificial Sequence
  derived and/or modified sequence
aagcgagaacaatgtgtcactgcaggactttggagctctcagctttggagtcagttaagaccagttccttgctgggaagccctaactctggagggacagagacaggtgtctgagctgggtgaattccagcctggggagaggactttgatcaccagatgtttttttggtgtgcgtgctgtcttatggttgcgtggcgagtttctgcttcagatgcagagcactgtccagagcttcctccagtggacaatagcatatttgtcgcaaaggaggtggaaggacagattctggggacttacgtttgtatcaagggctaccacctggtaggaaagaagacccttttttgcaatgcctctaaggagtgggataacaccactactgagtgccgcttgggccactgtcctgatcctgtgctggtgaatggagagttcagttcttcagggcctgtgaatgtaagtgacaaaatcacgtttatgtgcaatgaccactacatcctcaagggcagcaatcggagccagtgtctagaggaccacacctgggcacctccctttcccatctgcaaaagtagggactgtgaccctcctgggaatccagttcatggctattttgaaggaaataacttcaccttaggatccaccattagttattactgtgaagacaggtactacttagtgggcgtgcaggagcagcaatgcgttgatggggagtggagcagtgcacttccagtctgcaagttgatccaggaagctcccaaaccagagtgtgagaaggcacttcttgcctttcaggagagtaagaacctctgcgaagccatggagaactttatgcaacaattaaaggaaagtggcatgacaatggaggagctaaaatattctctggagctgaagaaagctgagttgaaggcaaaattgttgtaacactacagctgagcagatgtaatagaaataaacctatgaataaattttcttcttggttctgaaa

SEQ ID NO: 26277 - DNA, 949 bp, Artificial Sequence
  derived and/or modified sequence
gcaactcttttaccatccctttgtatttttgcagttcctccctataccagcttccttacagctgttctgatttcctgtcgtgtctgagctgggtgaattccagcctggggagaggactttgatcaccagatgtttttttggtgtgcgtgctgtcttatggttgcgtggcgagtttctgcttcagatgcagagcactgtccagagcttcctccagtggacaatagcatatttgtcgcaaaggaggtggaaggacagattctggggacttacgtttgtatcaagggctaccacctggtaggaaagaagacccttttttgcaatgcctctaaggagtgggataacaccactactgagtgccgcttgggccactgtcctgatcctgtgctggtgaatggagagttcagttcttcagggcctgtgaatgtaagtgacaaaatcacgtttatgtgcaatgaccactacatcctcaagggcagcaatcggagccagtgtctagaggaccacacctgggcacctccctttcccatctgcaaaagtagggactgtgaccctcctgggaatccagttcatggctattttgaaggaaataacttcaccttaggatccaccattagttattactgtgaagacaggtactacttagtgggcgtgcaggagcagcaatgcgttgatggggagtggagcagtgcacttccagtctgcaagttgatccaggaagctcccaaaccagagtgtgagaaggcacttcttgcctttcaggagagtaagaacctctgcgaagccatggagaactttatgcaacaattaaaggaaagtggcatgacaatggaggagctaaaatattctctggagctgaagaaagctgagttgaaggcaaaattgttgtaacactacagctgagcagatgtaatagaaataaacctatgaataaattttcttcttggttctg

SEQ ID NO: 26278 - DNA, 743 bp, Artificial Sequence
  derived and/or modified sequence
caaaaagactggtcaactggatttgcattcccagaaaccaggaaatttctgaaactgagttttaaacctggcaactcttttaccatccctttgtatttttgcagttcctccctataccagcttccttacagctgttctgatttcctgtcggtgtctgagctgggtgaattccagcctggggagaggactttgatcaccagatgtttttttggtgtgcgtgctgtcttatggttgcgtggcgagtttctgcttcagatgcagagcactgtccagagcttcctccagtggacaatagcatatttgtcgcaaaggaggtggaaggacagattctggggacttacgtttgtatcaagggctaccacctggtaggaaagaagacccttttttgcaatgcctctaaggagtgggataacaccactactgagtgccgcttgggccactgtcctgatcctgtgctggtgaatggagagttcagttcttcagggcctgtgaatgtaagtgacaaaatcacgtttatgtgcaatgaccactacatcctcaagggcagcaatcggagccagtgtctagaggaccacacctgggcacctccctttcccatctgcaaaagtagggactgtgaccctcctgggaatccagttcatggctattttgaaggaaataacttcaccttaggatccaccattagttattactgtgaagacaggtactacttagtgggcgtgcaggagcagcaatgcgttgat

SEQ ID NO: 26279 - DNA, 759 bp, Artificial Sequence
  derived and/or modified sequence
atgttcttctggtgcgcctgctgcctgatggtggcctggagagtgagcgccagcgacgccgagcactgccccgagctgccccccgtggacaacagcatcttcgtggccaaggaggtggagggccagatcctgggcacctacgtgtgcatcaagggctaccacctggtgggcaagaagaccctgttctgcaacgccagcaaggagtgggacaacaccaccaccgagtgcagactgggccactgccccgaccccgtgctggtgaacggcgagttcagcagcagcggccccgtgaacgtgagcgacaagatcaccttcatgtgcaacgaccactacatcctgaagggcagcaacagaagccagtgcctggaggaccacacctgggccccccccttccccatctgcaagagcagagactgcgacccccccggcaaccccgtgcacggctacttcgagggcaacaacttcaccctgggcagcaccatcagctactactgcgaggacagatactacctggtgggcgtgcaggagcagcagtgcgtggacggcgagtggagcagcgccctgcccgtgtgcaagctgatccaggaggcccccaagcccgagtgcgagaaggccctgctggccttccaggagagcaagaacctgtgcgaggccatggagaacttcatgcagcagctgaaggagagcggcatgaccatggaggagctgaagtacagcctggagctgaagaaggccgagctgaaggccaagctgctgtag

SEQ ID NO: 26280 - DNA, 546 bp, Artificial Sequence
  derived and/or modified sequence
atgttcttctggtgcgcctgctgcctgatggtggcctggagagtgagcgccagcgacgccgagcactgccccgagctgccccccgtggacaacagcatcttcgtggccaaggaggtggagggccagatcctgggcacctacgtgtgcatcaagggctaccacctggtgggcaagaagaccctgttctgcaacgccagcaaggagtgggacaacaccaccaccgagtgcagactgggccactgccccgaccccgtgctggtgaacggcgagttcagcagcagcggccccgtgaacgtgagcgacaagatcaccttcatgtgcaacgaccactacatcctgaagggcagcaacagaagccagtgcctggaggaccacacctgggccccccccttccccatctgcaagagcagagactgcgacccccccggcaaccccgtgcacggctacttcgagggcaacaacttcaccctgggcagcaccatcagctactactgcgaggacagatactacctggtgggcgtgcaggagcagcagtgcgtggactag

SEQ ID NO: 26281 - protein, 251 aa, Artificial Sequence
  derived and/or modified sequence
MFFWCACCLMVAWRVSASDEHCPELPPVDNSIFVAKEVEGQILGTYVCIKGYHLVGKKTLFCNASKEWDNTTTECRLGHCPDPVLVNGEFSSSGPVNVSDKITFMCNDHYILKGSNRSQCLEDHTWAPPFPICKSRDCDPPGNPVHGYFEGNNFTLGSTISYYCEDRYYLVGVQEQQCVDGEWSSALPVCKLIQEAPKPECEKALLAFQESKNLCEAMENFMQQLKESGMTMEELKYSLELKKAELKAKLL

SEQ ID NO: 26282 - DNA, 756 bp, Artificial Sequence
  derived and/or modified sequence
atgttcttctggtgcgcgtgctgcctgatggtagcgtggagagtgtcagcatcagacgagcactgcccagaattgcctcctgttgacaactctattttcgttgcgaaggaggttgagggccagattctgggcacatacgtctgtataaagggctatcatctggtgggcaagaaaacactgttttgcaatgctagcaaagaatgggataacacgactacagagtgcagactgggccactgtccagatcccgttctcgtgaatggcgagttttcatcgagcggacccgtcaatgtgtcagacaaaattacattcatgtgtaatgatcactacatactgaaaggttcaaatcgcagtcaatgccttgaggatcatacatgggcacctccgtttcccatctgtaagagccgggattgcgacccccccggtaaccctgttcacggttacttcgagggcaataattttactctggggtctacgatctcatactactgcgaggatagatactacctggtgggcgtccaagagcagcagtgcgtggacggggaatggagctcagcacttccagtgtgcaagcttatacaggaggctcccaaacctgaatgcgagaaagcgcttcttgctttccaggagagcaaaaacctttgtgaagcgatggagaactttatgcaacagctgaaggaaagcggcatgacaatggaggagctgaagtacagcctggagcttaaaaaggccgagctgaaagctaaacttctctag

SEQ ID NO: 26283 - DNA, 756 bp, Artificial Sequence
  derived and/or modified sequence
atgttcttctggtgtgcctgctgcctgatggtggcctggagggtgtctgccagtgatgagcactgcccagagctgccccctgtggacaacagcatctttgtggccaaggaggtggagggccagatcctgggcacctacgtgtgcatcaagggctaccacctggtgggcaagaagaccctcttctgcaatgccagcaaggagtgggacaacaccaccacagagtgccgcctgggccactgcccagaccctgtgctggtgaatggagagttcagcagcagcggccctgtgaatgtgtctgacaagatcaccttcatgtgcaatgaccactacatcctgaagggcagcaacagaagccagtgcctggaggaccacacctgggccccacccttccccatctgcaagagccgggactgtgaccccccaggcaaccctgtgcacggctactttgagggcaacaacttcaccctgggcagcaccatctcctactactgtgaagatcgctactacctggtgggcgtgcaggagcagcagtgtgtggatggagagtggagcagcgccctgcctgtgtgcaagctgatccaggaggcccccaagccagaatgtgagaaggccctgctggccttccaggagagcaagaacctgtgtgaggccatggagaacttcatgcagcagctgaaggagagcggcatgaccatggaggagctgaagtacagcctggagctgaagaaggccgagctgaaggccaagctgctgtag

SEQ ID NO: 26284 - DNA, 756 bp, Artificial Sequence
  derived and/or modified sequence
atgttcttctggtgcgcctgctgcctgatggtggcctggcgggtgtccgccagtgacgagcactgccctgagcttcctcctgtggataatagtatcttcgtagctaaggaagtcgagggacagatccttggaacctacgtttgcattaagggctatcatctggtcggtaagaaaacccttttttgtaatgccagcaaggaatgggataacacaaccactgagtgtcgactggggcattgccctgatcccgtcctcgtgaatggcgaattttcaagcagcggccctgtgaacgtgagcgataaaattacgttcatgtgcaacgaccactatatcttgaaaggttcgaacaggtctcagtgtttggaagatcacacgtgggcgcctcctttccctatttgcaaaagccgggactgtgatccccccggaaacccagtgcacggctacttcgaaggaaacaacttcacgcttgggagcacaatcagttattattgtgaagatagatactacttagtcggtgtgcaggagcaacagtgtgtggatggggaatggtcttcagcccttcccgtgtgcaagctgattcaagaagcaccaaagccggagtgtgaaaaagccctactggccttccaggagtcaaagaatctgtgcgaggcgatggaaaactttatgcagcagctgaaagagtctgggatgaccatggaggaactgaaatactccctggaactgaagaaggcagagctgaaagccaaactgctgtag

SEQ ID NO: 26285 - DNA, 756 bp, Artificial Sequence
  derived and/or modified sequence
atgtttttctggtgcgcgtgctgtctcatggtcgcctggagagtgtctgcaagcgacgaacactgtcccgagctcccccctgtggacaatagcatcttcgtagctaaagaggtggagggacagattctgggcacctacgtatgtataaaggggtaccaccttgtagggaaaaagaccctattttgcaacgcttctaaggaatgggacaacacaacaactgaatgccgactgggccattgtcctgatcccgtactggtgaatggggagttctcttcatcaggccctgtaaacgtttctgacaaaatcacatttatgtgcaatgaccactatatcttaaagggttccaataggagccagtgtctcgaagaccatacttgggcaccaccttttccgatctgtaaaagcagggattgcgatccacctgggaatccagttcacggttactttgaaggtaataatttcactctgggatcaaccatctcctattactgcgaagatcggtattatctcgtcggagtgcaagaacagcagtgcgtggatggggagtggtctagcgcactcccagtctgcaaactgatccaagaggctccaaaacctgaatgtgagaaggccctgctcgcgttccaggagagtaaaaatctgtgcgaagcgatggaaaactttatgcagcagctaaaggaatcaggaatgacaatggaagaactgaagtactccctggaactgaagaaagcggagctcaaagctaaactgctatag

SEQ ID NO: 26286 - DNA, 1113 bp, Artificial Sequence
  derived and/or modified sequence
attcccagaaaccaggaaatttctgaaactgagttttaaacctggcaactcttttaccatccctttgtatttttgcagttcctccctataccagcttccttacagctgttctgatttcctgtcgtaagattttttcttttcattttctccagggagggtaaatcaatataacctcttctctagagaggaggtggttaggttggtcttaagcagtgttagaagatctattttttttcaaaccaggtgtctgagctgggtgaattccagcctggggagaggactttgatcaccagatgtttttttggtgtgcgtgctgtcttatggttgcgtggcgagtttctgcttcagatgagcactgtccagagcttcctccagtggacaatagcatatttgtcgcaaaggaggtggaaggacagattctggggacttacgtttgtatcaagggctaccacctggtaggaaagaagacccttttttgcaatgcctctaaggagtgggataacaccactactgagtgccgcttgggccactgtcctgatcctgtgctggtgaatggagagttcagttcttcagggcctgtgaatgtaagtgacaaaatcacgtttatgtgcaatgaccactacatcctcaagggcagcaatcggagccagtgtctagaggaccacacctgggcacctccctttcccatctgcaaaagtagggactgtgaccctcctgggaatccagttcatggctattttgaaggaaataacttcaccttaggatccaccattagttattactgtgaagacaggtactacttagtgggcgtgcaggagcagcaatgcgttgatggggagtggagcagtgcacttccagtctgcaagttgatccaggaagctcccaaaccagagtgtgagaaggcacttcttgcctttcaggagagtaagaacctctgcgaagccatggagaactttatgcaacaattaaaggaaagtggcatgacaatggaggagctaaaatattctctggagctgaagaaagctgagttgaaggcaaaattgttgtaacactacagctgagcagatgtaatagaaataaacctatgaataaattttcttcttggttctgaaa

SEQ ID NO: 26287 - DNA, 756 bp, Artificial Sequence
  derived and/or modified sequence
atgttcttctggtgcgcctgctgcctgatggtggcctggagagtgagcgccagcgacgagcactgccccgagctgccccccgtggacaacagcatcttcgtggccaaggaggtggagggccagatcctgggcacctacgtgtgcatcaagggctaccacctggtgggcaagaagaccctgttctgcaacgccagcaaggagtgggacaacaccaccaccgagtgcagactgggccactgccccgaccccgtgctggtgaacggcgagttcagcagcagcggccccgtgaacgtgagcgacaagatcaccttcatgtgcaacgaccactacatcctgaagggcagcaacagaagccagtgcctggaggaccacacctgggccccccccttccccatctgcaagagcagagactgcgacccccccggcaaccccgtgcacggctacttcgagggcaacaacttcaccctgggcagcaccatcagctactactgcgaggacagatactacctggtgggcgtgcaggagcagcagtgcgtggacggcgagtggagcagcgccctgcccgtgtgcaagctgatccaggaggcccccaagcccgagtgcgagaaggccctgctggccttccaggagagcaagaacctgtgcgaggccatggagaacttcatgcagcagctgaaggagagcggcatgaccatggaggagctgaagtacagcctggagctgaagaaggccgagctgaaggccaagctgctgtag

SEQ ID NO: 26288 - protein, 327 aa, Artificial Sequence
  derived and/or modified sequence
MWATCCNWFCLDGQPEEVPPPQGARMQAYSNPGYSSFPSPTGLEPSCKSCGAHFANTARKQTCLDCKKNFCMTCSSQVGNGPRLCLLCQRFRATAFQREELMKMKVKDLRDYLSLHDISTEMCREKEELVLLVLGQQPVISQEDRTRASTLSPDFPEQQAFLTQPHSSMVPPTSPNLPSSSAQATSVPPAQVQENQQSIDSEDSFVPGRRASLSDLTDLEDIEGLTVRQLKEILARNFVNYKGCCEKWELMERVTRLYKDQKGLQHLGGAVPSGLEENLCKICMDSPIDCVLLECGHMVTCTKCGKRMNECPICRQYVIRAVHVFRS

SEQ ID NO: 26289 - protein, 363 aa, Artificial Sequence
  derived and/or modified sequence
MWATCCNWFCLDGQPEEVPPPQGARMQAYSNPGYSSFPSPTGLEPSCKSCGAHFANTARKQTCLDCKKNFCMTCSSQVGNGPRLCLLCQRFRATAFQREELMKMKVKDLRDYLSLHDISTEMCREKEELVLLVLGQQPVISQEDRTRASTLSPDFPEQQAFLTQPHSSMVPPTSPNLPSSSAQATSVPPAQVQENQQANGHVSQDQEEPVYLESVARVPAEDETQSIDSEDSFVPGRRASLSDLTDLEDIEGLTVRQLKEILARNFVNYKGCCEKWELMERVTRLYKDQKGLQHLVSGAEDQNGGAVPSGLEENLCKICMDSPIDCVLLECGHMVTCTKCGKRMNECPICRQYVIRAVHVFRS

SEQ ID NO: 26290 - protein, 355 aa, Artificial Sequence
  derived and/or modified sequence
MWATCCNWFCLDGQPEEVPPPQGARMQAYSNPGYSSFPSPTGLEPSCKSCGAHFANTARKQTCLDCKKNFCMTCSSQVGNGPRLCLLCQRFRATAFQREELMKMKVKDLRDYLSLHDISTEMCREKEELVLLVLGQQPVISQEDRTRASTLSPDFPEQQAFLTQPHSSMVPPTSPNLPSSSAQATSVPPAQVQENQQANGHVSQDQEEPVYLESVARVPAEDETQSIDSEDSFVPGRRASLSDLTDLEDIEGLTVRQLKEILARNFVNYKGCCEKWELMERVTRLYKDQKGLQHLGGAVPSGLEENLCKICMDSPIDCVLLECGHMVTCTKCGKRMNECPICRQYVIRAVHVFRS

SEQ ID NO: 26291 - protein, 271 aa, Artificial Sequence
  derived and/or modified sequence
MWATCCNWFCLDGQPEEVPPPQGARMQAYSNPGYSSFPSPTGLEPSCKSCGAHFANTARKQTCLDCKKNFCMTCSSQVGNGPRLCLLCQRFRATAFQREELMKMKVKDLRDYLSLHDISTEMCREKEELVLLVLGQQPVISQEDRTRASTLSPDFPEQQAFLTQPHSSMVPPTSPNLPSSSAQATSVPPAQVQENQQANGHVSQDQEEPVYLESVARVPAEDETQSIDSEDSFVPGRRASLSDLTDLEDIEGLTVRQLKEILARNFVNYKG

SEQ ID NO: 26292 - protein, 133 aa, Artificial Sequence
  derived and/or modified sequence
MWATCCNWFCLDGQPEEVPPPQGARMQAYSNPGYSSFPSPTGLEPSCKSCGAHFANTARKQTCLDCKKNFCMTCSSQVGNGPRLCLLCQRFRATAFQREELMKMKVKDLRDYLSLHDISTEMCREKEELVLLV

SEQ ID NO: 26293 - protein, 189 aa, Artificial Sequence
  derived and/or modified sequence
MWATCCNWFCLDGQPEEVPPPQGARMQAYSNPGYSSFPSPTGLEPSCKSCGAHFANTARKQTCLDCKKNFCMTCSSQVGNGPRLCLLCQRFRATAFQREELMKMKVKDLRDYLSLHDISTEMCREKEELVLLVLGQQPVISQEDRTRASTLSPDFPEQQAFLTQPHSSMVPPTSPNLPSSSAQATSVPP

SEQ ID NO: 26294 - protein, 45 aa, Artificial Sequence
  derived and/or modified sequence
MWATCCNWFCLDGQPEEVPPPQGARMQAYSNPGYSSFPSPTGLEP

SEQ ID NO: 26295 - DNA, 984 bp, Artificial Sequence
  derived and/or modified sequence
atgtgggccacctgctgtaattggttctgccttgatgggcaaccggaggaagtcccccccccccagggcgccagaatgcaagcttattctaatcccggatattccagtttcccatcacccacggggctagagccaagctgcaaatcatgtggtgcccattttgcaaataccgcgcgtaagcaaacttgcctagactgcaaaaaaaacttctgtatgacgtgctcgtcccaagtggggaatggaccaaggctgtgcttactgtgccagcgctttcgagccaccgcatttcaaagagaggaattgatgaagatgaaggttaaggatcttagagactacctctctctacatgacattagcactgaaatgtgccgggagaaagaagagctggtgcttcttgtcctcgggcagcagcctgtgatctcacaagaagacagaacgcgcgcttcaaccctgtccccagactttcctgaacagcaggcctttctcacacaaccccactccagtatggtgccacccacatcacctaatctgccaagcagctctgcccaggcgacgtctgttccccctgctcaagtccaggaaaaccagcagtctattgattctgaggactcatttgtgcccggacgacgcgcctcactgagcgatctgaccgatcttgaggatatcgagggacttaccgtgcgtcagctcaaggagattctcgcgcggaacttcgttaattacaaaggatgctgcgaaaaatgggagctcatggagagggttacaaggctgtataaggatcaaaaaggcctgcaacatctgggaggtgctgtcccatcaggactagaggagaatctgtgcaagatttgcatggacagcccaattgactgcgtgttgctggaatgcggacacatggtaacttgcaccaaatgcggtaaacggatgaatgagtgtccaatttgtcgccagtatgtcattcgggccgtgcacgtctttcggtcctag

SEQ ID NO: 26296 - DNA, 1092 bp, Artificial Sequence
  derived and/or modified sequence
atgtgggcgacttgttgtaactggttttgtctcgacggccaaccagaagaggtgccgccgccccagggagctcgcatgcaagcctattctaacccaggctactcttcttttccgtcgcccacagggctcgaaccgtcctgtaagagctgcggagcgcattttgctaacaccgctaggaaacaaacatgtctggattgtaagaagaacttttgcatgacctgctcttcccaggtgggtaatggccctcgattgtgcctcctgtgtcagcggttcagggcaactgccttccagcgggaggagcttatgaaaatgaaagttaaggatcttcgggattacctctccttgcacgatatcagcaccgaaatgtgcagagagaaggaagagctggtgctgctagtcttgggccagcagcccgttatttcacaggaggatagaacgcgagccagtacactgtcgccggatttcccagaacagcaggcatttttaactcagccacacagctctatggtgccacctacatccccaaacttacctagctcctccgcacaggcaacctctgttccccccgctcaggtgcaggagaatcaacaggctaatggacacgtaagtcaggatcaggaggaaccagtttatttggagtccgttgcacgagtgccggccgaggacgagacccaaagtatcgattcagaggacagcttcgttcccggacgtcgggctagtcttagcgacctcaccgatctcgaagacatagaaggcctgaccgtcaggcagcttaaggagattctcgccaggaactttgtgaattacaagggctgttgcgagaagtgggagctgatggaaagggtcacaaggctgtataaggatcagaaaggtctgcagcatttggtgtcaggggcagaggaccagaatgggggggcagtaccttcaggcctcgaggagaatctgtgtaagatctgtatggatagccctattgattgcgtgctgctcgaatgcggccatatggtgacttgcacgaaatgcggtaaacgtatgaatgaatgcccaatatgtagacagtacgtaattcgggccgtccacgtgtttcgttcctag

SEQ ID NO: 26297 - DNA, 1068 bp, Artificial Sequence
  derived and/or modified sequence
atgtgggcaacgtgttgtaactggttctgtctcgacggccagcctgaggaagtgccgccaccacagggagcaagaatgcaggcctactcgaaccccggctacagtagcttcccttcccccacagggttagagccttcgtgtaagagctgtggcgctcacttcgccaacacagcaaggaaacagacctgcctagactgcaaaaagaacttttgcatgacatgtagcagtcaggtaggcaatgggccccggctctgcctgctttgccagaggttcagagcgacagcgttccagcgtgaggaactcatgaagatgaaagtgaaggatctgagggattacttatccctccacgatatctccacagagatgtgccgcgaaaaagaggaacttgtcttgcttgttttgggccaacagcccgttatctctcaggaagatcgcacccgagcatcaactctcagccccgattttccggaacaacaagcttttctgactcagccccatagtagcatggtgccccccactagcccaaacctcccttcctctagtgctcaggccacttccgtgccccctgctcaggtgcaagagaaccagcaggctaacggccatgtatcccaggatcaagaggaacctgtgtaccttgaatcggtcgctcgagtccctgctgaggatgaaactcagtccattgacagtgaagattctttcgtgccgggaaggcgcgcatccctgtcagacctcaccgatttggaggacatcgaaggacttactgttcggcagttgaaggaaattctggcgaggaatttcgtaaactacaaaggctgctgtgaaaagtgggagctgatggagagggttactagactgtacaaggaccagaagggcttgcagcatttagggggagctgtgcccagcggcctcgaggaaaatctctgtaaaatttgcatggacagtcctatagactgcgtccttctagaatgtggacacatggtcacctgtactaagtgcggtaagagaatgaacgagtgccccatttgccgccagtacgtgattcgagcagtccacgtgttccgctcttag

SEQ ID NO: 26298 - DNA, 1092 bp, Artificial Sequence
  derived and/or modified sequence
atgtgggctacgtgttgcaactggttctgcttggacggccagccagaggaagttcctccacctcagggggcgcggatgcaggcttactcgaaccccggatactcgtcgtttccatctcctactggcctggagccaagctgcaagtcgtgcggggcacattttgcaaataccgccagaaagcagacatgcctagattgcaaaaaaaacttctgcatgacatgtagcagtcaggttggaaatggcccccggctgtgcctactttgtcaaaggtttcgagccacagcttttcagagggaggagctgatgaagatgaaggtgaaggatttgagggactatctgagtctgcacgatatttcaacagagatgtgccgcgaaaaagaggaactagtcctgctggtgctcggtcagcagcccgtgatcagtcaggaggatcgtacgcgagcttctacactatcccctgatttcccagaacagcaggctttcctcacccagcctcatagtagtatggtcccaccgacatcccctaacctcccttcgtccagtgcccaggctacaagcgtgcctccagcccaggtgcaagaaaaccagcaggccaacggtcacgtgtcccaggatcaagaggaacctgtctacctcgaaagcgtggccagagtccccgcagaggatgagacacagtccattgacagtgaagattcattcgtgcctggcagaagagctagcctcagtgacctgactgatctagaagacatcgagggtttgactgtgcggcaactaaaggagatattagctcgtaactttgttaactataaaggctgttgtgagaagtgggaattaatggagagggtgacaaggctatacaaggatcagaaaggattgcagcacctggtgtccggcgccgaagaccagaacgggggtgctgttcctagcggactggaagaaaacctgtgcaagatatgtatggacagtcccatcgattgcgtcctacttgaatgcggccatatggttacttgtactaagtgtggaaagcgtatgaatgaatgtcctatctgtcgacagtacgtgatcagggctgtacatgttttccgttcttag

SEQ ID NO: 26299 - DNA, 816 bp, Artificial Sequence
  derived and/or modified sequence
atgtgggcgacatgttgcaattggttttgcctggacggccagcctgaggaagtccccccaccacagggggccaggatgcaggcctattcaaaccccggttattcctcattccctagccctaccggcttagagccctcttgtaagtcatgcggcgctcacttcgccaacacggctcggaaacagacctgtctggactgtaagaagaacttttgtatgacatgttcttcccaggtggggaacggaccaagactgtgcctgctctgtcagcggttcagggccacagcatttcaacgagaggaattgatgaagatgaaggtgaaggacctgagggattatctgagcctccatgacatcagcacagagatgtgccgagaaaaggaggaactggtgttattggtgctgggccagcagcccgtaatatctcaagaggatcgaacccgggccagtacattaagcccggacttccccgaacagcaggccttcctcacacagccccattcctctatggtgcccccaacgtcccccaacctgcctagctcatctgcacaggccacatccgttccccccgcccaggtccaggagaatcagcaggcaaatggccacgtctcccaggatcaggaggaacccgtctatcttgaaagcgttgcgagggtgcctgccgaagatgagacacaatcaattgactccgaagactccttcgtacctgggaggagagcatctctttctgaccttaccgacctcgaggatatcgagggactgaccgtgcgacagctgaaggagatcctggccagaaacttcgtcaattacaaggggtag

SEQ ID NO: 26300 - DNA, 402 bp, Artificial Sequence
  derived and/or modified sequence
atgtgggctacctgctgtaactggttctgcctcgatgggcagcccgaggaagttccaccaccccagggggctcgcatgcaggcgtattctaatcctggctacagtagtttcccatcccccacagggttggaacccagttgtaaatcatgcggcgcacattttgcaaacaccgcacggaagcaaacctgcctcgattgtaagaagaatttctgcatgacttgctctagccaggtggggaatggtcctcggctctgtctgctgtgccagaggttcagagcaaccgccttccagagagaggagttgatgaaaatgaaggttaaggatctcagggattacctgagccttcatgatatcagtaccgagatgtgtcgcgagaaggaggagctggtgttactggtgtag

SEQ ID NO: 26301 - DNA, 570 bp, Artificial Sequence
  derived and/or modified sequence
atgtgggctacctgttgtaattggttctgcctcgatggccagcccgaggaggtgcccccaccccaaggagcaagaatgcaagcctactctaacccaggctattcttccttccccagccctactggactagagccctcgtgcaagtcctgcggggcgcattttgctaacacggctaggaaacagacatgcttggattgtaagaaaaatttctgcatgacgtgctcttcacaagtggggaacggccctcggctgtgtctgctttgccagcgctttagagctacagctttccagagggaggagctcatgaagatgaaagtgaaagatctgcgtgattacctaagcctgcacgatatcagtacagaaatgtgtcgggagaaagaagagcttgtgctgctggtcctagggcagcagccggtcatcagtcaagaggaccgaacccgggccagtacactgtcacccgatttccccgaacagcaggcgttccttacccagccccatagtagcatggtgcctccaaccagccctaaccttccttccagcagtgcacaagctaccagcgtgcccccgtag

SEQ ID NO: 26302 - DNA, 138 bp, Artificial Sequence
  derived and/or modified sequence
atgtgggcaacatgttgtaactggttctgcttggatggccaacctgaggaggtccctcctccccagggagctagaatgcaagcatatagcaaccccggctactctagcttcccaagtccaaccggactcgagccttag

SEQ ID NO: 26303 - DNA, 984 bp, Artificial Sequence
  derived and/or modified sequence
atgtgggccacctgctgcaactggttctgcctggatggccagcctgaggaggtgcccccaccccagggcgccaggatgcaggcctacagcaaccctggctacagcagcttccccagccccaccggcctggagcccagctgcaagagctgtggggcccactttgccaacacagccaggaagcagacctgcctggactgcaagaagaacttctgcatgacctgcagcagccaggtgggcaatggcccccggctgtgcctgctgtgccagcgcttccgggccacagccttccagcgggaggagctgatgaagatgaaggtgaaggacctgcgggactacctgagcctgcatgacatcagcacagagatgtgccgggagaaggaggagctggtgctgctggtgctgggccagcagcccgtcatcagccaggaggacaggacccgggccagcaccctgagcccagacttccctgagcagcaggccttcctgacccagccccacagctccatggtgccccccaccagccccaacctgcccagcagcagcgcccaggccacctctgtgcccccagcccaggtgcaggagaaccagcagagcattgattctgaggacagctttgtgcctggaagaagagccagcctgagtgacctgacagacctggaggacatcgagggcctgactgtgcggcagctgaaggagatcctggccaggaactttgtgaactacaagggctgctgtgagaagtgggagctgatggagcgggtgacccggctgtacaaggaccagaagggcctgcagcacctgggcggcgctgtgcccagcggcctggaggagaacctgtgcaagatctgcatggacagccccatcgactgtgtgctgctggagtgtggccacatggtgacctgcaccaagtgtgggaagaggatgaatgaatgtcccatctgccggcagtatgtgatccgggctgtgcacgtgttccgctcctag

SEQ ID NO: 26304 - DNA, 1092 bp, Artificial Sequence
  derived and/or modified sequence
atgtgggccacctgctgcaactggttctgcctggatggccagcctgaggaggtgcccccaccccagggcgccaggatgcaggcctacagcaaccctggctacagcagcttccccagccccaccggcctggagcccagctgcaagagctgtggggcccactttgccaacacagccaggaagcagacctgcctggactgcaagaagaacttctgcatgacctgcagcagccaggtgggcaatggcccccggctgtgcctgctgtgccagcgcttccgggccacagccttccagcgggaggagctgatgaagatgaaggtgaaggacctgcgggactacctgagcctgcatgacatcagcacagagatgtgccgggagaaggaggagctggtgctgctggtgctgggccagcagcccgtcatcagccaggaggacaggacccgggccagcaccctgagcccagacttccctgagcagcaggccttcctgacccagccccacagctccatggtgccccccaccagccccaacctgcccagcagcagcgcccaggccacctctgtgcccccagcccaggtgcaggagaaccagcaggccaatggacatgtgtcccaggaccaggaggagcctgtgtacctggagagcgtggcccgggtgcctgcagaagatgagacccagagcattgattctgaggacagctttgtgcctggaagaagagccagcctgagtgacctgacagacctggaggacatcgagggcctgactgtgcggcagctgaaggagatcctggccaggaactttgtgaactacaagggctgctgtgagaagtgggagctgatggagcgggtgacccggctgtacaaggaccagaagggcctgcagcacctggtgtctggagctgaggaccagaatggaggagctgtgcccagcggcctggaggagaacctgtgcaagatctgcatggacagccccatcgactgtgtgctgctggagtgtggccacatggtgacctgcaccaagtgtgggaagaggatgaatgaatgtcccatctgccggcagtatgtgatccgggctgtgcacgtgttccgctcctag

SEQ ID NO: 26305 - DNA, 1068 bp, Artificial Sequence
  derived and/or modified sequence
atgtgggccacctgctgcaactggttctgcctggatggccagcctgaggaggtgcccccaccccagggcgccaggatgcaggcctacagcaaccctggctacagcagcttccccagccccaccggcctggagcccagctgcaagagctgtggggcccactttgccaacacagccaggaagcagacctgcctggactgcaagaagaacttctgcatgacctgcagcagccaggtgggcaatggcccccggctgtgcctgctgtgccagcgcttccgggccacagccttccagcgggaggagctgatgaagatgaaggtgaaggacctgcgggactacctgagcctgcatgacatcagcacagagatgtgccgggagaaggaggagctggtgctgctggtgctgggccagcagcccgtcatcagccaggaggacaggacccgggccagcaccctgagcccagacttccctgagcagcaggccttcctgacccagccccacagctccatggtgccccccaccagccccaacctgcccagcagcagcgcccaggccacctctgtgcccccagcccaggtgcaggagaaccagcaggccaatggacatgtgtcccaggaccaggaggagcctgtgtacctggagagcgtggcccgggtgcctgcagaagatgagacccagagcattgattctgaggacagctttgtgcctggaagaagagccagcctgagtgacctgacagacctggaggacatcgagggcctgactgtgcggcagctgaaggagatcctggccaggaactttgtgaactacaagggctgctgtgagaagtgggagctgatggagcgggtgacccggctgtacaaggaccagaagggcctgcagcacctgggcggcgctgtgcccagcggcctggaggagaacctgtgcaagatctgcatggacagccccatcgactgtgtgctgctggagtgtggccacatggtgacctgcaccaagtgtgggaagaggatgaatgaatgtcccatctgccggcagtatgtgatccgggctgtgcacgtgttccgctcctag

SEQ ID NO: 26306 - DNA, 816 bp, Artificial Sequence
  derived and/or modified sequence
atgtgggccacctgctgcaactggttctgcctggatggccagcctgaggaggtgcccccaccccagggcgccaggatgcaggcctacagcaaccctggctacagcagcttccccagccccaccggcctggagcccagctgcaagagctgtggggcccactttgccaacacagccaggaagcagacctgcctggactgcaagaagaacttctgcatgacctgcagcagccaggtgggcaatggcccccggctgtgcctgctgtgccagcgcttccgggccacagccttccagcgggaggagctgatgaagatgaaggtgaaggacctgcgggactacctgagcctgcatgacatcagcacagagatgtgccgggagaaggaggagctggtgctgctggtgctgggccagcagcccgtcatcagccaggaggacaggacccgggccagcaccctgagcccagacttccctgagcagcaggccttcctgacccagccccacagctccatggtgccccccaccagccccaacctgcccagcagcagcgcccaggccacctctgtgcccccagcccaggtgcaggagaaccagcaggccaatggacatgtgtcccaggaccaggaggagcctgtgtacctggagagcgtggcccgggtgcctgcagaagatgagacccagagcattgattctgaggacagctttgtgcctggaagaagagccagcctgagtgacctgacagacctggaggacatcgagggcctgactgtgcggcagctgaaggagatcctggccaggaactttgtgaactacaagggctag

SEQ ID NO: 26307 - DNA, 402 bp, Artificial Sequence
  derived and/or modified sequence
atgtgggccacctgctgcaactggttctgcctggatggccagcctgaggaggtgcccccaccccagggcgccaggatgcaggcctacagcaaccctggctacagcagcttccccagccccaccggcctggagcccagctgcaagagctgtggggcccactttgccaacacagccaggaagcagacctgcctggactgcaagaagaacttctgcatgacctgcagcagccaggtgggcaatggcccccggctgtgcctgctgtgccagcgcttccgggccacagccttccagcgggaggagctgatgaagatgaaggtgaaggacctgcgggactacctgagcctgcatgacatcagcacagagatgtgccgggagaaggaggagctggtgctgctggtgtag

SEQ ID NO: 26308 - DNA, 570 bp, Artificial Sequence
  derived and/or modified sequence
atgtgggccacctgctgcaactggttctgcctggatggccagcctgaggaggtgcccccaccccagggcgccaggatgcaggcctacagcaaccctggctacagcagcttccccagccccaccggcctggagcccagctgcaagagctgtggggcccactttgccaacacagccaggaagcagacctgcctggactgcaagaagaacttctgcatgacctgcagcagccaggtgggcaatggcccccggctgtgcctgctgtgccagcgcttccgggccacagccttccagcgggaggagctgatgaagatgaaggtgaaggacctgcgggactacctgagcctgcatgacatcagcacagagatgtgccgggagaaggaggagctggtgctgctggtgctgggccagcagcccgtcatcagccaggaggacaggacccgggccagcaccctgagcccagacttccctgagcagcaggccttcctgacccagccccacagctccatggtgccccccaccagccccaacctgcccagcagcagcgcccaggccacctctgtgcccccatag

SEQ ID NO: 26309 - DNA, 138 bp, Artificial Sequence
  derived and/or modified sequence
atgtgggccacctgctgcaactggttctgcctggatggccagcctgaggaggtgcccccaccccagggcgccaggatgcaggcctacagcaaccctggctacagcagcttccccagccccaccggcctggagccctag

SEQ ID NO: 26310 - DNA, 984 bp, Artificial Sequence
  derived and/or modified sequence
atgtgggccacctgctgcaactggttctgcctggacggccagcccgaagaggtacctcccccacaaggagctagaatgcaggcctattccaatccgggttatagtagttttccctctccaactggtctcgaaccgagctgtaaatcttgcggggcacacttcgccaataccgctaggaagcagacttgcctggactgcaagaagaatttctgtatgacctgtagttctcaggtgggaaatggaccccggttgtgtctcctgtgtcaaagattccgggccacagcctttcagcgcgaggagctcatgaaaatgaaggttaaagatctccgcgactacctgtctttgcacgacattagtaccgagatgtgtagggaaaaggaggaattggtgcttctcgtgctgggccagcagcctgtgatttcgcaagaagatagaacccgggctagcactctgtctcctgatttccccgaacagcaagcgtttctgacccagcctcactcatccatggtccctccaacgagtcccaacctgccgtcaagtagcgcccaagctacttccgtgccccctgcccaggtgcaggaaaatcagcagagtatcgatagtgaagactccttcgtacccgggaggcgggcatctctgtccgacctgactgacctggaagatattgaagggttaaccgtccgtcagctgaaggaaatcctggccaggaactttgtcaattataagggttgttgtgaaaagtgggagctgatggaacgggtgacacgactgtacaaggaccagaagggcctgcagcatctagggggggcggttccaagcgggctggaagagaacctctgcaagatatgcatggactcacccattgattgtgtcctgctggagtgtgggcacatggtcacatgtactaaatgtgggaagcgcatgaatgaatgcccaatttgtaggcagtacgtcattcgggccgtacacgtgttcaggtcttag

SEQ ID NO: 26311 - DNA, 1092 bp, Artificial Sequence
  derived and/or modified sequence
atgtgggccacctgctgcaactggttctgcctggacggccagcccgaggaggtgcccccgccccagggggcgcgaatgcaggcctattccaatccagggtattcatccttcccatcacccacggggttagaacccagctgcaagtcttgcggtgctcacttcgcaaacactgctagaaaacagacctgcctggattgcaagaaaaacttctgtatgacctgttcttcgcaggtgggcaatggaccgcgactgtgtctgttatgtcaaaggtttcgcgccaccgccttccagagagaggagcttatgaagatgaaggtgaaagacctcagggactacctctcattgcacgatatctcgactgagatgtgtcgcgagaaagaggagctcgttctgcttgtgctggggcagcagccggtcatcagtcaggaggataggactcgtgcttccaccctaagcccagacttccccgagcagcaggcattcctgacccagcctcattcttccatggtgccacctacttcgccaaacctgccatcttcaagcgctcaggcaacttccgtgccgccggcccaagtgcaagagaaccagcaagctaatggacacgtaagccaggatcaagaggagcctgtttatctggaatcagttgctcgggtgccagctgaggacgaaacacagagcattgactccgaagattcgtttgtccccggccgtcgggcatcattgtcagacctgacagatcttgaggatattgagggtttgacagttcggcaacttaaggagattctcgcacgtaactttgtaaactacaaaggctgttgtgaaaagtgggagcttatggagcgagtgacgcgcctgtacaaagatcagaagggccttcagcacctggtgtctggagccgaagaccagaatggcggagcagtgccaagtggtctagaggagaatctgtgcaagatctgcatggacagccccattgactgtgtgttactggagtgtgggcatatggtgacatgtaccaagtgtggaaagcgcatgaatgagtgtccaatatgcaggcagtacgtgatcagggctgtccacgtcttccgatcctag

SEQ ID NO: 26312 - DNA, 1068 bp, Artificial Sequence
  derived and/or modified sequence
atgtgggccacctgctgcaactggttctgcctggacggccagcccgaagaagttcctccacctcagggggcacgaatgcaggcttattctaacccaggctattcaagtttcccttcgccaactggccttgagccgtcatgcaagtcttgtggggctcattttgcgaatactgcacggaaacaaacatgtttggattgcaagaaaaatttttgtatgacgtgctccagtcaggtgggtaatggccctcgcttgtgtttactctgtcaaagatttagggccacagctttccaaagagaggaactgatgaagatgaaagtcaaagacctacgtgactatctgtccctccacgatatcagcacggagatgtgtagagagaaagaagaactggtcctgctcgtactcggtcagcagccagtaattagccaggaagacaggaccagagcgagcacgctctccccggacttccctgagcaacaggcgttcctcacgcagccccattcgagtatggtgccaccaacttcccccaacctcccgagttcatctgctcaggctacttcagtgccgcccgcgcaggttcaagagaatcagcaggcaaatggccatgtctcccaagatcaagaggaacccgtatatctggagagtgtagcacgagttcccgccgaggacgaaacacaaagcatagattctgaagacagttttgtgccaggtcgacgagccagcctgagcgacctcaccgatttggaagatatcgaaggactgactgtgaggcagcttaaagagattctcgcacgcaactttgtcaactacaaagggtgctgcgaaaagtgggagctgatggaaagagtaactcgcctgtacaaagaccagaagggtctccagcatttaggcggagctgtcccaagcggccttgaggaaaatttatgcaaaatctgtatggactccccaatagactgcgtgttgttggaatgcgggcatatggtgacatgcaccaagtgcggaaagcgcatgaacgaatgtccgatctgcagacaatacgtgatccgtgccgtgcacgttttccggtcctag

SEQ ID NO: 26313 - DNA, 1092 bp, Artificial Sequence
  derived and/or modified sequence
atgtgggccacctgctgcaactggttctgcctggacggccagcccgaggaagtccccccgccacagggcgctcggatgcaggcctactccaacccaggatattcttcattcccaagtcccacaggcttagagcccagttgtaagagttgcggggcacacttcgctaatacagcaagaaaacaaacctgtctcgactgtaagaagaacttttgcatgacctgttcctctcaagtgggaaacggtccccggctttgtctgttatgtcagcggtttagagccacggcatttcagagggaggagcttatgaaaatgaaagttaaggatctgcgggattatctctctctgcatgatatttctactgagatgtgccgtgaaaaagaggaacttgtgctgctggtgttgggccagcagcccgtgatatctcaggaggatagaacgcgggcctcgacgctgtctcctgatttccctgagcagcaggcattcctcacccagcctcattcctccatggtcccacccacctctccaaatctgccaagcagttccgctcaggccacgagtgtgcctcctgcccaggtccaggagaaccagcaggccaacggtcacgtcagtcaggaccaggaggaacctgtgtatttagagtcagtggctcgtgttccagctgaggacgagactcagtcgattgatagcgaagactcattcgtgccaggcaggcgcgcgtccctgtccgatcttactgacctggaagatattgagggccttactgtgaggcagcttaaagaaatcttggctcggaactttgtgaattacaaggggtgctgcgagaaatgggagttgatggagcgcgtgacgaggctatataaggaccagaaggggctacaacacttagtgagtggggctgaagatcagaatggcggggctgttccctcgggactggaagagaatctttgtaaaatatgtatggacagcccaattgattgcgttcttctcgagtgcggtcacatggtgacttgcaccaaatgcggcaaacgcatgaacgaatgtcccatctgtaggcagtatgtcatcagggccgtgcacgtgtttagaagttag

SEQ ID NO: 26314 - DNA, 816 bp, Artificial Sequence
  derived and/or modified sequence
atgtgggccacctgctgcaactggttctgcctggacggccagcccgaagaggtcccaccaccccagggggcgaggatgcaagcttactccaaccctggctatagcagtttcccgtctcctaccgggttggagccttcctgtaagtcatgcggtgcgcacttcgccaacaccgcccggaaacagacctgcttggactgtaaaaagaatttctgtatgacctgttcctcccaggttggaaatggacccaggctctgccttttgtgtcagaggttcagggcaacagccttccagagagaggaacttatgaagatgaaggtaaaggatctgcgggattacctttctttacatgacatctcgacagagatgtgccgcgaaaaggaggagttagtgctgcttgtcctgggacagcaacctgttattagtcaagaggacagaactagggccagcacgctttccccagatttcccggagcagcaggccttcctgacccagccgcattccagtatggtgccccccacctccccaaacctgccctctagcagcgcgcaggcaacctccgtgcctccagctcaggtacaggagaaccagcaagcgaatggccatgtcagccaggaccaggaggagccagtctacctggaaagtgtggcccgcgtgcccgccgaagatgaaacgcagagtatcgatagcgaagacagtttcgtgcctggccgcagggccagtctgagcgaccttactgatttggaggatatcgagggcctaacagttagacagctgaaggaaatccttgcccgaaattttgttaattacaaagggtag

SEQ ID NO: 26315 - DNA, 402 bp, Artificial Sequence
  derived and/or modified sequence
atgtgggccacctgctgcaactggttctgcctggacggccagcccgaggaagtgccccccccccagggggcacggatgcaggcttactctaatccaggctactcttcatttccctctcccaccggcctggaaccatcttgtaagagttgtggcgcacatttcgccaatacagcgagaaaacagacctgtttagactgtaagaaaaacttctgtatgacctgctccagccaggtgggtaacggccctagattgtgtcttctgtgtcagagatttcgcgctactgcgttccagcgcgaggagctcatgaaaatgaaggtgaaagatctgcgcgactatctgtcactacatgacatttctacggaaatgtgtagagaaaaggaagagctcgttctccttgtctag

SEQ ID NO: 26316 - DNA, 570 bp, Artificial Sequence
  derived and/or modified sequence
atgtgggccacctgctgcaactggttctgcctggacggccagcccgaggaagtgccaccccctcagggcgctcgtatgcaggcctatagcaaccccggctattcttcattcccatctccaacaggactggagccttcctgcaagagctgtggggcccatttcgcgaacacagctagaaaacagacgtgtctcgactgtaaaaagaatttctgtatgacatgcagctctcaggttggcaacggacctaggctttgcctcctctgtcagcgctttcgggctacagctttccagagagaggagctgatgaagatgaaagttaaggatttgagagactacctctctctgcacgacatcagcactgaaatgtgtcgagagaaagaagaactggtgttactggtgttaggccagcaacctgtgatctcgcaggaggacagaacccgagcctctaccttgtcccccgactttcctgagcagcaggctttcttaacacagccccacagtagcatggtgccccctaccagtcccaaccttcctagtagcagcgcacaagctacttccgtgcccccatag

SEQ ID NO: 26317 - DNA, 138 bp, Artificial Sequence
  derived and/or modified sequence
atgtgggccacctgctgcaactggttctgcctggacggccagcccgaggaagtgccgcccccccagggcgcgagaatgcaagcctattccaaccccggatactctagtttccccagtcccacaggcttagagccatag

SEQ ID NO: 26318 - DNA, 984 bp, Artificial Sequence
  derived and/or modified sequence
atgtgggccacatgctgtaattggttttgcctggacggacagcccgaagaagtgcccccaccccaaggtgctaggatgcaggcttatagcaaccctggctatagctcctttccgagccccacgggattggagccgtcctgtaagtcttgcggagcccacttcgctaatacagccagaaagcaaacatgcctggattgtaagaagaacttttgcatgacatgctcttctcaggtcgggaatggcccaaggctgtgcctgctttgccagcggttccgcgctaccgcgttccaaagagaggagttgatgaagatgaaagtgaaggacttaagagattacctgtccttacacgacatctccactgagatgtgccgggaaaaagaagaactcgttttgctggtgttaggccagcagccggtcatttcccaggaagatcgcacccgggcttcaaccctgtcccccgacttccccgagcagcaagcctttctcacccaaccgcacagcagcatggtgcctccaacatcaccaaacctgccctcaagctcggctcaggcaactagtgtccctcctgcgcaagtgcaggaaaaccagcagtctatcgacagcgaagacagctttgtgcctgggcgtcgagcctcattaagtgacttgactgatctggaggacattgagggactcacagtgcgccagcttaaggagatcctcgccagaaatttcgtcaattacaagggatgctgcgagaagtgggaattaatggagcgggtgacacggctgtacaaagaccagaaagggctgcaacacctgggcggtgccgtgccgtccggcttagaagaaaatctctgcaagatatgcatggattcacctatcgactgcgtgttgcttgagtgtggtcatatggtgacttgcactaaatgtggtaagagaatgaatgagtgccctatttgtagacaatacgtgattagagccgtgcacgtgtttcgtagctag

SEQ ID NO: 26319 - DNA, 1092 bp, Artificial Sequence
  derived and/or modified sequence
atgtgggcaacttgttgtaactggttttgtctcgatggacagcccgaggaagtcccgcctccacagggtgcaaggatgcaggcctactccaatcctggctactcctcattcccctctcccacgggcctggagccatcctgtaaatcctgtggggctcactttgcaaacacggcgaggaaacaaacatgtctggattgcaaaaagaatttttgcatgacatgtagttcccaggttggcaacggccctagactgtgcctgctctgtcaacgcttccgagccacagccttccaacgggaagagctgatgaaaatgaaggtgaaagacctgcgagactatctgtcactgcacgacatctctaccgaaatgtgccgcgagaaggaggagttggtgctgctggtgctcggccagcagccggtcatcagtcaggaggacagaacaagggcatctaccctcagtccggacttccccgagcaacaggcctttctgacacagcctcactcctccatggtgcctccaactagccctaatctgccaagtagtagcgcccaggccaccagcgtgcccccagcccaggtgcaggagaaccaacaagctaatggtcacgtgtcacaggaccaagaggagcctgtgtacctggaatcagttgctcgggtgcccgctgaagacgaaactcaaagcattgactccgaggacagttttgtacccggaagaagggcgagcctgtccgatctaacggacctcgaagacatcgagggacttaccgtgaggcagcttaaagagattcttgcacgtaactttgtcaactacaagggttgctgtgagaagtgggagctgatggaacgcgtcacaagactctacaaggatcaaaaaggcttgcagcacctggtgtctggtgccgaggatcaaaatggaggcgcagtgccaagcggtttagaggaaaacctgtgcaaaatatgtatggacagtcccattgattgcgtcttactcgaatgtggacacatggtgacatgtactaagtgcggcaagcgtatgaatgagtgtcctatttgcagacaatacgtgatccgagccgttcacgtattcaggtcatag

SEQ ID NO: 26320 - DNA, 1068 bp, Artificial Sequence
  derived and/or modified sequence
atgtgggccacctgttgcaattggttctgcctggatggacagcccgaagaggtccctccacctcagggggctaggatgcaggcctattctaacccaggatactctagctttcctagcccaactggtttagaaccaagctgtaaatcctgtggagcccacttcgccaatactgcaagaaagcagacatgcctagactgtaagaagaatttctgtatgacctgtagctctcaggtcgggaatggaccaaggctgtgtctcctttgtcagcggtttcgagctaccgccttccagagagaggagcttatgaagatgaaagtgaaagacctgcgcgattacttgagcctacatgacattagcactgaaatgtgcagagagaaagaagagctggtcctcctggtgcttggccaacagcccgtgatcagtcaagaagatagaactcgggcatccactctttccccggacttcccagaacagcaggcatttctgacccagccccacagctccatggtaccgccaactagtccaaatcttcccagctcgtcggcacaggcaacatctgtacccccagcccaggtgcaggaaaatcaacaggcaaatggacatgttagtcaggaccaagaagagcctgtgtatctggaaagcgttgcacgggtgcctgcagaagatgaaacccagagtatcgacagcgaggatagttttgtccccggacggcgagcgtcactttccgatctgaccgatttggaggacatcgagggcctaacggtccgccagctgaaagagattttagctaggaattttgtgaattacaagggatgctgcgagaagtgggaattgatggagagagtgactcggctctataaggatcaaaaggggctgcagcacctcggaggcgcagtgcctagcggcctggaggaaaacctctgtaagatttgtatggattcacctattgactgtgtcctgctcgaatgtggacatatggtcacctgcacaaagtgtggcaaacggatgaacgagtgtcccatttgccgccagtacgtcatccgagccgtacacgtctttagaagttag

SEQ ID NO: 26321 - DNA, 1092 bp, Artificial Sequence
  derived and/or modified sequence
atgtgggctacttgctgcaattggttttgcctcgatggacagccagaggaggtcccgcctccacagggcgcaaggatgcaggcttatagtaacccaggctattcgtcctttcctagtcctacagggttggaaccttcgtgcaagagctgtggcgcacacttcgccaataccgcgagaaaacagacatgcctcgattgtaagaaaaacttctgcatgacctgttccagccaggttggaaatggcccaagactgtgcctcttgtgtcaacgttttcgcgctactgcgtttcagcgcgaagaactcatgaaaatgaaggtgaaggacctccgcgattacctcagtctccatgatatctccacagaaatgtgccgggagaaggaggaacttgtattgctcgttctggggcaacagcccgtaatttctcaggaggaccgcacacgcgcttctacactgtcgccagacttccctgagcaacaggccttcctaactcagccgcacagcagcatggtgccacctacaagtcccaacctgccctccagcagcgcacaagccacatcagtgcctccagcccaagtccaggaaaaccaacaagcgaacggtcatgtttctcaagaccaggaggaacctgtgtatctcgagtctgtcgcacgagttccggctgaggacgagacacagagtattgactctgaagatagtttcgttccgggtcgcagggcatctctgtctgacctaacagacctggaggacattgaggggctgacggttcggcagctcaaagagatacttgcacgtaattttgtcaattataaggggtgttgtgagaagtgggagctaatggaacgcgtgacacgactgtataaggatcagaaagggctgcagcatcttgtgtccggagccgaggatcagaatggaggagccgtcccctccgggctggaagagaatctgtgtaagatttgtatggattcccctatcgattgcgtcctgttggagtgcgggcacatggttacgtgtactaaatgtggcaagagaatgaacgaatgcccaatttgtcgtcagtacgtcatcagagccgtacatgtgtttagatcctag

SEQ ID NO: 26322 - DNA, 816 bp, Artificial Sequence
  derived and/or modified sequence
atgtgggctacatgctgtaactggttctgccttgatggccagcctgaagaagtgccacctccccagggagccagaatgcaggcttattcgaacccgggatattccagttttcctagtcctaccggcctagaaccttcctgtaagtcttgtggggcacactttgccaacacagccagaaaacaaacatgtctggattgcaagaagaacttttgcatgacctgtagctcacaagtgggcaacggacctcggctgtgcctcctctgtcaaaggtttagggccaccgcttttcaaagggaagagctgatgaaaatgaaagtgaaagatctgcgggactatctgagcttgcacgacatctcaacagaaatgtgccgggagaaggaagagttagtacttttggttcttggacagcagccagttatctcccaggaagaccggacgcgtgccagcaccttgagcccggacttccccgagcagcaagcatttctgacacagcctcactcttctatggtgccaccaacatctccgaatctcccctcttctagtgcgcaggccacttcggtgcctcctgctcaggtgcaggaaaaccagcaggctaatgggcatgtctcccaggatcaagaagaacccgtctacctggaatcggtggccagagtgcctgcagaagacgaaactcagtcaatcgattccgaagattcctttgtccccggacggagggcatcacttagcgatctgacagatctggaagacattgaggggctgacggtcaggcaactcaaagagatcctagctcggaattttgtgaactataagggatag

SEQ ID NO: 26323 - DNA, 402 bp, Artificial Sequence
  derived and/or modified sequence
atgtgggccacatgctgcaattggttctgcctggacggccagccagaggaggtgccgccaccacaaggcgcaaggatgcaagcatactccaatcccggttatagcagcttcccatcccctaccggattagagccatcatgtaaatcatgcggagctcacttcgcaaacactgcaaggaagcaaacttgcctggactgtaaaaagaatttctgtatgacctgctcaagtcaggtcggcaacggtcccagactctgcctcctctgccagcgttttcgcgctacagcatttcagcgagaggagctgatgaagatgaaggtcaaggatctgagggactacctatccctgcacgacatctccaccgagatgtgcagagagaaggaggaactggtcctgctggtttag

SEQ ID NO: 26324 - DNA, 570 bp, Artificial Sequence
  derived and/or modified sequence
atgtgggctacatgttgcaactggttttgccttgatgggcaacctgaggaggtccctccgcctcagggagcccgaatgcaggcctatagtaaccccggatactcttcatttccctcgcccactggactcgagccatcttgcaagagttgcggggctcattttgccaacactgccaggaaacagacatgtctggactgtaaaaaaaatttttgtatgacatgctcctcccaggttggcaacgggcctagactttgcctcttatgtcaaaggttcagagctaccgcatttcaaagagaggagctcatgaagatgaaagttaaagatctgcgggattatctgagtctccacgatattagtactgagatgtgtagggagaaagaagaattggtcctcttagtgctgggccagcagcctgtgatcagtcaagaagataggaccagggcatcgacattgtccccggattttccagaacaacaggcatttctgactcagccacacagttcaatggtaccacctacgtctcccaatctgccctcctccagcgcccaggccacgagtgtcccaccctag

SEQ ID NO: 26325 - DNA, 138 bp, Artificial Sequence
  derived and/or modified sequence
atgtgggccacctgttgtaactggttctgtctcgacgggcagcccgaggaggttccgcctccacagggagccaggatgcaagcttacagtaaccctggttacagctcatttccctcacctacaggattggagccttag

SEQ ID NO: 26326 - DNA, 4013 bp, Artificial Sequence
  derived and/or modified sequence
ttaccaaagatacatccccaggcggcaccattcacttcacatgaaagccgctgctcttggttcctgagatgatctcatctgaacatggctccagcgacctcagccacaggaactagagacagcttgctttctgtcgtggcaatgttttgaaactggcaaaatcagattttatcatgtgggcaacctgctgcaactggttctgcctggatggacagcctgaggaggtcccaccaccccagggagccaggatgcaggcctattccaaccctgggtacagctccttcccttccccaacaggcttggaaccaagctgcaagtcctgtggggctcactttgcaaacacggccaggaagcagacctgcttggactgtaagaaaaatttttgcatgacctgttcgagccaagtagggaatgggccccgcctctgccttctctgccaacggtttcgagctacagcctttcagcgagaggagctcatgaagatgaaggtgaaggacttgagggactatctcagcctccatgacatctctaccgaaatgtgccgggagaaagaagagctggtgctcttggtccttggccagcagcctgtaatctcccaggaggacaggactcgtgcctccaccttgtccccagactttcctgagcagcaggccttcctgacccagcctcactccagcatggttccacctacctcacccaacctcccctcttcatctgcacaagccacctctgttcccccagcccaggttcaggagaatcagcagtctattgactcagaggacagctttgtcccaggccgaagggcctctctgtctgacctgactgacctggaggacattgaaggcctgacagtgcggcagctgaaagagatcttggctcgcaactttgtcaactacaagggctgctgtgagaagtgggagctgatggagagagtgacccggctatacaaggatcagaaaggactccagcacctggggggagcagtaccatcaggcttggaggagaacctgtgtaagatctgcatggactcacccattgactgtgttcttctggagtgtggccacatggtaacctgtaccaagtgtggcaagcgcatgaatgaatgtcccatctgccggcagtatgtaatccgagctgtgcatgtcttccggtcctgagagcttgcatcggtttcttcagtgccttacagggaaatagcctggggtgtctgggctcagggttggccagcttgcagaggagcaagctagtagaaatattgcagggttcccaaaaccaggtcaagcaagatgccatgtcacccctgagcatgcctgtcttcccaggggtgtacctcttggctggcaaagcccaaggccagtgggaacttgtataaatcacatgggtatgttcttggttcagtgatcttggagtgatgatggtaactgatgaacagagaactttccagaacttgggtcctgtcttcctccctgaacctagacagtttcacccctcctcctgtacccaacccatccccaccccatatgggagatgcttgcccatgtgtttcatcaatcagaagtcctcctccccagcacattcggatttaaatttctggtctctccggctttctgtgctttaactatctttgctaaagtctcttgctacattgcctaaatccatttgtttctttggaccaaaaatgttagtttaccagaccgatagtggtccttaggacagattttagaccagtaaacttatctttggtgagaaatgaaatacaaatgctatagaaaaatttcaaagttgttaaaagccacttcattaaatgctgggattggaagctgttggtctcctgacctgactctgggagccaacaaaacatcaggctcccaaactgctgggaaatttgtttctgtctgcaagggatagtgcgtgcataatccctgctgctgcttctcttgggacctgatttgcaccatccttagtttatgcggaaaggggaagcaatgggtggaggcagtggccttctccttaattttggcttggcttctgatccttttcccaactagaagtcttaagccacttttcgctgaaaatgaaatccctcccttatccatggtagttttaaatttggtttcattgaagaaatagatttaggcaaagagcctgtgctcttctctggccagactgctgttgaagttcctggagagcaaatgttaagacagagcacttaagagctttcaggaggtactgaatgagactggattctgttgtaagccgacagttcaagtctttatttcccaggttggtggggagtgaggagaccctactttcattccctttcctagcccactgatttttgggggcaggtcagggagaaagcattttttttttttttttgagtctcactctgttgcccaggctggagtgcagtggtacagtcttggcttactgcaacctccacctcccaggttcaagctattctcctgccttagcctccagagtagctgggattataggcgcccaccaccacaccaggctaatttttgtatttttagtagagacggggttttaccatgttcaccaggctggtcttgaactcttgaccttatgatccgcccgcctcagcttcccaaagtgctgggattacaggcgtgagccaccacacccagcaggagaaaccattttctaggctctttaggaaggaccatgcaatgagtaggtgatgtatttgagccctcacagtctttacacccctagaggagctggaggacttaagagtttgctgcagaagcgtggccaagcacaaaacacatgatcaggaaagcagagtgttttcccattaccaatggatgaactatgcaaaccctaaacgccttggcagacacctcccaccccttacccctcccatgcagctgaaaaatctgagactagaaccaatcatgactctggatggcagagggaaacctctaaagggacttattacattggtacagacatatttatgctttcttccatcaccaaccactaaacccctttggaggaatgaaataactgcataaactagtcaactgaacactgggccacttacctcaatgttatacaaagtcctggatgatttgattctgaaccacagcctttgcaggagttgggggaatcagatttgctcatgaagacatccctttccacttttgtcatgggcagtaaatactatagtttacaatgcctaccaattagcaaaggatcattcattcagctactcagttcctctgtaaaacaggtctatgtatgtgcaattcagctaagatctagcagtaacttaagggcagaagctggctctctacttacaacctgctttctctgctgaagccttacctcctcttcagtttccctcctagacacaaatcgaaaataatatactgatagctggttagtaacctcagtaagaattaaaactgaggttgtttactcattttgcctttaaatcttttatccccttttggtgaaggtttccctttaggaaaaaaggtgtcaaacaaccctgattttttttttttttgcatcatttttattacaccaaattaaagttgggagttccaagatcccattccagttaatatttaaccaaggtctaaaatttgattttttttaaatctttgaatcctcccttctgcccctcatggatccttggttttaatgatatggaaacatctaattcttagaattattccgtagcttttgctgattactctgagatttcagttaagacttgtttcaaaagacagatagctgactggttcataatacattggaatagttggatccaaactaataagaataagctgtacaggaactagtgctcaatatacattgtataaatttgtggaaatctcttggatgtgaattgttacttcaagtggcttttattaagattttctcagacttacttggaggttaaagcaaacccaaatgtgtattattttgttacagagctctgctttataattttgtaataaagtttcaatacagacacc

SEQ ID NO: 26327 - DNA, 7269 bp, Artificial Sequence
  derived and/or modified sequence
gggtgggagggggggccgacttcctggggccgcccgtgaggatgtcgcgaccgcccccgggtgcccctcagccccagagacgccgccgcggcggagtccgcagcctccctgcctgaggcgtccgcggccgggatccggcccctcccctcgcctcctctcctaggtgccggccgggagggcggccgcagcagattttatcatgtgggcaacctgctgcaactggttctgcctggatggacagcctgaggaggtcccaccaccccagggagccaggatgcaggcctattccaaccctgggtacagctccttcccttccccaacaggcttggaaccaagctgcaagtcctgtggggctcactttgcaaacacggccaggaagcagacctgcttggactgtaagaaaaatttttgcatgacctgttcgagccaagtagggaatgggccccgcctctgccttctctgccaacggtttcgagctacagcctttcagcgagaggagctcatgaagatgaaggtgaaggacttgagggactatctcagcctccatgacatctctaccgaaatgtgccgggagaaagaagagctggtgctcttggtccttggccagcagcctgtaatctcccaggaggacaggactcgtgcctccaccttgtccccagactttcctgagcagcaggccttcctgacccagcctcactccagcatggttccacctacctcacccaacctcccctcttcatctgcacaagccacctctgttcccccagcccaggttcaggagaatcagcaggccaatggccatgtgtctcaggatcaagaggaacccgtctacctggagagcgtggccagagtacctgctgaggatgagacccagtctattgactcagaggacagctttgtcccaggccgaagggcctctctgtctgacctgactgacctggaggacattgaaggcctgacagtgcggcagctgaaagagatcttggctcgcaactttgtcaactacaagggctgctgtgagaagtgggagctgatggagagagtgacccggctatacaaggatcagaaaggactccagcacctggtcagtggtgccgaagaccaaaacgggggagcagtaccatcaggcttggaggagaacctgtgtaagatctgcatggactcacccattgactgtgttcttctggagtgtggccacatggtaacctgtaccaagtgtggcaagcgcatgaatgaatgtcccatctgccggcagtatgtaatccgagctgtgcatgtcttccggtcctgagagcttgcatcggtttcttcagtgccttacagggaaatagcctggggtgtctgggctcagggttggccagcttgcagaggagcaagctagtagaaatattgcagggttcccaaaaccaggtcaagcaagatgccatgtcacccctgagcatgcctgtcttcccaggggtgtacctcttggctggcaaagcccaaggccagtgggaacttgtataaatcacatgggtatgttcttggttcagtgatcttggagtgatgatggtaactgatgaacagagaactttccagaacttgggtcctgtcttcctccctgaacctagacagtttcacccctcctcctgtacccaacccatccccaccccatatgggagatgcttgcccatgtgtttcatcaatcagaagtcctcctccccagcacattcggatttaaatttctggtctctccggctttctgtgctttaactatctttgctaaagtctcttgctacattgcctaaatccatttgtttctttggaccaaaaatgttagtttaccagaccgatagtggtccttaggacagattttagaccagtaaacttatctttggtgagaaatgaaatacaaatgctatagaaaaatttcaaagttgttaaaagccacttcattaaatgctgggattggaagctgttggtctcctgacctgactctgggagccaacaaaacatcaggctcccaaactgctgggaaatttgtttctgtctgcaagggatagtgcgtgcataatccctgctgctgcttctcttgggacctgatttgcaccatccttagtttatgcggaaaggggaagcaatgggtggaggcagtggccttctccttaattttggcttggcttctgatccttttcccaactagaagtcttaagccacttttcgctgaaaatgaaatccctcccttatccatggtagttttaaatttggtttcattgaagaaatagatttaggcaaagagcctgtgctcttctctggccagactgctgttgaagttcctggagagcaaatgttaagacagagcacttaagagctttcaggaggtactgaatgagactggattctgttgtaagccgacagttcaagtctttatttcccaggttggtggggagtgaggagaccctactttcattccctttcctagcccactgatttttgggggcaggtcagggagaaagcattttttttttttttttgagtctcactctgttgcccaggctggagtgcagtggtacagtcttggcttactgcaacctccacctcccaggttcaagctattctcctgccttagcctccagagtagctgggattataggcgcccaccaccacaccaggctaatttttgtatttttagtagagacggggttttaccatgttcaccaggctggtcttgaactcttgaccttatgatccgcccgcctcagcttcccaaagtgctgggattacaggcgtgagccaccacacccagcaggagaaaccattttctaggctctttaggaaggaccatgcaatgagtaggtgatgtatttgagccctcacagtctttacacccctagaggagctggaggacttaagagtttgctgcagaagcgtggccaagcacaaaacacatgatcaggaaagcagagtgttttcccattaccaatggatgaactatgcaaaccctaaacgccttggcagacacctcccaccccttacccctcccatgcagctgaaaaatctgagactagaaccaatcatgactctggatggcagagggaaacctctaaagggacttattacattggtacagacatatttatgctttcttccatcaccaaccactaaacccctttggaggaatgaaataactgcataaactagtcaactgaacactgggccacttacctcaatgttatacaaagtcctggatgatttgattctgaaccacagcctttgcaggagttgggggaatcagatttgctcatgaagacatccctttccacttttgtcatgggcagtaaatactatagtttacaatgcctaccaattagcaaaggatcattcattcagctactcagttcctctgtaaaacaggtctatgtatgtgcaattcagctaagatctagcagtaacttaagggcagaagctggctctctacttacaacctgctttctctgctgaagccttacctcctcttcagtttccctcctagacacaaatcgaaaataatatactgatagctggttagtaacctcagtaagaattaaaactgaggttgtttactcattttgcctttaaatcttttatccccttttggtgaaggtttccctttaggaaaaaaggtgtcaaacaaccctgattttttttttttttgcatcatttttattacaccaaattaaagttgggagttccaagatcccattccagttaatatttaaccaaggtctaaaatttgattttttttaaatctttgaatcctcccttctgcccctcatggatccttggttttaatgatatggaaacatctaattcttagaattattccgtagcttttgctgattactctgagatttcagttaagacttgtttcaaaagacagatagctgactggttcataatacattggaatagttggatccaaactaataagaataagctgtacaggaactagtgctcaatatacattgtataaatttgtggaaatctcttggatgtgaattgttacttcaagtggcttttattaagattttctcagacttacttggaggttaaagcaaacccaaatgtgtattattttgttacagagctctgctttataattttgtaataaagtttcaatacagacacctgtcctgtctggtgcgaggatgttagaggttgataggactgacaaaagagcctgacagtggttcatgctataatttccacactttaggaggccaaggtgggaagactgcttgagctcaggagtttgagaccaacctgggcaatgtagtgagaccttgtctctacttaaaaaaacaaacaagggccgggtgcggtggctcacgcctgtaatcccagcactttgggaggctgaggcgggcagatcacgaggtcaggagatcgagaccaccctggctaacacggtgaaaccccgtctctactaaaaatacaaaaaattagccaggcgtggtggcgggtgcctgtagtcccagctactcgggaggctgaggcaggagaatggtgtgaacccgggaggcggagcttgcagtgagccaagattgcgccactgcagtccggcctgggcgaaagagcgagactctgtctcaaaaaacaaaacaaaaaaaaacacaaacaaaaaacccaaaaaaaccaaaaaattagccgtgcatggtggtgcatgtgggtagtcccaactacttggaaggctgaggtgggaggatcacttgagccaggagattgaagctgcagtgagctctgatcgccaccgcactccagccagggtgacagagtgagaccctgtattaaaaaaaaaaaaaaattgacaactgataaaccacaagctaatcctgggatgtgcacatggcctgggattagcctgtggttgggccaagtgaccttggtcaagatgctcagtgttgttgtaactaactaacttgctcaagaccacaaatgtaatatatggaagaggccatggaacaacctagaagagaatgagagctgggtaggtaaaggatgaatcccaagaccaattgggttgaagcaccaagtgagttcagatatttacactgatctagaagagatgggccttaaagaactgaaatctgaggacagttagtatgcccagttaggtcttcaggttaccctgggagatacatggtaccttttggatacagctgtagtacagctggactatggctcagaaaaggttggcccaggctgggcgccatggctcacgcctgtaatcccagcactttgggaggctgaggtgcgtggatgactcgaggccaggagtttgagaccagtctggacaacatggcgaaacgtggtctctactaaaaatacaaaaacttagctgcgagtgatggtgtgtgcctgtttgttaagtcttagccacttgggaggctgaggcatgagaattgcttgtgaacccgggaagcagaggttgcagtgagctgagattgcaccactgcactccagcctgaatgacagagcaagagtctgtttaaaaaaaaaaaaaaggttggcccagcctcgtgacagactgctgtgtgtgcgcaggcttgtacaaacctccctgaccaggcgcccaaggagcagggaaaagactactgagaatgcagcccctgggagaacaagattatgtgtccatctgctgtgactgagaagagaaaggaatcttgccaaaagggcataaaggatcgaggatgagccacaacactttgctcacattgccctagggagctgacctgttcagcacccagtgatgacctctgcttgatgccagccagcagcatgtagaggttcagaagagggaggcctccagcattctgctggagagatttatgatgatgatgttgagggctgcattgaaatacatgaaagaaatacatgaaaggatacaaaatagtatatacagtcagatctcagcagcaaagactggaagaaaatacataaaaaaccactgacattgaaatggcaataacacacactaaggcagagaagggacaagatgatcacctgcagccagcagaggccctttcctgtgagtgtgcactctgggtgtaagcaaccaataagggcaagtggggctgggtccaggttggagaggacagtgcctttggcaggatcctgaggagacagccttgttctgctgccctgtccggttgtttgtttggcctgaggctgaagagagaaatggaaatctatgtaggtcagtactcaaaggaggagcagctttttgtctccatagaggatggaataaaaagtatcttattcctaatactgaagcaaggctgaatggtgcctattcaaaaacaccaaatgtcctgggctagagtcaggaaagtaaacccctcccccgtgctgtccctactcccccaacatacacattttaaacagtaggtggaagccaaagtcaatcagatcaaagttgggggggggcggtggggtggccagggggcgcagtggtccttgatcttataggtccagagcctgttaatttgttcataaggtgagaactgaccctcaagagctggaaggattgggacatggcagccagtttacaaccatatggtgtcctgatgagcctgcactcagagtggagtgttggctggaacatgcacacctgcaactgagggttctaaagtcataggttaggcccttctcccgggtagggtctggacatgcacaccaggagtgacgttcccaactctagataactatgtgctaggctctgggctaagtgctttacataatgttgctcaggacaacaggacaaccctatgatttaggtgcacccattctacttggagggattgaggcttagatgttaacgtaacttgcctaaggttagagccattaagtttcaggagtctgatctgaactccgtctacacctgcactgtccagtgtggtagtcactagtgacatgtgaccatttgaagttgaattaaaataagaacttcagttccttagttgtgccagcttcatttcaattgctcagcagctgtctgtggctagtttggttggatactgcagatttatggatatttccactgctgcaaaaagttctattgaatagcacttgtctacactaaattgtctctcttccttttgttcttcaaataaatcagcctcaggtagcacaggagctgttctttgtaagcaggttgtatggatctgttctcaggtgtggatttttatttttttccctgcagatatggagtatattttctttaagaaattaaaaactaagaagaaaatgcca

SEQ ID NO: 26328 - DNA, 4097 bp, Artificial Sequence
  derived and/or modified sequence
ttaccaaagatacatccccaggcggcaccattcacttcacatgaaagccgctgctcttggttcctgagatgatctcatctgaacatggctccagcgacctcagccacaggaactagagacagcttgctttctgtcgtggcaatgttttgaaactggcaaaatcagattttatcatgtgggcaacctgctgcaactggttctgcctggatggacagcctgaggaggtcccaccaccccagggagccaggatgcaggcctattccaaccctgggtacagctccttcccttccccaacaggcttggaaccaagctgcaagtcctgtggggctcactttgcaaacacggccaggaagcagacctgcttggactgtaagaaaaatttttgcatgacctgttcgagccaagtagggaatgggccccgcctctgccttctctgccaacggtttcgagctacagcctttcagcgagaggagctcatgaagatgaaggtgaaggacttgagggactatctcagcctccatgacatctctaccgaaatgtgccgggagaaagaagagctggtgctcttggtccttggccagcagcctgtaatctcccaggaggacaggactcgtgcctccaccttgtccccagactttcctgagcagcaggccttcctgacccagcctcactccagcatggttccacctacctcacccaacctcccctcttcatctgcacaagccacctctgttcccccagcccaggttcaggagaatcagcaggccaatggccatgtgtctcaggatcaagaggaacccgtctacctggagagcgtggccagagtacctgctgaggatgagacccagtctattgactcagaggacagctttgtcccaggccgaagggcctctctgtctgacctgactgacctggaggacattgaaggcctgacagtgcggcagctgaaagagatcttggctcgcaactttgtcaactacaagggctgctgtgagaagtgggagctgatggagagagtgacccggctatacaaggatcagaaaggactccagcacctggggggagcagtaccatcaggcttggaggagaacctgtgtaagatctgcatggactcacccattgactgtgttcttctggagtgtggccacatggtaacctgtaccaagtgtggcaagcgcatgaatgaatgtcccatctgccggcagtatgtaatccgagctgtgcatgtcttccggtcctgagagcttgcatcggtttcttcagtgccttacagggaaatagcctggggtgtctgggctcagggttggccagcttgcagaggagcaagctagtagaaatattgcagggttcccaaaaccaggtcaagcaagatgccatgtcacccctgagcatgcctgtcttcccaggggtgtacctcttggctggcaaagcccaaggccagtgggaacttgtataaatcacatgggtatgttcttggttcagtgatcttggagtgatgatggtaactgatgaacagagaactttccagaacttgggtcctgtcttcctccctgaacctagacagtttcacccctcctcctgtacccaacccatccccaccccatatgggagatgcttgcccatgtgtttcatcaatcagaagtcctcctccccagcacattcggatttaaatttctggtctctccggctttctgtgctttaactatctttgctaaagtctcttgctacattgcctaaatccatttgtttctttggaccaaaaatgttagtttaccagaccgatagtggtccttaggacagattttagaccagtaaacttatctttggtgagaaatgaaatacaaatgctatagaaaaatttcaaagttgttaaaagccacttcattaaatgctgggattggaagctgttggtctcctgacctgactctgggagccaacaaaacatcaggctcccaaactgctgggaaatttgtttctgtctgcaagggatagtgcgtgcataatccctgctgctgcttctcttgggacctgatttgcaccatccttagtttatgcggaaaggggaagcaatgggtggaggcagtggccttctccttaattttggcttggcttctgatccttttcccaactagaagtcttaagccacttttcgctgaaaatgaaatccctcccttatccatggtagttttaaatttggtttcattgaagaaatagatttaggcaaagagcctgtgctcttctctggccagactgctgttgaagttcctggagagcaaatgttaagacagagcacttaagagctttcaggaggtactgaatgagactggattctgttgtaagccgacagttcaagtctttatttcccaggttggtggggagtgaggagaccctactttcattccctttcctagcccactgatttttgggggcaggtcagggagaaagcattttttttttttttttgagtctcactctgttgcccaggctggagtgcagtggtacagtcttggcttactgcaacctccacctcccaggttcaagctattctcctgccttagcctccagagtagctgggattataggcgcccaccaccacaccaggctaatttttgtatttttagtagagacggggttttaccatgttcaccaggctggtcttgaactcttgaccttatgatccgcccgcctcagcttcccaaagtgctgggattacaggcgtgagccaccacacccagcaggagaaaccattttctaggctctttaggaaggaccatgcaatgagtaggtgatgtatttgagccctcacagtctttacacccctagaggagctggaggacttaagagtttgctgcagaagcgtggccaagcacaaaacacatgatcaggaaagcagagtgttttcccattaccaatggatgaactatgcaaaccctaaacgccttggcagacacctcccaccccttacccctcccatgcagctgaaaaatctgagactagaaccaatcatgactctggatggcagagggaaacctctaaagggacttattacattggtacagacatatttatgctttcttccatcaccaaccactaaacccctttggaggaatgaaataactgcataaactagtcaactgaacactgggccacttacctcaatgttatacaaagtcctggatgatttgattctgaaccacagcctttgcaggagttgggggaatcagatttgctcatgaagacatccctttccacttttgtcatgggcagtaaatactatagtttacaatgcctaccaattagcaaaggatcattcattcagctactcagttcctctgtaaaacaggtctatgtatgtgcaattcagctaagatctagcagtaacttaagggcagaagctggctctctacttacaacctgctttctctgctgaagccttacctcctcttcagtttccctcctagacacaaatcgaaaataatatactgatagctggttagtaacctcagtaagaattaaaactgaggttgtttactcattttgcctttaaatcttttatccccttttggtgaaggtttccctttaggaaaaaaggtgtcaaacaaccctgattttttttttttttgcatcatttttattacaccaaattaaagttgggagttccaagatcccattccagttaatatttaaccaaggtctaaaatttgattttttttaaatctttgaatcctcccttctgcccctcatggatccttggttttaatgatatggaaacatctaattcttagaattattccgtagcttttgctgattactctgagatttcagttaagacttgtttcaaaagacagatagctgactggttcataatacattggaatagttggatccaaactaataagaataagctgtacaggaactagtgctcaatatacattgtataaatttgtggaaatctcttggatgtgaattgttacttcaagtggcttttattaagattttctcagacttacttggaggttaaagcaaacccaaatgtgtattattttgttacagagctctgctttataattttgtaataaagtttcaatacagacacc

SEQ ID NO: 26329 - DNA, 4121 bp, Artificial Sequence
  derived and/or modified sequence
ttaccaaagatacatccccaggcggcaccattcacttcacatgaaagccgctgctcttggttcctgagatgatctcatctgaacatggctccagcgacctcagccacaggaactagagacagcttgctttctgtcgtggcaatgttttgaaactggcaaaatcagattttatcatgtgggcaacctgctgcaactggttctgcctggatggacagcctgaggaggtcccaccaccccagggagccaggatgcaggcctattccaaccctgggtacagctccttcccttccccaacaggcttggaaccaagctgcaagtcctgtggggctcactttgcaaacacggccaggaagcagacctgcttggactgtaagaaaaatttttgcatgacctgttcgagccaagtagggaatgggccccgcctctgccttctctgccaacggtttcgagctacagcctttcagcgagaggagctcatgaagatgaaggtgaaggacttgagggactatctcagcctccatgacatctctaccgaaatgtgccgggagaaagaagagctggtgctcttggtccttggccagcagcctgtaatctcccaggaggacaggactcgtgcctccaccttgtccccagactttcctgagcagcaggccttcctgacccagcctcactccagcatggttccacctacctcacccaacctcccctcttcatctgcacaagccacctctgttcccccagcccaggttcaggagaatcagcaggccaatggccatgtgtctcaggatcaagaggaacccgtctacctggagagcgtggccagagtacctgctgaggatgagacccagtctattgactcagaggacagctttgtcccaggccgaagggcctctctgtctgacctgactgacctggaggacattgaaggcctgacagtgcggcagctgaaagagatcttggctcgcaactttgtcaactacaagggctgctgtgagaagtgggagctgatggagagagtgacccggctatacaaggatcagaaaggactccagcacctggtcagtggtgccgaagaccaaaacgggggagcagtaccatcaggcttggaggagaacctgtgtaagatctgcatggactcacccattgactgtgttcttctggagtgtggccacatggtaacctgtaccaagtgtggcaagcgcatgaatgaatgtcccatctgccggcagtatgtaatccgagctgtgcatgtcttccggtcctgagagcttgcatcggtttcttcagtgccttacagggaaatagcctggggtgtctgggctcagggttggccagcttgcagaggagcaagctagtagaaatattgcagggttcccaaaaccaggtcaagcaagatgccatgtcacccctgagcatgcctgtcttcccaggggtgtacctcttggctggcaaagcccaaggccagtgggaacttgtataaatcacatgggtatgttcttggttcagtgatcttggagtgatgatggtaactgatgaacagagaactttccagaacttgggtcctgtcttcctccctgaacctagacagtttcacccctcctcctgtacccaacccatccccaccccatatgggagatgcttgcccatgtgtttcatcaatcagaagtcctcctccccagcacattcggatttaaatttctggtctctccggctttctgtgctttaactatctttgctaaagtctcttgctacattgcctaaatccatttgtttctttggaccaaaaatgttagtttaccagaccgatagtggtccttaggacagattttagaccagtaaacttatctttggtgagaaatgaaatacaaatgctatagaaaaatttcaaagttgttaaaagccacttcattaaatgctgggattggaagctgttggtctcctgacctgactctgggagccaacaaaacatcaggctcccaaactgctgggaaatttgtttctgtctgcaagggatagtgcgtgcataatccctgctgctgcttctcttgggacctgatttgcaccatccttagtttatgcggaaaggggaagcaatgggtggaggcagtggccttctccttaattttggcttggcttctgatccttttcccaactagaagtcttaagccacttttcgctgaaaatgaaatccctcccttatccatggtagttttaaatttggtttcattgaagaaatagatttaggcaaagagcctgtgctcttctctggccagactgctgttgaagttcctggagagcaaatgttaagacagagcacttaagagctttcaggaggtactgaatgagactggattctgttgtaagccgacagttcaagtctttatttcccaggttggtggggagtgaggagaccctactttcattccctttcctagcccactgatttttgggggcaggtcagggagaaagcattttttttttttttttgagtctcactctgttgcccaggctggagtgcagtggtacagtcttggcttactgcaacctccacctcccaggttcaagctattctcctgccttagcctccagagtagctgggattataggcgcccaccaccacaccaggctaatttttgtatttttagtagagacggggttttaccatgttcaccaggctggtcttgaactcttgaccttatgatccgcccgcctcagcttcccaaagtgctgggattacaggcgtgagccaccacacccagcaggagaaaccattttctaggctctttaggaaggaccatgcaatgagtaggtgatgtatttgagccctcacagtctttacacccctagaggagctggaggacttaagagtttgctgcagaagcgtggccaagcacaaaacacatgatcaggaaagcagagtgttttcccattaccaatggatgaactatgcaaaccctaaacgccttggcagacacctcccaccccttacccctcccatgcagctgaaaaatctgagactagaaccaatcatgactctggatggcagagggaaacctctaaagggacttattacattggtacagacatatttatgctttcttccatcaccaaccactaaacccctttggaggaatgaaataactgcataaactagtcaactgaacactgggccacttacctcaatgttatacaaagtcctggatgatttgattctgaaccacagcctttgcaggagttgggggaatcagatttgctcatgaagacatccctttccacttttgtcatgggcagtaaatactatagtttacaatgcctaccaattagcaaaggatcattcattcagctactcagttcctctgtaaaacaggtctatgtatgtgcaattcagctaagatctagcagtaacttaagggcagaagctggctctctacttacaacctgctttctctgctgaagccttacctcctcttcagtttccctcctagacacaaatcgaaaataatatactgatagctggttagtaacctcagtaagaattaaaactgaggttgtttactcattttgcctttaaatcttttatccccttttggtgaaggtttccctttaggaaaaaaggtgtcaaacaaccctgattttttttttttttgcatcatttttattacaccaaattaaagttgggagttccaagatcccattccagttaatatttaaccaaggtctaaaatttgattttttttaaatctttgaatcctcccttctgcccctcatggatccttggttttaatgatatggaaacatctaattcttagaattattccgtagcttttgctgattactctgagatttcagttaagacttgtttcaaaagacagatagctgactggttcataatacattggaatagttggatccaaactaataagaataagctgtacaggaactagtgctcaatatacattgtataaatttgtggaaatctcttggatgtgaattgttacttcaagtggcttttattaagattttctcagacttacttggaggttaaagcaaacccaaatgtgtattattttgttacagagctctgctttataattttgtaataaagtttcaatacagacacc

SEQ ID NO: 26330 - DNA, 1100 bp, Artificial Sequence
  derived and/or modified sequence
aggttgcagttgactgcggttggttcaggctgagttgtttgggaagtacaaattttgcccagcgtgagtcagcactgccctgggtaaactccctgctgtgttgcaatcttgcttaccaaagatacatccccaggcggcaccattcacttcacatgaaagccgctgctcttggttcctgagatgatctcatctgaacatggctccagcgacctcagccacaggaactagagacagcttgctttctgtcgtggcaatgttttgaaactggcaaaatcagattttatcatgtgggcaacctgctgcaactggttctgcctggatggacagcctgaggaggtcccaccaccccagggagccaggatgcaggcctattccaaccctgggtacagctccttcccttccccaacaggcttggaaccaagctgcaagtcctgtggggctcactttgcaaacacggccaggaagcagacctgcttggactgtaagaaaaatttttgcatgacctgttcgagccaagtagggaatgggccccgcctctgccttctctgccaacggtttcgagctacagcctttcagcgagaggagctcatgaagatgaaggtgaaggacttgagggactatctcagcctccatgacatctctaccgaaatgtgccgggagaaagaagagctggtgctcttggtccttggccagcagcctgtaatctcccaggaggacaggactcgtgcctccaccttgtccccagactttcctgagcagcaggccttcctgacccagcctcactccagcatggttccacctacctcacccaacctcccctcttcatctgcacaagccacctctgttcccccagcccaggttcaggagaatcagcaggccaatggccatgtgtctcaggatcaagaggaacccgtctacctggagagcgtggccagagtacctgctgaggatgagacccagtctattgactcagaggacagctttgtcccaggccgaagggcctctctgtctgacctgactgacctggaggacattgaaggcctgacagtgcggcagctgaaagagatcttggctcgcaactttgtcaactacaagggctg

SEQ ID NO: 26331 - DNA, 489 bp, Artificial Sequence
  derived and/or modified sequence
aaggagttcaagttgcttgccagactaacttacttttaaaagtaagcagccttccaagttaagagatgattttaaatttcagattttatcatgtgggcaacctgctgcaactggttctgcctggatggacagcctgaggaggtcccaccaccccagggagccaggatgcaggcctattccaaccctgggtacagctccttcccttccccaacaggcttggaaccaagctgcaagtcctgtggggctcactttgcaaacacggccaggaagcagacctgcttggactgtaagaaaaatttttgcatgacctgttcgagccaagtagggaatgggccccgcctctgccttctctgccaacggtttcgagctacagcctttcagcgagaggagctcatgaagatgaaggtgaaggacttgagggactatctcagcctccatgacatctctaccgaaatgtgccgggagaaagaagagctggtgctcttggtc

SEQ ID NO: 26332 - DNA, 893 bp, Artificial Sequence
  derived and/or modified sequence
gtcagggtgggtacctcaggcaggtttgctggaaaattccagtaaacagtttcaaaggagttcaagttgcttgccagactaacttacttttaaaagtaagcagccttccaagttaagagatgattttaaatttcagggaaagtggaagaggagaccctagcaggcttcaagcaagctctgtaggacagcagttagacactgtttttgaggactaaattgccaagtctgtcttttaagaagagggtgaggggagtttgggaaggaatgttcaagccctgagtgaagatccaataattttctttcaagatcagaaggagattttatcatgtgggcaacctgctgcaactggttctgcctggatggacagcctgaggaggtcccaccaccccagggagccaggatgcaggcctattccaaccctgggtacagctccttcccttccccaacaggcttggaaccaagctgcaagtcctgtggggctcactttgcaaacacggccaggaagcagacctgcttggactgtaagaaaaatttttgcatgacctgttcgagccaagtagggaatgggccccgcctctgccttctctgccaacggtttcgagctacagcctttcagcgagaggagctcatgaagatgaaggtgaaggacttgagggactatctcagcctccatgacatctctaccgaaatgtgccgggagaaagaagagctggtgctcttggtccttggccagcagcctgtaatctcccaggaggacaggactcgtgcctccaccttgtccccagactttcctgagcagcaggccttcctgacccagcctcactccagcatggttccacctacctcacccaacctcccctcttcatctgcacaagccacctctgttcccccag

SEQ ID NO: 26333 - DNA, 720 bp, Artificial Sequence
  derived and/or modified sequence
gggccgggccggctggggatgggtgggagggggggccgacttcctggggccgcccgtgaggatgtcgcgaccgcccccgggtgcccctcagccccagagacgccgccgcggcggagtccgcagcctccctgcctgaggcgtccgcggccgggatccggcccctcccctcgcctcctctcctaggtgccggccgggagggcggccgcagcagaactttgggggaagtgagaactgtgagcacaataatcttcagagaatgcacagtcctttgggtatttgtctactcatcagctgcttagtcagatggagtgttttcctaagtactactgaagtacacagttcagtctttattttgaaatctctccttctgccttctctccctcttccattactttgattaccttgatgggacattcaagctgtgcagtcgtatccttttatttctatagcctgcagaaaccaggttgaagattaactgtaggtgaacaggtaatcttatctacttggctagaaatcacccttcaagatgaaacacgtgttgacaaaggccccctagacttggggacatgaacaaagattttatcatgtgggcaacctgctgcaactggttctgcctggatggacagcctgaggaggtcccaccaccccagggagccaggatgcaggcctattccaaccctgggtacagctccttcccttccccaacaggcttggaaccaa

SEQ ID NO: 26334 - DNA, 984 bp, Artificial Sequence
  derived and/or modified sequence
atgtgggccacctgctgcaactggttctgcctggacggccagcccgaggaggtgccccccccccagggcgccagaatgcaggcctacagcaaccccggctacagcagcttccccagccccaccggcctggagcccagctgcaagagctgcggcgcccacttcgccaacaccgccagaaagcagacctgcctggactgcaagaagaacttctgcatgacctgcagcagccaggtgggcaacggccccagactgtgcctgctgtgccagagattcagagccaccgccttccagagagaggagctgatgaagatgaaggtgaaggacctgagagactacctgagcctgcacgacatcagcaccgagatgtgcagagagaaggaggagctggtgctgctggtgctgggccagcagcccgtgatcagccaggaggacagaaccagagccagcaccctgagccccgacttccccgagcagcaggccttcctgacccagccccacagcagcatggtgccccccaccagccccaacctgcccagcagcagcgcccaggccaccagcgtgccccccgcccaggtgcaggagaaccagcagagcatcgacagcgaggacagcttcgtgcccggcagaagagccagcctgagcgacctgaccgacctggaggacatcgagggcctgaccgtgagacagctgaaggagatcctggccagaaacttcgtgaactacaagggctgctgcgagaagtgggagctgatggagagagtgaccagactgtacaaggaccagaagggcctgcagcacctgggcggcgccgtgcccagcggcctggaggagaacctgtgcaagatctgcatggacagccccatcgactgcgtgctgctggagtgcggccacatggtgacctgcaccaagtgcggcaagagaatgaacgagtgccccatctgcagacagtacgtgatcagagccgtgcacgtgttcagaagctag

SEQ ID NO: 26335 - DNA, 1092 bp, Artificial Sequence
  derived and/or modified sequence
atgtgggccacctgctgcaactggttctgcctggacggccagcccgaggaggtgccccccccccagggcgccagaatgcaggcctacagcaaccccggctacagcagcttccccagccccaccggcctggagcccagctgcaagagctgcggcgcccacttcgccaacaccgccagaaagcagacctgcctggactgcaagaagaacttctgcatgacctgcagcagccaggtgggcaacggccccagactgtgcctgctgtgccagagattcagagccaccgccttccagagagaggagctgatgaagatgaaggtgaaggacctgagagactacctgagcctgcacgacatcagcaccgagatgtgcagagagaaggaggagctggtgctgctggtgctgggccagcagcccgtgatcagccaggaggacagaaccagagccagcaccctgagccccgacttccccgagcagcaggccttcctgacccagccccacagcagcatggtgccccccaccagccccaacctgcccagcagcagcgcccaggccaccagcgtgccccccgcccaggtgcaggagaaccagcaggccaacggccacgtgagccaggaccaggaggagcccgtgtacctggagagcgtggccagagtgcccgccgaggacgagacccagagcatcgacagcgaggacagcttcgtgcccggcagaagagccagcctgagcgacctgaccgacctggaggacatcgagggcctgaccgtgagacagctgaaggagatcctggccagaaacttcgtgaactacaagggctgctgcgagaagtgggagctgatggagagagtgaccagactgtacaaggaccagaagggcctgcagcacctggtgagcggcgccgaggaccagaacggcggcgccgtgcccagcggcctggaggagaacctgtgcaagatctgcatggacagccccatcgactgcgtgctgctggagtgcggccacatggtgacctgcaccaagtgcggcaagagaatgaacgagtgccccatctgcagacagtacgtgatcagagccgtgcacgtgttcagaagctag

SEQ ID NO: 26336 - DNA, 1068 bp, Artificial Sequence
  derived and/or modified sequence
atgtgggccacctgctgcaactggttctgcctggacggccagcccgaggaggtgccccccccccagggcgccagaatgcaggcctacagcaaccccggctacagcagcttccccagccccaccggcctggagcccagctgcaagagctgcggcgcccacttcgccaacaccgccagaaagcagacctgcctggactgcaagaagaacttctgcatgacctgcagcagccaggtgggcaacggccccagactgtgcctgctgtgccagagattcagagccaccgccttccagagagaggagctgatgaagatgaaggtgaaggacctgagagactacctgagcctgcacgacatcagcaccgagatgtgcagagagaaggaggagctggtgctgctggtgctgggccagcagcccgtgatcagccaggaggacagaaccagagccagcaccctgagccccgacttccccgagcagcaggccttcctgacccagccccacagcagcatggtgccccccaccagccccaacctgcccagcagcagcgcccaggccaccagcgtgccccccgcccaggtgcaggagaaccagcaggccaacggccacgtgagccaggaccaggaggagcccgtgtacctggagagcgtggccagagtgcccgccgaggacgagacccagagcatcgacagcgaggacagcttcgtgcccggcagaagagccagcctgagcgacctgaccgacctggaggacatcgagggcctgaccgtgagacagctgaaggagatcctggccagaaacttcgtgaactacaagggctgctgcgagaagtgggagctgatggagagagtgaccagactgtacaaggaccagaagggcctgcagcacctgggcggcgccgtgcccagcggcctggaggagaacctgtgcaagatctgcatggacagccccatcgactgcgtgctgctggagtgcggccacatggtgacctgcaccaagtgcggcaagagaatgaacgagtgccccatctgcagacagtacgtgatcagagccgtgcacgtgttcagaagctag

SEQ ID NO: 26337 - DNA, 816 bp, Artificial Sequence
  derived and/or modified sequence
atgtgggccacctgctgcaactggttctgcctggacggccagcccgaggaggtgccccccccccagggcgccagaatgcaggcctacagcaaccccggctacagcagcttccccagccccaccggcctggagcccagctgcaagagctgcggcgcccacttcgccaacaccgccagaaagcagacctgcctggactgcaagaagaacttctgcatgacctgcagcagccaggtgggcaacggccccagactgtgcctgctgtgccagagattcagagccaccgccttccagagagaggagctgatgaagatgaaggtgaaggacctgagagactacctgagcctgcacgacatcagcaccgagatgtgcagagagaaggaggagctggtgctgctggtgctgggccagcagcccgtgatcagccaggaggacagaaccagagccagcaccctgagccccgacttccccgagcagcaggccttcctgacccagccccacagcagcatggtgccccccaccagccccaacctgcccagcagcagcgcccaggccaccagcgtgccccccgcccaggtgcaggagaaccagcaggccaacggccacgtgagccaggaccaggaggagcccgtgtacctggagagcgtggccagagtgcccgccgaggacgagacccagagcatcgacagcgaggacagcttcgtgcccggcagaagagccagcctgagcgacctgaccgacctggaggacatcgagggcctgaccgtgagacagctgaaggagatcctggccagaaacttcgtgaactacaagggctag

SEQ ID NO: 26338 - DNA, 402 bp, Artificial Sequence
  derived and/or modified sequence
atgtgggccacctgctgcaactggttctgcctggacggccagcccgaggaggtgccccccccccagggcgccagaatgcaggcctacagcaaccccggctacagcagcttccccagccccaccggcctggagcccagctgcaagagctgcggcgcccacttcgccaacaccgccagaaagcagacctgcctggactgcaagaagaacttctgcatgacctgcagcagccaggtgggcaacggccccagactgtgcctgctgtgccagagattcagagccaccgccttccagagagaggagctgatgaagatgaaggtgaaggacctgagagactacctgagcctgcacgacatcagcaccgagatgtgcagagagaaggaggagctggtgctgctggtgtag

SEQ ID NO: 26339 - DNA, 570 bp, Artificial Sequence
  derived and/or modified sequence
atgtgggccacctgctgcaactggttctgcctggacggccagcccgaggaggtgccccccccccagggcgccagaatgcaggcctacagcaaccccggctacagcagcttccccagccccaccggcctggagcccagctgcaagagctgcggcgcccacttcgccaacaccgccagaaagcagacctgcctggactgcaagaagaacttctgcatgacctgcagcagccaggtgggcaacggccccagactgtgcctgctgtgccagagattcagagccaccgccttccagagagaggagctgatgaagatgaaggtgaaggacctgagagactacctgagcctgcacgacatcagcaccgagatgtgcagagagaaggaggagctggtgctgctggtgctgggccagcagcccgtgatcagccaggaggacagaaccagagccagcaccctgagccccgacttccccgagcagcaggccttcctgacccagccccacagcagcatggtgccccccaccagccccaacctgcccagcagcagcgcccaggccaccagcgtgcccccctag

SEQ ID NO: 26340 - DNA, 138 bp, Artificial Sequence
  derived and/or modified sequence
atgtgggccacctgctgcaactggttctgcctggacggccagcccgaggaggtgccccccccccagggcgccagaatgcaggcctacagcaaccccggctacagcagcttccccagccccaccggcctggagccctag

SEQ ID NO: 26341 - DNA, 489 bp, Artificial Sequence
  derived and/or modified sequence
atgcccagatggtacttcctgctggccagatgcttcggctgcgccgtgatcgaggacacctggcactacttcctgcacagactgctgcaccacaagagaatctacaagtacatccacaaggtgcaccacgagttccaggcccccttcggcatggaggccgagtacgcccaccccctggagaccctgatcctgggcaccggcttcttcatcggcatcgtgctgctgtgcgaccacgtgatcctgctgtgggcctgggtgaccatcagactgctggagaccatcgacgtgcacagcggctacgacatccccctgaaccccctgaacctgatccccttctacgccggcagcagacaccacgacttccaccacatgaacttcatcggcaactacgccagcaccttcacctggtgggacagaatcttcggcaccgacagccagtacaacgcctacaacgagaagagaaagaagttcgagaagaagaccgagtag

SEQ ID NO: 26342 - DNA, 489 bp, Artificial Sequence
  derived and/or modified sequence
atgccacgctggtactttctattggcccggtgtttcgggtgtgccgtaatagaggacacctggcactacttcctgcaccgactccttcatcataaacgcatatataagtacatccataaggttcaccacgagttccaagcaccctttggcatggaagcagaatacgcccacccgctggagacactgatcctcggcacaggatttttcatcgggatcgtgttgctgtgcgaccacgtaattttactgtgggcatgggtgaccattcgactgctagaaaccatcgacgtgcacagcggttacgatatccctctgaaccctcttaatctcatccccttttacgctggttccaggcaccacgattttcatcacatgaatttcatcggcaactatgcttccaccttcacatggtgggaccggatctttggcacagactcacagtacaatgcttataatgaaaaaaggaagaaattcgaaaaaaagaccgagtag

SEQ ID NO: 26343 - DNA, 489 bp, Artificial Sequence
  derived and/or modified sequence
atgccccgctggtacttcctgctggcccgctgcttcggctgtgctgtgattgaggacacctggcactacttcctgcaccggctgctgcaccacaagaggatctacaagtacatccacaaggtgcaccacgagttccaggcccccttcggcatggaggccgagtatgcccaccccctggagaccctcatcctgggcaccggcttcttcatcggcatcgtgctgctgtgtgaccacgtgatcctgctgtgggcctgggtgaccatccggctgctggagaccattgatgtgcacagcggctatgacatccccctgaaccccctgaacctgatccccttctacgccggcagccgccaccacgacttccaccacatgaacttcatcggcaactatgccagcaccttcacctggtgggaccgcatctttggaacagacagccagtacaatgcctacaatgagaagaggaagaagtttgagaagaagacagaatag

SEQ ID NO: 26344 - DNA, 489 bp, Artificial Sequence
  derived and/or modified sequence
atgccccggtggtacttcctgctggcccggtgcttcggctgcgccgtgatcgaggacacttggcattactttctgcatagactgcttcaccataagagaatttataaatatatccataaggtgcaccatgagttccaagcaccattcggtatggaagctgagtacgcccaccccctagaaactctgatcctgggaactggcttttttattggtattgtgctgctttgtgaccatgtcatattattgtgggcttgggtgaccattcgactgctggagaccatcgacgtgcatagcgggtatgacataccgctcaatccgctgaatctgataccgttttacgcgggctccagacaccacgattttcatcacatgaactttattgggaattacgctagtacctttacttggtgggaccggatattcggaacagactcacagtacaatgcttacaatgagaaacggaagaaattcgagaaaaaaacggaatag

SEQ ID NO: 26345 - DNA, 489 bp, Artificial Sequence
  derived and/or modified sequence
atgcccaggtggtatttcctgctcgccaggtgttttggatgtgcagtcatcgaggatacatggcattactttctgcatcggcttttgcaccacaagagaatttataagtatattcacaaagttcatcatgagtttcaggctccattcgggatggaagctgagtacgcccacccccttgagacactgattcttgggaccgggttcttcatcggcattgtcctcctatgcgatcatgtcattctgctgtgggcctgggtgaccataaggcttctggaaactattgacgttcactctgggtatgatatacccctgaatcccttgaacctgatccctttttatgccggttctaggcaccatgacttccaccacatgaattttattggaaactatgctagcacgtttacctggtgggatagaatatttggtaccgatagccagtacaacgcctacaacgagaagagaaagaaatttgagaagaagacggagtag

SEQ ID NO: 26346 - protein, 280 aa, Artificial Sequence
  derived and/or modified sequence
MARFWVCVAGAGFFLAFLVLHSRFCGSPVLRNFTFAVSWRTEKILYRLDVGWPKHPEYFTGTTFCVAVDSLNGLVYIGQRGDNIPKILVFTEDGYFLRAWNYTVDTPHGIFAASTLYEQSVWITDVGSDFMILWLHGENGTGPAKFNIPHSVTLDSAGRVWVADRGNKRIQVFDKDTGEWLGAWNNCFTEEGPSSVRFTPDGKYLIVAQLNLSRLSVVAAPPVGSIGECSVISTIQLADQVLPHLLEVDRKTGAVYVAEIGAKQVQKYVPLNSYVPSFGS

SEQ ID NO: 26347 - protein, 153 aa, Artificial Sequence
  derived and/or modified sequence
MARFWVCVAGAGFFLAFLVLHSRFCGSPVLRNFTFAVSWRTEKILYRLDVGWPKHPEYFTGTTFCVAVDSLNGLVYIGQRGDNIPKILVFTEDGYFLRAWNYTVDTPHGIFAASTLYEQSVWITDVGSDFMILWLHGENGTGPAKFNIPHSVT

SEQ ID NO: 26348 - DNA, 843 bp, Artificial Sequence
  derived and/or modified sequence
atggcacgtttctgggtgtgcgtcgcaggcgcaggcttttttctggcttttctggttctgcatagtagattctgtgggagcccagtcctgaggaactttacattcgccgtgagttggagaacagagaaaattctgtacaggctggacgtcggttggcctaagcatcccgagtacttcacaggcactacgttttgcgtggcagtggactctctgaacgggctcgtttacataggacaaagaggggacaacattcccaagattcttgtattcaccgaggacggctactttctcagggcctggaattacactgttgacactccacacggcatcttcgccgcttccacactgtatgagcagagcgtgtggattaccgacgttgggtcggatttcatgatcctgtggcttcatggcgaaaacgggactggcccagccaaatttaatatccctcactccgtgacactggactctgcgggtcgcgtctgggtggccgaccgtggtaataagaggatccaggtgttcgacaaggatactggcgagtggcttggcgcatggaacaactgcttcacggaagaagggccatcttctgtccgatttaccccagacggaaagtaccttattgtcgctcagctgaacctctctcggcttagtgtggtggctgctcccccagtcgggtctataggtgagtgttccgtgatttccactattcaactcgccgaccaggttttgccccatctgctagaagtggacaggaagaccggcgcagtatacgtggccgaaattggtgcaaaacaggttcagaagtacgtccctttgaacagttacgtgccctctttcggctcgtag

SEQ ID NO: 26349 - DNA, 462 bp, Artificial Sequence
  derived and/or modified sequence
atggctcgtttttgggtttgcgtggcgggtgccggattctttcttgcctttctggtgctgcacagtcggttttgtggctcacccgtgcttaggaactttactttcgccgtaagctggagaacagaaaaaatactgtaccgcttggatgtgggatggcctaagcaccccgagtacttcaccggcacaaccttttgtgtggccgtggactctctgaatggcctcgtctacatcggacaaagaggagacaacatccctaaaatcctcgtgttcaccgaagatggatacttcttgcgcgcttggaattacactgtggacaccccacatggcatctttgccgcttctaccctctacgagcagagcgtttggatcactgatgtggggagtgatttcatgatcctctggctgcatggcgagaacggtactgggcctgctaaattcaatattccacactccgtcacatag

SEQ ID NO: 26350 - DNA, 843 bp, Artificial Sequence
  derived and/or modified sequence
atggcacgcttttgggtttgtgtggccggtgccggatttttcctcgcgttcctcgtgctgcactccaggttttgcggatctcctgtgctgcgaaactttactttcgctgtgtcttggcggacggaaaaaatcctgtataggctggacgttggatggcctaagcatccagaatacttcacaggcacaacattttgcgtggctgtagactccctaaatggactcgtctacattggacagcgcggcgataacatcccaaagatccttgtctttaccgaagacgggtattttctgagggcttggaattatacagttgacacgccccacggcattttcgccgcctccacattgtacgaacaatctgtctggattacggatgtgggatctgactttatgattttgtggcttcacggggagaatgggactggacctgctaaattcaacatccctcactcagtaaccctcgactctgctggacgcgtttgggttgcggatcggggaaacaagagaatacaagtttttgacaaggacactggtgagtggctcggcgcgtggaacaattgttttacagaagagggcccaagttcggtccgcttcacgcccgatggtaagtatctaatcgtagcgcagctgaacctgagccggctgtctgtcgtcgcggcccctccagtcggtagcattggcgagtgctccgtgatcagtaccattcagttggcagaccaggtgcttcctcatctcctcgaggtggatagaaaaaccggagcggtatacgtggccgagatcggagccaagcaggtgcaaaagtatgttcccctgaatagttatgttccctcctttggatcttag

SEQ ID NO: 26351 - DNA, 462 bp, Artificial Sequence
  derived and/or modified sequence
atggccagattctgggtatgtgtcgccggggccggcttttttctggcttttctggtcctccattctagattctgcggaagtccagtgctgagaaattttacttttgctgtctcatggcgcacagaaaaaatactgtacaggctcgacgttggttggccaaaacatcctgaatactttaccggaacaactttctgcgtcgcggtggactctcttaatggcctggtgtatattggccaaaggggggataacataccaaaaatcctcgtatttacagaagacggatactttctacgtgcctggaactatacggtcgatactcctcacgggatcttcgctgcatccacattgtatgagcagtccgtctggattacggatgtgggttcagacttcatgatactgtggctgcatggcgaaaatgggacaggccccgcaaaattcaatattccccacagcgtgacatag

SEQ ID NO: 26352 - DNA, 843 bp, Artificial Sequence
  derived and/or modified sequence
atggcccgcttttgggtatgcgtagctggtgctggtttttttctcgcctttctcgtgctccactcccggttttgcggttcacctgttctgagaaatttcacatttgcggtcagttggcgaaccgagaagattctttaccgtttggatgtgggttggccaaagcacccagagtacttcactgggactacattttgcgtcgcagtcgactccttgaacgggctagtgtacattggacaaaggggtgacaatatacctaaaatcctggtttttacagaagatggctactttctgcgagcttggaactacacagtagatacccctcacggtattttcgcagcttcaacactgtatgagcagagtgtgtggattaccgacgtgggttccgacttcatgatcctgtggctccacggagagaacggcacaggtcccgccaagtttaacattcctcacagcgtgactctggattccgccgggagagtgtgggtagcagataggggaaataagagaattcaggttttcgacaaagacaccggagagtggttaggtgcatggaacaactgtttcaccgaggagggcccctctagcgtccggtttacacctgacgggaaatatctcatcgtggctcaattaaatttatctaggttatccgttgttgccgctccgcctgttggatctattggagagtgtagcgtcatctctactatacagctcgctgaccaggtcctcccccatctcctcgaagtcgatcgcaagacaggcgcagtctatgtggctgagattggcgccaaacaggtacagaagtacgttcctctgaattcctatgttccgtccttcgggtcctag

SEQ ID NO: 26353 - DNA, 462 bp, Artificial Sequence
  derived and/or modified sequence
atggccagattctgggtatgtgtcgccggggccggcttttttctggcttttctggtcctccattctagattctgcggaagtccagtgctgagaaattttacttttgctgtctcatggcgcacagaaaaaatactgtacaggctcgacgttggttggccaaaacatcctgaatactttaccggaacaactttctgcgtcgcggtggactctcttaatggcctggtgtatattggccaaaggggggataacataccaaaaatcctcgtatttacagaagacggatactttctacgtgcctggaattatactgtagacacaccccacggtatcttcgccgctagcactttgtacgagcagtccgtttggatcaccgatgtgggctcagattttatgatcttatggttgcatggagaaaatgggaccggtccagccaagtttaacatcccccacagcgtgacctag

SEQ ID NO: 26354 - DNA, 3267 bp, Artificial Sequence
  derived and/or modified sequence
acctgacatgagggcggggaccccgaaatgcacacgaagtccggaactggtcttctgtgattttcattcgccctggtctctgttccctttcgtactcaaagctcgtgcatccagggaggggaaaccggagatagggtcttcgggccccgggcagaccctctgtgccgctgcaaaccgttgcagcctgaggctgtcaggtcctcccccagacacctgcggaccctccctctcctggcttcccgtctggtcatggcgagattctgggtctgcgtagccggtgctggcttctttcttgcatttttggttttgcattcgcgtttttgtggctctccagttttgaggaactttacttttgcagtttcctggagaactgagaaaattctttaccggctggatgtgggttggcctaagcacccagaatattttaccggaacaacattttgtgttgcagttgactccctcaatggattggtttacataggtcaaagaggggataacatcccaaagatattagtgttcacagaggatggatatttcctacgagcctggaattatacagttgacacacctcatggtatatttgcagccagtactctatatgaacaatccgtctggatcacggatgtaggaagtgatttcatgatcctttggctgcatggagaaaatgggacagggcctgctaagttcaacatacctcacagtgttacatgattcagctggtcgggtgtgggttgctgaccgaggaaataaaagaatccaagtatttgataaagacactggggagtggttaggagcatggaataattgtttcacagaagagggaccttcttcagtcaggtttactcctgatgggaagtacttgattgtggcccagctgaatcttagcaggctctcagtcgtagcagcacccccagtgggaagcattggggagtgttctgtgatcagcacaatccaactagcagatcaagttttgccacatctcctagaagtcgacagaaagactggagcagtctatgtagcagaaattggagcaaaacaagtacaaaaatatgtccctttgaatagctatgttccttcatttggttcataatgtttctttcctgggaatatttcaagtggcagttcagattctcaattcactaagtgcttaaaaatgatgttcaagcacaagaatttatttttctagtataaaagatctagtatcagaaagatttgtttttgtatcattaagaatcttatattttgttgccctcttgggacttagttttatttgtaagtgcataaggatattttaatgaaaggaaagtaactaaaaaatggggttgggaagagggactaaggtggtaacctcattatttgccctggtagactgattctccctgggtaaaaaaaatgggaataaaaatgagcttgcatgataatttattaaatttcatgtgaagaactccagacctccagattgtgcaactaacataaaatgagctgcttgagagattgtaaataagatgaactattgattaatttgagtacccacagagtgctgtgtcttgacgacttaaaaatgaaaaagcaggattgccttttgagtagcttgcagtctagtggggagacaagcaggcaaacagtcacaacacagcaaaagcgaccttggagcatagtgggacttttggagtaggagtgctgcatttgactgagggaatcatggatacttcgcaggagaagtgaatttgagctcagacttgaaaactgaggaggagcttaccaagggacaaggaggagaaaacaataatttccaagtaaagaaggtataaaaagttagaagtgtactgtaaactttgataggcttttaggccttttttaaagcccaacttggcttctgtccattacctataagatatttaatgtcagtcagcctttaaatgtaggaataaaatggctggcatctaagcactttagtaaaagaggtttttacaaataactaaggattgtagagcttccttctctttttttttctttttctttcttttgttttacatgaactcaacttattcctaacatttgtctacctcaaagaaatttcaagattatttagataacatggatatgtgccaaatcctttgagctgttaagatgataatttcctgctttcctcctacatcttctcctcccactccctcctttggtgtgaatattggcttcccaattaagacctttttttttttttttccagtttgttttagcttattataggttttggaggaactttgccattttgtaatctttcaaatcattcttcacccttcctcacatcagcttcctgcttttcccagtgttttactgtaaattgtgtagcatatgacaaatcttgagctgactttcctcttcacctgttatggctggagtattttccagacctgaagggactcacacttgttttgatacttggatcacatctccgtgaggttaggaaggtaaatctaccaacaggaagccctgtactctgtattccaaggccattggtaaatgtgttggtgccactgatcggactgtatgaccttaaacaagtcaccttagttttcagtgaaatgggaatatcattgtctcctctttcatgaatgctgtgagaatcagatgtgcaacaggtacagacttgccctttgaaatctatacctctggatacattagaggcattttattaacaaaggcccttctaaatgtgctatttatttgacaataactatcagatttgccttaattttgtgtttatagcatttatcaaaacgtatcctcatagactttatgcagattaatatggtcaattgatttggataaaagaaagtaatttcagggtttgtttttaagccaggacaagaagtgcaaatgcctctttgaagcaatttaggctaaactgattttgaaatttcaaaatgttttattttactttgttttattaagccaggacaagaagtgcaaatgcctctttgaagcaattcaggctaggtaaaccgattttgccatttcaaaacgttttattttactttgttttatatcagagtcttataaaacctgctgcaaatatttctgaatgtctttgtaaaagtgtttgttagtgtacctgtgattatagtacttcacttttttcctttggattaattggttaaatgaatgagaaatgtgttatgttttttactaaaaagtataaattaaaattttggaaagaaaaggcaatattatctggctccccaattaaagtttgattttattgtc

SEQ ID NO: 26355 - DNA, 843 bp, Artificial Sequence
  derived and/or modified sequence
atggccagattctgggtgtgcgtggccggcgccggcttcttcctggccttcctggtgctgcacagcagattctgcggcagccccgtgctgagaaacttcaccttcgccgtgagctggagaaccgagaagatcctgtacagactggacgtgggctggcccaagcaccccgagtacttcaccggcaccaccttctgcgtggccgtggacagcctgaacggcctggtgtacatcggccagagaggcgacaacatccccaagatcctggtgttcaccgaggacggctacttcctgagagcctggaactacaccgtggacaccccccacggcatcttcgccgccagcaccctgtacgagcagagcgtgtggatcaccgacgtgggcagcgacttcatgatcctgtggctgcacggcgagaacggcaccggccccgccaagttcaacatcccccacagcgtgaccctggacagcgccggcagagtgtgggtggccgacagaggcaacaagagaatccaggtgttcgacaaggacaccggcgagtggctgggcgcctggaacaactgcttcaccgaggagggccccagcagcgtgagattcacccccgacggcaagtacctgatcgtggcccagctgaacctgagcagactgagcgtggtggccgccccccccgtgggcagcatcggcgagtgcagcgtgatcagcaccatccagctggccgaccaggtgctgccccacctgctggaggtggacagaaagaccggcgccgtgtacgtggccgagatcggcgccaagcaggtgcagaagtacgtgcccctgaacagctacgtgcccagcttcggcagctag

SEQ ID NO: 26356 - DNA, 462 bp, Artificial Sequence
  derived and/or modified sequence
atggccagattctgggtgtgcgtggccggcgccggcttcttcctggccttcctggtgctgcacagcagattctgcggcagccccgtgctgagaaacttcaccttcgccgtgagctggagaaccgagaagatcctgtacagactggacgtgggctggcccaagcaccccgagtacttcaccggcaccaccttctgcgtggccgtggacagcctgaacggcctggtgtacatcggccagagaggcgacaacatccccaagatcctggtgttcaccgaggacggctacttcctgagagcctggaactacaccgtggacaccccccacggcatcttcgccgccagcaccctgtacgagcagagcgtgtggatcaccgacgtgggcagcgacttcatgatcctgtggctgcacggcgagaacggcaccggccccgccaagttcaacatcccccacagcgtgacctag

SEQ ID NO: 26357 - DNA, 843 bp, Artificial Sequence
  derived and/or modified sequence
atggcccggttttgggtgtgcgtggccggggccgggttctttctggcattcctggtgttgcacagcaggttttgtgggtcccccgtgcttcgcaactttacttttgctgtttcatggagaactgaaaaaattctctacagactagatgtgggatggcccaaacaccctgaatacttcaccggcaccactttctgtgttgccgtcgattcacttaacggattggtttatataggacagcgaggagataacattccgaaaatactggtgtttaccgaggacgggtacttcctgagggcctggaattatacagtggacacaccccacgggatcttcgccgccagtactctgtatgaacagtctgtgtggattaccgatgttggtagcgacttcatgattctgtggctgcacggcgaaaatggaaccggtccagcaaaatttaacatcccacactccgtgactctcgattctgctggccgcgtctgggtcgctgacaggggaaacaaaaggattcaggtattcgataaagacacaggtgagtggctgggggcctggaataactgtttcactgaggaaggacctagttccgtacgatttacccccgatgggaaatacctcatagttgcccagttgaatctgagcagactgtccgtggtggctgcccctcctgtcggaagcattggagagtgctcagtgatcagcaccattcagctggccgaccaggttttacctcacctgctggaggtggatcggaagacaggcgccgtctatgtggccgaaattggtgctaaacaagttcaaaagtatgttcctctgaactcctacgtgcccagtttcggaagctag

SEQ ID NO: 26358 - DNA, 462 bp, Artificial Sequence
  derived and/or modified sequence
atggcaaggttctgggtatgcgtggcaggcgccggatttttcctcgcatttcttgtgttgcactcaaggttttgcggcagtccggtgttacgcaatttcacctttgccgtgtcttggaggactgaaaagatcctgtacagattggacgtgggctggccgaagcaccccgagtatttcaccggcactaccttttgcgtagcagtagattcactgaacgggctggtgtacattggacagcggggagacaatatccctaagattctcgtctttactgaagacggctactttttacgcgcttggaattacactgttgacacgccccatggaatctttgccgcttccaccctgtacgaacagagcgtgtggataaccgacgtgggctccgacttcatgattttgtggttacatggggagaatggtacgggccccgcaaagttcaatatcccacactccgttacatag

SEQ ID NO: 26359 - DNA, 843 bp, Artificial Sequence
  derived and/or modified sequence
atggcccgcttctgggtgtgtgtggccggggccggcttcttcctggccttcctggtgctgcacagccgcttctgtggcagccctgtgctgaggaacttcacctttgctgtgtcctggaggacagagaagatcctgtaccgcctggatgtgggctggcccaagcaccctgagtacttcaccggcaccaccttctgtgtggccgtggacagcctgaatggcctggtgtacatcggccagagaggagacaacatccccaagatcctggtgttcacagaagatggctacttcctgcgggcctggaactacacagtggacaccccccacggcatctttgctgccagcaccctgtatgagcagagcgtgtggatcacagatgtgggcagtgacttcatgatcctgtggctgcacggggagaatggaactggacctgccaagttcaacatcccccacagcgtgaccctggacagcgctggccgggtgtgggtggccgaccggggcaacaagaggatccaggtgtttgacaaggacacaggagagtggctgggcgcctggaacaactgcttcacagaggagggccccagctctgtgcgcttcaccccagatggcaagtacctgattgtggcccagctgaacctgagccggctgtctgtggtggccgcccctcctgtgggcagcatcggggagtgcagcgtcatcagcaccatccagctggccgaccaggtgctgccccacctgctggaggtggacaggaagacaggagctgtgtatgtggccgagatcggggccaagcaggtgcagaagtatgtgcccctgaacagctatgtgcccagctttggcagctag

SEQ ID NO: 26360 - DNA, 462 bp, Artificial Sequence
  derived and/or modified sequence
atggcccgcttctgggtgtgtgtggccggggccggcttcttcctggccttcctggtgctgcacagccgcttctgtggcagccctgtgctgaggaacttcacctttgctgtgtcctggaggacagagaagatcctgtaccgcctggatgtgggctggcccaagcaccctgagtacttcaccggcaccaccttctgtgtggccgtggacagcctgaatggcctggtgtacatcggccagagaggagacaacatccccaagatcctggtgttcacagaagatggctacttcctgcgggcctggaactacacagtggacaccccccacggcatctttgctgccagcaccctgtatgagcagagcgtgtggatcacagatgtgggcagtgacttcatgatcctgtggctgcacggggagaatggaactggacctgccaagttcaacatcccccacagcgtgacctag

SEQ ID NO: 26361 - DNA, 3275 bp, Artificial Sequence
  derived and/or modified sequence
acctgacatgagggcggggaccccgaaatgcacacgaagtccggaactggtcttctgtgattttcattcgccctggtctctgttccctttcgtactcaaagctcgtgcatccagggaggggaaaccggagatagggtcttcgggccccgggcagaccctctgtgccgctgcaaaccgttgcagcctgaggctgtcaggtcctcccccagacacctgcggaccctccctctcctggcttcccgtctggtcatggcgagattctgggtctgcgtagccggtgctggcttctttcttgcatttttggttttgcattcgcgtttttgtggctctccagttttgaggaactttacttttgcagtttcctggagaactgagaaaattctttaccggctggatgtgggttggcctaagcacccagaatattttaccggaacaacattttgtgttgcagttgactccctcaatggattggtttacataggtcaaagaggggataacatcccaaagatattagtgttcacagaggatggatatttcctacgagcctggaattatacagttgacacacctcatggtatatttgcagccagtactctatatgaacaatccgtctggatcacggatgtaggaagtgatttcatgatcctttggctgcatggagaaaatgggacagggcctgctaagttcaacatacctcacagtgttacacttgattcagctggtcgggtgtgggttgctgaccgaggaaataaaagaatccaagtatttgataaagacactggggagtggttaggagcatggaataattgtttcacagaagagggaccttcttcagtcaggtttactcctgatgggaagtacttgattgtggcccagctgaatcttagcaggctctcagtcgtagcagcacccccagtgggaagcattggggagtgttctgtgatcagcacaatccaactagcagatcaagttttgccacatctcctagaagtcgacagaaagactggagcagtctatgtagcagaaattggagcaaaacaagtacaaaaatatgtccctttgaatagctatgttccttcatttggttcataatgtttctttcctgggaatatttcaagtggcagttcagattctcaattcactaagtgcttaaaaatgatgttcaagcacaagaatttatttttctagtataaaagatctagtatcagaaagatttgtttttgtatcattaagaatcttatattttgttgccctcttgggacttagttttatttgtaagtgcataaggatattttaatgaaaggaaagtaactaaaaaatggggttgggaagagggactaaggtggtaacctcattatttgccctggtagactgattctccctgggtaaaaaaaatgggaataaaaatgagcttgcatgataatttattaaatttcatgtgaagaactccagacctccagattgtgcaactaacataaaatgagctgcttgagagattgtaaataagatgaactattgattaatttgagtacccacagagtgctgtgtcttgacgacttaaaaatgaaaaagcaggattgccttttgagtagcttgcagtctagtggggagacaagcaggcaaacagtcacaacacagcaaaagcgaccttggagcatagtgggacttttggagtaggagtgctgcatttgactgagggaatcatggatacttcgcaggagaagtgaatttgagctcagacttgaaaactgaggaggagcttaccaagggacaaggaggagaaaacaataatttccaagtaaagaaggtataaaaagttagaagtgtactgtaaactttgataggcttttaggccttttttaaagcccaacttggcttctgtccattacctataagatatttaatgtcagtcagcctttaaatgtaggaataaaatggctggcatctaagcactttagtaaaagaggtttttacaaataactaaggattgtagagcttccttctctttttttttctttttctttcttttgttttacatgaactcaacttattcctaacatttgtctacctcaaagaaatttcaagattatttagataacatggatatgtgccaaatcctttgagctgttaagatgataatttcctgctttcctcctacatcttctcctcccactccctcctttggtgtgaatattggcttcccaattaagacctttttttttttttttccagtttgttttagcttattataggttttggaggaactttgccattttgtaatctttcaaatcattcttcacccttcctcacatcagcttcctgcttttcccagtgttttactgtaaattgtgtagcatatgacaaatcttgagctgactttcctcttcacctgttatggctggagtattttccagacctgaagggactcacacttgttttgatacttggatcacatctccgtgaggttaggaaggtaaatctaccaacaggaagccctgtactctgtattccaaggccattggtaaatgtgttggtgccactgatcggactgtatgaccttaaacaagtcaccttagttttcagtgaaatgggaatatcattgtctcctctttcatgaatgctgtgagaatcagatgtgcaacaggtacagacttgccctttgaaatctatacctctggatacattagaggcattttattaacaaaggcccttctaaatgtgctatttatttgacaataactatcagatttgccttaattttgtgtttatagcatttatcaaaacgtatcctcatagactttatgcagattaatatggtcaattgatttggataaaagaaagtaatttcagggtttgtttttaagccaggacaagaagtgcaaatgcctctttgaagcaatttaggctaaactgattttgaaatttcaaaatgttttattttactttgttttattaagccaggacaagaagtgcaaatgcctctttgaagcaattcaggctaggtaaaccgattttgccatttcaaaacgttttattttactttgttttatatcagagtcttataaaacctgctgcaaatatttctgaatgtctttgtaaaagtgtttgttagtgtacctgtgattatagtacttcacttttttcctttggattaattggttaaatgaatgagaaatgtgttatgttttttactaaaaagtataaattaaaattttggaaagaaaaggcaatattatctggctccccaattaaagtttgattttattgtcacaaaa

SEQ ID NO: 26362 - DNA, 843 bp, Artificial Sequence
  derived and/or modified sequence
atggcccggttctgggtgtgcgtggccggcgccggcttcttcctggcttttctggtgcttcacagcagattctgtggttctcccgtgctgcggaacttcacgtttgcagtgagctggcggaccgaaaagattctctaccggctcgacgtgggctggccaaagcacccagaatatttcacgggtacgaccttctgtgtggctgtggactctcttaatgggctggtgtacataggccaacggggcgacaatataccaaagattctggtgttcaccgaagacggctattttcttagagcatggaattatacagttgatacccctcatggaatctttgccgctagcaccttgtatgagcagagtgtctggattactgacgtggggagtgatttcatgatcttgtggctgcatggcgaaaatggcaccggaccagcaaaattcaacataccccattccgttacccttgattcagctggaagggtgtgggtggctgataggggcaacaaacgcatacaagtctttgataaagatacaggagagtggttaggggcttggaataattgctttacagaagaagggccctccagtgttcggtttacccccgacggcaagtacttaatcgtggcgcagctgaacctgagtcgattaagtgtggtggcggcacctccagtgggatccataggagaatgtagcgtaataagtactattcagctggccgatcaagtgctgccacacttacttgaagtggacaggaagacgggcgccgtctacgtagcagaaatcggagccaagcaggtacagaagtacgtccctctgaattcttatgtgccctcgtttggatcttag

SEQ ID NO: 26363 - DNA, 462 bp, Artificial Sequence
  derived and/or modified sequence
atggcccggttctgggtgtgcgtggccggcgccggcttcttcctggccttcttagttctgcacagtaggttttgcggctcaccagtcctgagaaactttacctttgcggtgagttggcgcactgaaaaaattttgtataggctggacgtgggctggcctaagcacccagagtactttactggcactacattttgcgttgctgtggactccctgaatggcctcgtatacattggccagaggggtgataatatacctaaaatactggtcttcactgaggacggatatttcctaagagcatggaattacacagtggacacgccccatggtatttttgccgcctccactctgtacgagcagagtgtttggatcaccgacgttggaagtgattttatgatcctctggcttcatggtgagaacgggacaggacctgcaaagtttaacatcccccattctgtgacttag

SEQ ID NO: 26364 - RNA, 843 nt, Artificial Sequence
  derived and/or modified sequence
auggcacgcuuuuggguuuguguggccggugccggauuuuuccucgcguuccucgugcugcacuccagguuuugcggaucuccugugcugcgaaacuuuacuuucgcugugucuuggcggacggaaaaaauccuguauaggcuggacguuggauggccuaagcauccagaauacuucacaggcacaacauuuugcguggcuguagacucccuaaauggacucgucuacauuggacagcgcggcgauaacaucccaaagauccuugucuuuaccgaagacggguauuuucugagggcuuggaauuauacaguugacacgccccacggcauuuucgccgccuccacauuguacgaacaaucugucuggauuacggaugugggaucugacuuuaugauuuuguggcuucacggggagaaugggacuggaccugcuaaauucaacaucccucacucaguaacccucgacucugcuggacgcguuuggguugcggaucggggaaacaagagaauacaaguuuuugacaaggacacuggugaguggcucggcgcguggaacaauuguuuuacagaagagggcccaaguucgguccgcuucacgcccgaugguaaguaucuaaucguagcgcagcugaaccugagccggcugucugucgucgcggccccuccagucgguagcauuggcgagugcuccgugaucaguaccauucaguuggcagaccaggugcuuccucaucuccucgagguggauagaaaaaccggagcgguauacguggccgagaucggagccaagcaggugcaaaaguauguuccccugaauaguuauguucccuccuuuggaucuuag

SEQ ID NO: 26365 - RNA, 462 nt, Artificial Sequence
  derived and/or modified sequence
auggccagauucuggguaugugucgccggggccggcuuuuuucuggcuuuucugguccuccauucuagauucugcggaaguccagugcugagaaauuuuacuuuugcugucucauggcgcacagaaaaaauacuguacaggcucgacguugguuggccaaaacauccugaauacuuuaccggaacaacuuucugcgucgcgguggacucucuuaauggccugguguauauuggccaaaggggggauaacauaccaaaaauccucguauuuacagaagacggauacuuucuacgugccuggaacuauacggucgauacuccucacgggaucuucgcugcauccacauuguaugagcaguccgucuggauuacggauguggguucagacuucaugauacuguggcugcauggcgaaaaugggacaggccccgcaaaauucaauauuccccacagcgugacauag

SEQ ID NO: 26366 - RNA, 843 nt, Artificial Sequence
  derived and/or modified sequence
auggcccgcuuuuggguaugcguagcuggugcugguuuuuuucucgccuuucucgugcuccacucccgguuuugcgguucaccuguucugagaaauuucacauuugcggucaguuggcgaaccgagaagauucuuuaccguuuggauguggguuggccaaagcacccagaguacuucacugggacuacauuuugcgucgcagucgacuccuugaacgggcuaguguacauuggacaaaggggugacaauauaccuaaaauccugguuuuuacagaagauggcuacuuucugcgagcuuggaacuacacaguagauaccccucacgguauuuucgcagcuucaacacuguaugagcagaguguguggauuaccgacguggguuccgacuucaugauccuguggcuccacggagagaacggcacaggucccgccaaguuuaacauuccucacagcgugacucuggauuccgccgggagaguguggguagcagauaggggaaauaagagaauucagguuuucgacaaagacaccggagagugguuaggugcauggaacaacuguuucaccgaggagggccccucuagcguccgguuuacaccugacgggaaauaucucaucguggcucaauuaaauuuaucuagguuauccguuguugccgcuccgccuguuggaucuauuggagaguguagcgucaucucuacuauacagcucgcugaccagguccucccccaucuccucgaagucgaucgcaagacaggcgcagucuauguggcugagauuggcgccaaacagguacagaaguacguuccucugaauuccuauguuccguccuucggguccuag

SEQ ID NO: 26367 - RNA, 462 nt, Artificial Sequence
  derived and/or modified sequence
auggccagauucuggguaugugucgccggggccggcuuuuuucuggcuuuucugguccuccauucuagauucugcggaaguccagugcugagaaauuuuacuuuugcugucucauggcgcacagaaaaaauacuguacaggcucgacguugguuggccaaaacauccugaauacuuuaccggaacaacuuucugcgucgcgguggacucucuuaauggccugguguauauuggccaaaggggggauaacauaccaaaaauccucguauuuacagaagacggauacuuucuacgugccuggaauuauacuguagacacaccccacgguaucuucgccgcuagcacuuuguacgagcaguccguuuggaucaccgaugugggcucagauuuuaugaucuuaugguugcauggagaaaaugggaccgguccagccaaguuuaacaucccccacagcgugaccuag

SEQ ID NO: 26368 - DNA, 228 bp, Artificial Sequence
  derived and/or modified sequence
atgatcttcacccccttcctgccccccgccgacctgaacgtgaagggcctgcagaacgaccccgaggagtgggtggccgtgagcgacgccaccgaggaccccagcggcggcaccggcctgcccagagagcccgccctgctgagaggcagctggagaagcagattccagagagccctggcctgcttcaccaagtgcttcagaggcggctacagagccctgggcatctag

SEQ ID NO: 26369 - DNA, 228 bp, Artificial Sequence
  derived and/or modified sequence
atgatttttaccccattcctccccccagccgatttaaacgtgaagggactccagaacgatcctgaggagtgggtggctgtttcagacgcgactgaagacccttctggtggcacaggactcccccgcgagcccgctctcttgcggggttcttggcgaagtaggttccagcgcgccctggcttgtttcacaaaatgttttcggggaggatacagggctctgggcatctag

SEQ ID NO: 26370 - DNA, 228 bp, Artificial Sequence
  derived and/or modified sequence
atgatcttcacccccttcctgcccccagctgacctgaatgtgaagggcctgcagaatgaccctgaggagtgggtggccgtgtctgatgccacagaggaccccagcggcggcaccggcctgccccgggagcccgccctgctgcggggctcctggaggagccgcttccagagggccctggcctgcttcaccaagtgcttccggggcggctaccgggccctgggcatctag

SEQ ID NO: 26371 - DNA, 228 bp, Artificial Sequence
  derived and/or modified sequence
atgatcttcacccccttcctgccccccgccgacctgaacgtgaagggactgcagaacgacccagaagagtgggtagcagtaagcgacgctaccgaggacccatccggcgggaccggcctgccccgggaaccagcacttctccgggggtcatggcgatcccgcttccagcgcgctctagcttgtttcacaaaatgttttcgcgggggctatcgcgctcttggcatatag

SEQ ID NO: 26372 - DNA, 228 bp, Artificial Sequence
  derived and/or modified sequence
atgatcttcaccccattccttcctccagcagacctgaacgtgaagggattgcaaaatgatcccgaggaatgggttgccgtttcagatgcgactgaggatcctagcgggggtacaggactcccacgggagcccgctcttctaagaggctcgtggcgatcacggttccagcgagcgctggcatgctttaccaagtgctttaggggtggataccgagctcttggcatttag

SEQ ID NO: 26373 - protein, 295 aa, Artificial Sequence
  derived and/or modified sequence
MELIQDTSRPPLEYVKGVPLIKYFAEALGPLQSFQARPDDLLINTYPKSGTTWVSQILDMIYQGGDLEKCNRAPIYVRVPFLEVNDPGEPSGLETLKDTPPPRLIKSHLPLALLPQTLLDQKVKVVYVARNPKDVAVSYYHFHRMEKAHPEPGTWDSFLEKFMAGEVSYGSWYQHVQEWWELSRTHPVLYLFYEDMKENPKREIQKILEFVGRSLPEETMDFMVQHTSFKEMKKNPMTNYTTVPQELMDHSISPFMRKGMAGDWKTTFTVAQNERFDADYAEKMAGCSLSFRSEL

SEQ ID NO: 26374 - DNA, 888 bp, Artificial Sequence
  derived and/or modified sequence
atggagctgatccaggacaccagcagaccccccctggagtacgtgaagggcgtgcccctgatcaagtacttcgccgaggccctgggccccctgcagagcttccaggccagacccgacgacctgctgatcaacacctaccccaagagcggcaccacctgggtgagccagatcctggacatgatctaccagggcggcgacctggagaagtgcaacagagcccccatctacgtgagagtgcccttcctggaggtgaacgaccccggcgagcccagcggcctggagaccctgaaggacacccccccccccagactgatcaagagccacctgcccctggccctgctgccccagaccctgctggaccagaaggtgaaggtggtgtacgtggccagaaaccccaaggacgtggccgtgagctactaccacttccacagaatggagaaggcccaccccgagcccggcacctgggacagcttcctggagaagttcatggccggcgaggtgagctacggcagctggtaccagcacgtgcaggagtggtgggagctgagcagaacccaccccgtgctgtacctgttctacgaggacatgaaggagaaccccaagagagagatccagaagatcctggagttcgtgggcagaagcctgcccgaggagaccatggacttcatggtgcagcacaccagcttcaaggagatgaagaagaaccccatgaccaactacaccaccgtgccccaggagctgatggaccacagcatcagccccttcatgagaaagggcatggccggcgactggaagaccaccttcaccgtggcccagaacgagagattcgacgccgactacgccgagaagatggccggctgcagcctgagcttcagaagcgagctgtag

SEQ ID NO: 26375 - DNA, 888 bp, Artificial Sequence
  derived and/or modified sequence
atggagctgatccaggataccagccgtcccccgctggagtacgtcaaaggcgttcctctcattaagtacttcgctgaagccctgggacctcttcagtccttccaggctcggccagatgacctgctgattaatacgtaccctaagtcagggaccacatgggtgagtcagatccttgacatgatttatcagggcggtgacctggaaaagtgcaatagggctccaatctatgtgcgggtcccattcctcgaagtgaacgaccccggtgagccctccggcctggagacattaaaggatacaccccctccacgactgatcaaaagtcacttgccactcgccttgctgccgcagactctcttagatcagaaggtcaaagtggtctacgtagcgaggaaccccaaagatgtggctgtttcttactaccacttccatcggatggagaaggcccacccggaacctggcacatgggattcttttttagaaaagtttatggcaggcgaggtgtcatacggcagttggtaccagcacgtccaggagtggtgggagctaagtagaacccaccccgtactgtatctgttttatgaagatatgaaagagaaccctaagcgtgagatccagaaaatcctagagtttgtaggaaggagccttccagaggaaaccatggatttcatggtacagcacacttcttttaaggagatgaaaaaaaacccgatgactaattacacgacggtccctcaggagctgatggatcacagcatcagcccttttatgcggaagggaatggcaggagattggaaaacaacttttacggttgcacagaatgaaaggttcgatgcggactacgcagagaaaatggccgggtgcagcctctcctttcgctccgagctgtag

SEQ ID NO: 26376 - DNA, 888 bp, Artificial Sequence
  derived and/or modified sequence
atggaactcatacaggacacctccagaccaccacttgaatacgtcaaaggggtgcctctgattaagtacttcgctgaagcccttgggcccctccagtcgttccaggcccgccccgacgatctcctcattaatacttaccctaagtctggaacaacctgggtgagtcaaatcctggatatgatctatcagggcggtgacctcgagaaatgcaatcgggctccaatatatgtacgcgtaccttttctggaagtgaacgatccaggtgagccaagcggccttgagacgctgaaagacactccaccacctagactcatcaagagtcatctaccgctcgctctgctgcctcagactctgttggatcagaaggtaaaagtggtgtacgtggcaaggaacccaaaagatgtcgccgtctcctattatcattttcacaggatggagaaagcacaccctgaaccaggaacatgggatagcttcttggaaaagtttatggccggggaggtgtcttacggcagctggtatcaacacgtgcaagaatggtgggaactgtcccgcacccacccagttctctatctgttttatgaggatatgaaggaaaaccctaaacgggagattcagaagattttggagtttgttggcaggtccctgccagaagaaaccatggacttcatggtgcagcacacatcgttcaaggagatgaagaaaaaccctatgacaaattacacaactgttccacaggaactgatggaccattctatttctcctttcatgaggaagggaatggcgggagattggaagaccacattcaccgtggcccaaaatgagagatttgacgccgactatgctgaaaagatggctgggtgcagtctatccttccggagcgaattgtag

SEQ ID NO: 26377 - DNA, 888 bp, Artificial Sequence
  derived and/or modified sequence
atggagctcatccaggatacaagcaggccacctttagagtatgtcaagggggtgccgctcatcaaatacttcgctgaagccttaggccctttgcagtccttccaagctagacccgatgacctgcttattaatacataccccaaaagtggaaccacttgggtgtctcagatactggatatgatttaccaggggggcgacttggaaaaatgcaacagggcccccatatatgtgagggtgccattcctcgaagttaacgatcctggtgagccttccggtctagagaccctgaaggatacaccgccaccaagattgatcaaaagccatctgcctctggcgctcctgccgcagaccctgttggaccagaaagttaaggtggtctacgtcgcgagaaaccccaaggatgtagctgtgtcctactaccacttccatcgaatggagaaggcccacccagagcctggaacctgggatagtttcctggagaagttcatggcgggggaagtgagctacggctcgtggtatcagcacgtgcaagaatggtgggagctatcccgaacccaccccgtgctctatcttttttatgaagacatgaaagagaatcctaagcgggagatccagaagatactggagtttgtgggtagatctctccctgaagaaacgatggatttcatggtgcaacacacgagtttcaaagagatgaaaaaaaaccctatgacaaattacaccactgtcccacaggagttgatggatcattccatttcccccttcatgcggaaaggcatggcaggcgactggaagacgacttttaccgttgcccaaaatgagagatttgacgctgactacgcggagaagatggcaggttgctctctttcatttagatccgagctgtag

SEQ ID NO: 26378 - DNA, 888 bp, Artificial Sequence
  derived and/or modified sequence
atggagctcattcaagacacctctcgcccaccactggaatatgttaagggcgttcccctaataaagtacttcgcagaggctctggggccacttcagagcttccaagcccgacccgacgatctgctgatcaatacatatccgaaaagtggaacaacatgggtgtcccagattttagacatgatttatcagggcggcgatctagagaagtgtaatagagccccgatctatgtgcgagtcccttttcttgaggtcaatgatcccggcgagccttcaggtctggagacccttaaagacaccccgccccccaggctgatcaagagtcacctgccgctcgcacttctcccgcaaacattgctggaccagaaagtgaaagtggtgtatgtcgctagaaacccaaaggacgtcgccgtatcttattatcattttcaccggatggagaaagcgcatccagagcccggaacatgggacagcttcctggagaagttcatggctggggaggttagttacgggagctggtatcaacacgtccaggaatggtgggagttatcgagaactcatcctgttttatacctattctacgaggacatgaaggaaaaccccaagagagagattcagaagatactcgaattcgtcggtcgctccctgccggaagaaactatggatttcatggtgcaacacactagcttcaaagagatgaaaaagaacccaatgaccaattacactactgtcccgcaggagctcatggaccactccatctctcccttcatgaggaaaggaatggctggggactggaagaccacttttacagtcgcgcaaaacgagcggttcgatgctgactacgccgaaaaaatggccgggtgtagcttgtctttcagaagcgagctatag

SEQ ID NO: 26379 - DNA, 888 bp, Artificial Sequence
  derived and/or modified sequence
atggaactcattcaagatacctctcggcctcccctggagtacgttaagggcgtacctcttataaaatatttcgccgaggccttaggacctctgcagtcttttcaggccaggcctgacgatttgcttatcaatacctatcctaagtccggcaccacttgggtatcccagatcctggatatgatttaccagggaggtgacttagaaaagtgtaatcgagcccccatctacgtcagagtgcccttcctcgaagtgaatgaccccggggaacccagcggcctagagacgcttaaggacacgcctcccccaaggctaatcaaaagtcacctgcctctcgccctacttccccagactctgctcgatcagaaggtgaaggtcgtctatgttgcccgcaaccctaaagatgtcgcagtatcatattaccatttccatcgtatggagaaggcacaccccgaacctggcacgtgggattcgtttctagagaagttcatggcgggcgaagtaagctatgggtcgtggtaccagcacgttcaggaatggtgggaactgagtcggacccatccagtgctgtaccttttttacgaagatatgaaggaaaatcctaaacgggaaattcagaagatcttagaattcgtcggtcggtccttgccagaggagacgatggacttcatggtgcagcatacatcttttaaagagatgaagaaaaatcccatgactaactataccactgtgccccaggagctcatggatcacagcatatctccctttatgagaaaaggaatggcgggggactggaaaaccactttcacagtggctcagaatgaaaggtttgatgccgattacgctgagaaaatggctggctgctccctgagtttcagaagtgaactctag

SEQ ID NO: 26380 - DNA, 888 bp, Artificial Sequence
  derived and/or modified sequence
atggaactgattcaggataccagccgccccccacttgagtacgtcaagggcgttccactgatcaaatattttgcagaagcccttgggccgctgcagagcttccaggcccgccccgacgaccttttgatcaacacgtatcctaagagtggcacgacatgggttagtcagatccttgatatgatctaccagggcggggacctcgagaagtgtaaccgcgcccctatctacgtgcgcgtgccgttcctagaagttaatgaccctggagagcccagcggcctggaaacgctgaaagacaccccaccccctcggttgatcaagtcgcacctgcctcttgcattactccctcagacactgctggaccaaaaggtgaaggtagtctacgtggctaggaaccctaaagatgtggcggtgagttattaccacttccacagaatggaaaaagcacacccggagcccggcacatgggactctttcctggaaaaattcatggcaggcgaagtaagttacgggtcttggtaccagcacgtgcaggaatggtgggagctcagcaggacacaccctgtgctgtatcttttttacgaagatatgaaagaaaaccctaagcgggaaatccaaaaaattctggagtttgtgggcagaagtctccctgaagagaccatggacttcatggtacagcacacttctttcaaggagatgaaaaaaaatcctatgacaaactatacaactgtaccgcaggagctcatggatcattccatctcgccatttatgaggaaagggatggccggcgactggaagacaacctttactgtagcccagaatgaacggttcgacgcagattacgctgaaaagatggccgggtgctccctgtcattccgcagtgaattgtag

SEQ ID NO: 26381 - DNA, 888 bp, Artificial Sequence
  derived and/or modified sequence
atggagctgattcaggatactagccgcccccccctggaatatgtgaaaggggtccccctgataaagtattttgctgaagccctgggcccactgcagtcatttcaggcaagaccagacgatctgctcatcaacacctatcccaagtctggcaccacttgggtctctcagatattggatatgatttatcaagggggagacctggagaaatgcaaccgcgccccaatatatgtccgggtgcccttcttagaagtgaatgatccgggggaaccatcagggctggagaccctgaaagatacaccccctcctcgcctcattaagtctcatctgccacttgcgctcctacctcagacattattggatcagaaggtaaaagtggtgtatgtagctcgaaatcccaaagacgtggctgtatcatattatcatttccacagaatggagaaggctcatccagagcctggtacctgggactctttcctcgagaagttcatggctggcgaggtgtcctacgggagttggtatcaacacgtgcaggaatggtgggaactctctaggactcatccagtgctctacctattctacgaggacatgaaggaaaatcctaaaagagagattcagaaaatcctggaattcgtagggagatcactgccagaagaaactatggattttatggtgcaacatacaagttttaaagaaatgaagaaaaaccctatgactaactatactacagtcccccaagaactgatggaccacagcatcagccctttcatgcgcaaaggcatggcaggtgactggaaaactacgtttacagtggcccagaacgagagatttgacgccgattatgccgagaaaatggccggctgttctctctcttttcgctccgaactgtag

SEQ ID NO: 26382 - DNA, 888 bp, Artificial Sequence
  derived and/or modified sequence
atggaattaatccaggacaccagccgcccccccctggaatacgtaaaaggggtgcccctgattaaatattttgctgaggccttaggccccctccagtcttttcaggctcggcctgatgacttactaataaacacttatccaaagtctggtactacttgggtgtcacagatactggacatgatttaccagggtggtgatctggagaaatgtaacagggcacctatttatgtgagagtgccctttctagaggtgaacgatccgggcgaaccgagcggtctggaaaccctgaaggatactcctccccccagactaatcaaaagccatctcccattagcgctgctgccacagacactgctggaccaaaaggttaaggtagtgtatgtggctcggaatcctaaggacgtggccgtgagctattaccattttcacaggatggagaaagctcatcccgaacccggtacctgggatagcttcttggagaaatttatggcgggcgaagtgagctatgggagttggtaccagcatgtacaggaatggtgggaactttctcgcactcatcccgtcctctacctcttttacgaagatatgaaagaaaaccctaagagggaaattcagaaaattctagagtttgtggggcgctcactgcccgaggaaaccatggatttcatggttcagcacacgagctttaaagaaatgaagaaaaacccaatgacaaattacaccaccgtcccccaggagctgatggaccacagcataagtccgtttatgcggaaggggatggccggggactggaaaaccacattcacagttgcccaaaacgaaaggtttgatgctgattatgccgaaaagatggccggatgtagcctctccttccgatctgagttgtag

SEQ ID NO: 26383 - DNA, 888 bp, Artificial Sequence
  derived and/or modified sequence
atggagctgatccaggacaccagccggccccccctggagtatgtgaagggcgtgcccctcatcaagtactttgctgaggccctgggccccctgcagagcttccaggcccggccagatgacctgctgatcaacacctaccccaagagcggcaccacctgggtgtcccagatcctggacatgatctaccagggcggggacctggagaagtgcaacagagcccccatctacgtgcgggtgcccttcctggaggtgaatgaccctggagagcccagcggcctggagaccctgaaggacaccccaccacccaggctcatcaagagccacctgcccctggccctgctgccccagaccctgctggaccagaaggtgaaggtggtgtatgtggccaggaaccccaaggatgtggccgtgtcctactaccacttccacaggatggagaaggcccaccctgagcccggcacctgggacagcttcctggagaagttcatggccggggaggtgtcctatggctcctggtaccagcacgtgcaggagtggtgggagctgagcaggacccaccctgtgctgtacctgttctatgaggacatgaaggagaaccccaagcgggagatccagaagatcctggagtttgtgggccgcagcctgcctgaggagaccatggacttcatggtgcagcacaccagcttcaaggagatgaagaagaaccccatgaccaactacaccaccgtgccccaggagctgatggaccacagcatcagccccttcatgaggaagggcatggccggggactggaagaccaccttcaccgtggcccagaatgaaagatttgatgctgactatgcagagaagatggccggctgcagcctgtccttccgctctgagctgtag

SEQ ID NO: 26384 - DNA, 888 bp, Artificial Sequence
  derived and/or modified sequence
atggagctgatccaggacaccagccggccccccctggagtacgtgaaaggggtgccccttataaaatacttcgcagaggctctgggtcccctgcagtcctttcaggctcggcctgatgatttgctaattaacacctaccctaaaagtggaaccacatgggtgtcccagattctggatatgatttatcaggggggcgatctggagaagtgtaaccgcgcccccatatacgtgcgcgtacctttcctggaggtgaatgatcccggcgaaccaagcgggctggaaaccctgaaagacactccacctccccggctaattaagagtcatttgccgctggcactcttgccccaaaccctactggaccaaaaggtgaaagtagtttacgttgcccggaacccgaaggatgttgcagtgtcgtactaccacttccacagaatggagaaggctcatcctgagccaggtacttgggatagttttctggagaagtttatggctggagaagtaagctatgggagctggtaccagcacgtacaggagtggtgggagctgagcaggacacatcctgtgctatatctgttttatgaggatatgaaagagaatccaaaacgcgagattcaaaagattctggagtttgtgggcagaagcctgcctgaggaaaccatggacttcatggtccagcacaccagcttcaaggagatgaagaaaaaccccatgaccaactacacaactgtgcctcaggagcttatggaccactctatcagcccatttatgcgtaaaggaatggccggggattggaagacaacgttcacagttgctcagaatgaacgattcgatgcagactatgcagaaaaaatggccggctgttcactgtcctttcggagtgagctctag

SEQ ID NO: 26385 - DNA, 888 bp, Artificial Sequence
  derived and/or modified sequence
atggagctgatccaggacaccagccggccccccctggagtacgtgaagggagtgcccttgatcaaatatttcgccgaggccctggggcccctgcagtcttttcaggcccgacccgacgacctacttataaacacttatccgaaatcgggcaccacatgggtctcccagatactagacatgatttatcaaggtggggaccttgagaagtgcaaccgcgcaccaatatacgtgcgggttccctttttggaagtcaacgatccaggagagccctccggacttgagacacttaaagatacccctcccccgaggctgattaaaagccatctgccccttgccctgttaccccaaacattgctagaccaaaaggttaaggtcgtttatgtggccaggaatcctaaagatgtggcagtgtcctactaccacttccatcgaatggaaaaggcccaccccgagccaggaacgtgggactcattcctggaaaagtttatggcaggagaagtgtcatacggatcctggtatcagcatgtacaggagtggtgggagttatcgaggacgcacccagtgctgtacctattctacgaggatatgaaggaaaaccccaagagagagatccagaagatactcgaattcgtgggtaggagtctgccagaggaaactatggattttatggtgcaacacacgtcatttaaagagatgaagaaaaaccctatgacaaattatacaacggtgccacaggagctgatggaccattccatttcccccttcatgcgcaaagggatggccggcgactggaagacgaccttcaccgtggcccaaaatgagagattcgatgcggactatgcagagaaaatggctggatgcagcctcagcttccgatctgaattatag

SEQ ID NO: 26386 - DNA, 888 bp, Artificial Sequence
  derived and/or modified sequence
atggagctgatccaggacaccagccggccccccctggagtacgtgaagggggtgcccctaatcaaatacttcgccgaggccttgggcccattacaatcattccaagcgaggccggacgacttactgatcaacacttaccccaaatccggtaccacttgggtgtcacagatattggacatgatctaccaaggcggcgaccttgaaaaatgtaatcgagcgcccatctatgttagggtcccttttcttgaagtaaacgacccgggagagccatccggactcgaaacccttaaggacacaccaccaccaaggttaatcaaatcacatctacctttggccctccttcctcagacacttctggatcagaaggttaaggtcgtttacgtagcacgtaacccgaaagatgtggccgtatcatattaccatttccataggatggaaaaagctcatcccgaaccgggaacatgggactcctttctggaaaagttcatggctggagaagtgagctatgggtcttggtaccagcacgtccaggaatggtgggaactttcgaggacgcatccagttctgtaccttttctacgaagacatgaaagaaaatccaaaaagagagatccagaagatcctagagttcgttggcaggagtctccctgaagagacgatggactttatggtgcagcacacttcgtttaaagagatgaagaagaaccctatgaccaattatacgacggttccgcaggagctcatggaccattctatctccccatttatgagaaaaggcatggcgggcgattggaaaaccaccttcacagttgcccagaacgagcgcttcgatgcagactatgctgagaagatggccgggtgttcactgagttttcgcagcgaactgtag

SEQ ID NO: 26387 - DNA, 888 bp, Artificial Sequence
  derived and/or modified sequence
atggagctgatccaggacaccagccggccccccctggagtacgtgaaaggagttccccttattaagtatttcgccgaagcccttggacctctccagtcctttcaagcacgaccagacgaccttctgatcaatacttacccgaagagcggcactacctgggtttcccagattttggatatgatttatcagggcggtgatctggagaaatgtaaccgcgccccgatttatgtaagggtgcctttcctcgaggtgaacgaccccggcgagccttctgggctcgaaacactcaaggataccccaccaccccgattgataaaatcccatttgccacttgctctacttccgcaaactcttcttgatcagaaagtcaaggtggtgtatgtggctcgcaatcctaaagacgtggctgtcagctattaccactttcaccgcatggagaaggcacaccctgagcccgggacatgggatagttttctggaaaaatttatggcgggtgaggtgagctatggtagttggtatcagcacgtccaggagtggtgggaactaagtcgaacccatcctgttctttatctcttttacgaggacatgaaagagaaccccaagcgagagatccagaaaattctcgagtttgtggggcgcagtctgcctgaagaaactatggattttatggtccaacacacctccttcaaagaaatgaagaagaatccaatgacaaactatacaacagtcccccaagagctaatggaccactcaatcagccccttcatgagaaagggaatggccggtgactggaaaacgaccttcaccgtggcacaaaacgagcggtttgatgcagactacgcagagaaaatggcgggctgctctctgtcttttaggtcagaactgtag

SEQ ID NO: 26388 - DNA, 888 bp, Artificial Sequence
  derived and/or modified sequence
atggagctgatccaggacaccagccggccccccctggagtacgtgaagggagtgcccctgataaaatactttgctgaggccctcggtccactccagtccttccaagctaggccagatgacctgttaattaatacttatcccaagtctggcactacctgggttagccaaatcctcgatatgatataccaggggggtgatcttgaaaagtgcaacagagcgccaatttacgtcagagtcccttttctcgaagttaatgatcccggagaaccaagcggactggaaacattgaaggacaccccacctcctcgtctgatcaagtctcacctgcccctggctctcttaccccaaactctgctggaccaaaaggtgaaggtagtctacgtcgcgaggaaccccaaagacgtcgcggtgtcctattatcactttcataggatggagaaggcacacccagagcctggaacatgggactcgtttttggaaaaattcatggcaggcgaggtgtcctacggaagctggtatcagcacgttcaggagtggtgggaactgtctaggacacatccagtcttgtacctgttttacgaagatatgaaagaaaaccccaaaagggagatccagaagatcttagagttcgtgggacgttcgcttccagaagagactatggatttcatggtgcaacatacctcatttaaggaaatgaagaagaatccgatgacgaattatactacggttccccaggagctgatggatcacagtattagcccgtttatgagaaagggcatggcgggtgattggaagacaaccttcactgtcgcacagaacgagcggtttgacgccgattacgcggaaaagatggctggttgcagcctgtccttccgtagcgagttgtag

SEQ ID NO: 26389 - DNA, 888 bp, Artificial Sequence
  derived and/or modified sequence
atggagctgatccaggacaccagccggccccccctggagtacgtgaagggcgtccctctcataaaatattttgcggaggccctcggtcctcttcagtcttttcaagctcgccctgatgacctcttgattaacacctacccaaagtcggggaccacctgggtgtctcagattcttgacatgatttatcagggtggagatttagaaaagtgcaatcgagcaccgatttacgttagagtcccttttctggaggttaacgatcctggggaaccctcgggtttggaaacacttaaagacaccccaccaccacgcctaatcaagtcgcacctgcctcttgcactgcttccgcagaccctgttggatcagaaggtgaaggtagtgtatgtcgccaggaacccaaaagatgtcgccgtgtcatactaccacttccaccgtatggaaaaggctcatcctgagccaggcacttgggacagttttctggagaaattcatggccggggaggtttcttatggctcctggtaccagcacgtccaggaatggtgggagctctctcggacccatcccgtgctgtacctcttttatgaggacatgaaggagaatcctaagcgcgagattcagaaaattttggaatttgtcggccgctcactgccagaggagacaatggatttcatggtgcagcacacgagttttaaagagatgaagaagaacccaatgaccaattacaccactgtgccacaggagctcatggaccatagcatttccccatttatgcggaaaggaatggcgggagattggaaaaccactttcacagtagctcaaaatgagcgcttcgacgccgattacgccgaaaagatggccggttgtagcctgtctttccgatctgaactgtag

SEQ ID NO: 26390 - DNA, 888 bp, Artificial Sequence
  derived and/or modified sequence
atggagctgatccaggacaccagccggccccccctggagtacgtgaaaggcgttcccctcattaaatattttgccgaagccctgggccctctccagagtttccaagcacgcccagatgatcttctaattaacacgtatcccaagtctggtacaacatgggtgtcacaaatcctggatatgatatatcagggaggtgatctggagaagtgtaacagagcacctatttacgtgagggttcccttcctagaagtgaacgaccccggtgagcctagtggtctcgaaacccttaaagacacacctcctccgcgactcattaagtcccatctccccttagccttgctaccacagacgttgctggaccaaaaggtgaaagtggtttacgttgcccgcaatcccaaagatgtggccgtcagctattaccatttccatcggatggaaaaggctcatcccgagcctggcacgtgggactccttcctggaaaaattcatggcaggagaagtttcctacgggagctggtatcagcatgtgcaagagtggtgggaactgagcagaacccatcccgtgttatacctgttctatgaagatatgaaggaaaaccccaagagggagatccaaaaaattcttgagtttgtgggaaggagcttgccggaagaaaccatggactttatggtgcagcacacatcatttaaggagatgaagaagaatcctatgacaaactatacaaccgtgccacaagagctgatggaccacagcattagccctttcatgcgcaagggtatggcaggagattggaaaactacattcaccgtcgcacagaacgagaggtttgatgccgactacgccgagaaaatggcggggtgttccttgtctttccggtccgagctttag

SEQ ID NO: 26391 - DNA, 888 bp, Artificial Sequence
  derived and/or modified sequence
atggagctgatccaggacaccagccggccccccctggagtacgtgaaaggcgttccgctgatcaaatatttcgctgaagccctgggtccacttcagtcatttcaagcccggcccgacgatcttctaattaatacatatccaaagtccggcaccacttgggtgtcgcagatactggacatgatttaccagggaggagatctggagaaatgcaatagagcgcctatttacgtgagggttccttttttggaagtgaatgacccaggagaacctagcgggttggaaacattaaaagacaccccaccacctcggttaattaagtctcatctccccctggcattgctgccccagacactgttagatcaaaaggtaaaagtcgtgtatgtggctaggaaccctaaagacgtggctgtttcttactatcattttcatcgtatggaaaaagcccacccggagcccgggacttgggacagtttcctcgagaagttcatggcgggagaggtcagttacggaagttggtatcagcacgtgcaggagtggtgggaactatcccgcacccatccggtattgtacttgttctatgaagacatgaaggagaaccctaaaagggagatccagaaaatattagaattcgtgggcagatcattgcctgaagaaacaatggatttcatggtacaacatactagtttcaaggagatgaagaagaaccccatgactaactacacaaccgtgccacaggagctcatggatcactcaatttcccctttcatgcggaagggcatggctggggactggaagactacttttaccgttgcacagaacgaacgatttgacgccgactatgcagagaaaatggccggatgcagtctctcctttcggagtgaactgtag

SEQ ID NO: 26392 - DNA, 888 bp, Artificial Sequence
  derived and/or modified sequence
atggagctgatacaggatacgtctaggccacctcttgagtacgtaaaaggcgtccctctgataaagtacttcgctgaggccctgggtccactacagtccttccaggcaaggcccgacgacttgctgattaacacctacccaaaatctggcactacttgggtgtcccaaatactcgacatgatttaccagggaggcgatttggagaagtgtaatcgggctccaatatacgtgcgtgtgccgtttttggaggtgaacgatcccggagaaccctcgggcctggaaactctgaaagatacacctccccctcgcctgatcaaatctcatttgcctctggcacttctgccccaaacattgctggaccaaaaagtgaaggtagtgtacgtcgccagaaacccgaaggatgtggcggtctcatactatcattttcaccgaatggagaaggcacaccctgagccaggcacttgggacagtttcctggagaagttcatggctggggaagtgtcctatggaagctggtaccagcacgtgcaggagtggtgggaattatccagaacccatcccgtcctgtatctattctatgaagatatgaaagagaatcccaaacgcgaaatccaaaagattctcgagttcgtaggccgaagtctgcctgaggaaaccatggacttcatggtgcagcatacctcttttaaggagatgaagaaaaacccaatgaccaattacaccaccgttccgcaggagctgatggatcactcaatctctccatttatgcggaaaggcatggcaggcgattggaaaacaaccttcactgtagctcagaatgaaagatttgacgcagactacgctgaaaagatggcgggatgcagcctgtctttccgaagcgagctgtag

SEQ ID NO: 26393 - DNA, 888 bp, Artificial Sequence
  derived and/or modified sequence
atggagctgatccaggatacaagcaggccaccgttggagtatgtaaaaggagttcccctcatcaagtatttcgcggaagccctcggaccgctgcagagcttccaagccaggcctgacgatctgctgatcaacacttaccctaaatctgggactacctgggtttcgcaaatcctggacatgatttatcaagggggtgatctggagaaatgcaaccgcgctcccatatacgtgcgcgtgcctttcctggaggtgaatgacccaggggaacccagtggactggagacattgaaagacacaccccctcctcgactgattaaatctcaccttccccttgcactgttaccccagaccctcttggatcagaaagtcaaggtcgtctatgtcgccagaaatccaaaggatgtggctgtgtcatattaccatttccatcgaatggagaaggcacaccctgagccaggcacctgggatagttttctggagaaatttatggcaggagaggtctcatacggcagctggtaccagcatgtacaagagtggtgggaactgagtagaacgcacccggtgttgtacctgttctacgaggacatgaaagagaatcctaagagggaaattcagaagattctcgagttcgtcggacgtagcctgcctgaggagaccatggactttatggtgcaacatacaagctttaaggagatgaaaaagaacccaatgacaaactacactacagtcccacaggagctcatggatcactcaatttcaccattcatgagaaagggcatggccggagattggaaaaccacatttacagttgcgcaaaacgaacgctttgatgctgattacgctgagaaaatggcaggatgctctctgtccttccgatctgagctgtag

SEQ ID NO: 26394 - DNA, 888 bp, Artificial Sequence
  derived and/or modified sequence
atggagttgatccaggataccagtagaccccctttagaatacgtgaaaggcgtccctctgatcaagtatttcgccgaggcccttggcccactgcagagtttccaagctcgccctgatgaccttttgatcaacacatatcccaagtctggaactacctgggtttcccaaatcctggatatgatctaccagggcggtgacctggagaagtgcaaccgcgctcccatatatgtgcgcgtgccttttcttgaagtgaacgaccccggagagccatctggacttgaaacccttaaagacacaccacctccaaggctgatcaaatcccatctgcctctagcactgctgccccaaacactgctggaccagaaagtcaaggtggtatacgtagcacgaaaccccaaggatgtggctgtgagctactatcatttccacaggatggagaaagctcaccccgagcccggaacatgggattcctttctagaaaaatttatggccggagaggtgagctacggtagttggtaccagcacgtccaggaatggtgggagctatcccgaacacatcccgttttgtacctcttctacgaggatatgaaggagaaccccaagagggagatccaaaagattctggagtttgtcggccgatctctcccagaggagaccatggacttcatggtccaacatacaagttttaaagagatgaagaaaaaccccatgaccaattacacaacagtgccacaggaactcatggaccattccatcagtccgtttatgcgcaaaggcatggctggagactggaaaaccaccttcactgtagctcagaacgagcgattcgatgccgattacgctgaaaagatggccggttgtagcctgtcttttagatccgaactgtag

SEQ ID NO: 26395 - DNA, 888 bp, Artificial Sequence
  derived and/or modified sequence
atggagttaattcaggatacaagtcgccctcccttggaatacgttaaaggagtacctctaatcaaatactttgcagaggccctgggccctctccaaagttttcaagcccgtcccgacgatcttttgatcaatacctatcctaaatcaggtacaacttgggtctctcaaattctcgacatgatttatcaggggggagacttggagaagtgcaaccgtgcgcctatttacgtgcgtgtgccgtttttggaggtgaatgatccaggggaacctagtggtctggaaacccttaaagacacccctccgcctcggcttataaaatcccacttgccccttgccttactcccacaaacacttctcgatcaaaaagttaaagtggtttatgttgccagaaaccctaaggatgtcgctgtgtcttactaccactttcataggatggagaaggcccatccggagccagggacatgggactcttttctcgagaagttcatggccggagaggtgtcctatggatcttggtatcagcatgttcaagagtggtgggaactgtcgcggacccatcctgtcctgtacctcttttacgaagacatgaaagagaaccccaagcgcgaaatacagaaaatcctggaatttgtcggccgtagcctcccagaggagaccatggatttcatggtacagcacaccagcttcaaggagatgaagaagaacccgatgactaattataccacagtgccccaggagctcatggaccattcaatttcgccctttatgagaaaggggatggccggtgactggaagactacgttcactgttgcacaaaatgaaaggttcgacgcggattatgctgaaaaaatggcaggttgctcacttagcttccggtccgaactgtag

SEQ ID NO: 26396 - DNA, 888 bp, Artificial Sequence
  derived and/or modified sequence
atggaactgatacaggacacatcgaggcccccactcgagtacgtcaaaggggtccccctaatcaaatactttgccgaggcacttgggccactccagtccttccaggcacgtcctgatgaccttctgatcaatacatacccgaaatcgggcactacctgggtcagccagattctcgatatgatttaccagggaggggatctggaaaagtgcaaccgagcgcctatttatgtccgcgtgccttttctcgaggtgaatgaccccggagagccaagcgggctggagacactaaaggacacccctccacccaggctgattaaaagccaccttcctctcgccttattgccccaaaccctgctcgatcagaaggtgaaggtcgtttacgttgcgaggaaccctaaggatgttgccgtgagctattatcacttccaccgcatggaaaaggctcatcctgaacccggaacgtgggacagttttttggaaaaatttatggcaggcgaggtttcctacgggtcatggtaccagcacgtacaggagtggtgggagctgagcaggacacaccccgtgctgtacctcttttatgaggatatgaaggagaatcccaagagggagattcagaagattctggagtttgttggcaggtccctccctgaggaaacaatggattttatggttcagcatacaagcttcaaggagatgaaaaagaatcctatgacaaactacacaaccgtgccgcaggaactgatggaccattccattagtccctttatgagaaagggtatggccggagattggaaaacgacgttcacagtggcccagaatgagcgcttcgacgcggactacgccgaaaagatggctggatgttctctgagcttccggagcgagttgtag

SEQ ID NO: 26397 - DNA, 888 bp, Artificial Sequence
  derived and/or modified sequence
atggagctaattcaggacacatctcgcccaccacttgaatacgttaagggcgttccactgattaagtacttcgcagaggccctcgggcctctccaatcctttcaggcccgtcctgacgatctgctgattaatacctatcctaagagtggtacaacgtgggtttctcaaatcctggacatgatctatcagggaggggatctggaaaagtgcaatcgcgctcccatatatgtgagagttccatttttagaggtgaacgaccccggtgagccgtctggcctagaaacacttaaggatacccctcccccaagactgattaagtcccaccttccactcgcgctactgccccagactcttctcgaccagaaggtgaaagtcgtttacgttgctcggaatcctaaggacgtggccgtgtcttattatcattttcatagaatggagaaagcacatcctgagcccggtacctgggatagcttcctagagaagttcatggccggtgaagtgagctacggtagctggtaccagcatgtgcaggagtggtgggaattgagtagaactcaccccgttctgtatttgttctacgaggacatgaaggagaacccgaaacgtgagatccagaaaattctcgaattcgtcggaaggagtctgccagaggaaaccatggactttatggtccagcacacctcttttaaggagatgaaaaaaaacccgatgacaaattacacaaccgttccacaggagctgatggaccacagcatttccccattcatgcgtaagggcatggcaggcgactggaaaactaccttcactgtagctcagaacgagaggtttgatgccgactacgcggagaaaatggctggatgctcattgtcctttaggagcgagttgtag

SEQ ID NO: 26398 - DNA, 888 bp, Artificial Sequence
  derived and/or modified sequence
atggagcttatccaagacacctcacgccctcctcttgagtatgttaagggggttccattaataaaatactttgcagaggccttgggcccacttcagtcattccaggcacgaccagatgacctcctgatcaatacttatccgaaaagcggaaccacatgggtgtcccagatcctggatatgatctatcagggtggagatctcgagaagtgcaacagagccccaatttacgtcagggtgccatttttagaagtgaacgatcccggagagcctagtgggctcgagacactaaaagacacacctccgcctaggctcatcaagtcccatttgcctctggccctgctgccgcagacccttttagaccaaaaggtaaaagtagtttacgttgcacgaaaccctaaggacgtggccgtgtcttactaccacttccatcgcatggagaaggcccaccccgagcccggtacatgggacagcttcctggagaagtttatggccggagaagtgagctacggaagctggtaccaacatgttcaggagtggtgggagttgtccagaactcaccccgtcctgtacttgttttacgaggatatgaaagaaaatcccaagagggagattcagaagattctggagtttgtgggtaggtctctccccgaagagactatggacttcatggtccagcacacctccttcaaggagatgaagaagaacccaatgaccaactataccacagtgcctcaggagctcatggatcattccatctcacctttcatgagaaagggcatggccggagactggaagacaacctttacagttgcccaaaacgagcgcttcgacgctgattatgcagaaaaaatggcagggtgcagcttgtcatttaggtcggagttgtag

SEQ ID NO: 26399 - DNA, 888 bp, Artificial Sequence
  derived and/or modified sequence
atggaactgattcaggatacctcccgtcccccactggaatatgttaagggtgtccctctgatcaaatacttcgccgaggccctcggccctctgcagtcgttccaggcacggcctgatgaccttttgattaacacgtaccccaagtcaggaacaacttgggttagccaaatcctagatatgatttaccaggggggagatctggagaagtgcaatagagctcctatttatgtccgtgttcccttcctggaggtcaacgacccaggtgagccatctggccttgagacacttaaagacaccccacctcctcgcctgataaagtcccacctgcccttggctttgctccctcaaaccctcctcgaccagaaggtgaaagtggtatatgttgcacggaatccgaaagacgtggcagtgtcgtactaccattttcatcgtatggagaaagctcacccggagccgggaacttgggatagtttcctcgagaaatttatggcaggagaagtcagttacgggtcttggtatcaacacgtgcaggaatggtgggaattgagccgaacccaccccgttctgtatctgttttatgaagacatgaaagaaaatcctaaacgagaaatccagaaaatcctagagtttgtgggacgcagcctgccggaggagaccatggacttcatggttcaacacaccagctttaaagagatgaagaagaacccaatgaccaactacaccaccgttcctcaggagctaatggatcacagtatttccccatttatgcggaagggcatggccggagactggaagaccacattcacagtggcccagaatgagcgttttgacgcggattatgccgaaaaaatggccggttgcagtctaagcttccgctcagagctttag

SEQ ID NO: 26400 - DNA, 1155 bp, Artificial Sequence
  derived and/or modified sequence
atgctggagaactacaacagcatcgtgagcctgggcctgcccgtgccccagcccgacgtgatcttccagctgaagagaggcgacaagccctggatggtggacctgcacggcagcgaggagagagagtggcccgagagcgtgagcctggactgggagaccaagcccgagatccacgacgccagcgacaagaagagcgagggcagcctgagagagtgcctgggcagacagagccccctgtgccccaagttcgaggtgcacacccccaacggcagaatgggcaccgagaagcagagccccagcggcgagaccagaaagaagagcctgagcagagacaagggcctgagaagaagaagaagcgccctgagcagagagatcctgaccaaggagagacaccaggagtgcagcgactgcggcaagaccttcttcgaccacagcagcctgaccagacaccagagaacccacaccggcgagaagccctacgactgcagagagtgcggcaaggccttcagccacagaagcagcctgagcagacacctgatgagccacaccggcgagagcccctacgagtgcagcgtgtgcagcaaggccttcttcgacagaagcagcctgaccgtgcaccagagaatccacaccggcgagaagcccttccagtgcaacgagtgcggcaaggccttcttcgacagaagcagcctgaccagacaccagagaatccacaccggcgagagcccctacgagtgccaccagtgcggcaaggccttcagccagaagagcatcctgaccagacaccagctgatccacaccggcagaaagccctacgagtgcaacgagtgcggcaaggccttctacggcgtgagcagcctgaacagacaccagaaggcccacgccggcgaccccagataccagtgcaacgagtgcggcaaggccttcttcgacagaagcagcctgacccagcaccagaagatccacaccggcgacaagccctacgagtgcagcgagtgcggcaaggccttcagccagagatgcagactgaccagacaccagagagtgcacaccggcgagaagcccttcgagtgcaccgtgtgcggcaaggtgttcagcagcaagagcagcgtgatccagcaccagagaagatacgccaagcagggcatcgactag

SEQ ID NO: 26401 - DNA, 1155 bp, Artificial Sequence
  derived and/or modified sequence
atgcttgagaactacaactccatcgtgagcctgggcctgccggtgccccaaccagacgtcatattccagcttaaaagaggagacaagccatggatggttgacctgcatggcagcgaggagcgagaatggcccgagagcgtgagcttagattgggaaaccaaacccgagatacatgacgcatctgacaagaagagtgagggcagtttgagagagtgcttgggccggcagtcccctctctgtcctaagttcgaggtgcacacaccaaatggccgcatgggcacagaaaaacagagcccatctggagagacaaggaagaagtccctgtctcgggataaagggctgaggcgacgtcgctccgctctctcccgcgagatcttgaccaaggaacgacatcaggagtgttccgactgcggcaagaccttctttgaccactcatctctgacccggcaccagaggacccacacaggcgaaaagccatacgactgccgcgaatgcggaaaagccttttctcaccggagtagtttaagtcggcacttaatgtcacacaccggagagtccccctatgagtgcagcgtatgctccaaagcgtttttcgatcgctcgagtttgacagttcatcagagaattcataccggagagaaacctttccagtgtaacgagtgcggaaaggcgttcttcgatcgctcgagtcttaccaggcaccagcgaatccacaccggcgaaagcccatacgagtgtcaccagtgcggcaaagccttctcccaaaaaagtatcctgacccgtcaccaattgattcacactggaagaaaaccatatgaatgcaacgaatgcggtaaggctttctacggagtgagttcattaaataggcaccagaaggcccatgcaggcgatcctcgctatcagtgcaacgaatgtggtaaagcctttttcgaccgctcctctctgactcagcaccagaagatacataccggcgataagccgtacgagtgcagtgagtgcggcaaagctttttcacagcggtgccgattgactcgtcatcagcgcgttcataccggtgagaagcccttcgaatgcacggtgtgtggcaaagtctttagtagcaagtcgagcgtaatccagcatcagagacggtatgccaagcagggaatcgattag

SEQ ID NO: 26402 - DNA, 1155 bp, Artificial Sequence
  derived and/or modified sequence
atgctggagaactacaacagcatcgtgtccctgggcctgcctgtgccccagccagatgtgatcttccagctgaagagaggagacaagccctggatggtggacctgcacggcagcgaggagcgggagtggccagagagcgtgtccctggactgggagaccaagccagagatccatgatgccagtgacaagaagtctgagggcagcctgagagaatgtctgggccggcagagccccctgtgccccaagtttgaggtgcacaccccaaatggaaggatgggcacagagaagcagagccccagcggggagaccaggaagaagagcctgagccgggacaagggcctgcggaggagaagaagtgccctgagccgggagatcctgaccaaggagcggcaccaggagtgcagcgactgtgggaagaccttctttgaccacagcagcctgaccaggcaccagaggacccacactggagagaagccctatgactgccgggagtgtgggaaggccttcagccacaggagcagcctgagccgccacctgatgagccacactggagagagcccctatgaatgttctgtgtgcagcaaggccttctttgacaggagcagcctgactgtgcaccagaggatccacactggagagaagcccttccagtgcaatgaatgtgggaaggccttctttgacaggagcagcctgaccaggcaccagaggatccacactggagagagcccctatgagtgccaccagtgtgggaaggccttcagccagaagagcatcctgaccaggcaccagctgatccacactggaaggaagccctatgaatgtaatgaatgtgggaaggccttctacggcgtgagcagcctgaacagacaccagaaggcccatgctggggacccccgctaccagtgcaatgaatgtgggaaggccttctttgacaggagcagcctgacccagcaccagaagatccacactggagacaagccctatgaatgttctgaatgtgggaaggccttcagccagcgctgccgcctgaccaggcaccagagggtgcacactggagagaagccctttgaatgtactgtgtgtgggaaggtgttcagcagcaagagcagcgtcatccagcaccagaggagatatgccaagcagggcattgattag

SEQ ID NO: 26403 - DNA, 1155 bp, Artificial Sequence
  derived and/or modified sequence
atgctggagaactacaacagcatcgtgagcctgggcctgcccgtgccccagcccgacgtcattttccaactgaaacggggggataagccatggatggtggacctgcacggaagtgaggaaagggagtggcctgagtctgtgtctctcgactgggaaaccaaacccgagatccatgatgcttctgacaaaaagtcagaaggcagcctaagagagtgtctgggcagacagagcccactgtgcccaaagttcgaggttcatacccctaacggtcgtatggggaccgaaaaacagagtcctagtggagaaacacgaaagaaaagcctgtctagggataaaggcttgcgtagaagacgttctgcactcagcagagagattcttactaaagaaagacaccaagagtgttccgattgtggaaagaccttcttcgaccattcctcacttacccggcaccagcggacacacacaggagaaaagccttacgactgcagagagtgcggtaaagcgttctctcaccggtcttccttgtcacgtcacctgatgtctcacaccggcgaatctccatatgagtgttccgtttgctcgaaggcgtttttcgaccggtcttccctgactgtacaccagcgcatccatactggcgaaaagccctttcagtgtaacgaatgtggtaaggctttttttgatcgatcttcactgacaagacatcagaggattcatactggagagtccccctatgagtgtcatcaatgcggcaaagccttcagtcagaaatctattctgacacgccaccagctcattcacacagggcgcaagccttacgagtgcaatgagtgtggaaaagctttttacggcgtctctagtctgaaccgccaccagaaagcccatgccggagacccacgctatcagtgcaacgaatgtggcaaggcattctttgacagaagttccctaactcagcaccagaagatccataccggcgacaagccctacgaatgctccgagtgtggaaaggccttctcccaacggtgtagattgacacgccatcagagggtgcacactggagagaaaccatttgagtgtaccgtttgcggtaaggtgttcagctccaagtctagcgtaatccagcaccagagacgttatgctaagcagggtatcgactag

SEQ ID NO: 26404 - DNA, 1155 bp, Artificial Sequence
  derived and/or modified sequence
atgctagagaactataactctatcgtgtctttgggcctgcccgtgccccagcccgacgtaatatttcagctcaaacgcggagacaagccttggatggtagacctccatggaagcgaggaacgggagtggcccgagtccgtgagtctcgactgggagactaagcctgagatacacgatgcctccgataagaagagcgagggtagcctgcgcgagtgtcttgggagacaatcccccctgtgccccaagttcgaagtgcacactccaaacggaagaatgggcaccgaaaagcagtcacccagcggagagaccagaaaaaaatctttatcaagggataaaggcctccgccgaagacgtagtgcactgtctagggagatcctgaccaaagagcgccaccaggaatgctccgactgcgggaaaaccttctttgaccacagttctctgaccagacatcagagaacgcacacaggggagaaaccctacgactgtcgagagtgtggcaaagcttttagccataggagcagtctttcccgccacctgatgtcccacaccggcgagtcaccgtacgaatgctctgtttgcagtaaggctttctttgaccggagcagcttgacggtgcatcagaggatacacacgggcgaaaagcccttccagtgcaatgagtgcgggaaggcattctttgatcggtccagtctgaccaggcaccagcgaatccatactggagagtcaccctatgagtgtcatcaatgcggaaaggctttctcccagaagtcaatacttacccggcaccaactcattcataccggaaggaagccctacgagtgtaacgaatgtggcaaggccttctatggcgtgtctagccttaaccgccaccaaaaagcgcacgcgggagatccgaggtaccagtgtaatgaatgtggcaaggccttctttgaccgctcttctctaacacagcaccagaaaatccataccggcgacaaaccctacgagtgttccgaatgtggtaaggctttcagccagaggtgcagactcactaggcaccagcgcgtgcacactggggagaaaccgttcgagtgcacggtatgtggtaaggtgtttagctcgaagagctccgtgatacaacatcagaggcgctacgccaaacagggaatcgactag

SEQ ID NO: 26405 - protein, 60 aa, Artificial Sequence
  derived and/or modified sequence
MSESGEMSEFGYIMELIAKGKMPDWRRGYRCRQGCGKTTELATATDFSQTGNKSGKHFKT

SEQ ID NO: 26406 - DNA, 183 bp, Artificial Sequence
  derived and/or modified sequence
atgagcgagagcggcgagatgagcgagttcggctacatcatggagctgatcgccaagggcaagatgcccgactggagaagaggctacagatgcagacagggctgcggcaagaccaccgagctggccaccgccaccgacttcagccagaccggcaacaagagcggcaagcacttcaagacctag

SEQ ID NO: 26407 - DNA, 183 bp, Artificial Sequence
  derived and/or modified sequence
atgagtgagtctggggaaatgtcagaatttggctatattatggagctaatagccaagggaaagatgcccgactggcggaggggctatagatgtcggcagggatgcggcaaaaccaccgagctcgcgacagccaccgacttttcacaaactggtaataagagcgggaagcatttcaaaacgtag

SEQ ID NO: 26408 - DNA, 183 bp, Artificial Sequence
  derived and/or modified sequence
atgtctgagagcggggagatgtctgaatttggctacatcatggagctgattgccaagggcaagatgccagactggaggcggggctaccgctgccggcagggctgcggcaagaccacagagctggccacagccacagacttcagccagacaggcaacaagagcggcaagcacttcaagacctag

SEQ ID NO: 26409 - DNA, 183 bp, Artificial Sequence
  derived and/or modified sequence
atgagcgagagcggcgagatgagcgagttcggctacatcatggagttgatcgccaaagggaagatgcccgattggcgcagaggatatagatgtcggcagggctgcggaaaaactaccgaacttgccactgcaacagactttagccagacaggcaataagagcgggaagcatttcaagacgtag

SEQ ID NO: 26410 - DNA, 183 bp, Artificial Sequence
  derived and/or modified sequence
atgtccgagtccggagagatgtccgagttcggatatatcatggagcttatcgccaagggcaaaatgcccgattggaggaggggatatcggtgtcgacagggatgtggtaagactaccgaactcgctaccgcaacagacttttcccagaccggaaacaagtctggtaaacattttaagacatag

SEQ ID NO: 26411 - DNA, 693 bp, Artificial Sequence
  derived and/or modified sequence
gatggggcttttttccagatcttcgcgccgagagccggggacggccaacctgccggcatgcgataaaggccggggaatgtctagctggggccgcgctgagccgagtgcggacccgctttgtgtgcgcgtttgtttgtctccgctgcggtccgaaccgctgccgcgacccccgaggaggcggggcctccgcgcgcccggctccgcctggtgagggtttcacggcctctgctgccgccgccgccgccctcgtttgttccgttagatcgcgcagccccgaccgctgcacccggatcctagcaagccgggcgaggctgcccgggagccctcgatggccttcatttcacccaagcccgcttcttgctttccccggcgcttcccctcttttcctggttaacagcttatgggcggggagctcggcaaaactcagactaaaaacagaaaaagagaaaagaaaggacaaattcgatacacccgcgtcggtcctccagagtttgtgaaggggtgtaaacatgtcggagtctggggagatgagtgaatttggctacatcatggaattgatagctaaaggcaagatgccggattggagacgaggctaccgctgcagacagggctgtgggaagacgacggaacttgccacagcgacagacttctcccaaacaggaaataaaagtgggaagcattttaaaacctaaa

SEQ ID NO: 26412 - protein, 61 aa, Artificial Sequence
  derived and/or modified sequence
MSESGEMSEFGYIMELIAKGKASAMGLQQTHEHSRLTSKGGEARCPFEISEVGKQSLPRRT

SEQ ID NO: 26413 - DNA, 186 bp, Artificial Sequence
  derived and/or modified sequence
atgagcgagagcggcgagatgagcgagttcggctacatcatggagctgatcgccaagggcaaggccagcgccatgggcctgcagcagacccacgagcacagcagactgaccagcaagggcggcgaggccagatgccccttcgagatcagcgaggtgggcaagcagagcctgcccagaagaacctag

SEQ ID NO: 26414 - DNA, 186 bp, Artificial Sequence
  derived and/or modified sequence
atgagcgagtctggcgagatgagcgagttcggttacattatggaactcatcgcgaagggcaaagcctccgcaatgggattacagcagacacacgaacattctaggctgacaagcaaaggaggcgaagcccgatgtccgttcgagatctctgaggtgggaaaacagtctctgccgcggcgcacgtag

SEQ ID NO: 26415 - DNA, 186 bp, Artificial Sequence
  derived and/or modified sequence
atgtctgagagcggggagatgtctgaatttggctacatcatggagctgattgccaagggcaaggccagcgccatgggcctgcagcagacccatgagcacagccggctgaccagcaaaggaggagaggcccgctgcccctttgagatcagcgaggtgggcaagcagagcctgcccaggagaacatag

SEQ ID NO: 26416 - DNA, 186 bp, Artificial Sequence
  derived and/or modified sequence
atgagcgagagcggcgagatgagcgagttcggctacatcatggagctgatcgctaagggcaaagcttctgcaatgggactacagcagacccacgagcactctcggctcacctccaagggaggggaagcccgctgcccttttgaaatctcggaggtgggaaaacagagccttcctcggcgcacatag

SEQ ID NO: 26417 - DNA, 186 bp, Artificial Sequence
  derived and/or modified sequence
atgagtgagagcggagagatgtccgaatttggctatatcatggagcttattgccaaagggaaagcctccgctatgggcttgcagcagacccacgagcattctcggctgacctccaagggcggtgaagccagatgcccctttgagatatcggaggtgggaaagcagagcctcccgagacgaacctag

SEQ ID NO: 26418 - DNA, 1322 bp, Artificial Sequence
  derived and/or modified sequence
gatggggcttttttccagatcttcgcgccgagagccggggacggccaacctgccggcatgcgataaaggccggggaatgtctagctggggccgcgctgagccgagtgcggacccgctttgtgtgcgcgtttgtttgtctccgctgcggtccgaaccgctgccgcgacccccgaggaggcggggcctccgcgcgcccggctccgcctggtgagggtttcacggcctctgctgccgccgccgccgccctcgtttgttccgttagatcgcgcagccccgaccgctgcacccggatcctagcaagccgggcgaggctgcccgggagccctcgatggccttcatttcacccaagcccgcttcttgctttccccggcgcttcccctcttttcctggttaacagcttatgggcggggagctcggcaaaactcagactaaaaacagaaaaagagaaaagaaaggacaaattcgatacacccgcgtcggtcctccagagtttgtgaaggggtgtaaacatgtcggagtctggggagatgagtgaatttggctacatcatggaattgatagctaaaggcaaggcttcagcaatgggcctgcagcaaacccatgagcattcccggttgacttctaaaggtggagaggcccgctgtccctttgaaatctctgaggttggaaagcagtctctcccaagaagaacttaggacaattcctctctctgttttgtgggggttggagggggagagttggtctggagtaggctcctaaccatttcaacgtaagcttatttcctaccactctcctcaggctcaaatcctgccccgccccgcagccccagcactagcccatttaagacccctgttttgtgtgtgattatacaggatttgaacactgaatattaaccatggaatagcagacctttgagactgacttgctttattttcctctgtggggttcggttccactttgtagttcgggtttgtaatgtaaagaataatgggaaactggtctaattatgagagttaagagagtagaggcctgtagttggcctgccctccgccccaccatccctcaaagttgagaccactgagttaaccatcctcttaatttctctcacttttcccccagatttgtttcatccttgtactggacttctcaagctctgtacataattaaaaatacatagctttacatttttacaaacttaatacctggaatatatgcttgttgtaaagtattcaaacttcacagaaaggttcacagagtaaaaagtctaagttcatgcccacctccaatctcattccttccccagtggcagcagtttgtgtgtc

SEQ ID NO: 26419 - protein, 967 aa, Artificial Sequence
  derived and/or modified sequence
MPSPPGLRALWLCAALCASRRAGGAPQPGPGPTACPAPCHCQEDGIMLSADCSELGLSAVPGDLDPLTAYLDLSMNNLTELQPGLFHHLRFLEELRLSGNHLSHIPGQAFSGLYSLKILMLQNNQLGGIPAEALWELPSLQSLRLDANLISLVPERSFEGLSSLRHLWLDDNALTEIPVRALNNLPALQAMTLALNRISHIPDYAFQNLTSLVVLHLHNNRIQHLGTHSFEGLHNLETLDLNYNKLQEFPVAIRTLGRLQELGFHNNNIKAIPEKAFMGNPLLQTIHFYDNPIQFVGRSAFQYLPKLHTLSLNGAMDIQEFPDLKGTTSLEILTLTRAGIRLLPSGMCQQLPRLRVLELSHNQIEELPSLHRCQKLEEIGLQHNRIWEIGADTFSQLSSLQALDLSWNAIRSIHPEAFSTLHSLVKLDLTDNQLTTLPLAGLGGLMHLKLKGNLALSQAFSKDSFPKLRILEVPYAYQCCPYGMCASFFKASGQWEAEDLHLDDEESSKRPLGLLARQAENHYDQDLDELQLEMEDSKPHPSVQCSPTPGPFKPCEYLFESWGIRLAVWAIVLLSVLCNGLVLLTVFAGGPVPLPPVKFVVGAIAGANTLTGISCGLLASVDALTFGQFSEYGARWETGLGCRATGFLAVLGSEASVLLLTLAAVQCSVSVSCVRAYGKSPSLGSVRAGVLGCLALAGLAAALPLASVGEYGASPLCLPYAPPEGQPAALGFTVALVMMNSFCFLVVAGAYIKLYCDLPRGDFEAVWDCAMVRHVAWLIFADGLLYCPVAFLSFASMLGLFPVTPEAVKSVLLVVLPLPACLNPLLYLLFNPHFRDDLRRLRPRAGDSGPLAYAAAGELEKSSCDSTQALVAFSDVDLILEASEAGRPPGLETYGFPSVTLISCQQPGAPRLEGSHCVEPEGNHFGNPQPSMDGELLLRAEGSTPAGGGLSGGGGFQPSGLAFASHV

SEQ ID NO: 26420 - protein, 75 aa, Artificial Sequence
  derived and/or modified sequence
MLSADCSELGLSAVPGDLDPLTAYLAVPGMVAEGKADRTGGGGSSRPEKTRRSLEEAIDRTIGGAQELWAPEVSS

SEQ ID NO: 26421 - DNA, 2904 bp, Artificial Sequence
  derived and/or modified sequence
atgccatctcccccaggtctgcgggctctgtggctttgcgctgcactttgcgcaagcaggagggctggaggcgctccacagccaggcccggggccaacagcctgtcctgctccctgtcactgtcaagaggatggcatcatgctcagcgccgactgttctgagcttggcctctctgctgtccctggagacttggatcctcttaccgcttatttagatctgtctatgaataatctgaccgagctccaaccaggtttgttccatcatcttagatttctcgaggaactccgcctgtctggtaatcatttgagccatattccagggcaggccttttctgggctctatagtctgaagattcttatgctgcagaataatcaacttgggggaattccagccgaggctctttgggagttaccttcactgcagtccctgagactggatgcaaacctcatatctctggtacccgagcggagttttgagggcctgagttctctacggcacctgtggctggatgacaacgccttgactgagattcccgtacgggcgctgaataacctaccggcacttcaggccatgacacttgccctgaaccgtatctcgcacatcccagactatgcctttcagaaccttacgagcctggtagtgctgcatctccataataaccgaatacagcacctcggtactcactcatttgaaggactgcacaatctagaaacactcgatctgaactataacaagctccaggagtttcccgtggctatacgcactctcggacggcttcaggagctcggcttccacaataataacataaaagctattcccgagaaggccttcatggggaatcccctcttgcaaaccattcacttctacgataaccctatacaattcgtaggcagatctgcttttcagtatctgccaaagctgcacacccttagtctaaacggagctatggacatccaggaattcccagatctaaaaggaaccacatctctcgagattttgaccttgacccgcgccggaatccgtctgttgccctccggcatgtgtcagcagcttccaagactgcgggtattagagttgagccacaatcagatagaggagctgccaagtttacacagatgccaaaagctcgaggaaatcggcctgcagcataaccgaatctgggagattggcgcggacacttttagtcagctgtccagtctgcaggcgcttgatttatcttggaatgcgattagatctatccaccctgaagccttcagcaccctgcactcactggtcaagctggacctcacagataaccagttgactaccttgccattagcaggacttgggggactgatgcacttgaaactaaaggggaaccttgctctgtcacaagcctttagtaaggactccttccccaaactgaggatcctggaggtgccctatgcctaccaatgctgtccctacggtatgtgcgcaagcttcttcaaggcgtctggccagtgggaagccgaggatctgcatctggatgatgaggagtccagcaagcgcccactgggcttgttggcccgacaagcggaaaatcactacgatcaggatctggatgagctgcagcttgagatggaagatagcaaaccacatccttcagtgcaatgtagcccgacacccggtcccttcaagccttgcgaatatctgtttgagtcttggggaatccgtcttgcagtctgggccattgttctgctgtccgtcctttgtaacggcctggtgttgttgaccgtctttgcaggcggacctgtaccccttcctcccgtgaagtttgtggtcggcgccatagcgggagccaatacccttaccggtatcagttgtggcctcttggcatctgtggacgccctcacattcggtcagttcagtgaatatggggcgaggtgggaaaccggacttggctgccgcgccacaggattcttggcagtactcggttccgaggcaagcgttcttttgttgactctggccgcagtccagtgtagcgtttcagtctcttgcgttagggcgtacggcaaaagcccatctctgggctctgtccgggccggggtgttggggtgcttggcgctagccggattggcagccgccttgcctttggccagcgtcggagaatatggggccagtccactgtgtcttccatatgccccgcccgaagggcagcctgcagctcttggctttacggttgccctggttatgatgaacagtttttgctttctcgtggtggctggagcctatatcaaactgtattgcgatctccctaggggcgattttgaggcagtgtgggactgcgcgatggtccgccatgtcgcctggctaattttcgcggacgggctcctttattgtcccgtggcctttctgtctttcgcaagtatgttaggcctcttccccgtaacacctgaagccgtgaaatcagtactcctggtggtgttgcccttgcctgcctgcctcaacccattactgtatctcctgttcaaccctcatttcagagatgatcttcgccgtcttaggcccagggctggagattctggcccattggcatacgcagctgccggagagcttgaaaagtccagctgtgactctactcaagccctggtggcgttctccgatgtggatctcatcctggaggcaagtgaggccgggcggcctcctgggctggagacatacgggtttcccagcgtcactctgatcagttgccagcagcctggagccccccgcctggagggttcccactgcgtcgagccagaagggaatcattttggcaaccctcagccctccatggacggagaactgctcctacgggccgaaggttcaacacctgctggagggggactctcgggcggtggcggcttccagccatcgggcttggcttttgcgagccacgtttag

SEQ ID NO: 26422 - DNA, 228 bp, Artificial Sequence
  derived and/or modified sequence
atgcttagtgcagattgtagtgagctgggcctctctgcggtccctggggacctggatccactgacggcttatctagccgtaccaggcatggttgctgagggaaaggctgatcggacgggcggcggcggatcatcaaggcccgaaaagactaggcggtccctggaagaagccattgatagaactatcggaggcgctcaggagctgtgggccccagaggtgagctcatag

SEQ ID NO: 26423 - DNA, 2904 bp, Artificial Sequence
  derived and/or modified sequence
atgcccagccccccaggcctgcgggccctgtggctgtgtgccgccctgtgtgccagccggcgggccggcggggccccccagcccggccctggccccacagcctgcccagccccctgccactgccaggaggatggcatcatgctgtctgctgactgcagcgagctgggcctgtctgctgtgcctggggacctggaccccctgacagcctacctggacctgtccatgaacaacctgacagagctgcagcccggcctcttccaccacctgcgcttcctggaggagctgcggctgagcggcaaccacctgagccacatccctggccaggccttcagcggcctgtacagcctgaagatcctgatgctgcagaacaaccagctgggcggcatcccagctgaggccctgtgggagctgcccagcctgcagagcctgcggctggatgccaacctgatcagcctggtgcctgagaggagctttgagggcctgagcagcctgcggcacctgtggctggatgacaatgccctgacagagatccctgtgcgggccctgaacaacctgcctgccctgcaggccatgaccctggccctgaaccgcatcagccacatcccagactatgccttccagaacctgaccagcctggtggtgctgcacctgcacaacaaccgcatccagcacctgggcacccacagctttgagggcctgcacaacctggagaccctggacctgaactacaacaagctgcaggagttccctgtggccatccgcaccctgggccgcctgcaggagctgggcttccacaacaacaacatcaaggccatccctgagaaggccttcatgggcaaccccctgctgcagaccatccacttctatgacaaccccatccagtttgtgggccgcagcgccttccagtacctgcccaagctgcacaccctgagcctgaatggagccatggacatccaggagttcccagacctgaagggcaccaccagcctggagatcctgaccctgacccgggccggcatccggctgctgcccagcggcatgtgccagcagctgccccggctgcgggtgctggagctgagccacaaccagatcgaggagctgcccagcctgcaccgctgccagaagctggaggagatcggcctgcagcacaaccgcatctgggagattggagctgacaccttcagccagctgagcagcctgcaggccctggacctgtcctggaatgccatccgcagcatccaccctgaggccttcagcaccctgcacagcctggtgaagctggacctgacagacaaccagctgaccaccctgcccctggccggcctgggcggcctgatgcacctgaagctgaagggcaacctggccctgagccaggccttcagcaaggacagcttccccaagctgcgcatcctggaggtgccctatgcctaccagtgctgcccctacggcatgtgtgccagcttcttcaaggccagcggccagtgggaggccgaggacctgcacctggatgatgaggagagcagcaagaggcccctgggcctgctggcccggcaggccgagaaccactatgaccaggacctggatgagctgcagctggagatggaggacagcaagccccaccccagcgtgcagtgcagccccaccccaggccccttcaagccctgtgagtacctgtttgagagctggggcatccggctggccgtgtgggccatcgtgctgctgtctgtgctgtgcaatggcctggtgctgctgactgtgtttgctgggggccctgtgcccctgccccctgtgaagtttgtggtgggcgccatcgccggggccaacaccctgaccggcatcagctgtggcctgctggcctctgtggatgccctgaccttcggccagttctctgaatatggagcccgctgggagaccggcctgggctgccgggccaccggcttcctggccgtgctgggcagcgaggcctctgtgctgctgctgaccctggccgctgtgcagtgcagcgtgtctgtgtcctgtgtgcgggcctacggcaagagccccagcctgggctctgtgcgggccggcgtgctgggctgcctggccctggccggcctggccgccgccctgcccctggcctctgtgggggagtatggagccagccccctgtgcctgccctatgcccctcctgagggccagcctgctgccctgggcttcaccgtggccctggtgatgatgaacagcttctgcttcctggtggtggccggggcctacatcaagctgtactgtgacctgcccaggggggactttgaagctgtgtgggactgtgccatggtgcgccacgtggcctggctgatctttgctgatggcctgctgtactgccctgtggccttcctgagctttgcctccatgctgggcctcttccctgtgaccccagaggccgtgaagtctgtgctgctggtggtgctgcccctgcctgcctgcctgaaccccctgctgtacctgctcttcaacccccacttcagagatgacctgcggcggctgcggcccagggctggggacagcggccccctggcctatgctgctgctggggagctggagaagagcagctgtgacagcacccaggccctggtggccttcagtgatgtggacctgatcctggaggccagcgaggccggccggcccccaggcctggagacctacggcttccccagcgtgaccctcatcagctgccagcagcccggggccccccggctggagggcagccactgtgtggagcctgagggcaaccactttggaaacccccagcccagcatggatggagagctgctgctgcgggcagagggcagcaccccagctgggggcggcctgagcggcggcggcggcttccagcccagcggcctggcctttgccagccacgtgtag

SEQ ID NO: 26424 - DNA, 228 bp, Artificial Sequence
  derived and/or modified sequence
atgctgtctgctgactgcagcgagctgggcctgtctgctgtgcctggggacctggaccccctgacagcctacctggccgtgcccggcatggtggccgagggcaaggctgacagaactggaggcggcggcagcagcaggcctgagaagaccaggaggagcctggaggaggccatcgacaggaccatcggcggggcccaggagctgtgggcccctgaggtgagcagctag

SEQ ID NO: 26425 - DNA, 3567 bp, Artificial Sequence
  derived and/or modified sequence
gcccgccgggaccgggaggaagcagctgcggccatcgcgccgtgcgtccgcgcccggccgccaggtgccccagtagcccgaccgccgagatgcccagcccgccggggctccgggcgctatggctttgcgccgcgctgtgcgcttcccggagggccggcggcgccccccagcccggcccggggcccaccgcctgcccggccccctgccactgccaggaggacggcatcatgctgtctgccgactgctctgagctcgggctgtccgccgttccgggggacctggaccccctgacggcttacctggacctcagcatgaacaacctcacagagcttcagcctggcctcttccaccacctgcgcttcttggaggagctgcgtctctctgggaaccatctctcacacatcccaggacaagcattctctggtctctacagcctgaaaatcctgatgctgcagaacaatcagctgggaggaatccccgcagaggcgctgtgggagctgccgagcctgcagtcgctgcgcctagatgccaacctcatctccctggtcccggagaggagctttgaggggctgtcctccctccgccacctctggctggacgacaatgcactcacggagatccctgtcagggccctcaacaacctccctgccctgcaggccatgaccctggccctcaaccgcatcagccacatccccgactacgcgttccagaatctcaccagccttgtggtgctgcatttgcataacaaccgcatccagcatctggggacccacagcttcgaggggctgcacaatctggagacactagacctgaattataacaagctgcaggagttccctgtggccatccggaccctgggcagactgcaggaactggggttccataacaacaacatcaaggccatcccagaaaaggccttcatggggaaccctctgctacagacgatacacttttatgataacccaatccagtttgtgggaagatcggcattccagtacctgcctaaactccacacactatctctgaatggtgccatggacatccaggagtttccagatctcaaaggcaccaccagcctggagatcctgaccctgacccgcgcaggcatccggctgctcccatcggggatgtgccaacagctgcccaggctccgagtcctggaactgtctcacaatcaaattgaggagctgcccagcctgcacaggtgtcagaaattggaggaaatcggcctccaacacaaccgcatctgggaaattggagctgacaccttcagccagctgagctccctgcaagccctggatcttagctggaacgccatccggtccatccaccccgaggccttctccaccctgcactccctggtcaagctggacctgacagacaaccagctgaccacactgcccctggctggacttgggggcttgatgcatctgaagctcaaagggaaccttgctctctcccaggccttctccaaggacagtttcccaaaactgaggatcctggaggtgccttatgcctaccagtgctgtccctatgggatgtgtgccagcttcttcaaggcctctgggcagtgggaggctgaagaccttcaccttgatgatgaggagtcttcaaaaaggcccctgggcctccttgccagacaagcagagaaccactatgaccaggacctggatgagctccagctggagatggaggactcaaagccacaccccagtgtccagtgtagccctactccaggccccttcaagccctgtgagtacctctttgaaagctggggcatccgcctggccgtgtgggccatcgtgttgctctccgtgctctgcaatggactggtgctgctgaccgtgttcgctggcgggcctgtccccctgcccccggtcaagtttgtggtaggtgcgattgcaggcgccaacaccttgactggcatttcctgtggccttctagcctcagtcgatgccctgacctttggtcagttctctgagtacggagcccgctgggagacggggctaggctgccgggccactggcttcctggcagtacttgggtcggaggcatcggtgctgctgctcactctggccgcagtgcagtgcagcgtctccgtctcctgtgtccgggcctatgggaagtccccctccctgggcagcgttcgagcaggggtcctaggctgcctggcactggcagggctggccgccgcgctgcccctggcctcagtgggagaatacggggcctccccactctgcctgccctacgcgccacctgagggtcagccagcagccctgggcttcaccgtggccctggtgatgatgaactccttctgtttcctggtcgtggccggtgcctacatcaaactgtactgtgacctgccgcggggcgactttgaggccgtgtgggactgcgccatggtgaggcacgtggcctggctcatcttcgcagacgggctcctctactgtcccgtggccttcctcagctttgcctccatgctgggcctcttccctgtcacgcccgaggccgtcaagtctgtcctgctggtggtgctgcccctgcctgcctgcctcaacccactgctgtacctgctcttcaacccccacttccgggatgaccttcggcggcttcggccccgcgcaggggactcagggcccctagcctatgctgcggccggggagctggagaagagctcctgtgattctacccaggccctggtagccttctctgatgtggatctcattctggaagcttctgaagctgggcggccccctgggctggagacctatggcttcccctcagtgaccctcatctcctgtcagcagccaggggcccccaggctggagggcagccattgtgtagagccagaggggaaccactttgggaacccccaaccctccatggatggagaactgctgctgagggcagagggatctacgccagcaggtggaggcttgtcagggggtggcggctttcagccctctggcttggcctttgcttcacacgtgtaaatatccctccccattcttctcttcccctctcttccctttcctctctccccctcggtgaatgatggctgcttctaaaacaaatacaaccaaaactcagcagtgtgatctatagcaggatggcccagtccctggctccactgatcacctctctcctgtgaccatcaccaacgggtgcctcttggcctggctttcccttggccttcctcagcttcaccttgatactgggcctcttccttgtcatgtctgaagctgtggaccagagacctggacttttgtctgcttaagggaaatgagggaagtaaagacagtgaaggggtggagggttgatcagggcacagtggacagggagacctcacagagaaaggcctggaaggtgatttcccgtgtgactcatggataggatacaaaatgtgttccatgtaccattaatcttgacatatgccatgcataaagacttcctattaaaataagctttggaagagattacacatgatgtctttttcttagagattcacagtgcatgttagtgtaataaagagataagtcctacagtagtaaaatctattgaactttg

SEQ ID NO: 26426 - DNA, 546 bp, Artificial Sequence
  derived and/or modified sequence
cctgcccctctctgactgcaccgtcccggcgctcccaccgccgccgccgccgcccaatagagcccctggggcggtccccaccgacggtgcagcccgccgggaccgggaggaagcagctgcggccatcgcgccgtgcgtccgcgcccggccgccaggtgccccagtagcccgaccgccgagatgcccagcccgccggggctccgggcgctatggctttgcgccgcgctgtgcgcttcccggagggccggcggcgccccccagcccggcccggggcccaccgcctgcccggccccctgccactgccaggaggacggcatcatgctgtctgccgactgctctgagctcgggctgtccgccgttccgggggacctggaccccctgacggcttacctagcagtgcccgggatggtggctgagggtaaagctgacagaactggaggtggaggaagtagcaggccagagaagactcgaagatccttagaagaagccatagacagaactataggaggcgcccaggagctatgggctccagaagtttcctcttaa

SEQ ID NO: 26427 - DNA, 2904 bp, Artificial Sequence
  derived and/or modified sequence
atgcccagcccccccggcctgcgggccctgtggctgtgcgccgccctgtgtgcgtcccggagggctggcggagcaccacagcctggaccagggcccacagcgtgtccagcaccctgtcattgtcaggaggacgggataatgctaagtgctgactgctccgagttaggtctcagcgctgttccaggagatcttgaccccctcacagcgtatcttgacttatcaatgaataatctgacagaacttcaacctggtctctttcatcatttacgattcctggaagaactgaggctgagtggaaaccacctcagtcacatcccaggacaggcattctcgggtctctattctctcaaaatccttatgctgcagaataaccaactgggggggatacccgctgaggctttgtgggagctgccctcccttcagtctcttcgactcgatgctaacctcattagtctggtgccggaaaggtccttcgaggggttgagctccctgcggcacctgtggcttgacgataacgccctgaccgagatcccagttagagccctgaataaccttcccgccctccaggccatgacccttgcattgaaccgtatatctcatattcccgactacgcatttcagaatttgacctcactggtggtgcttcacctccacaataataggattcagcatctggggacgcattcattcgaaggtcttcataacttggagaccctcgatcttaattataacaagctacaggagtttcctgtagccatccggactctggggagactacaggaactcggattccacaataacaacattaaagctataccagaaaaggcgtttatgggcaaccccctcttacaaactattcatttttatgataatcctattcagttcgtaggcagaagcgctttccagtatctccccaagctgcatacactatctcttaacggagcaatggacattcaagagtttcccgaccttaagggtaccacttctctggaaatcctcaccttgactcgcgccggtattcgtttgttgccctccggcatgtgccaacaactgccgaggcttcgggtgctggaacttagccataatcagattgaagagctgccaagcttacaccggtgccagaagctcgaggagatcgggctccaacataaccgcatctgggagatcggcgccgatacctttagccagcttagttccctccaggcgttggacctgagctggaacgctattcggagtatccatccggaagcattcagtacgctacacagccttgtgaagctggatctgaccgataatcaactgactacactgcctctggcgggcctgggcggactcatgcacctgaaactcaaagggaacctggccctgtctcaagcattctctaaggactcattcccgaaactgaggatcctagaggtcccatacgcctaccagtgttgcccctacggaatgtgtgcctcctttttcaaagcgagtggacagtgggaggctgaggacctgcacctggacgatgaggagtccagtaaaagacctctcggactgctggcccgacaggccgagaaccattacgatcaggacctggatgagctccagctcgagatggaggatagcaaaccccatccatcagttcagtgcagccctacccctggaccgttcaagccttgcgagtatctgtttgagagctgggggatcagactcgccgtgtgggccatcgttctcctgtcagtattgtgtaatggactggttttgcttactgtcttcgccggaggtcctgtccctctcccgccagtcaaatttgtcgtgggggcaatcgcaggagccaatacactgactggcatcagctgtggtcttttagcttccgtggacgcgcttaccttcggccagtttagcgaatatggcgcccgttgggagacgggactggggtgtagagccacgggctttctggcggtcctcggatccgaggcttctgtgctgcttttgactctcgcagcggtccagtgttccgtatcagtcagctgtgtgcgtgcctatggaaaatcacctagtctgggcagtgtccgcgcaggcgtactcgggtgtcttgccttggcgggtctggccgctgccctccccctggctagtgttggcgaatacggagcttccccactctgcctgccatacgcgcccccagaaggacagcctgcagcccttgggtttactgttgctctagtcatgatgaatagtttctgctttttggtcgtggcaggagcttatattaagctctattgtgacctgcctcgtggcgactttgaagccgtgtgggactgcgccatggtgcgacatgtggcatggttaatattcgccgatggccttctgtattgcccggttgcatttctctcattcgcgtccatgctggggcttttcccagttacacccgaggctgttaaatccgtgcttctggtcgtactgccactgcccgcctgcttgaatccacttctgtatctactgttcaatccccatttccgtgacgacctgcggcggctcaggcctcgggctggcgacagcgggcctctcgcttatgccgccgccggcgagcttgagaaaagctcgtgcgattcaacacaggcgctcgttgcattttccgatgtggatcttatcctcgaagccagcgaggcagggcggcctccgggactggaaacatacggtttcccttctgtgacacttatcagctgccagcagcccggggctcctcgactcgaggggtcacattgcgtagaacctgagggtaatcattttgggaacccacagccgagtatggacggcgaattgctgttaagggcagaagggtctacccctgctggagggggactttctggaggcggagggttccaaccatccggcctagcattcgcctctcatgtgtag

SEQ ID NO: 26428 - DNA, 228 bp, Artificial Sequence
  derived and/or modified sequence
atgctgagcgccgactgcagcgagctgggcctgagcgccgtgcccggagatttggatcccttgaccgcctatctagccgttcccggcatggtggcagaaggcaaggcagacaggacgggcggggggggtagttcaaggccggagaagacccgcagatctctggaagaagccattgacaggactatcggcggtgcccaggaactgtgggctcccgaggtcagttcttag

SEQ ID NO: 26429 - DNA, 2904 bp, Artificial Sequence
  derived and/or modified sequence
atgccttcccctccagggctgagagcgttatggctctgcgccgcactttgcgcttcgcgcagagccggaggtgcaccgcagccaggacccggaccgaccgcctgtcccgctccatgccactgtcaggaagatggcattatgctgagtgctgattgcagtgaactgggcttaagcgcagttccaggagatctcgacccactgactgcatacctcgatctctcaatgaataaccttactgagcttcaacccggactcttccaccacctgcggttcctggaagaactcaggctgtctggtaaccatctgtcccatatacctgggcaggctttctcaggtctctactccctaaagatactgatgcttcagaacaaccaacttggaggcatcccagcagaagctctgtgggaactgccttcactgcagtccctccggctggatgctaatctgatcagcctggtaccggagaggtcctttgaaggcctctcttccttgagacatctgtggttagatgacaatgctcttaccgagattcccgtccgcgctcttaataacctgccagctctgcaggccatgacactggcgctgaaccgcatttcccatattccagattatgccttccaaaatctgaccagcctggtggtcttgcacctgcacaacaatcggattcagcatctcggaacacactctttcgagggcctgcacaacctggagacactcgatttgaattacaataagctgcaggagttccccgtggcaatccggactctgggcaggcttcaggagttgggcttccacaacaacaatatcaaagccatccccgaaaaggcatttatgggtaatcctctgctacagacaatacacttctacgataacccaatccagtttgtggggcgttcagcatttcaatatctcccaaaacttcacaccctctccttgaatggcgcaatggacattcaggagttccccgacctgaaggggacgacatctctcgagatcctgaccctgactcgggctggcattagactgctgccgagtggcatgtgtcaacagttgccacgcctcagggtgctggaattaagtcacaaccagatagaagagctgccaagcctgcatcgctgtcaaaaattggaagaaatcgggttgcagcacaatcgcatctgggaaattggggcagatactttttcgcagctgagctcactgcaagccctcgacctctcatggaatgcgatccgttcaatccatcctgaggccttctctaccctgcactcattggtcaagctcgatcttaccgataatcaactaactacattgccactggcaggtcttgggggactgatgcatctaaagctgaagggcaacctggccctgagccaagcattttccaaagatagttttcctaaacttaggatcctagaggtgccttacgcctatcaatgctgtccttacggtatgtgcgccagctttttcaaggcttccggtcagtgggaagccgaggacctccacttggatgacgaggaaagtagcaaaaggcctctgggcctactggccaggcaggctgaaaatcattatgatcaggatttggacgaactgcagcttgagatggaggactccaagccccacccctccgtgcagtgctctccaaccccagggccttttaaaccatgtgagtacctgttcgagagctgggggattagattggcagtatgggccatcgtcctgctgagtgtgctttgcaatggcctcgtattattaacggtgttcgcaggcggacctgtacccctacccccagttaagttcgtagttggggctattgcaggcgctaatactctcaccggcatttcatgcggcctcctggcgtccgtggatgcacttacatttgggcagttctccgagtatggagcaagatgggaaaccgggctcggctgtcgcgctacgggcttcttggcagtgctggggagcgaggcaagcgtgctgcttttaaccttggccgctgtccagtgttccgtgtccgtgtcctgcgttagagcttacggaaaaagcccgagtttggggtccgttagggcaggcgtgttaggttgtctggcactggcaggcctagctgctgcattgccactggcctccgtaggtgaatacggggcttcccccctgtgccttccctatgcacctccagaggggcagcccgcagctctgggcttcaccgtcgccctggtgatgatgaacagtttttgctttctggtcgttgcaggagcctacattaagctctactgtgatctccctaggggagattttgaggcagtgtgggactgcgcgatggtgaggcacgtcgcctggctgatcttcgcagacggtctgctctattgtcctgtggccttcctcagttttgccagtatgctggggctcttccctgtgacgcccgaggcagtcaagtccgtgctgctggttgtgctgcctctgcccgcatgcctgaatcccctcctgtacctgctatttaacccgcactttcgggacgatctccgacgcctccgtccgagggccggagactccggaccgcttgcctatgccgctgctggtgagctggaaaagagctcttgtgactccacccaggcactggtggcgttctcagacgtggacctaatcctggaggcttccgaggctggacgaccgccaggattagagacatacggattccctagcgtcacgctaatcagttgtcagcaacctggcgctccaaggctcgagggttcccattgcgtggagcctgaaggcaatcactttggcaacccccagccttctatggacggggaactcctcttaagggctgagggcagcactccggcaggcggaggtctcagtgggggtgggggattccagccctccggattagcctttgcgtctcatgtgtag

SEQ ID NO: 26430 - DNA, 228 bp, Artificial Sequence
  derived and/or modified sequence
atgttgtctgctgactgcagcgaacttggccttagcgcggtccctggtgacctcgatcctttgacggcctatcttgcagtgcccggaatggtggccgaaggtaaagcggatagaaccgggggaggagggtcaagccgacccgaaaaaacccggcgtagcctcgaagaagccatcgaccgaaccattggcggtgcgcaggagctgtgggcccctgaagtctcgagctag

SEQ ID NO: 26431 - DNA, 2904 bp, Artificial Sequence
  derived and/or modified sequence
atgcccagcccccccggcctgagagccctgtggctgtgcgccgccctgtgcgccagcagaagagccggcggcgccccccagcccggccccggccccaccgcctgccccgccccctgccactgccaggaggacggcatcatgctgagcgccgactgcagcgagctgggcctgagcgccgtgcccggcgacctggaccccctgaccgcctacctggacctgagcatgaacaacctgaccgagctgcagcccggcctgttccaccacctgagattcctggaggagctgagactgagcggcaaccacctgagccacatccccggccaggccttcagcggcctgtacagcctgaagatcctgatgctgcagaacaaccagctgggcggcatccccgccgaggccctgtgggagctgcccagcctgcagagcctgagactggacgccaacctgatcagcctggtgcccgagagaagcttcgagggcctgagcagcctgagacacctgtggctggacgacaacgccctgaccgagatccccgtgagagccctgaacaacctgcccgccctgcaggccatgaccctggccctgaacagaatcagccacatccccgactacgccttccagaacctgaccagcctggtggtgctgcacctgcacaacaacagaatccagcacctgggcacccacagcttcgagggcctgcacaacctggagaccctggacctgaactacaacaagctgcaggagttccccgtggccatcagaaccctgggcagactgcaggagctgggcttccacaacaacaacatcaaggccatccccgagaaggccttcatgggcaaccccctgctgcagaccatccacttctacgacaaccccatccagttcgtgggcagaagcgccttccagtacctgcccaagctgcacaccctgagcctgaacggcgccatggacatccaggagttccccgacctgaagggcaccaccagcctggagatcctgaccctgaccagagccggcatcagactgctgcccagcggcatgtgccagcagctgcccagactgagagtgctggagctgagccacaaccagatcgaggagctgcccagcctgcacagatgccagaagctggaggagatcggcctgcagcacaacagaatctgggagatcggcgccgacaccttcagccagctgagcagcctgcaggccctggacctgagctggaacgccatcagaagcatccaccccgaggccttcagcaccctgcacagcctggtgaagctggacctgaccgacaaccagctgaccaccctgcccctggccggcctgggcggcctgatgcacctgaagctgaagggcaacctggccctgagccaggccttcagcaaggacagcttccccaagctgagaatcctggaggtgccctacgcctaccagtgctgcccctacggcatgtgcgccagcttcttcaaggccagcggccagtgggaggccgaggacctgcacctggacgacgaggagagcagcaagagacccctgggcctgctggccagacaggccgagaaccactacgaccaggacctggacgagctgcagctggagatggaggacagcaagccccaccccagcgtgcagtgcagccccacccccggccccttcaagccctgcgagtacctgttcgagagctggggcatcagactggccgtgtgggccatcgtgctgctgagcgtgctgtgcaacggcctggtgctgctgaccgtgttcgccggcggccccgtgcccctgccccccgtgaagttcgtggtgggcgccatcgccggcgccaacaccctgaccggcatcagctgcggcctgctggccagcgtggacgccctgaccttcggccagttcagcgagtacggcgccagatgggagaccggcctgggctgcagagccaccggcttcctggccgtgctgggcagcgaggccagcgtgctgctgctgaccctggccgccgtgcagtgcagcgtgagcgtgagctgcgtgagagcctacggcaagagccccagcctgggcagcgtgagagccggcgtgctgggctgcctggccctggccggcctggccgccgccctgcccctggccagcgtgggcgagtacggcgccagccccctgtgcctgccctacgccccccccgagggccagcccgccgccctgggcttcaccgtggccctggtgatgatgaacagcttctgcttcctggtggtggccggcgcctacatcaagctgtactgcgacctgcccagaggcgacttcgaggccgtgtgggactgcgccatggtgagacacgtggcctggctgatcttcgccgacggcctgctgtactgccccgtggccttcctgagcttcgccagcatgctgggcctgttccccgtgacccccgaggccgtgaagagcgtgctgctggtggtgctgcccctgcccgcctgcctgaaccccctgctgtacctgctgttcaacccccacttcagagacgacctgagaagactgagacccagagccggcgacagcggccccctggcctacgccgccgccggcgagctggagaagagcagctgcgacagcacccaggccctggtggccttcagcgacgtggacctgatcctggaggccagcgaggccggcagaccccccggcctggagacctacggcttccccagcgtgaccctgatcagctgccagcagcccggcgcccccagactggagggcagccactgcgtggagcccgagggcaaccacttcggcaacccccagcccagcatggacggcgagctgctgctgagagccgagggcagcacccccgccggcggcggcctgagcggcggcggcggcttccagcccagcggcctggccttcgccagccacgtgtag

SEQ ID NO: 26432 - DNA, 228 bp, Artificial Sequence
  derived and/or modified sequence
atgctgagcgccgactgcagcgagctgggcctgagcgccgtgcccggcgacctggaccccctgaccgcctacctggccgtgcccggcatggtggccgagggcaaggccgacagaaccggcggcggcggcagcagcagacccgagaagaccagaagaagcctggaggaggccatcgacagaaccatcggcggcgcccaggagctgtgggcccccgaggtgagcagctag

SEQ ID NO: 26433 - protein, 828 aa, Artificial Sequence
  derived and/or modified sequence
MRLEGEGRSARAGQNLSRAGSARRGAPRDLSMNNLTELQPGLFHHLRFLEELRLSGNHLSHIPGQAFSGLYSLKILMLQNNQLGGIPAEALWELPSLQSLDLNYNKLQEFPVAIRTLGRLQELGFHNNNIKAIPEKAFMGNPLLQTIHFYDNPIQFVGRSAFQYLPKLHTLSLNGAMDIQEFPDLKGTTSLEILTLTRAGIRLLPSGMCQQLPRLRVLELSHNQIEELPSLHRCQKLEEIGLQHNRIWEIGADTFSQLSSLQALDLSWNAIRSIHPEAFSTLHSLVKLDLTDNQLTTLPLAGLGGLMHLKLKGNLALSQAFSKDSFPKLRILEVPYAYQCCPYGMCASFFKASGQWEAEDLHLDDEESSKRPLGLLARQAENHYDQDLDELQLEMEDSKPHPSVQCSPTPGPFKPCEYLFESWGIRLAVWAIVLLSVLCNGLVLLTVFAGGPVPLPPVKFVVGAIAGANTLTGISCGLLASVDALTFGQFSEYGARWETGLGCRATGFLAVLGSEASVLLLTLAAVQCSVSVSCVRAYGKSPSLGSVRAGVLGCLALAGLAAALPLASVGEYGASPLCLPYAPPEGQPAALGFTVALVMMNSFCFLVVAGAYIKLYCDLPRGDFEAVWDCAMVRHVAWLIFADGLLYCPVAFLSFASMLGLFPVTPEAVKSVLLVVLPLPACLNPLLYLLFNPHFRDDLRRLRPRAGDSGPLAYAAAGELEKSSCDSTQALVAFSDVDLILEASEAGRPPGLETYGFPSVTLISCQQPGAPRLEGSHCVEPEGNHFGNPQPSMDGELLLRAEGSTPAGGGLSGGGGFQPSGLAFASHV

SEQ ID NO: 26434 - DNA, 2487 bp, Artificial Sequence
  derived and/or modified sequence
atgcgccttgaaggcgaagggaggagtgctagagccggacagaatctgagcagagccggatctgctcggagaggtgctccacgcgatttatctatgaataatctcactgaactgcagccgggcctgtttcaccatctgcggtttctggaggagctccggctgagtggcaatcatttaagccatataccggggcaagcctttagcggcttgtactccctgaaaattctaatgctccaaaacaaccagctaggagggattcccgcagaagccctctgggaactccccagtcttcagagcctggatctcaattataataaactgcaagagttccctgtagctattcggaccctgggacggctgcaagagcttggctttcataacaataacatcaaggccatccccgaaaaagcattcatgggaaatccgctcctgcagaccattcacttctatgacaatcctatacagttcgtgggacggtcagcctttcaatatttgcctaagttgcacacactctcacttaatggagccatggatattcaggagtttcctgaccttaaaggcaccacgtccctcgagatattgaccctcacacgtgctggaattagactccttccttccggaatgtgtcaacagctcccccgcctgcgggttctggaactgagtcataaccagattgaggagctgccctctttgcacagatgccagaagttggaggagatcggcctgcagcacaaccggatttgggagattggcgccgacacctttagccaactgtccagcctacaggcgctggacctgtcgtggaatgccattcggagtatccatcctgaagctttcagcaccctgcattcactggtgaagctggatttaacagataaccagctgacaaccttacccttagcgggcttgggcgggctcatgcatctcaagctaaagggtaacttagccctgtctcaggcgtttagtaaggactctttccccaaactgagaattctagaagtgccatatgcctatcaatgctgtccttatggtatgtgtgcgtcctttttcaaagctagcgggcaatgggaggccgaggacctgcatttagacgatgaggagagctccaagaggccgctggggcttcttgcgaggcaggccgagaatcactatgatcaggacttagatgaactacagctagagatggaggatagtaagcctcacccctctgttcagtgttctcccacacctggcccatttaaaccttgcgaatatctgttcgagtcttggggaatacggctggcagtgtgggccattgtactgctgagcgttctgtgcaacggattggtattgctgactgtgtttgccggcggacctgtcccgctacctcccgtaaagttcgtcgtaggagctatcgctggtgctaacaccttgacaggaatctcgtgcggcctattagcttctgtcgacgcactgacctttgggcagttttccgaatatggagcacggtgggaaacagggcttggatgtagagccacaggcttcctggcagtgctcgggagcgaagcgagcgtcctcctgctgacgcttgcagcggttcaatgcagtgtgtctgtttcctgcgtacgcgcttatggaaaaagtcccagtctcgggagcgttagggcaggcgtgcttggttgcctcgccctggccggactcgccgcggccttgcctctggctagtgtcggcgaatacggtgcctcacctctgtgcctaccttatgcccctccggaaggtcaacctgcagcgctcggctttaccgttgcccttgtgatgatgaattccttctgttttctggtggtcgccggtgcctatattaaactgtattgtgatctgcctaggggggatttcgaggctgtgtgggactgcgccatggtgagacacgtcgcctggctgatctttgctgatggactgctgtactgccccgtggcctttctttcattcgctagcatgctcgggctgtttcccgttacccctgaggccgttaagagcgtactgctggtggtcttgcccctcccagcctgcttgaatccactactctacctcctgttcaacccacatttccgtgacgacctccggcggctgcgccctcgagcaggggacagtggccctcttgcttacgcagcggcaggcgagctggaaaaaagctcctgcgattcgactcaggctttagttgccttctctgacgtagacctgattctggaggcatcggaggccgggcgccctcccggactagagacctacggcttccctagcgtgacgctgatcagctgtcagcagccaggcgccccccgcctggaaggatcccattgtgtcgagccagagggaaatcactttgggaacccccagccctccatggacggagagcttctacttagggcagaaggctcaacaccagcaggtggcggcctgtccggtggagggggattccaaccatcaggactcgcattcgccagtcacgtatag

SEQ ID NO: 26435 - DNA, 2487 bp, Artificial Sequence
  derived and/or modified sequence
atgaggctggagggggagggccgcagcgcccgggccggccagaacctgagcagagctggcagcgccaggagaggagccccccgggacctgtccatgaacaacctgacagagctgcagcccggcctcttccaccacctgcgcttcctggaggagctgcggctgagcggcaaccacctgagccacatccctggccaggccttcagcggcctgtacagcctgaagatcctgatgctgcagaacaaccagctgggcggcatcccagctgaggccctgtgggagctgcccagcctgcagagcctggacctgaactacaacaagctgcaggagttccctgtggccatccgcaccctgggccgcctgcaggagctgggcttccacaacaacaacatcaaggccatccctgagaaggccttcatgggcaaccccctgctgcagaccatccacttctatgacaaccccatccagtttgtgggccgcagcgccttccagtacctgcccaagctgcacaccctgagcctgaatggagccatggacatccaggagttcccagacctgaagggcaccaccagcctggagatcctgaccctgaccagggctggcatccggctgctgcccagcggcatgtgccagcagctgccccggctgcgggtgctggagctgagccacaaccagatcgaggagctgcccagcctgcaccgctgccagaagctggaggagatcggcctgcagcacaaccgcatctgggagatcggggctgacaccttcagccagctgagcagcctgcaggccctggacctgtcctggaatgccatccgcagcatccaccctgaggccttcagcaccctgcacagcctggtgaagctggacctgacagacaaccagctgaccaccctgcccctggccggcctgggcggcctgatgcacctgaagctgaagggcaacctggccctgagccaggccttcagcaaggacagcttccccaagctgcgcatcctggaggtgccctatgcctaccagtgctgcccctacggcatgtgtgccagcttcttcaaggccagcggccagtgggaggccgaggacctgcacctggatgatgaggagagcagcaagaggcccctgggcctgctggcccggcaggccgagaaccactatgaccaggacctggatgagctgcagctggagatggaggacagcaagccccaccccagcgtgcagtgcagccccaccccaggccccttcaagccctgtgagtacctgtttgagagctggggcatccggctggccgtgtgggccatcgtgctgctgtctgtgctgtgcaatggcctggtgctgctgactgtgtttgctgggggccctgtgcccctgccccctgtgaagtttgtggtgggcgccatcgccggggccaacaccctgaccggcatcagctgtggcctgctggcctctgtggatgccctgaccttcggccagttctctgaatatggagcccgctgggagaccggcctgggctgccgggccaccggcttcctggccgtgctgggcagcgaggcctctgtgctgctgctgaccctggccgctgtgcagtgcagcgtgtctgtgtcctgtgtgcgggcctacggcaagagccccagcctgggctctgtgcgggccggcgtgctgggctgcctggccctggccggcctggccgccgccctgcccctggcctctgtgggggagtatggagccagccccctgtgcctgccctatgcccctcctgagggccagcctgctgccctgggcttcaccgtggccctggtgatgatgaacagcttctgcttcctggtggtggccggggcctacatcaagctgtactgtgacctgcccaggggggactttgaggccgtgtgggactgtgccatggtgagacatgtggcctggctgatctttgctgatggcctgctgtactgccctgtggccttcctgagctttgcctccatgctgggcctcttccctgtgaccccagaggccgtgaagtctgtgctgctggtggtgctgcccctgcctgcctgcctgaaccccctgctgtacctgctcttcaacccccacttcagagatgacctgcggcggctgcggccccgggccggggacagcggccccctggcctatgctgctgctggggagctggagaagagcagctgtgacagcacccaggccctggtggccttcagtgatgtggacctgatcctggaggccagcgaggccggccggcccccaggcctggagacctacggcttccccagcgtgaccctcatcagctgccagcagcccggggccccccggctggagggcagccactgtgtggagcctgagggcaaccacttcggcaacccccagcccagcatggatggagagctgctgctgcgggcagagggcagcaccccagctgggggcggcctgagcggcggcggcggcttccagcccagcggcctggcctttgccagccacgtgtag

SEQ ID NO: 26436 - DNA, 2487 bp, Artificial Sequence
  derived and/or modified sequence
atgcgcttggagggagagggccgctcagcgagggcgggacagaacctctcccgggctgggagtgcacggcgcggtgcgcccagggacctcagcatgaacaacctcacagagcttcagcctggcctcttccaccacctgcgcttcttggaggagctgcgtctctctgggaaccatctctcacacatcccaggacaagcattctctggtctctacagcctgaaaatcctgatgctgcagaacaatcagctgggaggaatccccgcagaggcgctgtgggagctgccgagcctgcagtcgctagacctgaattataacaagctgcaggagttccctgtggccatccggaccctgggcagactgcaggaactggggttccataacaacaacatcaaggccatcccagaaaaggccttcatggggaaccctctgctacagacgatacacttttatgataacccaatccagtttgtgggaagatcggcattccagtacctgcctaaactccacacactatctctgaatggtgccatggacatccaggagtttccagatctcaaaggcaccaccagcctggagatcctgaccctgacccgcgcaggcatccggctgctcccatcggggatgtgccaacagctgcccaggctccgagtcctggaactgtctcacaatcaaattgaggagctgcccagcctgcacaggtgtcagaaattggaggaaatcggcctccaacacaaccgcatctgggaaattggagctgacaccttcagccagctgagctccctgcaagccctggatcttagctggaacgccatccggtccatccaccccgaggccttctccaccctgcactccctggtcaagctggacctgacagacaaccagctgaccacactgcccctggctggacttgggggcttgatgcatctgaagctcaaagggaaccttgctctctcccaggccttctccaaggacagtttcccaaaactgaggatcctggaggtgccttatgcctaccagtgctgtccctatgggatgtgtgccagcttcttcaaggcctctgggcagtgggaggctgaagaccttcaccttgatgatgaggagtcttcaaaaaggcccctgggcctccttgccagacaagcagagaaccactatgaccaggacctggatgagctccagctggagatggaggactcaaagccacaccccagtgtccagtgtagccctactccaggccccttcaagccctgtgagtacctctttgaaagctggggcatccgcctggccgtgtgggccatcgtgttgctctccgtgctctgcaatggactggtgctgctgaccgtgttcgctggcgggcctgtccccctgcccccggtcaagtttgtggtaggtgcgattgcaggcgccaacaccttgactggcatttcctgtggccttctagcctcagtcgatgccctgacctttggtcagttctctgagtacggagcccgctgggagacggggctaggctgccgggccactggcttcctggcagtacttgggtcggaggcatcggtgctgctgctcactctggccgcagtgcagtgcagcgtctccgtctcctgtgtccgggcctatgggaagtccccctccctgggcagcgttcgagcaggggtcctaggctgcctggcactggcagggctggccgccgcgctgcccctggcctcagtgggagaatacggggcctccccactctgcctgccctacgcgccacctgagggtcagccagcagccctgggcttcaccgtggccctggtgatgatgaactccttctgtttcctggtcgtggccggtgcctacatcaaactgtactgtgacctgccgcggggcgactttgaggccgtgtgggactgcgccatggtgaggcacgtggcctggctcatcttcgcagacgggctcctctactgtcccgtggccttcctcagctttgcctccatgctgggcctcttccctgtcacgcccgaggccgtcaagtctgtcctgctggtggtgctgcccctgcctgcctgcctcaacccactgctgtacctgctcttcaacccccacttccgggatgaccttcggcggcttcggccccgcgcaggggactcagggcccctagcctatgctgcggccggggagctggagaagagctcctgtgattctacccaggccctggtagccttctctgatgtggatctcattctggaagcttctgaagctgggcggccccctgggctggagacctatggcttcccctcagtgaccctcatctcctgtcagcagccaggggcccccaggctggagggcagccattgtgtagagccagaggggaaccactttgggaacccccaaccctccatggatggagaactgctgctgagggcagagggatctacgccagcaggtggaggcttgtcagggggtggcggctttcagccctctggcttggcctttgcttcacacgtgtaa

SEQ ID NO: 26437 - DNA, 2487 bp, Artificial Sequence
  derived and/or modified sequence
atgcggctggagggcgagggccggagcgcccgggccggccagaacctgagcagggctgggagcgcaaggcgtggcgccccaagggatctttctatgaacaacctgactgaattacagccaggtctgtttcaccacttgagatttctcgaggagttgcgcctgagtggtaaccatctgtcacacattcccgggcaggctttcagcgggctttatagtctcaagattctgatgcttcaaaacaatcagctcggtgggattcccgccgaggccctctgggaactcccctctctccaaagcctggacctgaactataataagcttcaagaattcccagtcgccatccgaactctcgggagactacaagagctaggctttcacaacaacaacataaaagcaattcccgaaaaagcatttatgggaaatcctctccttcagacaatccatttctacgacaatccaattcagttcgtgggcagatccgctttccagtatctgccaaagttgcataccctgagcctaaacggggccatggacatccaggaattcccggatctcaaagggaccacaagcctggagatcctgacactgacacgggcaggcattaggctgctcccctcggggatgtgccagcagctgcccagactgagggtgcttgagctgagccataatcagattgaagagctgccgagcttgcaccggtgtcagaagctggaggaaattggcctgcaacataaccgtatatgggagataggcgccgacaccttcagtcagctgtcttcactgcaggcacttgacctgagctggaatgccattcgatccatacatcctgaggctttcagcacgctgcatagcctggtgaaactcgacctgaccgacaaccaactcactactctgcctttagccgggctgggcgggctgatgcaccttaagctgaagggaaatctcgccctgtcacaggccttctcaaaagactccttccctaaactgagaatacttgaagtgccgtatgcctaccagtgttgtccctatggcatgtgcgcgagttttttcaaagccagcggacagtgggaagccgaggatctgcatctggacgacgaagagagtagtaaacgcccactaggcctcctggcgcggcaggctgagaatcactacgaccaggaccttgacgaattacagctcgagatggaagattccaagccacaccctagtgttcagtgcagcccaacacccgggcccttcaaaccgtgcgagtatttattcgaatcatgggggattagactggctgtgtgggctattgtgctgcttagcgtcctgtgcaatggcttagttcttctcaccgtttttgctggaggccctgttccattgcctcccgtgaagttcgtcgttggcgcaatcgcaggggccaatacacttaccggcatcagttgcgggctattggccagcgtcgacgcactgacgttcggacaattttcagagtacggagcaaggtgggagaccggccttggatgccgagcaaccggatttctagctgtgcttggatcggaggctagtgtgcttctgctgacgttagctgcagtgcagtgttccgtaagtgtgtcatgtgtccgcgcttatggcaagtccccgagcttaggatccgttagggctggagtcctaggctgcttggccttagccgggctcgccgccgcattacccctggctagtgtaggagagtacggcgcttcaccattatgcctgccttacgctccgccagagggacaaccagcggcactgggcttcacagtcgcgcttgtcatgatgaacagtttttgtttcttggtggtagccggagcttacattaaattgtattgcgacctgccaaggggtgatttcgaggctgtgtgggactgcgctatggtgaggcatgtggcatggttgattttcgcggatggtctgctctattgccccgtggcgttcctgagcttcgcgtcaatgctggggttgtttcccgtcactccagaagcagtgaaatccgtgttactggtagtgctgcccctccctgcatgtctcaaccctctgctatacctcctgttcaatcctcactttcgtgatgacctgagaaggctgagacctcgggcaggcgactcagggccactcgcttacgccgcagccggtgagttggaaaaaagttcctgcgatagcacgcaggcattggtggctttcagcgacgtggaccttatcctcgaggctagtgaggccggaaggcctcccggacttgagacctatggcttcccaagtgtcacgctgatctcctgtcaacagcccggggctccaaggctcgaaggatctcattgtgttgaacccgaagggaaccattttggcaaccctcaaccctccatggacggagaactcctcctccgcgctgaaggctctactcctgctggaggtgggctatcaggtggtggggggtttcagccctccggcctggcctttgcctctcacgtttag

SEQ ID NO: 26438 - DNA, 2487 bp, Artificial Sequence
  derived and/or modified sequence
atgaggctggaaggggagggaagaagcgcccgagccggtcagaacttgtcaagggctggctcagccagaaggggggcaccacgggacctgtcaatgaacaacctgacagagctccagccgggactgtttcaccatttacgctttcttgaagaacttagacttagcggtaaccatctcagccatattccaggtcaagcatttagtggcctgtactctctgaagatcctgatgcttcagaataatcaactgggaggaatccccgctgaggctctgtgggaactgcctagtctgcagagtctggacctgaattacaacaaactgcaagaattccccgtggcaatccgaaccctcggccgtctacaggaactgggctttcacaataacaatattaaagccatccccgaaaaagcctttatgggtaaccctctgctgcagacaattcatttctacgataatccaattcaattcgttgggagatccgcctttcagtatcttccaaaacttcatactttatcattaaatggcgctatggatatccaagagttccccgacctgaagggcacaacctccctggaaattctgacccttaccagggccggaatccgccttctgcccagcggcatgtgccagcaactgcccaggttgcgagtgctcgaactgtctcataatcagattgaggagcttccatcactccacaggtgccagaagctggaagagattgggctacagcacaacagaatctgggaaattggcgctgacaccttctcccagctgtctagcctgcaggccctggacttatcctggaatgctattaggtcgattcaccccgaagcttttagcacattgcattcgctcgtaaaactagacttaaccgacaatcagctgacgactttacctttggctggcctcggcggtctgatgcacctgaagttgaaagggaatctggccctgagtcaggcattctccaaggacagttttccaaagctcagaattttagaggtgccctatgcctatcagtgctgcccatacggaatgtgcgccagttttttcaaggcctccgggcagtgggaagccgaggacctgcacttagacgatgaggagtcatccaagaggccgctgggcctcttggctaggcaagctgaaaaccattacgaccaggatttggatgagctccaacttgagatggaagactctaagcctcacccatccgtgcaatgcagtccgacccccggtcccttcaaaccttgtgaatatcttttcgagtcctggggcatccggcttgccgtgtgggcaatcgtactcctcagcgttttgtgcaatggactggttttgctgacagtgtttgctggcggaccagtgcctctgcctccagtcaaatttgttgtcggcgcaatcgccggtgccaatactctaactggtattagctgtgggctcttggctagtgttgacgccctcacatttgggcagtttagtgagtacggggcacgttgggagactggccttgggtgcagagccaccggtttcttggccgtcttgggtagcgaagcctccgtactgttgcttaccttagctgcagtccagtgcagcgtctccgtttcatgcgtcagagcgtacggtaagtcgccgagcctgggatctgttcgggctggtgtactgggatgtctggcattggctggcctggcagccgctctgcccctggcatctgtcggggagtacggggcatcaccgctatgcctcccatacgcacccccagaggggcagccagcagctttgggattcacagtggccctggttatgatgaatagcttctgcttcttggttgtagcaggcgcttacattaagctttattgtgacctaccacgaggggatttcgaggctgtctgggattgtgcaatggtgcgacatgtggcatggcttatcttcgccgatggcctactctactgtccggtcgcgtttttaagcttcgccagcatgttggggctgttccctgtgactcccgaggccgtgaaatccgtgcttcttgtcgtgcttcccttgcccgcttgtctaaaccctctgctttatctcctgttcaatccccacttcagagacgatttgcgcagactcagaccacgagccggtgactccggccctctcgcgtatgccgcagctggggaacttgaaaagtcttcctgcgactctactcaggcattggtggctttttccgacgtggacctgattctggaggcatcggaggccggacggcctcccggactggagacctatgggtttccttccgtgacgttaattagttgccaacaacccggagccccacgtttagaaggatctcactgcgtcgagcctgaggggaatcactttggtaaccctcagcccagtatggacggcgagctgctgttgagggccgaaggatctaccccagctggcggtggcctgtccggtggtgggggtttccagccctcaggtctggccttcgcaagccatgtgtag

SEQ ID NO: 26439 - DNA, 2487 bp, Artificial Sequence
  derived and/or modified sequence
atgagactggagggcgagggcagaagcgccagagccggccagaacctgagcagagccggcagcgccagaagaggcgcccccagagacctgagcatgaacaacctgaccgagctgcagcccggcctgttccaccacctgagattcctggaggagctgagactgagcggcaaccacctgagccacatccccggccaggccttcagcggcctgtacagcctgaagatcctgatgctgcagaacaaccagctgggcggcatccccgccgaggccctgtgggagctgcccagcctgcagagcctggacctgaactacaacaagctgcaggagttccccgtggccatcagaaccctgggcagactgcaggagctgggcttccacaacaacaacatcaaggccatccccgagaaggccttcatgggcaaccccctgctgcagaccatccacttctacgacaaccccatccagttcgtgggcagaagcgccttccagtacctgcccaagctgcacaccctgagcctgaacggcgccatggacatccaggagttccccgacctgaagggcaccaccagcctggagatcctgaccctgaccagagccggcatcagactgctgcccagcggcatgtgccagcagctgcccagactgagagtgctggagctgagccacaaccagatcgaggagctgcccagcctgcacagatgccagaagctggaggagatcggcctgcagcacaacagaatctgggagatcggcgccgacaccttcagccagctgagcagcctgcaggccctggacctgagctggaacgccatcagaagcatccaccccgaggccttcagcaccctgcacagcctggtgaagctggacctgaccgacaaccagctgaccaccctgcccctggccggcctgggcggcctgatgcacctgaagctgaagggcaacctggccctgagccaggccttcagcaaggacagcttccccaagctgagaatcctggaggtgccctacgcctaccagtgctgcccctacggcatgtgcgccagcttcttcaaggccagcggccagtgggaggccgaggacctgcacctggacgacgaggagagcagcaagagacccctgggcctgctggccagacaggccgagaaccactacgaccaggacctggacgagctgcagctggagatggaggacagcaagccccaccccagcgtgcagtgcagccccacccccggccccttcaagccctgcgagtacctgttcgagagctggggcatcagactggccgtgtgggccatcgtgctgctgagcgtgctgtgcaacggcctggtgctgctgaccgtgttcgccggcggccccgtgcccctgccccccgtgaagttcgtggtgggcgccatcgccggcgccaacaccctgaccggcatcagctgcggcctgctggccagcgtggacgccctgaccttcggccagttcagcgagtacggcgccagatgggagaccggcctgggctgcagagccaccggcttcctggccgtgctgggcagcgaggccagcgtgctgctgctgaccctggccgccgtgcagtgcagcgtgagcgtgagctgcgtgagagcctacggcaagagccccagcctgggcagcgtgagagccggcgtgctgggctgcctggccctggccggcctggccgccgccctgcccctggccagcgtgggcgagtacggcgccagccccctgtgcctgccctacgccccccccgagggccagcccgccgccctgggcttcaccgtggccctggtgatgatgaacagcttctgcttcctggtggtggccggcgcctacatcaagctgtactgcgacctgcccagaggcgacttcgaggccgtgtgggactgcgccatggtgagacacgtggcctggctgatcttcgccgacggcctgctgtactgccccgtggccttcctgagcttcgccagcatgctgggcctgttccccgtgacccccgaggccgtgaagagcgtgctgctggtggtgctgcccctgcccgcctgcctgaaccccctgctgtacctgctgttcaacccccacttcagagacgacctgagaagactgagacccagagccggcgacagcggccccctggcctacgccgccgccggcgagctggagaagagcagctgcgacagcacccaggccctggtggccttcagcgacgtggacctgatcctggaggccagcgaggccggcagaccccccggcctggagacctacggcttccccagcgtgaccctgatcagctgccagcagcccggcgcccccagactggagggcagccactgcgtggagcccgagggcaaccacttcggcaacccccagcccagcatggacggcgagctgctgctgagagccgagggcagcacccccgccggcggcggcctgagcggcggcggcggcttccagcccagcggcctggccttcgccagccacgtgtag

SEQ ID NO: 26440 - protein, 396 aa, Artificial Sequence
  derived and/or modified sequence
MAVQESAAQLSMTLKVQEYPTLKVPYETLNKRFRAAQKNIDRETSHVTMVVAELEKTLSGCPAVDSVVSLLDGVVEKLSVLKRKAVESIQAEDESAKLCKRRIEHLKEHSSDQPAAASVWKRKRMDRMMVEHLLRCGYYNTAVKLARQSGIEDLVNIEMFLTAKEVEESLERRETATCLAWCHDNKSRLRKMKSCLEFSLRIQEFIELIRQNKRLDAVRHARKHFSQAEGSQLDEVRQAMGMLAFPPDTHISPYKDLLDPARWRMLIQQFRYDNYRLHQLGNNSVFTLTLQAGLSAIKTPQCYKEDGSSKSPDCPVCSRSLNKLAQPLPMAHCANSRLVCKISGDVMNENNPPMMLPNGYVYGYNSLLSIRQDDKVVCPRTKEVFHFSQAEKVYIM

SEQ ID NO: 26441 - protein, 434 aa, Artificial Sequence
  derived and/or modified sequence
MAVQESAAQLSMTLKVQEYPTLKVPYETLNKRFRAAQKNIDRETSHVTMVVAELEKTLSGCPAVDSVVSLLDGVVEKLSVLKRKAVESIQAEDESAKLCKRRIEHLKEHSSDQPAAASVWKRKRMDRMMVEHLLRCGYYNTAVKLARQSGIEDLVNIEMFLTAKEVEESLERRETATCLAWCHDNKSRLRKMKGRQNKHEAKTGRKSRAASSSPKESLDLGMETLKGKPELSCLEFSLRIQEFIELIRQNKRLDAVRHARKHFSQAEGSQLDEVRQAMGMLAFPPDTHISPYKDLLDPARWRMLIQQFRYDNYRLHQLGNNSVFTLTLQAGLSAIKTPQCYKEDGSSKSPDCPVCSRSLNKLAQPLPMAHCANSRLVCKISGDVMNENNPPMMLPNGYVYGYNSLLSIRQDDKVVCPRTKEVFHFSQAEKVYIM

SEQ ID NO: 26442 - protein, 348 aa, Artificial Sequence
  derived and/or modified sequence
MVVAELEKTLSGCPAVDSVVSLLDGVVEKLSVLKRKAVESIQAEDESAKLCKRRIEHLKEHSSDQPAAASVWKRKRMDRMMVEHLLRCGYYNTAVKLARQSGIEDLVNIEMFLTAKEVEESLERRETATCLAWCHDNKSRLRKMKSCLEFSLRIQEFIELIRQNKRLDAVRHARKHFSQAEGSQLDEVRQAMGMLAFPPDTHISPYKDLLDPARWRMLIQQFRYDNYRLHQLGNNSVFTLTLQAGLSAIKTPQCYKEDGSSKSPDCPVCSRSLNKLAQPLPMAHCANSRLVCKISGDVMNENNPPMMLPNGYVYGYNSLLSIRQDDKVVCPRTKEVFHFSQAEKVYIM

SEQ ID NO: 26443 - protein, 375 aa, Artificial Sequence
  derived and/or modified sequence
MAVQESAAQLSMTLKVQEYPTLKVPYETLNKRFRAAQKNIDRETSHVTMVVAELEKLSVLKRKAVESIQAEDESAKLCKRRIEHLKEHSSDQPAAASVWKRKRMDRMMVEHLLRCGYYNTAVKLARQSGIEDLVNIEMFLTAKEVEESLERRETATCLAWCHDNKSRLRKMKSCLEFSLRIQEFIELIRQNKRLDAVRHARKHFSQAEGSQLDEVRQAMGMLAFPPDTHISPYKDLLDPARWRMLIQQFRYDNYRLHQLGNNSVFTLTLQAGLSAIKTPQCYKEDGSSKSPDCPVCSRSLNKLAQPLPMAHCANSRLVCKISGDVMNENNPPMMLPNGYVYGYNSLLSIRQDDKVVCPRTKEVFHFSQAEKVYIM

SEQ ID NO: 26444 - DNA, 1191 bp, Artificial Sequence
  derived and/or modified sequence
atggctgtacaggagtctgccgcccagttatctatgaccttgaaagtgcaggagtatccaaccctgaaagtcccctacgaaactctcaataaacggtttcgcgccgcacagaaaaatatcgatagagaaacttcccacgtgacaatggtggtggccgagctcgagaagaccctgtccggttgtcccgcagtggactccgtcgtgtcattgctcgacggcgtggtagagaaactgtctgtcctcaagagaaaagccgtggagtcgattcaggcagaagacgagagcgccaaactatgtaaaagaaggattgagcacctgaaggagcacagctcggatcagccagcagctgcaagtgtgtggaagaggaaacgtatggatagaatgatggtggagcacttgttacggtgtggctattacaatacagccgtgaaacttgccaggcagtccggtattgaggacttggtgaatattgaaatgtttctgacagcaaaagaagtggaagagagcttggagcggcgggagacagccacctgtctagcgtggtgtcacgacaacaaaagcaggctgcggaagatgaaaagctgcttggaatttagcctgaggatccaagaatttattgagctgatccgccaaaacaaaagactggatgcagtcagacatgcccgcaaacatttctcccaggcagaggggtcacagctggatgaggtgcggcaagcaatgggtatgctggcctttccccccgatacacatatttccccttacaaggacttattggatcccgcaaggtggcggatgttaatccagcaatttagatatgacaactacaggctccatcagctgggcaacaactctgtttttaccctgacccttcaggccggcctgtcagccattaagaccccacagtgctacaaggaagatggatcaagtaaatccccggactgcccggtttgttctagatctctgaacaaactggctcaaccccttccaatggctcattgcgccaactcacgcctggtatgcaaaatatcgggcgacgtgatgaatgagaataacccacccatgatgttgcccaacgggtacgtgtacggttataactcacttctatctatccgtcaggatgataaggtagtgtgtcctcggacgaaggaggtgttccatttttcacaagccgagaaagtttacattatgtag

SEQ ID NO: 26445 - DNA, 1305 bp, Artificial Sequence
  derived and/or modified sequence
atggcagtccaggaatccgccgcacaactgtccatgacacttaaagtgcaggaatacccaaccctcaaagtgccttacgagacccttaataagcgattccgggcagctcaaaagaatatcgatagggaaacttcccacgtgacaatggtggtagccgaacttgagaaaacactgtccgggtgtcccgctgttgacagcgttgtgtccctcctagacggggttgtagagaagctttctgtactgaagaggaaggcggtagagagtattcaggctgaggacgagagtgccaagttgtgtaagcggcggatagaacacttgaaggaacattcctcagaccaaccggcggcagcaagtgtctggaaacgaaagagaatggatcgtatgatggtggaacatctcctcagatgtggctattacaacacggccgtcaaactggctcgacagtcaggtattgaagatttggtcaacatagaaatgtttctgaccgccaaggaggtggaggagtccctagagcgaagagaaacagcaacctgtctggcgtggtgtcacgataacaaatcaagattgagaaaaatgaagggtcgccaaaataaacatgaggcgaagacaggacgaaaaagtcgggccgcctcatcttcacccaaagaatcgctggatcttggcatggagacactcaagggaaagcccgagctctcctgcctggaattttccctgcgaattcaagagtttatcgaactgattcgccagaacaaacggctggacgctgtgcggcatgcaagaaaacatttttcacaggcggagggcagccagctggacgaagtgcggcaggccatgggtatgctggcattccctcccgacacacatataagtccttacaaagatctgttggaccctgctagatggcggatgctgattcagcaatttcggtacgataactaccggctgcaccagctgggaaacaattccgtcttcacgttgacgctgcaggccggattatccgccattaagactccacagtgttataaagaagacgggagctcaaaatctccagattgtccggtttgcagcaggtcactgaataagctggctcagccactgccaatggcgcattgtgcgaactcacgactggtgtgtaaaattagtggggacgtcatgaacgaaaacaacccgccaatgatgctgcctaatggatacgtttacggctataatagcctgctgagcattcggcaagatgataaagttgtgtgtcctcggaccaaggaggtgttccatttcagccaggccgagaaagtgtatattatgtag

SEQ ID NO: 26446 - DNA, 1128 bp, Artificial Sequence
  derived and/or modified sequence
atggccgtacaggagagcgctgcccagctttccatgacactgaaagtgcaagaataccccactctgaaagtgccgtacgagacactgaataagagattcagggccgcccaaaagaatattgacagggaaaccagccatgtcacaatggtcgtcgcagaactggaaaaactttccgttttaaaacgtaaagccgtggaatcgatccaggctgaggatgaatccgctaagctttgtaagaggcgtatcgaacatctgaaggaacattcatcggaccagcctgctgcggcctctgtatggaaaaggaagaggatggaccgcatgatggtcgagcatttgctgcgttgcggatactataacacagcagttaagctcgcccggcaatcgggcattgaggatctagtgaacatcgagatgtttcttactgcaaaggaggtcgaagaatccctcgaaaggcgtgagaccgccacatgcctggcatggtgccatgataacaaatctaggctcaggaagatgaaaagttgtttggagttttcactccgaatacaggagttcatcgagcttattaggcagaataaacgtctggacgccgtgagacacgctaggaaacatttttcccaggcggaagggtcccagttagacgaggtccgacaggccatgggtatgctggccttcccacctgatacacatatctctccttataaggatcttctggaccccgcacggtggaggatgctcatccaacaatttcgttacgacaattacagactgcaccagcttgggaacaattctgtgttcactctgacattgcaggcaggcctctcggcaatcaagacgccgcaatgctacaaagaggacgggtcaagcaaatcgcccgactgtcccgtgtgtagccggtctctcaacaaattagcacagccactgcctatggcacattgcgcgaacagcagattggtgtgcaagatcagtggagacgtcatgaatgaaaataatcccccaatgatgctgccaaacggctatgtgtacgggtataattcactgctctcaataagacaggacgacaaggtcgtgtgtcctcgtaccaaggaggtcttccactttagtcaggctgaaaaagtctacattatgtag

SEQ ID NO: 26447 - DNA, 1191 bp, Artificial Sequence
  derived and/or modified sequence
atggctgtgcaggagagcgctgcccagctgtccatgaccctgaaggtgcaggagtaccccaccctgaaggtgccctatgagaccctgaacaagcgcttccgggccgcccagaagaacatcgaccgggagaccagccacgtgaccatggtggtggccgagctggagaagaccctgagcggctgcccagctgtggacagcgtggtgtccctgctggatggagtggtggagaagctgtctgtgctgaagaggaaggctgtggagagcatccaggccgaggatgaaagtgccaagctgtgcaagagaagaattgagcacctgaaggagcacagcagtgaccagcctgctgctgcctctgtgtggaagaggaagaggatggacaggatgatggtggagcacctgctgcgctgtggctactacaacacagctgtgaagctggcccggcagagcggcatcgaggacctggtgaacatcgagatgttcctgacagccaaggaggtggaggagagcctggagcggcgggagacagccacctgcctggcctggtgccacgacaacaagagccggctgaggaagatgaagagctgcctggagttcagcctgcgcatccaggagttcatcgagctgatccggcagaacaagaggctggatgctgtgagacatgccaggaagcacttcagccaggccgagggcagccagctggatgaggtgcggcaggccatgggcatgctggccttccccccagacacccacatcagcccctacaaggacctgctggaccctgcccgctggaggatgctgatccagcagttccgctatgacaactaccgcctgcaccagctgggcaacaacagcgtcttcaccctgaccctgcaggccggcctgagcgccatcaagaccccccagtgctacaaggaggatggcagcagcaagagcccagactgccctgtgtgcagccgcagcctgaacaagctggcccagcccctgcccatggcccactgtgccaacagccggctggtgtgcaagatctctggagatgtgatgaatgaaaacaacccccccatgatgctgcccaacggctacgtgtatggctacaacagcctgctgagcatccggcaggatgacaaggtggtgtgccccaggaccaaggaggtgttccacttcagccaggccgagaaggtgtacatcatgtag

SEQ ID NO: 26448 - DNA, 1305 bp, Artificial Sequence
  derived and/or modified sequence
atggctgtgcaggagagcgctgcccagctgtccatgaccctgaaggtgcaggagtaccccaccctgaaggtgccctatgagaccctgaacaagcgcttccgggccgcccagaagaacatcgaccgggagaccagccacgtgaccatggtggtggccgagctggagaagaccctgagcggctgcccagctgtggacagcgtggtgtccctgctggatggagtggtggagaagctgtctgtgctgaagaggaaggctgtggagagcatccaggccgaggatgaaagtgccaagctgtgcaagagaagaattgagcacctgaaggagcacagcagtgaccagcctgctgctgcctctgtgtggaagaggaagaggatggacaggatgatggtggagcacctgctgcgctgtggctactacaacacagctgtgaagctggcccggcagagcggcatcgaggacctggtgaacatcgagatgttcctgacagccaaggaggtggaggagagcctggagcggcgggagacagccacctgcctggcctggtgccacgacaacaagagccggctgaggaagatgaagggccggcagaacaagcatgaggccaagacaggcaggaagagcagagctgccagcagcagccccaaggagagcctggacctgggcatggagaccctgaagggcaagccagagctgagctgcctggagttcagcctgcgcatccaggagttcatcgagctgatccggcagaacaagaggctggatgctgtgagacatgccaggaagcacttcagccaggccgagggcagccagctggatgaggtgcggcaggccatgggcatgctggccttccccccagacacccacatcagcccctacaaggacctgctggaccctgcccgctggaggatgctgatccagcagttccgctatgacaactaccgcctgcaccagctgggcaacaacagcgtcttcaccctgaccctgcaggccggcctgagcgccatcaagaccccccagtgctacaaggaggatggcagcagcaagagcccagactgccctgtgtgcagccgcagcctgaacaagctggcccagcccctgcccatggcccactgtgccaacagccggctggtgtgcaagatctctggagatgtgatgaatgaaaacaacccccccatgatgctgcccaacggctacgtgtatggctacaacagcctgctgagcatccggcaggatgacaaggtggtgtgccccaggaccaaggaggtgttccacttcagccaggccgagaaggtgtacatcatgtag

SEQ ID NO: 26449 - DNA, 1128 bp, Artificial Sequence
  derived and/or modified sequence
atggctgtgcaggagagcgctgcccagctgtccatgaccctgaaggtgcaggagtaccccaccctgaaggtgccctatgagaccctgaacaagcgcttccgggccgcccagaagaacatcgaccgggagaccagccacgtgaccatggtggtggccgagctggagaagctgtctgtgctgaagaggaaggctgtggagagcatccaggctgaagatgagagcgccaagctgtgcaagaggcgcatcgagcacctgaaggagcacagcagtgaccagcctgctgctgcctctgtgtggaagaggaagaggatggacaggatgatggtggagcacctgctgcgctgtggctactacaacacagctgtgaagctggcccggcagagcggcatcgaggacctggtgaacatcgagatgttcctgacagccaaggaggtggaggagagcctggagcggcgggagacagccacctgcctggcctggtgccacgacaacaagagccggctgaggaagatgaagagctgcctggagttcagcctgcgcatccaggagttcatcgagctgatccggcagaacaagaggctggatgctgtgagacatgccaggaagcacttcagccaggccgagggcagccagctggatgaggtgcggcaggccatgggcatgctggccttccccccagacacccacatcagcccctacaaggacctgctggaccctgcccgctggaggatgctgatccagcagttccgctatgacaactaccgcctgcaccagctgggcaacaacagcgtcttcaccctgaccctgcaggccggcctgagcgccatcaagaccccccagtgctacaaggaggatggcagcagcaagagcccagactgccctgtgtgcagccgcagcctgaacaagctggcccagcccctgcccatggcccactgtgccaacagccggctggtgtgcaagatctctggagatgtgatgaatgaaaacaacccccccatgatgctgcccaacggctacgtgtatggctacaacagcctgctgagcatccggcaggatgacaaggtggtgtgccccaggaccaaggaggtgttccacttcagccaggccgagaaggtgtacatcatgtag

SEQ ID NO: 26450 - DNA, 2222 bp, Artificial Sequence
  derived and/or modified sequence
tcatttcccggcgtgcagcgcgctcgcgcgtcccccgcccgctaatgttttggccgcttcaagatggcggtgcaggagtcggcggctcagttgtccatgaccctgaaggtccaggagtacccgaccctcaaggtgccctacgagacgctgaacaaacgctttcgcgccgctcagaagaacattgaccgggagaccagccacgtcaccatggtggtggccgagctggagaagacgttgagcggctgccccgccgtggactccgtggtcagcctgctggacggcgtggtggagaagctcagcgtcctcaagaggaaggcggtggaatccatccaggccgaggacgagagcgccaagctgtgcaagcgccggatcgagcacctcaaagagcatagcagcgaccagcccgcggcggccagcgtgtggaagaggaagcgcatggatcgcatgatggtggagcacctgctgcgttgcggctactacaacacggctgtcaagctggcgcgccagagcggcatcgaggacctagtgaatattgagatgttcctgacggccaaagaggtggaggagtccctggagaggcgtgagacggccacctgcctggcctggtgccatgacaacaagtcccggctccggaagatgaagagctgcctggagttcagcctcagaatccaggagttcattgaactcatccggcagaataagagactggacgctgtgagacatgcaagaaagcacttcagccaagcagaagggagccagctggacgaggtgcgccaggccatgggcatgctggccttcccgcccgacacgcacatctccccgtacaaggaccttctggaccctgcacggtggcggatgctgatccagcagttccggtacgacaactaccgactacaccagctgggaaacaattctgtgttcaccctcaccctgcaggctggcctctcagccatcaagacaccacagtgctacaaggaggacggcagctccaagagccctgactgccctgtgtgcagccgctccctgaacaagctggcgcagcccctgcccatggcccactgtgccaactcccgcctggtctgcaagatttctggcgacgtgatgaacgagaacaatccgcccatgatgctgcccaacggctacgtctacggctacaattctctgctttctatccgtcaagatgataaagtcgtgtgcccgagaaccaaagaagtcttccacttctcacaagccgagaaggtgtacatcatgtaggccccacgtcgtgaagcgcacgcctcggggacgggctgcagtgggcggggaggccacgccttcctcctgtcccacgctccagcctgccgcggcgtttctgtttcttgcgaccaaagatccgtgagcaacgataaatactcttaggaagagagaaaataaggtttcataagtttgtacttgaaaacatttggattggtaggattttgtaacacgtcaaccatttgatgcttctgaaaagtactttcaacttgcgaaggaaactcttctttaaagactgacctaaacaccgagggaaacttaagaacgtttaaaatataggagtccgtgatttccctgtgttttcagtttctttccttctgtgaacgatgagacttggagaacgggctggtccttcaccacttcctgttggccctggcctggccggggaaggtggcagcggcaccggactgacctgcagtgacccgcgatgccgcgccacgagggacacttatggcttcattcgagagctgctgccaaaacgcctggcgccgccaccgtcgggggctggcttcgaggacgcccgcctgcctcgcgggtcgtgtccgcgggactgtgttcgtacgtgcatagtttcgatatcacatcgcggggctgtgttcgtagctgcgtcgtttcgatatcacaccctctgtgtgccgccttacttcctgcttcgagaatgtataacgtggaaatccacgggaccaaatttctgcagaggccttgccggatggttccataactgtagagtctaattgctatccattacagaaattaatcgttcagttgaaagaagtactgatgacttttcaaaacaaatgaaccaccgtagctgacagagaaccgtatcgtagaggtttgtagttagtgcttatttttgcatgttgatgttgactagctaataaactgtaaatgtaaaccatgcgaataaaatggttttctatttctca

SEQ ID NO: 26451 - DNA, 1340 bp, Artificial Sequence
  derived and/or modified sequence
gcccgctaatgttttggccgcttcaagatggcggtgcaggagtcggcggctcagttgtccatgaccctgaaggtccaggagtacccgaccctcaaggtgccctacgagacgctgaacaaacgctttcgcgccgctcagaagaacattgaccgggagaccagccacgtcaccatggtggtggccgagctggagaagacgttgagcggctgccccgccgtggactccgtggtcagcctgctggacggcgtggtggagaagctcagcgtcctcaagaggaaggcggtggaatccatccaggccgaggacgagagcgccaagctgtgcaagcgccggatcgagcacctcaaagagcatagcagcgaccagcccgcggcggccagcgtgtggaagaggaagcgcatggatcgcatgatggtggagcacctgctgcgttgcggctactacaacacggctgtcaagctggcgcgccagagcggcatcgaggacctagtgaatattgagatgttcctgacggccaaagaggtggaggagtccctggagaggcgtgagacggccacctgcctggcctggtgccatgacaacaagtcccggctccggaagatgaagggccgccaaaacaagcacgaagcaaagacgggacgaaaaagtagagcggctagtagctcccctaaagagagtttggaccttggtatggaaaccctaaaaggaaagccagaattgagctgcctggagttcagcctcagaatccaggagttcattgaactcatccggcagaataagagactggacgctgtgagacatgcaagaaagcacttcagccaagcagaagggagccagctggacgaggtgcgccaggccatgggcatgctggccttcccgcccgacacgcacatctccccgtacaaggaccttctggaccctgcacggtggcggatgctgatccagcagttccggtacgacaactaccgactacaccagctgggaaacaattctgtgttcaccctcaccctgcaggctggcctctcagccatcaagacaccacagtgctacaaggaggacggcagctccaagagccctgactgccctgtgtgcagccgctccctgaacaagctggcgcagcccctgcccatggcccactgtgccaactcccgcctggtctgcaagatttctggcgacgtgatgaacgagaacaatccgcccatgatgctgcccaacggctacgtctacggctacaattctctgctttctatccgtcaagatgataaagtcgtgtgcccgagaaccaaagaagtcttccacttctcacaagccgagaaggtgtacatcatgtaggccccacg

SEQ ID NO: 26452 - DNA, 1294 bp, Artificial Sequence
  derived and/or modified sequence
gctaatgttttggccgcttcaagatggcggtgcaggagtcggcggctcagttgtccatgaccctgaaggtccaggagtacccgaccctcaaggtgccctacgagacgctgaacaaacgctttcgcgccgctcagaagaacattgaccgggagaccagccacgtcaccatggtggtggccgagctggagaagctcagcgtcctcaagaggaaggcggtggaatccatccaggccgaggacgagagcgccaagctgtgcaagcgccggatcgagcacctcaaagagcatagcagcgaccagcccgcggcggccagcgtgtggaagaggaagcgcatggatcgcatgatggtggagcacctgctgcgttgcggctactacaacacggctgtcaagctggcgcgccagagcggcatcgaggacctagtgaatattgagatgttcctgacggccaaagaggtggaggagtccctggagaggcgtgagacggccacctgcctggcctggtgccatgacaacaagtcccggctccggaagatgaagagctgcctggagttcagcctcagaatccaggagttcattgaactcatccggcagaataagagactggacgctgtgagacatgcaagaaagcacttcagccaagcagaagggagccagctggacgaggtgcgccaggccatgggcatgctggccttcccgcccgacacgcacatctccccgtacaaggaccttctggaccctgcacggtggcggatgctgatccagcagttccggtacgacaactaccgactacaccagctgggaaacaattctgtgttcaccctcaccctgcaggctggcctctcagccatcaagacaccacagtgctacaaggaggacggcagctccaagagccctgactgccctgtgtgcagccgctccctgaacaagctggcgcagcccctgcccatggcccactgtgccaactcccgcctggtctgcaagatttctggcgacgtgatgaacgagaacaatccgcccatgatgctgcccaacggctacgtctacggctacaattctctgctttctatccgtcaagatgataaagtcgtgtgcccgagaaccaaagaagtcttccacttctcacaagccgagaaggtgtacatcatgtaggccccacgtcgtgaagcgcacgcctcggggacgggctgcagtgggcggggaggccacgccttcctcctgtcccacgctccagcctgccgcggcgtttctgtttcttgcgaccaaagatccgtgagcaacgataaatactctta

SEQ ID NO: 26453 - DNA, 1191 bp, Artificial Sequence
  derived and/or modified sequence
atggccgtgcaggagagcgccgcccagctgagcatgaccctgaaggtgcaggaatacccgaccttgaaagttccctacgaaactttaaacaagcggtttagagctgcccagaagaatatagatagggaaactagccatgttacaatggtggtagccgagctggaaaagacactttccggttgtccagccgtagatagtgtcgtcagcctgttggacggcgtggttgagaaactgagtgtgctgaaacggaaagccgtggagtctatccaggcagaggatgagagcgccaaattgtgcaaacgaaggattgaacacctcaaagagcactccagcgatcagcccgcagctgctagtgtatggaaacgtaaaaggatggatcggatgatggtcgaacacttgttacgatgcggatactacaacacagccgtcaagcttgcccgccagtctggcatagaggacctggtgaacatcgagatgtttttgacagccaaagaggtggaggaatccctggagcgaagggagaccgcaacctgcctcgcctggtgccacgataacaaatctcggcttcgcaagatgaagtcgtgtcttgagttttctcttcggatccaagagttcattgaactgatccgacaaaacaagaggttagacgcagtgagacacgcccgaaagcacttctctcaggcggaaggatcccagcttgatgaggttcgccaagctatgggaatgctggcctttccaccggatactcatataagtccatacaaagacttactggacccagctcgttggcgcatgctgatacagcaatttagatatgataattacaggcttcaccaacttgggaataactctgtcttcaccttgacactgcaggccggcctttcggccatcaaaacccctcagtgctacaaagaggacggcagttctaagtcacccgactgtcccgtttgctcacggagcctcaacaagctggcccagcctctccctatggctcactgcgctaactccaggctcgtctgcaagatcagcggagatgtgatgaatgagaataatccaccgatgatgcttcccaatggatatgtatacggatacaattctttgttgtcaataagacaggatgacaaggtggtctgccctagaactaaagaagtattccatttcagccaggctgaaaaggtgtacatcatgtag

SEQ ID NO: 26454 - DNA, 1305 bp, Artificial Sequence
  derived and/or modified sequence
atggccgtgcaggagagcgccgcccagctgagcatgaccctgaaggtccaggagtaccctacactcaaggtcccttacgagacactaaacaagaggtttcgcgccgcacagaagaatatagaccgcgaaacgagtcacgtaacaatggtcgtggcagagctagaaaaaactttgagcggctgcccagctgtcgatagtgtggtgtcccttctggacggagtggtggagaagctgagcgtgctgaagcggaaggccgtcgaaagcattcaagccgaggacgaatcagcgaagctttgtaagagacgtatcgaacacctgaaagaacattccagtgaccagccagcagcagcctcggtatggaagcggaaaagaatggacaggatgatggtggaacatctgttgcgttgcggatattataacacggccgtgaagctggccagacagagtgggattgaggatctggtcaacatcgagatgtttctcactgccaaggaggtggaagaaagcctcgagagacgcgagaccgcaacctgtctggcttggtgtcacgacaacaagtcccgactacgaaagatgaaaggcagacagaataagcacgaagctaaaaccggcaggaagtctagagctgcttcttcttcaccaaaggaaagtttggacctgggtatggagacgttaaagggaaagccagagctgtcttgtctagagttttcacttcgtatccaggagtttatcgagctgatcaggcagaacaaacgactggacgctgtgcgccatgcccgtaagcatttttcccaggctgagggaagtcaactggatgaggtgcgccaagctatggggatgctcgcctttcctccagatacccatatcagcccatacaaggatctgttggatccggcgcggtggcggatgctgattcagcaatttaggtatgataactacagactgcatcaactggggaacaactccgtgttcactttaacactgcaagcggggttgtccgctattaagacaccacagtgttacaaggaggacggctcttccaaatccccagattgccccgtctgctcgcgctctctgaataagctggcccagcccctgccgatggcacactgcgccaattcacgccttgtttgcaagatttccggcgatgtgatgaacgaaaacaaccctcccatgatgctgccaaacggctacgtgtacggatataactccctgcttagcatccggcaggacgataaggtggtatgtcccagaacaaaggaggtgtttcacttctcccaagctgaaaaggtgtacatcatgtag

SEQ ID NO: 26455 - DNA, 1128 bp, Artificial Sequence
  derived and/or modified sequence
atggccgtgcaggagagcgccgcccagctgagcatgaccctgaaggtacaggaatatccaactctcaaagtaccgtacgagaccctcaataaacgatttagagcagcccagaaaaatatagaccgggaaacatcccacgtcacgatggtggtggcagaacttgaaaaactgagtgtcttgaagagaaaggccgtagagtcgatccaggctgaagatgaaagcgctaaattatgtaaacgcaggatcgaacacttaaaggaacattcctccgaccagcccgccgcggcctcagtgtggaagcggaagcgcatggacagaatgatggtcgagcacttgttaagatgcgggtattacaacacggctgttaagttggcccgccagtcagggatcgaggacctcgtaaacatcgagatgttcctcacggccaaggaggtggaagaatcgttggaaagacgcgagaccgcaacttgcctggcttggtgccacgacaataaaagccgtttgcgcaagatgaaatcttgcctggagttcagtctgcgaattcaggagtttatagaactgatcagacagaacaagcgcttagatgctgttcggcatgctcgcaagcatttctctcaggccgaaggatcccagctagacgaagtgcggcaggccatgggtatgctcgccttccctccggacacccacatatctccgtacaaggacctacttgaccccgccagatggcgcatgttgattcagcagttccgttacgacaactatagattacaccagctagggaataactccgtctttacactcacactgcaagccgggctcagcgctatcaagacaccccagtgttacaaggaggacggttcatccaagtcacctgactgcccggtttgctcccgctcccttaataaactggcacagcccctgccaatggcccactgcgccaatagcagactggtgtgcaaaattagcggcgatgtgatgaacgaaaataaccctccaatgatgctccctaatggttatgtgtatgggtataacagtttattatcaatacggcaggatgacaaagttgtgtgccctaggactaaggaagtttttcacttctctcaggcagaaaaggtgtacattatgtag

SEQ ID NO: 26456 - DNA, 1191 bp, Artificial Sequence
  derived and/or modified sequence
atggccgtgcaggagtccgccgctcagctgagcatgaccctgaaagtgcaggaataccctaccctaaaggtcccgtacgaaaccctcaacaaacgatttagggcagcacagaaaaatattgaccgggagaccagtcacgtgactatggtcgtggcagagctcgagaaaacactatccgggtgcccagctgtggactcggtggttagtctgcttgacggagttgtggagaagctctcagtgcttaagcggaaggcagttgagtctatccaggccgaagacgaatccgcgaagctttgcaagcgcagaatcgagcacttgaaagaacactcctcagaccaaccagccgcagcttccgtatggaagagaaaacggatggaccggatgatggtagagcatctccttaggtgcggatattacaataccgccgtgaagctcgccagacagtcaggcatagaggatcttgtcaatatcgagatgttcctaacagccaaggaagtcgaggagtcactggagagacgagaaacagcaacttgcctcgcctggtgtcacgataacaagtctaggctgaggaagatgaaatcatgtcttgaattctctctcagaattcaggagttcattgaactgattcgccagaacaagcgtctggacgctgtcaggcacgcacggaaacattttagccaggctgagggcagccagcttgacgaagtccgacaggccatgggaatgctggcattcccgccagacacccacatttccccctacaaagatctgctggaccctgccagatggcggatgctcatccagcagtttcgctatgacaattatcggctgcatcagttgggtaataactcggtgttcaccttaacactccaggccggtctgtccgccattaagacaccccaatgttacaaagaagatgggtcctcgaagtctcccgattgtccagtgtgctccagatccctgaacaaattggctcagcctctccccatggctcactgcgcaaatagcagacttgtatgcaaaataagtggggatgtaatgaatgagaataacccccctatgatgctccctaatgggtacgtttacgggtacaactctcttctctctattcgtcaggacgataaagtggtgtgtccacgaaccaaggaggttttccactttagtcaagcagaaaaagtgtacatcatgtag

SEQ ID NO: 26457 - DNA, 1305 bp, Artificial Sequence
  derived and/or modified sequence
atggccgtgcaggagtccgcggcacagctgagcatgacactgaaagtgcaggaatatccgacactgaaggtaccatatgaaaccctcaacaagaggtttcgcgctgcccagaaaaatatcgatagagaaacctcacatgtaacaatggtggtggccgagttagaaaaaacgctgtctgggtgtccagccgtggattccgtggtcagcttgttggatggtgttgtagaaaaattatcagtgcttaagcgcaaggcagtagagagcattcaggccgaagatgaatcggccaagttgtgcaaacggagaatcgaacatctcaaagagcattcctccgaccagccagccgctgcgtccgtctggaaacgaaaaaggatggataggatgatggtggagcacctgctgcggtgcggctattataacacagccgtgaagctcgccaggcagagtggcatcgaggacctggtgaatatagaaatgtttctgacagctaaagaggtggaggaatccctcgagcggagggaaacagcaacttgccttgcttggtgccatgataataaatcgcggctgcgcaaaatgaaggggcgacagaataagcacgaggccaagacgggacgtaagtcacgggctgctagctcgtcacccaaggagtctctagatttgggtatggagactctgaagggtaaaccagaactttcctgtctggaattctctctgcgtatccaggagtttattgaactgatccgccagaacaaacgcctggatgctgttcgacatgctaggaagcacttcagccaggccgagggcagccagctagatgaggtgagacaggctatgggcatgttggctttccctcctgatacccatatttccccttacaaggatctcctggatccggctcggtggcggatgctcatccaacagttcagatatgataactatagattgcatcaactgggaaataactctgtcttcacattgacactccaggctggcctgtctgcgataaaaacaccccaatgttataaggaggacgggagctccaagagcccagactgtccagtgtgcagcaggagcttgaacaagctcgcacagcctcttccaatggctcattgcgccaactcccggctcgtgtgtaaaatttccggggacgtaatgaacgaaaataacccaccgatgatgctgccaaatggatacgtgtacggctacaattctctcctctcaatccggcaagacgataaagtcgtttgtccaaggacgaaagaggtcttccacttctctcaggccgagaaagtttatatcatgtag

SEQ ID NO: 26458 - DNA, 1128 bp, Artificial Sequence
  derived and/or modified sequence
atggctgttcaagagtctgcagctcaactcagcatgaccctgaaggtgcaggagtatcccacactaaaggtaccctatgagactctcaacaaacggtttcgagctgctcaaaaaaacatcgaccgggaaacaagtcacgtgactatggtggtagcggaactggaaaaactcagcgtcctcaagaggaaggccgttgaatcaatacaggcagaggatgagtctgccaagttgtgcaagcggaggatcgaacacctcaaggagcattcatcagaccaaccggctgccgcttcagtctggaaaagaaaacgcatggacagaatgatggtggaacacctgctccgctgtgggtactacaataccgccgtcaagctggccaggcaatccgggatagaggatctggtgaacattgaaatgttcctcacagcaaaggaggtggaagaatcccttgaaaggcgggagacggccacttgtctagcatggtgccatgacaataagagtaggcttagaaagatgaagtcctgtctcgagttttccctgcggattcaagagttcatcgaactgataaggcagaataagcgcttagacgcagtcagacacgccagaaaacatttttcacaggccgagggctctcagttggatgaggtgagacaagccatggggatgctagcattccctcctgatacccacatctctccatacaaggacctcctggaccctgcacgttggcgcatgcttatccagcagtttcgatacgacaattacaggctccatcaacttggaaataattctgtgttcaccctcacactgcaggctggacttagtgcaattaaaacaccgcaatgctacaaggaggatggaagctcaaagtctcctgattgtcccgtttgctcccgctctttaaataagctcgcccagcccctgcccatggcccattgtgctaatagcaggcttgtttgtaagatatccggcgatgtgatgaacgaaaacaatccccctatgatgctgccaaatggctatgtgtatggttataactctctcctgtccatcaggcaggatgacaaggtggtttgtccacgtacaaaggaagtgttccatttctcgcaggccgagaaggtgtatattatgtag

SEQ ID NO: 26459 - DNA, 1191 bp, Artificial Sequence
  derived and/or modified sequence
atggccgtgcaggagagcgccgcccagctgagcatgaccctgaaggtgcaggagtaccccaccctgaaggtgccctacgagaccctgaacaagagattcagagccgcccagaagaacatcgacagagagaccagccacgtgaccatggtggtggccgagctggagaagaccctgagcggctgccccgccgtggacagcgtggtgagcctgctggacggcgtggtggagaagctgagcgtgctgaagagaaaggccgtggagagcatccaggccgaggacgagagcgccaagctgtgcaagagaagaatcgagcacctgaaggagcacagcagcgaccagcccgccgccgccagcgtgtggaagagaaagagaatggacagaatgatggtggagcacctgctgagatgcggctactacaacaccgccgtgaagctggccagacagagcggcatcgaggacctggtgaacatcgagatgttcctgaccgccaaggaggtggaggagagcctggagagaagagagaccgccacctgcctggcctggtgccacgacaacaagagcagactgagaaagatgaagagctgcctggagttcagcctgagaatccaggagttcatcgagctgatcagacagaacaagagactggacgccgtgagacacgccagaaagcacttcagccaggccgagggcagccagctggacgaggtgagacaggccatgggcatgctggccttcccccccgacacccacatcagcccctacaaggacctgctggaccccgccagatggagaatgctgatccagcagttcagatacgacaactacagactgcaccagctgggcaacaacagcgtgttcaccctgaccctgcaggccggcctgagcgccatcaagaccccccagtgctacaaggaggacggcagcagcaagagccccgactgccccgtgtgcagcagaagcctgaacaagctggcccagcccctgcccatggcccactgcgccaacagcagactggtgtgcaagatcagcggcgacgtgatgaacgagaacaacccccccatgatgctgcccaacggctacgtgtacggctacaacagcctgctgagcatcagacaggacgacaaggtggtgtgccccagaaccaaggaggtgttccacttcagccaggccgagaaggtgtacatcatgtag

SEQ ID NO: 26460 - DNA, 1305 bp, Artificial Sequence
  derived and/or modified sequence
atggccgtgcaggagagcgccgcccagctgagcatgaccctgaaggtgcaggagtaccccaccctgaaggtgccctacgagaccctgaacaagagattcagagccgcccagaagaacatcgacagagagaccagccacgtgaccatggtggtggccgagctggagaagaccctgagcggctgccccgccgtggacagcgtggtgagcctgctggacggcgtggtggagaagctgagcgtgctgaagagaaaggccgtggagagcatccaggccgaggacgagagcgccaagctgtgcaagagaagaatcgagcacctgaaggagcacagcagcgaccagcccgccgccgccagcgtgtggaagagaaagagaatggacagaatgatggtggagcacctgctgagatgcggctactacaacaccgccgtgaagctggccagacagagcggcatcgaggacctggtgaacatcgagatgttcctgaccgccaaggaggtggaggagagcctggagagaagagagaccgccacctgcctggcctggtgccacgacaacaagagcagactgagaaagatgaagggcagacagaacaagcacgaggccaagaccggcagaaagagcagagccgccagcagcagccccaaggagagcctggacctgggcatggagaccctgaagggcaagcccgagctgagctgcctggagttcagcctgagaatccaggagttcatcgagctgatcagacagaacaagagactggacgccgtgagacacgccagaaagcacttcagccaggccgagggcagccagctggacgaggtgagacaggccatgggcatgctggccttcccccccgacacccacatcagcccctacaaggacctgctggaccccgccagatggagaatgctgatccagcagttcagatacgacaactacagactgcaccagctgggcaacaacagcgtgttcaccctgaccctgcaggccggcctgagcgccatcaagaccccccagtgctacaaggaggacggcagcagcaagagccccgactgccccgtgtgcagcagaagcctgaacaagctggcccagcccctgcccatggcccactgcgccaacagcagactggtgtgcaagatcagcggcgacgtgatgaacgagaacaacccccccatgatgctgcccaacggctacgtgtacggctacaacagcctgctgagcatcagacaggacgacaaggtggtgtgccccagaaccaaggaggtgttccacttcagccaggccgagaaggtgtacatcatgtag

SEQ ID NO: 26461 - DNA, 1128 bp, Artificial Sequence
  derived and/or modified sequence
atggccgtgcaggagagcgccgcccagctgagcatgaccctgaaggtgcaggagtaccccaccctgaaggtgccctacgagaccctgaacaagagattcagagccgcccagaagaacatcgacagagagaccagccacgtgaccatggtggtggccgagctggagaagctgagcgtgctgaagagaaaggccgtggagagcatccaggccgaggacgagagcgccaagctgtgcaagagaagaatcgagcacctgaaggagcacagcagcgaccagcccgccgccgccagcgtgtggaagagaaagagaatggacagaatgatggtggagcacctgctgagatgcggctactacaacaccgccgtgaagctggccagacagagcggcatcgaggacctggtgaacatcgagatgttcctgaccgccaaggaggtggaggagagcctggagagaagagagaccgccacctgcctggcctggtgccacgacaacaagagcagactgagaaagatgaagagctgcctggagttcagcctgagaatccaggagttcatcgagctgatcagacagaacaagagactggacgccgtgagacacgccagaaagcacttcagccaggccgagggcagccagctggacgaggtgagacaggccatgggcatgctggccttcccccccgacacccacatcagcccctacaaggacctgctggaccccgccagatggagaatgctgatccagcagttcagatacgacaactacagactgcaccagctgggcaacaacagcgtgttcaccctgaccctgcaggccggcctgagcgccatcaagaccccccagtgctacaaggaggacggcagcagcaagagccccgactgccccgtgtgcagcagaagcctgaacaagctggcccagcccctgcccatggcccactgcgccaacagcagactggtgtgcaagatcagcggcgacgtgatgaacgagaacaacccccccatgatgctgcccaacggctacgtgtacggctacaacagcctgctgagcatcagacaggacgacaaggtggtgtgccccagaaccaaggaggtgttccacttcagccaggccgagaaggtgtacatcatgtag

SEQ ID NO: 26462 - protein, 454 aa, Artificial Sequence
  derived and/or modified sequence
MSAGGPCPAAAGGGPGGASCSVGAPGGVSMFRWLEVLEKEFDKAFVDVDLLLGEIDPDQADITYEGRQKMTSLSSCFAQLCHKAQSVSQINHKLEAQLVDLKSELTETQAEKVVLEKEVHDQLLQLHSIQLQLHAKTGQSADSGTIKAKLERELEANKKEKMKEAQLEAEVKLLRKENEALRRHIAVLQAEVYGARLAAKYLDKELAGRVQQIQLLGRDMKGPAHDKLWNQLEAEIHLHRHKTVIRACRGRNDLKRPMQAPPGHDQDSLKKSQGVGPIRKVLLLKEDHEGLGISITGGKEHGVPILISEIHPGQPADRCGGLHVGDAILAVNGVNLRDTKHKEAVTILSQQRGEIEFEVVYVAPEVDSDDENVEYEDESGHRYRLYLDELEGGGNPGASCKDTSGEIKVLQGFNKKAVTDTHENGDLGTASETPLDDGASKLDDLHTLYHKKSY

SEQ ID NO: 26463 - DNA, 1365 bp, Artificial Sequence
  derived and/or modified sequence
atgtcagcaggtgggccatgccccgctgcagctgggggcggaccaggtggagcttcctgtagcgtcggtgctcctggaggcgtctccatgttccgctggcttgaagtgctggagaaagaattcgataaagcattcgtcgatgtggatctgctcctgggagaaattgatcctgatcaagccgacatcacctacgaaggaaggcaaaagatgacatctctctcctcctgttttgcacagctctgccacaaggctcagtccgtttcccagattaatcacaagttagaggcacaactagttgatctgaagtccgagctcaccgagacccaggccgaaaaagtggtgctggagaaagaagtccacgatcaactcctccaacttcactccattcagctgcagctgcatgcgaaaacaggccagagcgcggactctgggacaattaaagccaaactggaacgcgagctggaggctaataagaaggaaaaaatgaaagaggcccagctggaagccgaagtcaagctgctgcgcaaggagaacgaggctctccgccggcatatcgcagtcctgcaggctgaggtctacggcgctcgactcgccgcgaagtacctggataaagaactagcagggcgcgtgcaacagattcagttgctgggccgagatatgaaaggtccagcacacgacaagttgtggaatcagctggaagctgagatccatttgcacaggcacaagactgtcattagggcatgcaggggtaggaatgacttgaaaagacccatgcaagccccgcctggacatgatcaggatagcctgaagaagtcacagggggtgggacctatccgtaaagtgttactgttgaaagaagaccacgagggactgggaatctccattacagggggaaaggagcacggcgtccctatccttatttctgaaatccatcccggacagcctgcggatcggtgcggtgggctgcacgtcggagatgcaatcttggccgttaatggggtcaatttgagggacaccaaacacaaagaagcagtgaccatcctatcccagcaaagaggcgaaatcgaatttgaagtggtgtatgtggcccccgaggtggattcggacgatgagaatgtggaatacgaagacgagagtggacaccgttaccggctctacctggatgaattggagggaggaggcaatcccggcgctagttgtaaggatacttctggagagatcaaggtgctgcagggattcaataagaaagctgttaccgatacacacgagaacggcgacttgggaactgcttctgagactccactggacgacggagccagtaaactggatgatctgcatacgctgtatcacaaaaaatcctactag

SEQ ID NO: 26464 - DNA, 4590 bp, Artificial Sequence
  derived and/or modified sequence
ggggcaggctgggaggtgggactgactgagtcttccgtgtgtcgccgccgttgccgcctcagcttcagcctcgttactcctgcggttctgtgactgtgctgctggcgttaacggcgcgaggtgaagggaggtgacggagtgtgcccgcgcgcgcgggggtcccctcagtcccagcagttcccttcgtgcgcggggggcggcgagggtcttcagcagtcgggagaggcccttgacggcgccatgtcggcgggcggtccatgcccagcagcagccggagggggcccagggggcgcctcctgctccgtgggggcccctggcggggtatccatgttccggtggctggaggtgctggagaaggagttcgacaaagcttttgtggatgtggatctgctcctgggagagatcgatccagaccaagcggacatcacttatgaggggcgacagaagatgaccagcctgagctcctgctttgcacagctttgccacaaagcccagtctgtgtctcaaatcaaccacaagctggaggcacagttggtggatctgaaatctgaactgacagaaacccaagcagagaaagttgttttggagaaagaagtacatgatcagcttttacagctgcactctattcagctgcagcttcatgctaaaactggtcaaagtgctgactctggtaccattaaggcaaaattggaaagagagcttgaggcaaacaaaaaagaaaaaatgaaagaagcacaacttgaagctgaagtgaaattgttgagaaaagagaatgaagcccttcgtagacatatagctgttctccaggctgaagtatatggggcgagactagctgccaagtacttggataaggaactggcaggaagggtccaacagatacaattgctaggacgagatatgaagggacctgctcatgataagctttggaaccaattagaagctgaaatacatttgcatcgtcacaaaactgtgatccgagcctgcagaggacgtaatgacttgaaacgaccaatgcaagcaccaccaggccatgatcaagattccctaaagaaaagccaaggtgttggtccaattagaaaagttctcctccttaaggaagatcatgaaggccttggcatttcaattacaggtgggaaagaacatggtgttccaatcctcatctctgagatccatccggggcaacctgctgatagatgcggagggctgcacgttggggatgctattttggcagtcaacggagttaacctaagggacacaaagcataaagaagctgtaactattctttctcagcagagaggagagattgaatttgaagtagtttatgtggctcctgaagtggattctgatgatgaaaacgtagagtatgaagatgagagtggacatcgttaccgtttgtaccttgatgagttagaaggaggtggtaaccctggtgctagttgcaaagacacaagtggggaaatcaaagtattacaaggatttaataagaaggcagtaactgacacacatgaaaatggagacctgggcactgcaagtgaaactccgctagatgacggtgcttcaaaattagatgatctgcacactctgtatcataaaaaatcttattaaattgaccatatctccagacaagattgttaatcagactattctgaatttggggcactggggaagatggtgacaaagactacaaaatcaggggaggctgtttgttgcctaaatgaaaggcgggtacctcagggcttcatgtgaacaattctcaatgcataaaacaccctgttttctgtggtagaccataattagctattgcatgtaaagcaattttgattttcttgaacttgtaagcaccaaagcatgtgtttcccaaaggggtattactgggctcttaagtaccaaatgaaaccctactgttttacttggttccttttccctttagtaggaggacagtgctaactggaattttataaggagtaccctttaaaatacagagagtaagtgaattcatattttatattctagaatgttaactgtggtatttcagaagacagagcttgactcaatgaattgtagaaatataggcttgacttaatttttgtaactgaaaggctttagacttaaaaaaatttattgtgcatcctaaaatctaaaccaattattaatgatcatttattgtaatgagtttgcatttcagctttattcaatgcagtacaaaatagttttctttaagcagtcttttatcaatcaatgctgcactagaaatagattctcaaaagttactaaacattttactttttttgttttttaaaagaaatgcagatgagtgtaaaacatctgttctcaattatgttgatctgtgtgcgcagtactggagcatttacccattcatgttgagcctcaaatgcttgttttctggggtccacaaaagacagttttatacattttgagttgttcataaagtttgtcttgtgatagtcctggcacttaaagacaaatttttctggtagtaaaagttcagatttattactatgtcatgaaacacagtacattcaaatcaaacggcagttttctttctaagtaaatgatttccagtcatctaaaaggtgggcaagatgagataaagacattttgatacagtaattgttttggttgggttttcatgtcagtttatgtttgactaaagctctcttcatatgcaggtttataaatttgttaggtctgttgtcccatgattaaacatggagtgcctcctctctgatttaatattctgcaggtcattgtaacctgctaggcaaagtcacaacattgcattaaagaggtgatagctttgctaatatcactgttttaaaggacgtacagttaaaggaatattaagtgggagaaagcctacaaggcttttagaatattatcagtatcttcatttctggtattcagatgttatgtgataaaacacattttttttggctttcccagatacactatatatttgttcaagggtaaatctataaaatgtatatactttattttgtggttttgctatttataaatttaatgttttaactgttgctcatttatggtttgttttgggtggtggtgttcatctgtatatcaccatgttaatttgtaatggaagtgcacttcgtagtgtatattgttactgacattaaaatactttatagcattgtctctgagcaaaagctagtatttaattgtacaaatgaataagcaagttacatgttattgtttgctcttgacagggtaggcctcttaaaagaaaaaaaacaacttgttttttctttatgaatcccctatgccaaacacataccttccatgcatgacatgagatctgcaaactggattttagccaccgtatttatttagtcaaaaaaattgtccattgtagcagacccgaaaacctttttgctgtgacatgaaaccatgttattcttatcttcttaaaacacagcctgggatggaatggccatggcatttttttcagagaacatcctttatctgctatgactgaatccttaggaaatgtaagctataaccctttgattttcaagaactaccgaataagtgtatgaagaggtggttttttaaaacttcaagttggaatttttatgaggtcactgtgtaatttgaagaattgtgtgagattgtcatgatataaattccttttaaggactgataaatagaatgaaaagtttccaggtagtttaaaactccacaggtcagtttccttttcattcctgcttcactgtggtttataagcctacgggagagcaccgttgctcagatgctactgtgagcttcctgtccggtgttagaaagtaactagttaaaagttcattttagaatgtatggtttttggggatgaactaagaattagttattagttccaaaggactgagaaccaattttaatattttcacatttataggaaagaaattcatatgtccctgaaacttctaggacaaaaccaaacaagtaaggagggaactgttgcaaagccatttcatcgagaaggggacagaaggagaaatacacacatgtatacacaaacagaatggttgagaaaacgttttaataaaatgtgagggttgtatgtgtgcgtgtatatatttacacttaacctctaaaattctcttctacagtatctctgttatgaatatgatggaaaagcaacattttggtggtgagactattgttaaaataaatttgagaaagacgaaaattttgtgagtcttgataattacaagtcaacagctatcgaaagttagcacagcttgtctgtggtgctgtttttttccccactgcagtggacttatgctgttttcatgtttagaaacaaaaaggtttcatgtgattcatgtgtaagatgcacagtatttgacatcctgattatgtaatccctattccatctatccagtcttacacttatggttggcctcaaatctattgcatttatgataatgtattatatctagttgagtttaatatttttttattagcctgtaaataaagatggcatcttctacattaaaatgatattgatctcatttttttaaataaacattttgtttccttgacgttaaa

SEQ ID NO: 26465 - DNA, 1365 bp, Artificial Sequence
  derived and/or modified sequence
atgtctgctgggggcccctgcccagctgctgctgggggcggccctggaggagccagctgcagcgtgggcgcccctggaggagtgtccatgttccgctggctggaggtgctggagaaggagtttgacaaggcctttgtggatgtggacctgctgctgggggagattgatcctgaccaggccgacatcacctatgagggccggcagaagatgaccagcctgagcagctgctttgcccagctgtgccacaaggcccagagcgtgtcccagatcaaccacaagctggaggcccagctggtggacctgaagtctgagctgacagagacccaggccgagaaggtggtgctggagaaggaggtgcatgaccagctgctgcagctgcacagcatccagctgcagctgcacgccaagacaggccagagcgctgacagcggcaccatcaaggccaagctggagcgggagctggaggccaacaagaaggagaagatgaaggaggcccagctggaggccgaggtgaagctgctgaggaaagaaaatgaggccctgcggcggcacatcgctgtgctgcaggccgaggtgtatggagcccggctggccgccaagtacctggacaaggagctggccggccgggtgcagcagatccagctgctgggccgggacatgaagggccctgcccatgacaagctgtggaaccagctggaggccgagatccacctgcaccgccacaagacagtcatccgggcctgccggggcagaaatgacctgaagaggcccatgcaggcccctcctggccatgaccaggacagcctgaagaagagccagggcgtgggccccatcaggaaggtgctgctgctgaaggaggaccacgagggcctgggcatcagcatcaccggcggcaaggagcacggcgtgcccatcctgatcagcgagatccaccctggccagcctgctgacagatgtggcggcctgcacgtgggagatgccatcctggccgtgaatggagtgaacctgcgggacaccaagcacaaggaggccgtgaccatcctgagccagcagagaggagaaattgaatttgaggtggtgtatgtggcccctgaggtggacagtgatgatgaaaatgtggagtatgaagatgaaagtggccaccgctaccgcctgtacctggatgagctggagggcggcggcaaccctggggccagctgcaaggacaccagcggggagatcaaggtgctgcagggcttcaacaagaaggctgtgacagacacccatgaaaatggagacctgggcacagccagcgagacccccctggatgatggagccagcaagctggatgacctgcacaccctgtaccacaagaagagctactag

SEQ ID NO: 26466 - DNA, 1365 bp, Artificial Sequence
  derived and/or modified sequence
atgagcgccggcggcccctgccccgccgccgccggcggcggccccgggggcgcgtcgtgttcggtgggagctcctggaggggtgagtatgttcagatggttagaagtactggagaaagaattcgacaaagctttcgtggacgtcgacttgcttctcggtgaaatagatccggaccaggccgatatcacatacgaagggcgccagaagatgacgtcgttatctagttgcttcgcacagctttgtcacaaagctcagtcagtctctcaaatcaaccacaagcttgaagcccagctggttgacctcaaatcagagctgacagaaactcaagctgaaaaggttgtcttggagaaggaagtccatgaccagcttcttcaactacactctatacagctgcaactgcacgccaagactggacaaagtgctgactccggcactatcaaagcaaagcttgagcgcgagctggaggctaataaaaaggagaagatgaaagaggcccagttggaagctgaagttaagttgttacggaaagagaacgaggccctgcgaaggcacattgccgtgctccaggcggaggtgtacggcgcccgactggctgcaaaatatttggataaagagcttgctggaagagtgcaacagattcaactccttggtcgcgacatgaagggtccagcccatgacaagttgtggaatcagctggaagctgaaatacacctgcaccgtcacaaaacagtaattagggcctgtaggggacggaatgacttaaagagacccatgcaggcccctcctggacatgatcaggacagcctgaagaagtctcaaggcgtgggccccatacgaaaagtcctacttctaaaggaggaccacgagggtctgggcatttctatcacaggcggaaaagagcatggggtgcccatcctgatttcggaaattcacccgggccaacccgcagaccggtgtggtggccttcacgtaggcgatgccatcttggccgtaaatggagtcaacctaagggatactaagcacaaggaggctgtgaccatattgtcccaacagcgtggtgagatagagtttgaagtggtttatgtagcacccgaggtcgacagtgatgacgaaaatgtggagtacgaggatgagtccggacaccgctacagactgtatctggatgaactggaaggaggtggaaaccctggtgctagctgtaaagatactagtggggagatcaaagtgctgcagggatttaacaaaaaagctgtgacagatactcatgaaaacggagacctcggcactgcgagcgagacacctcttgatgacggggcctcaaaactcgacgacctgcacacactgtaccacaaaaaaagctattag

SEQ ID NO: 26467 - DNA, 1365 bp, Artificial Sequence
  derived and/or modified sequence
atgagcgccggtgggccttgtccagccgctgcaggaggagggccaggcggtgcctcctgctctgtcggtgcgccaggcggtgtctctatgttccgatggctggaggttctagaaaaggaattcgacaaggcgtttgtggatgtggacttgctattgggggaaattgacccagatcaggctgatatcacgtacgagggcagacagaagatgactagtctctcctcttgtttcgcacagttgtgccacaaagctcagtctgtgagccaaataaaccataagttagaagcgcaactggtggatcttaagagcgagctgaccgagacacaggcagagaaggtagtgctggagaaggaggtccacgaccagctgctgcagcttcattcaatccagttgcagctgcacgccaaaacaggccagtcggccgactcgggaacaatcaaagctaaacttgaacgtgaactcgaagcgaacaagaaagagaaaatgaaggaagcacagctggaggcagaggtgaagctgctccggaaagaaaacgaggctctgagacggcatattgcagtactgcaggccgaagtctacggggctagactcgcagcgaaatacctggataaggaactagctgggagggtccaacagattcagctactagggagggatatgaagggacccgctcacgacaagctgtggaaccagctggaggctgagatccaccttcaccgccacaaaactgttatcagggcgtgtcgcggtagaaatgatctgaagcggccaatgcaggcaccccctggccatgaccaggacagtctcaaaaaaagccagggtgtcggacctattcgaaaagtgctgctgttaaaggaggatcacgagggcctcgggatttctatcaccggcggtaaggaacacggtgtgcccatactgatcagcgagatccaccccggtcaacctgccgatcgctgcggaggactccacgtgggcgacgccatcctggctgtcaacggtgtaaatctccgagatactaagcataaagaagcggtgacaatcttaagccagcagcggggagaaatcgagtttgaggtggtgtatgtggcccctgaagtggactcggatgatgaaaacgtcgaatatgaagatgaatccggtcaccgctatcgcctgtatctggatgaactcgaaggaggagggaaccccggagctagctgcaaggacacctccggggagatcaaagtcctccagggattcaataaaaaggcagtcacagacacacatgagaatggggacctcgggaccgcatcagaaacccccctagatgacggcgctagcaaactcgatgatctccacacactgtaccacaagaaatcatactag

SEQ ID NO: 26468 - DNA, 1365 bp, Artificial Sequence
  derived and/or modified sequence
atgagtgcgggaggcccttgccccgccgccgccggaggcggccctgggggcgcgtcttgttccgtgggagctccggggggcgtctcaatgttccgctggctggaggtgctcgaaaaggagttcgacaaagcattcgttgatgttgaccttttactgggggaaattgatccagatcaagccgatatcacatatgagggcaggcagaagatgacttctctcagctcctgcttcgctcagctttgccataaggcccaaagtgtgtcccaaattaaccacaaactggaagctcaactggttgacctcaaatcagaactgaccgaaacacaagcggagaaagtcgtgttggaaaaggaggtgcacgaccagcttctgcagcttcactccatccagctacagttgcatgccaagaccggccagagcgccgattctgggacaatcaaagcgaagttggagagagaactcgaagccaacaagaaagagaagatgaaggaggctcagctcgaagccgaagtgaagctcttaaggaaagaaaacgaagcactgcgtagacatatcgccgtgctccaggctgaggtgtacggggcccgccttgccgccaagtatctggataaagagctggcaggaagagttcaacagattcagctcctcggcagagacatgaagggaccagcccatgacaagctatggaaccaattggaggcagagattcacttgcatcggcacaagacggtgataagagcatgtcgaggccgcaatgatctgaaacggcccatgcaggcccctccagggcacgaccaggacagcctcaaaaaaagccagggtgtgggaccgatccggaaagtcctccttctgaaagaggatcatgagggactcgggatctctattactggaggcaaggagcatggcgtgccaatcttaatcagtgagatccaccctggacagcccgccgataggtgcggaggcttacacgtcggagacgctatactcgccgtgaatggagtcaaccttagggatacaaagcacaaagaggctgtgacaattttgagtcagcagcggggagaaatagaattcgaggtcgtttatgtggcaccagaggtagactccgacgatgagaacgttgaatacgaagacgaaagcggccatagatatagactctacctcgacgagctggaaggaggaggtaatcccggggccagttgtaaggacacaagcggggagatcaaagtactgcagggattcaacaaaaaagccgtcaccgacacccatgagaacggcgacctaggaactgctagtgagacgccactggacgatggcgctagcaaactggatgacttgcacacgttgtatcacaaaaagtcttattag

SEQ ID NO: 26469 - DNA, 1365 bp, Artificial Sequence
  derived and/or modified sequence
atgtccgctggtggaccctgtcccgcagcagctggcggaggacccggaggagcatcctgcagtgtcggagccccgggcggcgtctccatgttccggtggctggaagttctcgagaaagaattcgacaaggcctttgtcgacgtagatctgcttctgggtgaaatagaccccgaccaggccgatatcacatatgagggacggcaaaagatgaccagtctgagcagctgtttcgcacagctgtgtcacaaagctcagtccgtatctcaaattaatcacaaattggaggctcagctcgtggaccttaagtcagaacttaccgagacacaggcagagaaggttgttctggaaaaggaagtacacgaccagctgctccagctgcacagtatccagcttcagttacacgccaaaacggggcagtccgcagattcaggaactattaaggcaaaactcgaacgtgagctggaagccaacaagaaggaaaagatgaaggaggcgcaattggaagccgaagttaagttgttgcgcaaagagaacgaagcacttagaagacatatcgccgtactccaagccgaggtatacggcgcacggctggccgccaagtatctagataaagaattggcagggagggtacagcagattcaactgcttgggagagatatgaaaggccctgctcacgataagctgtggaaccaattggaggctgagatccaccttcacagacataaaacagtaatccgggcctgtcgtggaaggaacgacctcaaacgaccaatgcaagctcctccaggccacgatcaggacagtttgaagaaatcccagggggtaggaccaatccgaaaagtgctgcttttaaaggaagatcatgaaggcctgggcattagtattacggggggcaaggagcacggagttcccatcctgatatctgagatacaccccggccaacccgccgatagatgcggtggcttgcatgtgggggatgctatactcgctgtgaatggcgtcaacctgagagatacgaaacacaaagaagctgtgacaatactgagccagcagaggggtgaaatcgagtttgaggtcgtctatgtggcccccgaggtggacagcgatgacgagaatgtggaatatgaggatgaaagtgggcataggtatcgtttgtatctcgacgaattggagggcggcggcaatccaggcgcctcttgtaaagataccagcggtgaaattaaagtgctgcaaggatttaataagaaggccgtgactgatactcacgaaaacggcgacctgggtacagcaagcgaaactcccttggatgatggtgcttccaaactggatgacctccatacactatatcacaagaaaagttactag

SEQ ID NO: 26470 - DNA, 1365 bp, Artificial Sequence
  derived and/or modified sequence
atgagcgccggcggcccctgccccgccgccgccggcggcggccccggcggcgccagctgcagcgtgggcgcccccggcggcgtgagcatgttcagatggctggaggtgctggagaaggagttcgacaaggccttcgtggacgtggacctgctgctgggcgagatcgaccccgaccaggccgacatcacctacgagggcagacagaagatgaccagcctgagcagctgcttcgcccagctgtgccacaaggcccagagcgtgagccagatcaaccacaagctggaggcccagctggtggacctgaagagcgagctgaccgagacccaggccgagaaggtggtgctggagaaggaggtgcacgaccagctgctgcagctgcacagcatccagctgcagctgcacgccaagaccggccagagcgccgacagcggcaccatcaaggccaagctggagagagagctggaggccaacaagaaggagaagatgaaggaggcccagctggaggccgaggtgaagctgctgagaaaggagaacgaggccctgagaagacacatcgccgtgctgcaggccgaggtgtacggcgccagactggccgccaagtacctggacaaggagctggccggcagagtgcagcagatccagctgctgggcagagacatgaagggccccgcccacgacaagctgtggaaccagctggaggccgagatccacctgcacagacacaagaccgtgatcagagcctgcagaggcagaaacgacctgaagagacccatgcaggccccccccggccacgaccaggacagcctgaagaagagccagggcgtgggccccatcagaaaggtgctgctgctgaaggaggaccacgagggcctgggcatcagcatcaccggcggcaaggagcacggcgtgcccatcctgatcagcgagatccaccccggccagcccgccgacagatgcggcggcctgcacgtgggcgacgccatcctggccgtgaacggcgtgaacctgagagacaccaagcacaaggaggccgtgaccatcctgagccagcagagaggcgagatcgagttcgaggtggtgtacgtggcccccgaggtggacagcgacgacgagaacgtggagtacgaggacgagagcggccacagatacagactgtacctggacgagctggagggcggcggcaaccccggcgccagctgcaaggacaccagcggcgagatcaaggtgctgcagggcttcaacaagaaggccgtgaccgacacccacgagaacggcgacctgggcaccgccagcgagacccccctggacgacggcgccagcaagctggacgacctgcacaccctgtaccacaagaagagctactag

SEQ ID NO: 26471 - protein, 189 aa, Artificial Sequence
  derived and/or modified sequence
MTDKTEKVAVDPETVFKRPRECDSPSYQKRQRMALLARKQGAGDSLIAGSAMSKAKKLMTGHAIPPSQLDSQIDDFTGFSKDRMMQKPGSNAPVGGNVTSSFSGDDLECRETASSPKSQREINADIKRKLVKELRCVGQKYEKIFEMLEGVQGPTAVRKRFFESIIKEAARCMRRDFVKHLKKKLKRMI

SEQ ID NO: 26472 - DNA, 570 bp, Artificial Sequence
  derived and/or modified sequence
atgaccgacaaaaccgagaaagtggcagtcgacccagaaaccgtgttcaagagaccccgtgagtgcgatagtcctagttatcagaaacggcaacgtatggcattgctggcacgtaaacagggggccggggattcgttaatcgccggttccgccatgtctaaggcaaagaaactcatgaccggtcacgcgatacctccatcacagctcgactcccagatcgatgacttcactggatttagcaaagatagaatgatgcagaagcctggatcaaacgcgcctgtaggtggaaacgttactagcagcttctctggagatgacctagaatgtcgcgagacagctagtagcccaaagtcacaaagggaaatcaacgcggacatcaagcggaaactggtgaaggagctgagatgcgtggggcaaaagtatgagaagatctttgaaatgctggagggcgtacagggccctaccgctgtgcgtaaaagatttttcgaatcaattatcaaggaggcggcacgctgcatgcggcgggattttgtgaaacaccttaagaagaagctaaaaaggatgatttag

SEQ ID NO: 26473 - DNA, 570 bp, Artificial Sequence
  derived and/or modified sequence
atgacagacaagacagagaaggtggccgtggaccctgagaccgtcttcaagaggcccagagaatgtgacagccccagctaccagaagaggcagaggatggccctgctggccaggaagcagggcgctggggacagcctgattgctggcagcgccatgagcaaggccaagaagctgatgacaggccacgccatcccccccagccagctggacagccagattgatgacttcaccggcttcagcaaggacaggatgatgcagaagccaggcagcaatgcccctgtgggcggcaatgtgaccagcagcttctctggagatgacctggagtgccgggagacagccagcagccccaagagccagcgggagatcaatgctgacatcaagaggaagctggtgaaggagctgcgctgtgtgggccagaagtatgagaagatctttgagatgctggagggcgtgcagggccccacagctgtgaggaagcgcttctttgagagcatcatcaaggaggccgcccgctgcatgaggcgggactttgtgaagcacctgaagaagaagctgaagaggatgatctag

SEQ ID NO: 26474 - DNA, 570 bp, Artificial Sequence
  derived and/or modified sequence
atgaccgacaagaccgagaaggtggccgtggaccccgagaccgtgttcaagcgcccgcgcgagtgcgactcccccagctatcagaaacgccagagaatggctctgctggcccgaaagcaaggggccggagactctctgatcgcaggctcagccatgtcaaaagctaaaaaactcatgactggacacgcaattcccccttcccaactggacagtcagatagatgacttcacaggattctcaaaagataggatgatgcaaaaacccggatctaatgcgcctgtaggcggaaacgtgacctcaagctttagcggagatgatctcgagtgcagagaaactgcaagttcccctaaatcccagcgtgaaataaatgctgacatcaaacggaagctggtgaaagagcttagatgcgtgggacagaagtacgagaagattttcgagatgctagagggagtccagggccctaccgcggtgaggaaaaggttttttgagtccattataaaagaagctgcccgctgcatgcgaagggactttgtgaagcatctgaaaaagaaattgaaaagaatgatctag

SEQ ID NO: 26475 - DNA, 570 bp, Artificial Sequence
  derived and/or modified sequence
atgaccgataaaacagagaaagtcgccgttgatccagaaacagtgttcaagcgtccaagagagtgtgacagcccaagttatcagaagcgccagaggatggcactcctcgcacgcaaacaaggcgctggcgatagtctcattgctgggtccgctatgtcaaaggctaagaaactcatgaccggccacgccattccaccatctcaactggattctcagatcgatgacttcaccggattcagtaaagatagaatgatgcagaagcctggtagcaacgcgcctgtcgggggaaatgttacttccagcttctctggtgatgatctggagtgtagagagacagccagctcccctaagtcccaaagagaaattaacgctgatattaaacgtaaactcgttaaggaattaaggtgtgttgggcagaaatatgaaaagatattcgaaatgctggaaggagtgcaggggccaaccgctgtgcgtaagaggttcttcgagagtattatcaaggaagcggctaggtgcatgcggcgagatttcgtgaagcatttgaaaaaaaagctgaagcgaatgatttag

SEQ ID NO: 26476 - DNA, 1010 bp, Artificial Sequence
  derived and/or modified sequence
agtgttcggctggggcaggcacgctgtggctggctgcttcccttccttccatcccctttggaccaaacgggatcggtgcttctggtgagacgcctccccatgcacatcactcccaggtgccctagggggcacatttcccacaactcccagagggcaggtttctagaaagtgccaccagtggggaggcgccacaacttcactgccattttgtgaggtgccgctgtctctcctccagcaaggaaacaatgaccgataaaacagagaaggtggctgtagatcctgaaactgtgtttaaacgtcccagggaatgtgacagtccttcgtatcagaaaaggcagaggatggccctgttggcaaggaaacaaggagcaggagacagccttattgcaggctctgccatgtccaaagcaaagaagcttatgacaggacatgctattccacccagccaattggattctcagattgatgacttcactggtttcagcaaagataggatgatgcagaaacctggtagcaatgcacctgtgggaggaaacgttaccagcagtttctctggagatgacctagaatgcagagaaacagcctcctctcccaaaagccaacgagaaattaatgctgatataaaacgtaaattagtgaaggaactccgatgcgttggacaaaaatatgaaaaaatcttcgaaatgcttgaaggagtgcaaggacctactgcagtcaggaagcgattttttgaatccatcatcaaggaagcagcaagatgtatgagacgagactttgttaagcaccttaagaagaaactgaaacgtatgatttgagaatacttgtccctggaggattatcacaccccaaatgcataatctcgttaatgattgaggagagaaaaggatcagattgctgttttctacaatggagcaggatattgctgaagtctcctggcatatgttaccgaatcaactggccttccagaggctaagaaatttctgttagtaaaagatgttctttttcccaaa

SEQ ID NO: 26477 - DNA, 570 bp, Artificial Sequence
  derived and/or modified sequence
atgaccgacaagaccgagaaggtggccgtggaccccgagaccgtgttcaagagacccagagagtgcgacagccccagctaccagaagagacagagaatggccctgctggccagaaagcagggcgccggcgacagcctgatcgccggcagcgccatgagcaaggccaagaagctgatgaccggccacgccatcccccccagccagctggacagccagatcgacgacttcaccggcttcagcaaggacagaatgatgcagaagcccggcagcaacgcccccgtgggcggcaacgtgaccagcagcttcagcggcgacgacctggagtgcagagagaccgccagcagccccaagagccagagagagatcaacgccgacatcaagagaaagctggtgaaggagctgagatgcgtgggccagaagtacgagaagatcttcgagatgctggagggcgtgcagggccccaccgccgtgagaaagagattcttcgagagcatcatcaaggaggccgccagatgcatgagaagagacttcgtgaagcacctgaagaagaagctgaagagaatgatctag

SEQ ID NO: 26478 - protein, 72 aa, Artificial Sequence
  derived and/or modified sequence
MSYQQQQCKQPCQPPPVCPTPKCPEPCPPPKCPEPCPPPKCPQPCPPQQCQQKYPPVTPSPPCQPKYPPKSK

SEQ ID NO: 26479 - protein, 793 aa, Artificial Sequence
  derived and/or modified sequence
MLSQVYRCGFQPFNQHLLPWVKCTTVFRSHCIQPSVIRHVRSWSNIPFITVPLSRTHGKSFAHRSELKHAKRIVVKLGSAVVTRGDECGLALGRLASIVEQVSVLQNQGREMMLVTSGAVAFGKQRLRHEILLSQSVRQALHSGQNQLKEMAIPVLEARACAAAGQSGLMALYEAMFTQYSICAAQILVTNLDFHDEQKRRNLNGTLHELLRMNIVPIVNTNDAVVPPAEPNSDLQGVISVKDNDSLAARLAVEMKTDLLIVLSDVEGLFDSPPGSDDAKLIDIFYPGDQQSVTFGTKSRVGMGGMEAKVKAALWALQGGTSVVIANGTHPKVSGHVITDIVEGKKVGTFFSEVKPAGPTVEQQGEMARSGGRMLATLEPEQRAEIIHHLADLLTDQRDEILLANKKDLEEAEGRLAAPLLKRLSLSTSKLNSLAIGLRQIAASSQDSVGRVLRRTRIAKNLELEQVTVPIGVLLVIFESRPDCLPQVAALAIASGNGLLLKGGKEAAHSNRILHLLTQEALSIHGVKEAVQLVNTREEVEDLCRLDKMIDLIIPRGSSQLVRDIQKAAKGIPVMGHSEGICHMYVDSEASVDKVTRLVRDSKCEYPAACNALETLLIHRDLLRTPLFDQIIDMLRVEQVKIHAGPKFASYLTFSPSEVKSLRTEYGDLELCIEVVDNVQDAIDHIHKYGSSHTDVIVTEDENTAEFFLQHVDSACVFWNASTRFSDGYRFGLGAEVGISTSRIHARGPVGLEGLLTTKWLLRGKDHVVSDFSEHGSLKYLHENLPIPQRNTN

SEQ ID NO: 26480 - DNA, 2382 bp, Artificial Sequence
  derived and/or modified sequence
atgttatcacaagtataccggtgtggcttccagcccttcaaccagcacttgctgccctgggtgaagtgtaccactgttttcaggtcacactgcattcagcctagcgtgatcagacacgtccgcagctggtctaatatcccgtttattaccgtgcccctcagccgcacacacgggaagtcctttgctcatagaagtgaattgaagcacgctaagaggatcgtagtgaaacttggatccgccgttgtgacacggggcgacgagtgtgggcttgccctcggccgcttggcgtcaatcgtggagcaggtgtcagttttgcagaaccagggaagagagatgatgctagttaccagcggcgctgtcgcatttgggaagcaaagactgagacacgaaatcctgctaagccaatccgtgagacaagctctccattccgggcaaaatcaactaaaggagatggcgataccggttttagaggccagagcttgcgccgctgcagggcagtctgggttgatggcactctatgaggctatgtttacccagtatagtatatgcgcagcccagatacttgtgactaacctcgacttccacgacgagcagaaacgtcgcaacctgaacggcactctacatgagctgttacggatgaatatcgttccgatcgtcaacacgaacgatgccgtggtcccgcctgcggagccgaacagtgatctccagggtgtcatcagtgttaaggacaatgactcactcgcagcacgcctcgctgtcgagatgaagaccgatttattgatagtgctgtctgatgttgagggattgtttgactccccccccgggtcagacgacgccaaactcattgacatcttctatcctggagaccagcaaagcgtcaccttcgggacgaaatctcgagtgggaatggggggaatggaagcaaaggtaaaagcagccttgtgggctctgcaaggcgggacttctgtagttatcgccaatggcacacatcccaaagtcagtggacatgtgataacagatatagtggaaggtaagaaagtcggcacattcttctccgaagtgaaacctgccggacctacagtggagcaacagggcgaaatggcgcggtccgggggacggatgctggctactttggaacccgaacagagagctgagattattcaccacttggcagatctgctcaccgaccagcgtgatgaaattctgctggccaacaagaaagatttagaggaagctgagggaaggcttgcagccccactcctgaagcgtctgagcctgtcaaccagtaaattgaactctctggctattggcctaagacagatcgccgcctcctctcaggattccgttggccgcgttctcagacggacccgaatagccaagaatttggagctagagcaggtaaccgtccctatcggagttctgctggtgatctttgagagccgcccagattgcttgccacaagtcgccgcactggctattgcaagcgggaatggcctgctgttgaagggaggaaaggaggccgcccactctaatcggatattacatcttctgacccaagaggccctgtctatccacggcgtgaaggaggccgtgcagttggtcaacacccgagaagaagtggaggatctttgcagacttgacaagatgatcgacctcattataccaaggggttcatcccagttggtacgggatatacagaaagccgctaaaggcatcccggttatgggtcactctgagggcatatgccacatgtacgtggactctgaagcctctgtagacaaggtgacaagactggtgcgggactcaaagtgcgagtaccctgctgcctgcaacgcattggaaacgctgctgatccaccgcgatctcctgcggactcccttgttcgaccagattattgacatgttaagagttgagcaggttaaaatccatgccggtccgaagtttgcctcatatctgactttttcaccaagcgaggtcaagtctctgaggacagagtacggcgacctggagctgtgcatagaggtggtggacaatgtgcaggacgcaattgatcacattcataagtacggaagctctcacacagatgtcatcgtcactgaagacgagaacaccgcggagttcttcctgcagcatgtggatagtgcctgtgttttttggaatgccagcaccagattctctgacggctatcgttttgggctgggggcagaggtaggaatcagtacatcgaggatccatgcgagggggcccgtgggcctggaaggtctgcttaccactaaatggttgctgagaggtaaggaccacgtcgtgtcggattttagcgagcacgggtccctgaaatatctgcacgagaatctacccataccacagcgtaacactaactag

SEQ ID NO: 26481 - DNA, 2382 bp, Artificial Sequence
  derived and/or modified sequence
atgctgagccaggtgtaccgctgtggcttccagcccttcaaccagcacctgctgccctgggtgaagtgcaccaccgtcttccgcagccactgcatccagcccagcgtcatcagacatgtgcgctcctggagcaacatccccttcatcaccgtgcccctgagcaggacccacggcaagagctttgcccacaggtctgagctgaagcacgccaagagaattgtggtgaagctgggcagcgctgtggtgaccagaggagatgaatgtggcctggccctgggccgcctggccagcatcgtggagcaggtgtctgtgctgcagaaccagggccgggagatgatgctggtgaccagcggggctgtggccttcggcaagcagaggctgcggcatgagatcctgctgagccagagcgtgcggcaggccctgcacagcggccagaaccagctgaaggagatggccatccctgtgctggaggcccgggcctgtgccgccgccggccagagcggcctgatggccctgtatgaggccatgttcacccagtacagcatctgtgccgcccagatcctggtgaccaacctggacttccatgatgagcagaagagaagaaacctgaatggcaccctgcacgagctgctgaggatgaacatcgtgcccatcgtgaacaccaatgatgctgtggtgcccccagctgagcccaacagcgacctgcagggcgtcatctctgtgaaggacaatgacagcctggccgcccggctggccgtggagatgaagacagacctgctgattgtgctgagtgatgtggagggcctgtttgacagccccccaggcagtgatgatgccaagctgattgacatcttctacccaggggaccagcagagcgtgaccttcggcaccaagagccgggtgggcatgggcggcatggaggccaaggtgaaggccgccctgtgggccctgcagggcggcacctctgtggtgattgccaacggcacccaccccaaggtgtctggccacgtgatcacagacatcgtggagggcaagaaggtgggcaccttcttcagcgaggtgaagccagctggccccaccgtggagcagcagggcgagatggcccggagcggcggccgcatgctggccaccctggagcctgagcagagagctgagatcatccaccacctggccgacctgctgacagaccagagagatgagatcctgctggccaacaagaaggacctggaggaggccgagggccgcctggccgcccccctgctgaagaggctgagcctgagcaccagcaagctgaacagcctggccatcggcctgcggcagattgctgccagcagccaggacagcgtgggccgggtgctgcggaggacccgcatcgccaagaacctggagctggagcaggtgacagtgcccatcggcgtgctgctggtgatctttgagagcaggccagactgcctgccccaggtggccgccctggccatcgccagcggaaatggcctgctgctgaagggcggcaaggaggccgcccacagcaaccgcatcctgcacctgctgacccaggaggccctgagcatccatggagtgaaggaggccgtgcagctggtgaacacccgggaggaggtggaggacctgtgccgcctggacaagatgattgacctgatcatcccccggggcagcagccagctggtgcgggacatccagaaggccgccaagggcatccctgtgatgggccacagcgagggcatctgccacatgtatgtggacagcgaggcctctgtggacaaggtgacccggctggtgcgggacagcaaatgtgagtacccagctgcctgcaatgccctggagaccctgctgatccaccgggacctgctgcggacccccctgtttgaccagatcatcgacatgctgcgggtggagcaggtgaagatccacgccggccccaagtttgccagctacctgaccttcagccccagcgaggtgaagagcctgaggacagaatatggagacctggagctgtgcatcgaggtggtggacaacgtgcaggatgccatcgaccacatccacaagtatggcagcagccacacagatgtgattgtgacagaagatgagaacacagctgagttcttcctgcagcacgtggacagcgcctgtgtgttctggaatgccagcacccgcttcagtgatggctacagatttggcctgggcgctgaggtgggcatcagcaccagccgcatccacgcccggggccctgtgggcctggagggcctgctgaccaccaagtggctgctgcggggcaaggaccacgtggtgtctgacttcagcgagcacggcagcctgaagtacctgcacgagaacctgcccatcccccagaggaacaccaactag

SEQ ID NO: 26482 - DNA, 3337 bp, Artificial Sequence
  derived and/or modified sequence
gcgggacgtggacggaagaaaaaagagagtgagcgagcgccggaatcagcccggcgtggagtgcggacccgcggtagtgccagggggcgaaggcggcggtggtgaggaagatactttggttagtgaccacatcgcagcatgttgagtcaagtttaccgctgtgggttccagcccttcaaccaacatcttctgccctgggtcaagtgtacaaccgtcttcagatctcattgtatccagccttcagtcatcagacatgttcgttcttggagcaacatcccgtttatcactgtacccctcagtcgtacacatggcaagtccttcgcccaccgcagtgagctgaagcatgccaagagaatcgtggtgaagctcggcagtgccgtggtgacccgaggggatgaatgtggcctggccctggggcgcttggcatctattgttgagcaggtatcagtgctgcagaatcagggcagagagatgatgctggtgaccagtggagccgtagcctttggcaaacaacgcttgcgccatgagatccttctgtctcagagcgtgcggcaggccctccactcggggcagaaccagctgaaagaaatggcaattccagtcttagaggcacgagcctgtgcagctgccggacagagtgggctgatggccttgtatgaggctatgtttacccagtacagcatctgtgctgcccagattttggtgaccaatttggatttccatgatgagcagaagcgccggaacctcaatggaacacttcatgaactccttagaatgaacattgtccccattgtcaacacaaatgatgctgttgtccccccagctgagcccaacagtgacctgcagggggttattagtgttaaagataatgatagcctggctgcccgactggctgtggaaatgaaaactgatctcttgattgttctttcagatgtagaaggcctttttgacagccccccaggttcagatgatgcaaagcttattgatatattttatcccggagatcagcagtctgtgacatttggaaccaagtctagagtgggaatgggtggcatggaagccaaggtgaaagcagccctctgggctttgcaaggtggcacttctgttgttattgccaatggaacccacccaaaggtgtctgggcacgtcatcacagacattgtggaggggaagaaagttggtaccttcttttcagaagtaaagcctgcaggccctactgttgagcagcagggagaaatggcgcgatctggaggaaggatgttggccaccttggaacctgagcagagagcagaaattatccatcatctggctgatctgttgacggaccagcgtgatgagatcctgttagccaacaaaaaagacttggaggaggcagaggggagacttgcagctcctctgctgaaacgtttaagcctctccacatccaaattgaacagcctggccatcggtctgcgacagatcgcagcctcctcccaggacagcgtgggacgtgttttgcgccgcacccgaatcgccaaaaacttggaactggaacaagtgactgtcccaattggagttctgctggtgatctttgaatctcgtcctgactgtctaccccaggtggcagctttggctatcgcaagtggcaatggcttgttactcaaaggagggaaggaggctgcacacagcaaccggattctccacctcctgacccaggaggctctctcaatccatggagtcaaggaggccgtgcaactggtgaataccagagaagaagttgaagatctttgccgcctagacaaaatgatagatctgatcattccacgtggctcttcccagctggtcagagacatccagaaagctgctaaggggattccagtgatggggcacagcgaagggatctgtcacatgtatgtggattccgaggccagtgttgataaggtcaccaggctagtcagagactctaaatgtgaatatccagctgcctgtaatgctttggagactttgttaatccaccgggatctgctcaggacaccattatttgaccagatcattgatatgctgagagtggaacaggtaaaaattcatgcaggccccaaatttgcctcctatctgaccttcagcccctccgaagtgaagtcactccgaactgagtatggggacctggaattatgcattgaagtagtggacaacgttcaggatgccattgaccacatccacaagtatggcagctcccacacggatgtcatcgtcacagaggacgaaaacacagcggagttcttcctgcagcacgtagacagtgcctgtgtgttctggaatgccagcactcgcttttctgatggttaccgctttggactgggagctgaagtgggaatcagtacatcgagaatccacgcccggggaccagtaggacttgagggactgcttactactaagtggctgctgcgagggaaggaccacgtggtctcagatttctcagagcatggaagtttaaaatatcttcatgagaacctccctattcctcagagaaacaccaactgaaaagagccaggaaaacccgggaattttccaaaaggtcttcacgttaaacttgtcttatctcaggagagagcccgctcttgtctcccagttcctggtagggtctgcctgttggaaagtgtacctggatgcttctgggctccgtttggcaatagcagtcttggctgatgtgcacagtctggctcccagctcaccctttttttttaaagtaagaaaatagttgctaccgatagggactttgccaagtccaattatcttctaggattgaaaggtgcattttccccataaaaaaggcgaggaaaacccatggctgctttgtgtcacctcagtgacttacagtcccccttggcatttagttggtactagagccagtcatccttaacaaatcttttcacattttatttctttcacatgtagtcatcttcaaaaaggaaagatttggaattttagaaaaggggcaactcttctttttagcattctcatcagaaagtcacaaaaatcgatggaatcatttccactgggaagattgaccttttgtatttatttgtggggtaaattaataagcattccagatgcttgcagcttcctgcatccaggagatgctgtgttccccgtgatgcagctggaacccaagctgcagcaggagatgcaagtttcaggatgttccccactgagctggaggaatatctacagcagtgatgcttgaaatttttgtatgaattattttgtcgtcctacccttttcctccaaaacaaaaattagaggattattttaatactttggattcttcccccttttttgagaaataaagttttttatg

SEQ ID NO: 26483 - DNA, 2382 bp, Artificial Sequence
  derived and/or modified sequence
atgctgagccaggtgtaccggtgcggcttccagcccttcaaccagcacttgcttccttgggtcaagtgtacaacagtgttcagatcccactgcattcagccatctgtcatccggcacgtaagaagttggagcaatattcctttcatcaccgtacctctctcccggacccacggaaaatcgtttgcgcatagatcagagctgaagcatgctaaacgtattgttgtcaagctcggctccgcggtagtcactaggggagatgagtgcggtctagcactgggcaggctggcttctattgttgagcaagtaagcgtactgcaaaatcagggaagagaaatgatgctagttactagtggcgctgtagcattcggaaagcagaggctaaggcatgagattctactgtctcagagcgttcgtcaagcattgcatagcggccagaatcagttgaaggagatggccatccccgtcctcgaggccagagcctgcgcagccgctggacagtccggcctgatggccctgtacgaggctatgtttactcaatacagcatctgcgctgcccagattctggtcaccaatctcgacttccacgacgagcaaaaacgtagaaacttaaacggtaccctgcatgagctgctaagaatgaacatcgtgccaattgtgaacaccaacgacgccgtggttcctcctgccgaacccaattcggacttgcagggggtgattagtgtgaaggataatgatagtctggctgccagactggctgtggagatgaagacagatttgttaatagtcttaagcgatgtcgaggggctgtttgattccccccctggaagcgacgatgccaaactaattgatattttttatccaggtgaccaacaatccgtcacgtttgggaccaaaagcagagtcgggatgggaggcatggaagccaaggtgaaagctgccctctgggcactgcaaggcgggacatctgtcgttatcgctaacggaacacaccctaaggtcagtggacacgtcatcacagacattgttgaaggaaaaaaggtaggtacattcttttccgaggtaaaaccagctggacccacagtcgaacagcagggggaaatggctcgctcgggcggtcggatgctcgccactctcgagccagaacagcgcgccgaaatcattcaccacctggccgacttgctgaccgatcagagggacgagatactcctggcaaacaagaaagacctggaagaagccgagggaagacttgcggcccccctattgaagcgcctctccctaagcaccagcaagttaaattcactcgccatcggccttagacaaatagcggcttccagccaggacagcgtgggcagagtgctgcgacggactagaatcgccaagaaccttgagctggagcaggtcaccgtgcctataggcgtgctgctcgtcatcttcgaaagccggcccgactgcctgccgcaggtcgccgctttagccatcgcttctggcaacggcttactgctgaaaggcggcaaagaggccgcacacagcaataggattctgcatctcctgacacaagaggccctgtccattcatggggtgaaggaagcggtccaattggtgaacactagggaagaggtggaggatctgtgtaggctcgacaaaatgatagatcttattatccccagggggtccagtcagctagtgagagatattcaaaaggccgctaagggtattcccgtgatgggccactcagagggcatatgtcacatgtacgtggattccgaagcgtcggtggataaggtgaccagacttgtaagggattcaaaatgtgaatacccggctgcctgtaacgctctcgaaacccttctcattcatagagacttgcttaggacacctctctttgatcagattatagacatgctgcgcgtggaacaggttaaaatacatgcagggcccaaatttgcctcttatttgacgttctctccatctgaggtgaagagccttcgcactgaatatggcgatctggagctgtgcatagaagtagtcgataacgtgcaggatgcaattgatcacatacacaagtatggctcgagccatacagacgttatcgtgacagaagacgagaacactgccgaattctttctgcaacatgtagattctgcatgcgtgttctggaacgcatctacgcggttctccgacgggtacaggttcgggttgggtgctgaagtggggatttccacctcacgtattcacgcccgcggtccagtggggcttgagggcctactaaccaccaaatggttgctccggggtaaagatcacgtggtgtctgactttagtgaacacggatctctcaaatacctgcatgagaacctccctatcccccagcgaaacacaaactag

SEQ ID NO: 26484 - DNA, 2382 bp, Artificial Sequence
  derived and/or modified sequence
atgctctcgcaggtctatagatgtggctttcagcctttcaatcagcatcttctgccttgggtaaagtgcacgacagtgttcagatctcattgcattcaaccttccgtgatcagacatgtgaggtcatggtccaacataccgttcatcactgtccccttatcaaggacccatgggaagtcttttgcccataggtctgaactgaaacacgcaaaaagaatagtggtgaagctgggtagtgctgtggttacacggggtgacgagtgcggccttgctctgggtagactggcctccatagtagagcaggtatcggtgctgcagaatcagggaagagaaatgatgcttgtgaccagtggagcagttgcatttgggaaacaacggctgcggcacgaaatcctcctgtcccaatccgttcggcaggctttgcatagtgggcagaaccagcttaaagagatggcgataccagttctcgaggcacgcgcttgtgcagcggcaggacaatcgggtctgatggctctctacgaggcaatgttcacacagtatagtatctgtgcagcacagatcctagtcactaatctggacttccacgatgagcaaaagcgccgaaacctaaatggtaccctgcatgaacttcttcggatgaatatcgtgcccattgttaacacaaacgacgctgtcgtgccaccggcagaacccaacagcgatctgcagggtgtcatctccgtcaaggacaacgactctttagctgcaaggctcgcagtggagatgaagaccgacctattgattgtgctgagcgacgtcgagggcttgttcgatagtcctcctggctcggacgatgcgaagctgattgacatcttttaccctggtgaccagcagtctgtcacattcggtacaaaaagtcgcgtggggatggggggaatggaagccaaggtgaaagccgcactctgggctctgcagggaggaacctccgtcgtgatcgcaaacggaactcatcctaaggtgtctggacacgtaataactgacatcgtggaaggcaaaaaggtcgggacgtttttttcagaagtgaagccggctgggcctaccgtggaacagcagggcgagatggctaggagcggaggacgtatgttggccaccttagagccagagcaacgggctgaaatcatacatcaccttgcggaccttttgacagatcagcgtgacgagatactgcttgccaataaaaaggatctcgaggaggcagaaggccgactagccgcaccattactcaagagactttctctcagcacatctaaactgaattccctggcaatcggacttcggcagattgcagccagctcacaggatagtgtgggacgagtcctcagacggacccgaattgccaagaatctggaactagagcaggttacagttcctattggcgtgctcctcgttatctttgagagccggcctgactgtcttcctcaggttgccgctctggccattgcttctggaaatggactgctcctgaaagggggtaaggaggcggctcattcaaatcgcatcttgcacctgttgacacaggaggccttatctatccatggtgtcaaagaggccgtccagctggtcaatacgcgcgaagaggtggaggacttgtgccgccttgacaaaatgattgacctgattatccctagggggagctcccagctggttcgcgacatccagaaggcagctaaaggtatacccgtgatggggcattcagaagggatctgtcatatgtacgttgactctgaggccagcgtagacaaagtgaccaggctggtgagggatagcaaatgtgagtaccctgctgcctgtaacgccctcgagactctgcttatccaccgcgaccttttgcgcaccccgttgtttgaccagatcatcgacatgctgcgtgtggagcaggtcaagatccatgccggacccaaattcgcctcctacctgacattctccccttcagaggtgaaaagtctgcgcacagagtacggcgatctcgaattgtgcattgaggttgtagataatgttcaggatgcaatagaccatattcacaagtatggctcttcacacactgacgtgattgtgaccgaggatgagaatactgctgagttctttctgcagcacgtcgatagtgcatgcgtattttggaatgccagtacacgtttctccgacggatataggtttgggcttggcgcagaggtagggattagtaccagccggatccatgcaaggggacccgtagggcttgagggattgctaacaactaaatggctgcttcgaggcaaggaccacgtggtgagtgacttttctgaacatggctctctaaaatacctacacgaaaatcttccaatcccccagagaaacactaactag

SEQ ID NO: 26485 - DNA, 2382 bp, Artificial Sequence
  derived and/or modified sequence
atgctgagccaggtgtacagatgcggcttccagcccttcaaccagcacctgctgccctgggtgaagtgcaccaccgtgttcagaagccactgcatccagcccagcgtgatcagacacgtgagaagctggagcaacatccccttcatcaccgtgcccctgagcagaacccacggcaagagcttcgcccacagaagcgagctgaagcacgccaagagaatcgtggtgaagctgggcagcgccgtggtgaccagaggcgacgagtgcggcctggccctgggcagactggccagcatcgtggagcaggtgagcgtgctgcagaaccagggcagagagatgatgctggtgaccagcggcgccgtggccttcggcaagcagagactgagacacgagatcctgctgagccagagcgtgagacaggccctgcacagcggccagaaccagctgaaggagatggccatccccgtgctggaggccagagcctgcgccgccgccggccagagcggcctgatggccctgtacgaggccatgttcacccagtacagcatctgcgccgcccagatcctggtgaccaacctggacttccacgacgagcagaagagaagaaacctgaacggcaccctgcacgagctgctgagaatgaacatcgtgcccatcgtgaacaccaacgacgccgtggtgccccccgccgagcccaacagcgacctgcagggcgtgatcagcgtgaaggacaacgacagcctggccgccagactggccgtggagatgaagaccgacctgctgatcgtgctgagcgacgtggagggcctgttcgacagcccccccggcagcgacgacgccaagctgatcgacatcttctaccccggcgaccagcagagcgtgaccttcggcaccaagagcagagtgggcatgggcggcatggaggccaaggtgaaggccgccctgtgggccctgcagggcggcaccagcgtggtgatcgccaacggcacccaccccaaggtgagcggccacgtgatcaccgacatcgtggagggcaagaaggtgggcaccttcttcagcgaggtgaagcccgccggccccaccgtggagcagcagggcgagatggccagaagcggcggcagaatgctggccaccctggagcccgagcagagagccgagatcatccaccacctggccgacctgctgaccgaccagagagacgagatcctgctggccaacaagaaggacctggaggaggccgagggcagactggccgcccccctgctgaagagactgagcctgagcaccagcaagctgaacagcctggccatcggcctgagacagatcgccgccagcagccaggacagcgtgggcagagtgctgagaagaaccagaatcgccaagaacctggagctggagcaggtgaccgtgcccatcggcgtgctgctggtgatcttcgagagcagacccgactgcctgccccaggtggccgccctggccatcgccagcggcaacggcctgctgctgaagggcggcaaggaggccgcccacagcaacagaatcctgcacctgctgacccaggaggccctgagcatccacggcgtgaaggaggccgtgcagctggtgaacaccagagaggaggtggaggacctgtgcagactggacaagatgatcgacctgatcatccccagaggcagcagccagctggtgagagacatccagaaggccgccaagggcatccccgtgatgggccacagcgagggcatctgccacatgtacgtggacagcgaggccagcgtggacaaggtgaccagactggtgagagacagcaagtgcgagtaccccgccgcctgcaacgccctggagaccctgctgatccacagagacctgctgagaacccccctgttcgaccagatcatcgacatgctgagagtggagcaggtgaagatccacgccggccccaagttcgccagctacctgaccttcagccccagcgaggtgaagagcctgagaaccgagtacggcgacctggagctgtgcatcgaggtggtggacaacgtgcaggacgccatcgaccacatccacaagtacggcagcagccacaccgacgtgatcgtgaccgaggacgagaacaccgccgagttcttcctgcagcacgtggacagcgcctgcgtgttctggaacgccagcaccagattcagcgacggctacagattcggcctgggcgccgaggtgggcatcagcaccagcagaatccacgccagaggccccgtgggcctggagggcctgctgaccaccaagtggctgctgagaggcaaggaccacgtggtgagcgacttcagcgagcacggcagcctgaagtacctgcacgagaacctgcccatcccccagagaaacaccaactag

SEQ ID NO: 26486 - protein, 152 aa, Artificial Sequence
  derived and/or modified sequence
MMNPRAKRDFYLAAPDLLDPKSAAQNSKPRLSFSTKPTVLASRVESDTTINVMKWKTVSTIFLVVVLYLIIGATVFKALEQPHEISQRTTIVIQKQTFISQHSCVNSTELDELIQDLETSHHAQKAAKYSVSSMPYWEFPSLVFSWLELEIS

SEQ ID NO: 26487 - protein, 422 aa, Artificial Sequence
  derived and/or modified sequence
MMNPRAKRDFYLAAPDLLDPKSAAQNSKPRLSFSTKPTVLASRVESDTTINVMKWKTVSTIFLVVVLYLIIGATVFKALEQPHEISQRTTIVIQKQTFISQHSCVNSTELDELIQQIVAAINAGIIPLGNTSNQISHWDLGSSFFFAGTVITTIGFGNISPRTEGGKIFCIIYALLGIPLFGFLLAGVGDQLGTIFGKGIAKVEDTFIKWNVSQTKIRIISTIIFILFGCVLFVALPAIIFKHIEGWSALDAIYFVVITLTTIGFGDYVAGGSDIEYLDFYKPVVWFWILVGLAYFAAVLSMIGDWLRVISKKTKEEVGEFRAHAAEWTANVTAEFKETRRRLSVEIYDKFQRATSIKRKLSAELAGNHNQELTPCRRTLSVNHLTSERDVLPPLLKTESIYLNGLTPHCAGEEIAVIENIK

SEQ ID NO: 26488 - protein, 228 aa, Artificial Sequence
  derived and/or modified sequence
MMNPRAKRDFYLAAPDLLDPKSAAQNSKPRLSFSTKPTVLASRVESDTTINVMKWKTVSTIFLVVVLYLIIGATVFKALEQPHEISQRTTIVIQKQTFISQHSCVNSTELDELIQQIVAAINAGIIPLGNTSNQISHWDLGSSFFFAGTVITTIGFGNISPRTEGGKIFCIIYALLGIPLFGFLLAGVGDQLGTIFGKGIAKVEDTFIVDPILNIWTSISLSCGSGSL

SEQ ID NO: 26489 - DNA, 459 bp, Artificial Sequence
  derived and/or modified sequence
atgatgaacccccgggcaaaacgtgacttttacctggcagcccccgacctgctcgatcctaaaagcgccgctcaaaatagcaaacctcggctcagcttctctacaaagcctaccgtgttggcctcaagagtggagtccgataccacaattaatgtgatgaagtggaagactgtaagtacaatcttcttagtagtagttctgtatcttattattggagcgaccgtgtttaaggctctggagcagccgcacgaaatttcgcagagaacaactatagtaatccaaaagcagacattcattagtcaacattcatgtgttaatagcacagagctggacgaactaatccaggacctcgagacgagtcaccacgcacagaaagcagctaaatactcagtgtcctcaatgccctactgggaatttccttctctggttttcagttggttggaactcgagatcagttag

SEQ ID NO: 26490 - DNA, 1269 bp, Artificial Sequence
  derived and/or modified sequence
atgatgaatcccagagccaaacgggacttctatctggccgcgccagacctcctggatcccaagagtgccgctcagaatagtaaacccaggctgtccttcagcacaaaaccgacagtcctggcctcaagagttgagtccgatacaaccattaacgtgatgaagtggaaaaccgtgagcacaatattcttggtggtggtgctgtacttgatcataggggctacagtcttcaaggccctcgaacaacctcacgagatctcgcagaggacaaccatcgtgatccagaagcaaaccttcataagtcagcatagttgcgttaattccacagaactcgacgaacttattcaacagattgtcgctgcgataaacgccggcataattccgttgggcaataccagcaatcagatctcacattgggacctgggcagttcattcttctttgctggaacagtgataacaacaattggcttcggaaatatatctccccggaccgaaggagggaaaatattttgcattatctatgctctgctgggaattcccctatttggattcctgcttgccggagttggagatcagctcggaactatatttggtaaggggatcgccaaggttgaggatacgttcataaagtggaatgtgagccagaccaagatcaggatcatatcgacaatcattttcattttgttcggttgtgtgttgtttgttgccctccccgccattatatttaagcatattgagggatggagtgctctggatgccatctattttgtggtgattacccttacaactattggctttggcgactatgtagccgggggctccgatatcgaatatttggacttctataagccagtggtatggttctggattttggtcggactagcctactttgctgctgtgctgagcatgatcggcgattggcttagagttatcagcaagaaaacaaaggaagaggtaggtgagtttagagcacacgctgctgagtggaccgccaatgtgaccgcggagttcaaggaaacccgtaggagactgtctgtcgaaatctatgataagttccagagggccacttcaattaaacggaaactaagtgctgagctagccggcaatcacaaccaggagcttaccccctgccgaagaacgctgtcagtgaaccatctcaccagtgagagagacgttctgccacccctcctaaagacagagtccatttacttgaatggattgactccccactgcgcgggagaggagatcgcagtgatcgagaacatcaaatag

SEQ ID NO: 26491 - DNA, 687 bp, Artificial Sequence
  derived and/or modified sequence
atgatgaacccaagggcaaagagagacttttatctggccgcacctgacctgctggatccaaaaagcgcagcacaaaatagcaagccgagattaagcttctccacaaagcccacagtcctggccagcagagttgagagtgatacaaccataaacgttatgaaatggaaaacagtttccacgattttcctggtcgtggttctctatttaattataggtgctaccgtctttaaagccctggagcagccccatgaaatttcccagagaacgactattgtgatacaaaaacagacatttatctctcaacactcctgtgtcaatagcaccgaactggacgaactgatccagcaaatcgtggcagcgatcaatgccggtatcataccccttggtaatacctctaaccagattagtcactgggatctgggtagcagctttttcttcgccggaaccgtcatcactactattggcttcggaaatatttcgccgaggacagagggcggaaaaattttttgtatcatttatgctctgctgggaataccgctctttggcttcctgttagctggcgtgggtgaccagctggggacgatattcgggaaaggtattgcaaaggtggaggacactttcattgtggaccccatcctcaatatctggacatccatatctctatcctgcggatcaggctcactctag

SEQ ID NO: 26492 - DNA, 459 bp, Artificial Sequence
  derived and/or modified sequence
atgatgaacccccgggctaagagggacttctatctcgccgctccagacttgttggacccgaagagcgcggctcagaatagtaaaccaaggctgtcattcagcaccaaaccgactgttttggcatcgagggtggagtcggacacaacaatcaacgtgatgaagtggaagactgtgtccacaatcttcctggtggtcgtgctctatcttattatcggagctactgtttttaaggccctggaacagccccacgaaatatctcagagaactacaatcgtcatccaaaaacagactttcatttcccagcactcctgtgtgaattctaccgagctcgatgagcttatccaggatctggagaccagccaccacgcccagaaggctgcaaaatatagcgtctctagtatgccctactgggaattcccttcactcgttttcagctggctggagctggagataagctag

SEQ ID NO: 26493 - DNA, 459 bp, Artificial Sequence
  derived and/or modified sequence
atgatgaacccccgggccaagagggacttctacctggccgccccagacctgctggaccccaagtctgctgcccagaacagcaagccccggctgtccttcagcaccaagcccaccgtgctggccagccgggtggagagtgacaccaccatcaacgtgatgaagtggaagacagtgtccaccatcttcctggtggtggtgctgtacctgatcattggagccaccgtcttcaaggccctggagcagccccatgagatcagccagaggaccaccatcgtcatccagaagcagaccttcatcagccagcacagctgtgtgaacagcacagagctggatgagctgatccaggacctggagaccagccaccacgcccagaaggccgccaagtacagcgtgtcctccatgccctactgggagttccccagcctggtgttctcctggctggagctggagatctcctag

SEQ ID NO: 26494 - DNA, 1269 bp, Artificial Sequence
  derived and/or modified sequence
atgatgaacccccgggccaagagggacttctacctggccgccccagacctgctggaccccaagtctgctgcccagaacagcaagccccggctgtccttcagcaccaagcccaccgtgctggccagccgggtggagagtgacaccaccatcaacgtgatgaagtggaagacagtgtccaccatcttcctggtggtggtgctgtacctgatcattggagccaccgtcttcaaggccctggagcagccccatgagatcagccagaggaccaccatcgtcatccagaagcagaccttcatcagccagcacagctgtgtgaacagcacagagctggatgagctgatccagcagatcgtggccgccatcaatgccggcatcatccccctgggcaacaccagcaaccagatcagccactgggacctgggcagcagcttcttctttgctggcaccgtcatcaccaccatcggcttcggcaacatcagccccaggacagaaggaggcaagatcttctgcatcatctatgccctgctgggcatccccctgtttggcttcctgctggccggcgtgggggaccagctgggcaccatctttgggaagggcatcgccaaggtggaggacaccttcatcaagtggaatgtgtcccagaccaagatccgcatcatcagcaccatcatcttcatcctgtttggctgtgtgctgtttgtggccctgcctgccatcatcttcaagcacatcgagggctggagcgccctggatgccatctactttgtggtgatcaccctgaccaccatcggctttggagactatgtggccggcggcagtgacatcgagtacctggacttctacaagcctgtggtgtggttctggatcctggtgggcctggcctactttgctgctgtgctgtccatgattggagactggctgcgggtcatcagcaagaagaccaaggaggaggtgggggagttccgggcccatgctgctgagtggacagccaacgtgacagctgagttcaaggagacccggcggcggctgtctgtggagatctatgacaagttccagagggccaccagcatcaagaggaagctgtctgctgagctggccggcaaccacaaccaggagctgaccccctgcaggaggaccctgtctgtgaaccacctgaccagcgagagagatgtgctgccccccctgctgaagacagagagcatctacctgaatggcctgaccccccactgtgccggggaggagattgctgtgattgagaacatcaagtag

SEQ ID NO: 26495 - DNA, 687 bp, Artificial Sequence
  derived and/or modified sequence
atgatgaacccccgggccaagagggacttctacctggccgccccagacctgctggaccccaagtctgctgcccagaacagcaagccccggctgtccttcagcaccaagcccaccgtgctggccagccgggtggagagtgacaccaccatcaacgtgatgaagtggaagacagtgtccaccatcttcctggtggtggtgctgtacctgatcattggagccaccgtcttcaaggccctggagcagccccatgagatcagccagaggaccaccatcgtcatccagaagcagaccttcatcagccagcacagctgtgtgaacagcacagagctggatgagctgatccagcagatcgtggccgccatcaatgccggcatcatccccctgggcaacaccagcaaccagatcagccactgggacctgggcagcagcttcttctttgctggcaccgtcatcaccaccatcggcttcggcaacatcagccccaggacagaaggaggcaagatcttctgcatcatctatgccctgctgggcatccccctgtttggcttcctgctggccggcgtgggggaccagctgggcaccatctttgggaagggcatcgccaaggtggaggacaccttcatcgtggaccccatcctgaacatctggaccagcatcagcctgagctgtggcagcggcagcctgtag

SEQ ID NO: 26496 - DNA, 459 bp, Artificial Sequence
  derived and/or modified sequence
atgatgaacccccgggccaagcgggacttctacctggccgcccccgacttgctggatccaaagtctgccgcacagaattccaaacctaggctttcattcagtaccaagcccacagttctggcctcaagggtcgagtctgataccacaatcaacgttatgaaatggaagactgtctctactattttcctcgtcgttgtcctgtatctcattattggtgccaccgtctttaaggccctggaacaacctcacgagatttcccagcggactaccatagtgatccagaagcagaccttcatcagtcagcactcatgtgtaaatagcactgagcttgatgaattgattcaggaccttgaaactagtcatcacgcccaaaaagccgcgaaatacagcgtcagctctatgccctactgggagttccccagcctcgtgttctcttggttggaattggaaatctcttag

SEQ ID NO: 26497 - DNA, 1269 bp, Artificial Sequence
  derived and/or modified sequence
atgatgaacccccgggccaagcgggacttctacctggccgcccccgacctcctggatccaaagtcggccgctcagaatagtaagccccgcctgagcttttccaccaagccaacagtgctggccagccgcgttgagagcgacaccaccattaatgtcatgaagtggaaaacggtgtccaccatcttcctggtggtggttctttatctcattatcggggctacggtcttcaaggctttagagcagccgcacgaaatttcccaacggactaccattgtgattcaaaagcagacgtttatttctcagcattcttgcgtgaactccacagaactcgacgaacttatacaacagatagttgctgctatcaacgctggcattatccccttggggaacacaagcaaccagatctcccactgggatttgggttcatcctttttcttcgccggcacagtcattactaccattgggtttgggaacatttctcctcggaccgagggtggaaaaatattctgcataatttacgctctcttgggaattcccttgttcggcttcctcctggccggtgtcggggatcagttagggaccatatttgggaaagggatcgcaaaagtggaagacaccttcattaaatggaacgtcagccagactaagattagaatcatctccactatcattttcatcctcttcggctgcgtactgttcgttgctctgcctgcaataatcttcaaacacattgagggttggagcgctctggatgcgatttactttgttgtgatcaccctgaccaccatcggattcggggattacgtggcaggagggtccgacatcgagtacttggacttctataagcctgtggtgtggttctggattctggtcggcctagcttacttcgccgcagttttatctatgatcggagattggcttcgagttattagcaagaagacaaaggaggaagtgggggaattcagagcccacgcagccgagtggacggcgaatgttaccgcggagtttaaagagaccaggaggagattgtccgtggaaatctacgataaattccaacgtgccacctccattaaacgaaagctgtcagccgagcttgccggtaatcataaccaggagctgacgccctgccgtagaacgctatccgtcaaccatttgacgtctgagcgggatgtgctcccccccctcctgaaaaccgaatccatttatttaaacggactgactccccactgcgctggagaggaaattgcggtgattgaaaacatcaagtag

SEQ ID NO: 26498 - DNA, 687 bp, Artificial Sequence
  derived and/or modified sequence
atgatgaacccccgggccaagcgggacttctacctggccgcccccgatctgctggaccctaagagcgcggctcaaaacagtaagccacgcctatcattcagtaccaagcctacggtcttggcaagtagagtcgagagcgataccaccatcaatgttatgaagtggaagactgtatcaaccattttcctggtcgtagttctgtatttgatcattggggccactgttttcaaagcgctggaacagccccacgaaattagccaacggacaaccattgtgatccagaaacagactttcatttcacagcacagctgtgttaattctaccgaactggacgagctgattcaacagatcgtcgccgcgatcaatgccgggatcatccccctgggaaacacatccaatcagattagccactgggacctcgggagcagcttcttttttgccggtacggtcatcactacaatagggtttgggaacatctcacccaggaccgaagggggaaagatcttttgtattatttatgctctgttaggcatccccctcttcggcttcctgctagccggggtgggggaccagctcgggaccatttttggaaaaggaatcgcaaaagtcgaggacacgtttatcgttgaccccatcctgaacatatggacaagtatcagtctttcttgcgggtcagggtccctgtag

SEQ ID NO: 26499 - DNA, 459 bp, Artificial Sequence
  derived and/or modified sequence
atgatgaacccccgggccaagcgggacttctacctggccgcccccgacctgctggaccccaaatccgcagcccagaactcaaaacccagactctccttctccacaaagcctacagtgttggcctcaagggtcgagtccgatacaacgatcaatgtgatgaagtggaaaaccgtgagcaccatctttcttgtcgtcgtcctttacctgataattggggccactgttttcaaggccttggagcaacctcacgaaatcagccagaggaccacaatcgtgatacagaagcagacattcatctcgcaacacagctgcgtgaacagtacggaactcgacgagcttatccaagaccttgaaacgtcccaccatgcccagaaagccgcaaaatatagcgtttcatctatgccgtactgggagttccctagcctcgtgttctcctggctggaacttgagatatcttag

SEQ ID NO: 26500 - DNA, 1410 bp, Artificial Sequence
  derived and/or modified sequence
gaaaccttggaggaagaacggcattaaagatcaaaagcatgatgactcctgatgaaaacatcaccaaatgatgaacccacgagcaaaaagggatttctacttggcggcacctgacttgctggatcctaaatctgccgctcagaactccaaaccgaggctctcgttttccacgaaacccacagtgcttgcttcccgggtggagagtgacacgaccattaatgttatgaaatggaagacggtctccacgatattcctggtggttgtcctctatctgatcatcggagccaccgtgttcaaagcattggagcagcctcatgagatttcacagaggaccaccattgtgatccagaagcaaacattcatatcccaacattcctgtgtcaattcgacggagctggatgaactcattcagcaaatagtggcagcaataaatgcagggattataccgttaggaaacacctccaatcaaatcagtcactgggatttgggaagttccttcttctttgctggcactgttattacaaccataggatttggaaacatctcaccacgcacagaaggcggcaaaatattctgtatcatctatgccttactgggaattcccctctttggttttctcttggctggagttggagatcagctaggcaccatatttggaaaaggaattgccaaagtggaagatacgtttattaagtggaatgttagtcagaccaagattcgcatcatctcaacaatcatatttatactatttggctgtgtactctttgtggctctgcctgcgatcatattcaaacacatagaaggctggagtgccctggacgccatttattttgtggttatcactctaacaactattggatttggtgactacgttgcaggtggatccgatattgaatatctggacttctataagcctgtcgtgtggttctggatccttgtagggcttgcttactttgctgctgtcctgagcatgattggagattggctccgagtgatatctaaaaagacaaaagaagaggtgggagagttcagagcacacgctgctgagtggacagccaacgtcacagccgaattcaaagaaaccaggaggcgactgagtgtggagatttatgacaagttccagcgggccacctccatcaagcggaagctctcggcagaactggctggaaaccacaatcaggagctgactccttgtaggaggaccctgtcagtgaaccacctgaccagcgagagggatgtcttgcctcccttactgaagactgagagtatctatctgaatggtttgacgccacactgtgctggtgaagagattgctgtgattgagaacatcaaatagccctctctttaaataaccttaggcatagccataggtgaggacttctctatgctctttatgactgttgctggtag

SEQ ID NO: 26501 - DNA, 1200 bp, Artificial Sequence
  derived and/or modified sequence
gacaagaaaccttggaggaagaacggcattaaagatcaaaagcatgatgactcctgatgaaaacatcaccaaatgatgaacccacgagcaaaaagggatttctacttggcggcacctgacttgctggatcctaaatctgccgctcagaactccaaaccgaggctctcgttttccacgaaacccacagtgcttgcttcccgggtggagagtgacacgaccattaatgttatgaaatggaagacggtctccacgatattcctggtggttgtcctctatctgatcatcggagccaccgtgttcaaagcattggagcagcctcatgagatttcacagaggaccaccattgtgatccagaagcaaacattcatatcccaacattcctgtgtcaattcgacggagctggatgaactcattcagcaaatagtggcagcaataaatgcagggattataccgttaggaaacacctccaatcaaatcagtcactgggatttgggaagttccttcttctttgctggcactgttattacaaccataggatttggaaacatctcaccacgcacagaaggcggcaaaatattctgtatcatctatgccttactgggaattcccctctttggttttctcttggctggagttggagatcagctaggcaccatatttggaaaaggaattgccaaagtggaagatacgtttattgtggatccgatattgaatatctggacttctataagcctgtcgtgtggttctggatccttgtagggcttgcttactttgctgctgtcctgagcatgattggagattggctccgagtgatatctaaaaagacaaaagaagaggtgggagagttcagagcacacgctgctgagtggacagccaacgtcacagccgaattcaaagaaaccaggaggcgactgagtgtggagatttatgacaagttccagcgggccacctccatcaagcggaagctctcggcagaactggctggaaaccacaatcaggagctgactccttgtaggaggaccctgtcagtgaaccacctgaccagcgagagggatgtcttgcctcccttactgaagactgagagtatctatctgaatggtttgacgccacactgtgctggtgaagagattgctgtgattgagaacatcaaatagccctctctttaaataaccttaggcatagccataggtgaggacttct

SEQ ID NO: 26502 - DNA, 459 bp, Artificial Sequence
  derived and/or modified sequence
atgatgaacccgcgtgccaaacgggacttttacttagctgcacccgacctgctggatccgaagtctgctgcccagaactcaaaacctcgcttgtcattctctacgaaacctaccgtcctagcatcccgtgtagaatcagataccacaattaatgtcatgaaatggaagacagtgagtaccatatttcttgtagttgtgctgtacctgattataggcgctacagtcttcaaggcccttgagcagcctcacgaaatcagtcagcggacaaccattgtcatccagaagcagaccttcatcagtcaacattcctgcgtgaatagcaccgagttggacgaactcattcaagatctcgagacgtctcatcatgctcagaaggctgccaaatactctgtgtcttccatgccgtattgggagttccctagcctggtattcagttggctcgagctagaaattagctag

SEQ ID NO: 26503 - DNA, 1269 bp, Artificial Sequence
  derived and/or modified sequence
atgatgaatccgagagcaaagcgagatttttatctggcagctcctgatctcttggatcccaaaagcgcagctcagaatagcaaacccagactgtccttttctacaaagcccacagtgttagcctccagggtggaaagtgacacaactatcaacgtgatgaaatggaaaaccgtgtctacaatttttttagtcgtggtgttgtacctgattattggagccacagtgttcaaggccctggagcagccgcacgagatttcccagagaactaccattgtgatccaaaagcagaccttcattagccagcactcttgcgtaaattcgaccgagcttgacgagctgattcagcaaattgtggcagctatcaatgctggaatcatacccttgggtaacacttcaaaccaaatcagtcattgggacttgggtagctcttttttcttcgcaggcaccgtgataaccacaattgggttcgggaatatctccccacgcactgaaggaggcaagatcttttgtatcatttacgcccttctcggtatcccactgtttggtttccttctggccggtgtcggtgaccagctagggaccatctttgggaagggtattgccaaagtggaggatacattcatcaagtggaatgtatcccaaacaaaaattcgaatcatcagcacgataatcttcattctcttcggatgcgtgctctttgtggctctgcctgctataattttcaagcatatcgagggatggtccgcccttgatgctatatattttgtggtcatcacactgaccaccatcggattcggcgactatgtagcagggggaagcgatatagaatacctggatttctacaaaccagtggtgtggttctggatcctggtcggactggcttattttgcggctgttctgagtatgattggcgattggctcagagtgatctctaaaaagacaaaagaagaagttggcgagttcagggcccatgccgcagaatggacagcgaatgttacagctgaattcaaagagacaagaaggcgtctctccgtggaaatctatgacaaatttcagagggctacgtcgatcaagcgaaagttgtccgctgaactggctggcaatcataaccaggagttaacgccatgcagaagaactctgtctgtcaatcacctcacttctgagagggacgtgttgcccccattactcaagacggagtccatttatctgaacggattaactccccactgtgctggcgaagagatcgctgtgatcgagaacattaagtag

SEQ ID NO: 26504 - DNA, 687 bp, Artificial Sequence
  derived and/or modified sequence
atgatgaatccacgtgctaagcgcgatttctacctggcagcacccgatttgttggatcctaaaagcgcggctcagaattcaaaaccacggttgagcttcagcacgaaacccacagtcctggcaagcagagtcgagtctgacaccaccatcaacgtcatgaaatggaagacagtgtcgacaatctttctggtcgtcgtactgtacttaattatcggggctactgtgtttaaggcccttgaacagccacacgaaatcagtcagagaaccaccatagttatccaaaaacaaactttcatctcacaacactcatgtgtcaactcaaccgagctggacgagctgattcagcagattgtcgcagctatcaacgctggaatcatccccctcggtaatacatctaatcagatttcccattgggacctgggcagttcattctttttcgcagggacagtgattacgacgattggtttcggcaacatctcccccaggaccgaaggaggcaaaattttctgtattatctatgcactcctaggaattccccttttcggattcctcctggcaggggtcggggatcaactggggacaatatttggaaaagggatagctaaggtggaagatactttcatcgtagaccccattctgaacatttggacaagcatcagtctgagttgtggttcaggatccctgtag

SEQ ID NO: 26505 - DNA, 459 bp, Artificial Sequence
  derived and/or modified sequence
atgatgaaccccagagctaaacgggatttttacctcgctgcccctgaccttctggacccgaagtcagcagctcagaactctaagccaaggctctcattctcgaccaagccaactgtgcttgccagcagagtggaatcagacaccaccattaatgtaatgaagtggaagacagtgagcactatattcctggtggtcgtattgtacctgatcataggcgctactgtgttcaaggcgctggaacagccacacgaaatatctcagagaaccactattgtcattcagaagcagaccttcatttctcaacactcttgcgtcaattctacagaactggatgagcttatccaagaccttgaaacatcacaccatgctcagaaggccgcaaagtattctgtctcgtctatgccctactgggaattcccttccctagtgttttcgtggttggaattggagatttcgtag

SEQ ID NO: 26506 - DNA, 459 bp, Artificial Sequence
  derived and/or modified sequence
atgatgaaccccagagccaagagagacttctacctggccgcccccgacctgctggaccccaagagcgccgcccagaacagcaagcccagactgagcttcagcaccaagcccaccgtgctggccagcagagtggagagcgacaccaccatcaacgtgatgaagtggaagaccgtgagcaccatcttcctggtggtggtgctgtacctgatcatcggcgccaccgtgttcaaggccctggagcagccccacgagatcagccagagaaccaccatcgtgatccagaagcagaccttcatcagccagcacagctgcgtgaacagcaccgagctggacgagctgatccaggacctggagaccagccaccacgcccagaaggccgccaagtacagcgtgagcagcatgccctactgggagttccccagcctggtgttcagctggctggagctggagatcagctag

SEQ ID NO: 26507 - DNA, 1269 bp, Artificial Sequence
  derived and/or modified sequence
atgatgaaccccagagccaagagagacttctacctggccgcccccgacctgctggaccccaagagcgccgcccagaacagcaagcccagactgagcttcagcaccaagcccaccgtgctggccagcagagtggagagcgacaccaccatcaacgtgatgaagtggaagaccgtgagcaccatcttcctggtggtggtgctgtacctgatcatcggcgccaccgtgttcaaggccctggagcagccccacgagatcagccagagaaccaccatcgtgatccagaagcagaccttcatcagccagcacagctgcgtgaacagcaccgagctggacgagctgatccagcagatcgtggccgccatcaacgccggcatcatccccctgggcaacaccagcaaccagatcagccactgggacctgggcagcagcttcttcttcgccggcaccgtgatcaccaccatcggcttcggcaacatcagccccagaaccgagggcggcaagatcttctgcatcatctacgccctgctgggcatccccctgttcggcttcctgctggccggcgtgggcgaccagctgggcaccatcttcggcaagggcatcgccaaggtggaggacaccttcatcaagtggaacgtgagccagaccaagatcagaatcatcagcaccatcatcttcatcctgttcggctgcgtgctgttcgtggccctgcccgccatcatcttcaagcacatcgagggctggagcgccctggacgccatctacttcgtggtgatcaccctgaccaccatcggcttcggcgactacgtggccggcggcagcgacatcgagtacctggacttctacaagcccgtggtgtggttctggatcctggtgggcctggcctacttcgccgccgtgctgagcatgatcggcgactggctgagagtgatcagcaagaagaccaaggaggaggtgggcgagttcagagcccacgccgccgagtggaccgccaacgtgaccgccgagttcaaggagaccagaagaagactgagcgtggagatctacgacaagttccagagagccaccagcatcaagagaaagctgagcgccgagctggccggcaaccacaaccaggagctgaccccctgcagaagaaccctgagcgtgaaccacctgaccagcgagagagacgtgctgccccccctgctgaagaccgagagcatctacctgaacggcctgaccccccactgcgccggcgaggagatcgccgtgatcgagaacatcaagtag

SEQ ID NO: 26508 - DNA, 687 bp, Artificial Sequence
  derived and/or modified sequence
atgatgaaccccagagccaagagagacttctacctggccgcccccgacctgctggaccccaagagcgccgcccagaacagcaagcccagactgagcttcagcaccaagcccaccgtgctggccagcagagtggagagcgacaccaccatcaacgtgatgaagtggaagaccgtgagcaccatcttcctggtggtggtgctgtacctgatcatcggcgccaccgtgttcaaggccctggagcagccccacgagatcagccagagaaccaccatcgtgatccagaagcagaccttcatcagccagcacagctgcgtgaacagcaccgagctggacgagctgatccagcagatcgtggccgccatcaacgccggcatcatccccctgggcaacaccagcaaccagatcagccactgggacctgggcagcagcttcttcttcgccggcaccgtgatcaccaccatcggcttcggcaacatcagccccagaaccgagggcggcaagatcttctgcatcatctacgccctgctgggcatccccctgttcggcttcctgctggccggcgtgggcgaccagctgggcaccatcttcggcaagggcatcgccaaggtggaggacaccttcatcgtggaccccatcctgaacatctggaccagcatcagcctgagctgcggcagcggcagcctgtag

SEQ ID NO: 26509 - protein, 426 aa, Artificial Sequence
  derived and/or modified sequence
MLPSASRERPGYRAGVAAPDLLDPKSAAQNSKPRLSFSTKPTVLASRVESDTTINVMKWKTVSTIFLVVVLYLIIGATVFKALEQPHEISQRTTIVIQKQTFISQHSCVNSTELDELIQQIVAAINAGIIPLGNTSNQISHWDLGSSFFFAGTVITTIGFGNISPRTEGGKIFCIIYALLGIPLFGFLLAGVGDQLGTIFGKGIAKVEDTFIKWNVSQTKIRIISTIIFILFGCVLFVALPAIIFKHIEGWSALDAIYFVVITLTTIGFGDYVAGGSDIEYLDFYKPVVWFWILVGLAYFAAVLSMIGDWLRVISKKTKEEVGEFRAHAAEWTANVTAEFKETRRRLSVEIYDKFQRATSIKRKLSAELAGNHNQELTPCRRTLSVNHLTSERDVLPPLLKTESIYLNGLTPHCAGEEIAVIENIK

SEQ ID NO: 26510 - protein, 156 aa, Artificial Sequence
  derived and/or modified sequence
MLPSASRERPGYRAGVAAPDLLDPKSAAQNSKPRLSFSTKPTVLASRVESDTTINVMKWKTVSTIFLVVVLYLIIGATVFKALEQPHEISQRTTIVIQKQTFISQHSCVNSTELDELIQDLETSHHAQKAAKYSVSSMPYWEFPSLVFSWLELEIS

SEQ ID NO: 26511 - DNA, 1281 bp, Artificial Sequence
  derived and/or modified sequence
atgcttccatccgccagtagagagcggcctggctatcgagcgggcgtggcggctcccgacctgctagaccctaagtccgcagctcaaaatagcaagccccggctctcattttccactaaaccaactgtgctggcgagtagagtggaatcagataccaccatcaacgtgatgaaatggaagacggtctccacaatatttctcgtggtggtgttatatctaatcataggggccacagtgttcaaagctctggagcaaccacatgaaataagccagagaactactattgtgatacagaaacagactttcatatcacagcacagttgtgtgaatagtacagagctggacgaactgatccagcaaattgttgcagctattaacgccggcattatcccactcgggaatacttctaatcaaatctcccattgggatttaggttcttcatttttttttgcgggcactgttataaccacaatcggatttggcaatattagccctaggactgaaggtgggaaaatcttctgtatcatttacgctttacttgggataccactattcggcttcctcctggcaggtgtgggggaccaattgggtaccatcttcggaaaaggcattgccaaggtggaagatactttcattaaatggaacgtgtctcagaccaaaatccggattatcagtacaattatatttatcctgttcggctgcgtgctgttcgtagcgctgcctgctattatcttcaagcatatcgagggctggtctgctctcgatgcaatctacttcgtggtgatcaccctgacgaccattgggttcggtgattacgtggccggtggcagcgatatagaatatctagatttctacaaaccggtggtttggttctggattctcgtggggctggcgtattttgctgccgtgctgagcatgattggcgattggctcagggtaatcagcaagaagacgaaagaggaggtcggtgaatttcgcgctcatgccgccgaatggacggccaatgttaccgctgagtttaaggaaactagacgccggttgtcagtcgagatctacgacaagttccagcgggccacttcaatcaaacggaagttatcggcagaacttgcaggaaaccataaccaggaattaactccttgcaggaggacactgtccgttaaccatctgacaagtgagagagacgttctgccacctctactcaagaccgagtctatttatctgaacgggctgacccctcactgtgccggggaggaaatcgccgtgatcgaaaacataaagtag

SEQ ID NO: 26512 - DNA, 471 bp, Artificial Sequence
  derived and/or modified sequence
atgctgccatcagcctcccgcgaacggcctggttaccgagccggagtggctgctcctgatctcctcgacccaaagtctgctgcacagaattccaagcctcgcctcagcttcagtaccaagcccacggttctggcatcaagagtcgaatccgatacgacaataaacgtgatgaagtggaagaccgtgtcgacaatcttcttggtcgtggtcctataccttatcattggggcaacagtttttaaggccttagaacagccccacgaaatcagccagcggaccaccattgtgatccagaaacagacgtttatctctcagcattcgtgcgtgaactctaccgagctggacgaactgatacaggacctggagacgtcccatcacgcgcaaaaggccgctaagtattccgtctccagtatgccctattgggagttcccttcgctggtgttctcatggctcgagctagaaatctcctag

SEQ ID NO: 26513 - DNA, 1281 bp, Artificial Sequence
  derived and/or modified sequence
atgctgcccagcgccagccgggagcggcccggctaccgggccggcgtggccgccccagacctgctggaccccaagtctgctgcccagaacagcaagccccggctgtccttcagcaccaagcccaccgtgctggccagccgggtggagagtgacaccaccatcaacgtgatgaagtggaagacagtgtccaccatcttcctggtggtggtgctgtacctgatcattggagccaccgtcttcaaggccctggagcagccccatgagatcagccagaggaccaccatcgtcatccagaagcagaccttcatcagccagcacagctgtgtgaacagcacagagctggatgagctgatccagcagatcgtggccgccatcaatgccggcatcatccccctgggcaacaccagcaaccagatcagccactgggacctgggcagcagcttcttctttgctggcaccgtcatcaccaccatcggcttcggcaacatcagccccaggacagaaggaggcaagatcttctgcatcatctatgccctgctgggcatccccctgtttggcttcctgctggccggcgtgggggaccagctgggcaccatctttgggaagggcatcgccaaggtggaggacaccttcatcaagtggaatgtgtcccagaccaagatccgcatcatcagcaccatcatcttcatcctgtttggctgtgtgctgtttgtggccctgcctgccatcatcttcaagcacatcgagggctggagcgccctggatgccatctactttgtggtgatcaccctgaccaccatcggctttggagactatgtggccggcggcagtgacatcgagtacctggacttctacaagcctgtggtgtggttctggatcctggtgggcctggcctactttgctgctgtgctgtccatgattggagactggctgcgggtcatcagcaagaagaccaaggaggaggtgggggagttccgggcccatgctgctgagtggacagccaacgtgacagctgagttcaaggagacccggcggcggctgtctgtggagatctatgacaagttccagagggccaccagcatcaagaggaagctgtctgctgagctggccggcaaccacaaccaggagctgaccccctgcaggaggaccctgtctgtgaaccacctgaccagcgagagagatgtgctgccccccctgctgaagacagagagcatctacctgaatggcctgaccccccactgtgccggggaggagattgctgtgattgagaacatcaagtag

SEQ ID NO: 26514 - DNA, 471 bp, Artificial Sequence
  derived and/or modified sequence
atgctgcccagcgccagccgggagcggcccggctaccgggccggcgtggccgccccagacctgctggaccccaagtctgctgcccagaacagcaagccccggctgtccttcagcaccaagcccaccgtgctggccagccgggtggagagtgacaccaccatcaacgtgatgaagtggaagacagtgtccaccatcttcctggtggtggtgctgtacctgatcattggagccaccgtcttcaaggccctggagcagccccatgagatcagccagaggaccaccatcgtcatccagaagcagaccttcatcagccagcacagctgtgtgaacagcacagagctggatgagctgatccaggacctggagaccagccaccacgcccagaaggccgccaagtacagcgtgtcctccatgccctactgggagttccccagcctggtgttctcctggctggagctggagatctcctag

SEQ ID NO: 26515 - DNA, 1281 bp, Artificial Sequence
  derived and/or modified sequence
atgctgcccagcgccagccgggagcggcccggctaccgggccggcgtcgcagcccccgaccttttggaccccaagtcagccgcacagaatagcaaaccccggctctccttttcgacgaaaccgactgtcttagcctccagagtggaatccgacaccactataaatgttatgaaatggaagacggtgtctaccatattcttagtcgtggtgttgtatctaattattggcgcaaccgtcttcaaagccctggagcagcctcatgaaatctcacagaggactacgatcgtcattcagaaacaaacatttatctcgcagcattcttgtgtgaactcgactgagctggacgaactcatccagcagatcgtcgccgcaatcaacgcgggaatcattcctctgggaaatacaagcaatcaaatcagtcactgggatctgggatcatcattcttctttgccggtacggtgatcaccaccataggattcgggaatattagcccgagaaccgagggtggcaagattttttgcattatttacgcgctcctaggaatccccttgttcggcttcctgctcgctggcgtgggtgaccagcttggaactatcttcggaaaaggtatcgcgaaagtggaagatacgttcattaagtggaatgtgtcacaaactaagatcaggatcatctctacaatcatattcattctctttggatgtgtgctgttcgttgcattgccagcaatcattttcaaacacattgaaggttggtccgccctggacgcgatctacttcgtggtgatcacactcacaacgataggattcggagattacgtagccggagggtctgatatcgagtaccttgatttctacaaaccagtggtctggttttggatactcgtggggctggcatatttcgcagccgtgttatctatgattggggattggttaagggtgatttcaaagaaaaccaaggaagaagtcggggagttcagggctcatgctgcagagtggacggccaacgtgactgctgagttcaaggaaaccaggcggaggctgtctgttgaaatttacgataaattccagcgggccacgtccattaaaagaaaactgtccgctgagctggcaggaaatcacaaccaggaactaactccttgccgaaggacactgagtgtaaatcatttaacaagcgaacgtgacgttctgccaccattgcttaagacggaaagcatatacttaaatgggcttactccccattgtgccggagaagaaatcgcggtgattgaaaacatcaagtag

SEQ ID NO: 26516 - DNA, 471 bp, Artificial Sequence
  derived and/or modified sequence
atgctgcccagcgccagccgggagcggcccggctaccgggccggcgtggccgcccccgacctgctggaccctaagtcagcagcccaaaattcaaaaccgcggctctccttttccacaaagcctactgtcctagcaagtagagtggaatcagatactaccataaacgtgatgaagtggaagacagtgtctactatcttcctggttgttgtgttgtacttaattatcggcgctactgtcttcaaagcactggagcagccacatgagataagccagcggaccacaatcgtgattcagaagcagacatttatcagccagcactcttgcgttaactctactgagctcgacgagttgatccaggatttagaaactagtcatcacgcccaaaaagccgcaaagtacagcgtcagctctatgccctattgggagttcccatccttagtattcagctggctggagctggagatctcgtag

SEQ ID NO: 26517 - DNA, 3379 bp, Artificial Sequence
  derived and/or modified sequence
ccttgtaaaacaaagccggggaaaatgcctgcccgtgcagctcggagcgcgcagcccgtctctgaataagaagtgagtacaatggcgtgtttgtaaaaaaaagcttcaagtccgtctttttcaaaaaacattttgaatgctgcatgcctcatgcttcccagcgcctcgcgggagagacccggctatagagcaggagtggcggcacctgacttgctggatcctaaatctgccgctcagaactccaaaccgaggctctcgttttccacgaaacccacagtgcttgcttcccgggtggagagtgacacgaccattaatgttatgaaatggaagacggtctccacgatattcctggtggttgtcctctatctgatcatcggagccaccgtgttcaaagcattggagcagcctcatgagatttcacagaggaccaccattgtgatccagaagcaaacattcatatcccaacattcctgtgtcaattcgacggagctggatgaactcattcagcaaatagtggcagcaataaatgcagggattataccgttaggaaacacctccaatcaaatcagtcactgggatttgggaagttccttcttctttgctggcactgttattacaaccataggatttggaaacatctcaccacgcacagaaggcggcaaaatattctgtatcatctatgccttactgggaattcccctctttggttttctcttggctggagttggagatcagctaggcaccatatttggaaaaggaattgccaaagtggaagatacgtttattaagtggaatgttagtcagaccaagattcgcatcatctcaacaatcatatttatactatttggctgtgtactctttgtggctctgcctgcgatcatattcaaacacatagaaggctggagtgccctggacgccatttattttgtggttatcactctaacaactattggatttggtgactacgttgcaggtggatccgatattgaatatctggacttctataagcctgtcgtgtggttctggatccttgtagggcttgcttactttgctgctgtcctgagcatgattggagattggctccgagtgatatctaaaaagacaaaagaagaggtgggagagttcagagcacacgctgctgagtggacagccaacgtcacagccgaattcaaagaaaccaggaggcgactgagtgtggagatttatgacaagttccagcgggccacctccatcaagcggaagctctcggcagaactggctggaaaccacaatcaggagctgactccttgtaggaggaccctgtcagtgaaccacctgaccagcgagagggatgtcttgcctcccttactgaagactgagagtatctatctgaatggtttgacgccacactgtgctggtgaagagattgctgtgattgagaacatcaaatagccctctctttaaataaccttaggcatagccataggtgaggacttctctatgctctttatgactgttgctggtagcattttttaaattgtgcatgagctcaaagggggaacaaaatagatacacccatcatggtcatctatcatcaagagaatttggaattctgagccagcactttctttctgatgatgcttgttgaacggtccactttctttgatgagtggaatgacaagcaatgtctgatgcctttttgtgcccagactgttttcctctctctttccctaatgtgccataaggcctcagaatgaatgagaattgtttctggtaacaatgtagctttgagggatcagttcttaacttttcagggtctacctaactgagcctagatatggaccatttatggatgacaacaattttttttttgtaaatgacaagaaattcttatgcagccttttacctaagaaattttctgtcagtgccttatcttatgaagaaacagaacctctctagctaatgtgtggtttctccttccctgcccccacccctaggctcacctctgcagtcttttaccccagttctcccatttgaataccataccttgctggaaacagtgtgtaaaatgactgaagtgatgatgcccgaagatgaaatagatgccaaattagatggacattgaagcaacactcagcgttgcctagcgttaaaggcactgcagagaaatgaggtgcagaggtggcccctctgagtatttatttgactcaggtaccagtggtacatatatacagtgtaattatgaccaggctggtaaaattggctgctcgcaaacaatccccttttttcctggcagtatttggaatttatcatttattaataactatacatttttaaaggcagaagaagaaaatctatctatctatctatctatctatctatctatctatctatctatctatctaaatgacctgacagaagaaaactgttaaaaatggatattattggaggggatttaaaacagtgggtgtgaattatcattctgatggaaagaaaatagcaaaacaatgtgttacaagtatttgctaataaacagtatactgccagcttctaattgctttttgatgtatgaaaggcttatataattttcttttcgttgggtgacttttgccagatgagaggaggtggcacagtggtgagtgcagggcacagtcctagccttctgtgggtatacttttggagttgtgacttggctgtgagggcagaagttgaagttgggatcactgtgactttgcacatggaaaaatgcagattgcaggcataattcatctctgacattagagaaaaagctgttatagcacaatttaaattttgagagtttgctgtgtttttttttcacataaaagaggctgattattctttttagtttaattttatatcctgtaattctttggatggttccaagattcagaaaaaattcagtaaatgcaccccgtaaattgctaccctttcctttattttcatacttagatctgctgtacattgtatatatatataatttttaaaatgcagaaagaaaataatttccctaaatataattgcaaactgatttcttttacttttttgtgtgtgggggtgggagctgtatctgaataagtggcattcagattagggtcttgaaaaataaacccagaatctttaaaagaagcaaataaactaatagacgcttattttccaaaatttaaatttaagctagaaatgtaaatattcaattaatttgttaaaagtacttttataaagttaaaaaaaatccaaccaaaattttagaaagtcaggctcttttagaaagaaagctacacccatttcctcaaataactgttccgaaaatttatatggtggaatgcgccatgtataaactgtgaattgtattgacaaataaagtttgtaattaaagtcagca

SEQ ID NO: 26518 - DNA, 1281 bp, Artificial Sequence
  derived and/or modified sequence
atgctgccatcggcctctcgcgaacgacctggctatcgggcaggagtcgcggcaccagaccttctcgaccctaagtctgccgctcaaaacagcaagcctagattaagcttttctactaaacctacagtgctcgctagccgcgtcgaaagtgacactaccatcaacgttatgaagtggaaaacggtgtcaacaattttcctggtggtggtgctgtatttgatcattggtgcgacagtattcaaggccctggagcagccacacgagatttcgcagcgaactaccatcgtgatccagaaacagacttttatttctcaacactcttgcgtgaacagcaccgagctcgatgagctcatacagcaaatcgtggccgcaattaacgccggaatcatccctcttggaaacaccagtaatcaaatctcccactgggacctgggcagttccttcttctttgccggaactgtgattaccacgatagggtttggaaatatctcacccagaacggagggtggcaaaatattttgcataatttatgcactgctcggtatcccattgttcggttttctgctggcaggggtaggagatcagctcggtactattttcgggaaaggcatcgctaaagtcgaagacacattcataaaatggaatgtcagtcagaccaagatccggatcattagcactattatatttatcctgttcgggtgcgttctgttcgtggcacttccagcaatcatcttcaagcacatagaaggttggtccgccctcgatgccatatacttcgttgtgatcaccttgaccacaataggttttggcgactacgtagcgggtgggtccgatatcgagtacctcgatttttataaaccagttgtgtggttctggattcttgttgggttggcctactttgcagccgtgctgtccatgataggtgactggctaagagtaatttcgaaaaagactaaggaggaggttggggaattcagagctcacgccgcagaatggactgccaatgtcacagccgagttcaaggaaacaagacggagattgtctgtcgagatatacgataagttccagcgcgcaacctcaatcaaacggaaactgtcagccgagctcgccggaaatcataaccaggaattgacaccctgccggaggacactctccgtgaaccacctcacctcagaacgtgatgtactgccccctctattgaaaacggaatcaatctatctgaatgggttgactccacattgtgccggtgaagagatcgccgtcatcgaaaatattaagtag

SEQ ID NO: 26519 - DNA, 471 bp, Artificial Sequence
  derived and/or modified sequence
atgctgccctccgcaagcagagagaggcccggatatcgtgccggtgtcgcagccccagatctcttggaccccaagtccgcggctcaaaactcaaaacccagactgtcattcagtactaagccaactgtcctcgcttcccgggtggagtcagatactaccatcaacgtaatgaaatggaaaacagtttcaactattttccttgtggtcgtgctgtacctcattatcggcgctaccgtcttcaaggcactggagcagcctcatgaaattagccagcgaacaactattgtcatacagaaacaaacatttatcagtcagcatagttgtgtgaattccactgaactcgacgagctcatccaggacctcgaaacaagccatcatgcccagaaagctgctaaatacagcgtgagctccatgccttattgggagttcccgagtttagtcttcagctggctggaactggaaatctcctag

SEQ ID NO: 26520 - DNA, 1281 bp, Artificial Sequence
  derived and/or modified sequence
atgctgcccagcgccagcagagagagacccggctacagagccggcgtggccgcccccgacctgctggaccccaagagcgccgcccagaacagcaagcccagactgagcttcagcaccaagcccaccgtgctggccagcagagtggagagcgacaccaccatcaacgtgatgaagtggaagaccgtgagcaccatcttcctggtggtggtgctgtacctgatcatcggcgccaccgtgttcaaggccctggagcagccccacgagatcagccagagaaccaccatcgtgatccagaagcagaccttcatcagccagcacagctgcgtgaacagcaccgagctggacgagctgatccagcagatcgtggccgccatcaacgccggcatcatccccctgggcaacaccagcaaccagatcagccactgggacctgggcagcagcttcttcttcgccggcaccgtgatcaccaccatcggcttcggcaacatcagccccagaaccgagggcggcaagatcttctgcatcatctacgccctgctgggcatccccctgttcggcttcctgctggccggcgtgggcgaccagctgggcaccatcttcggcaagggcatcgccaaggtggaggacaccttcatcaagtggaacgtgagccagaccaagatcagaatcatcagcaccatcatcttcatcctgttcggctgcgtgctgttcgtggccctgcccgccatcatcttcaagcacatcgagggctggagcgccctggacgccatctacttcgtggtgatcaccctgaccaccatcggcttcggcgactacgtggccggcggcagcgacatcgagtacctggacttctacaagcccgtggtgtggttctggatcctggtgggcctggcctacttcgccgccgtgctgagcatgatcggcgactggctgagagtgatcagcaagaagaccaaggaggaggtgggcgagttcagagcccacgccgccgagtggaccgccaacgtgaccgccgagttcaaggagaccagaagaagactgagcgtggagatctacgacaagttccagagagccaccagcatcaagagaaagctgagcgccgagctggccggcaaccacaaccaggagctgaccccctgcagaagaaccctgagcgtgaaccacctgaccagcgagagagacgtgctgccccccctgctgaagaccgagagcatctacctgaacggcctgaccccccactgcgccggcgaggagatcgccgtgatcgagaacatcaagtag

SEQ ID NO: 26521 - DNA, 471 bp, Artificial Sequence
  derived and/or modified sequence
atgctgcccagcgccagcagagagagacccggctacagagccggcgtggccgcccccgacctgctggaccccaagagcgccgcccagaacagcaagcccagactgagcttcagcaccaagcccaccgtgctggccagcagagtggagagcgacaccaccatcaacgtgatgaagtggaagaccgtgagcaccatcttcctggtggtggtgctgtacctgatcatcggcgccaccgtgttcaaggccctggagcagccccacgagatcagccagagaaccaccatcgtgatccagaagcagaccttcatcagccagcacagctgcgtgaacagcaccgagctggacgagctgatccaggacctggagaccagccaccacgcccagaaggccgccaagtacagcgtgagcagcatgccctactgggagttccccagcctggtgttcagctggctggagctggagatcagctag

SEQ ID NO: 26522 - protein, 219 aa, Artificial Sequence
  derived and/or modified sequence
MPFHHVTAGLLYKGNYLNRSLSAGSDSEQLANISVEELDEIREAFRVLDRDGNGFISKQELGMAMRSLGYMPSEVELAIIMQRLDMDGDGQVDFDEFMTILGPKLVSSEGRDGFLGNTIDSIFWQFDMQRITLEELKHILYHAFRDHLTMKDIENIIINEEESLNETSGNCQTEFEGVHSQKQNRQTCVRKSLICAFAMAFIISVMLIAANQILRSGME

SEQ ID NO: 26523 - protein, 125 aa, Artificial Sequence
  derived and/or modified sequence
MPFHHVTAGLLYKGNYLNRSLSAGSDSEQLANISVEELDEIREAFRVLDRDGNGFISKQELGMAMRSLGYMPSEVELAIIMQRLDMDGDGQVDFDEFMTILGPKLVSSEGRDGFLGNTIDSIFWQ

SEQ ID NO: 26524 - DNA, 660 bp, Artificial Sequence
  derived and/or modified sequence
atgcccttccaccacgtgaccgccggcctgctgtacaagggcaactacctgaacagaagcctgagcgccggcagcgacagcgagcagctggccaacatcagcgtggaggagctggacgagatcagagaggccttcagagtgctggacagagacggcaacggcttcatcagcaagcaggagctgggcatggccatgagaagcctgggctacatgcccagcgaggtggagctggccatcatcatgcagagactggacatggacggcgacggccaggtggacttcgacgagttcatgaccatcctgggccccaagctggtgagcagcgagggcagagacggcttcctgggcaacaccatcgacagcatcttctggcagttcgacatgcagagaatcaccctggaggagctgaagcacatcctgtaccacgccttcagagaccacctgaccatgaaggacatcgagaacatcatcatcaacgaggaggagagcctgaacgagaccagcggcaactgccagaccgagttcgagggcgtgcacagccagaagcagaacagacagacctgcgtgagaaagagcctgatctgcgccttcgccatggccttcatcatcagcgtgatgctgatcgccgccaaccagatcctgagaagcggcatggagtag

SEQ ID NO: 26525 - DNA, 660 bp, Artificial Sequence
  derived and/or modified sequence
atgcccttccaccacgtgacagcaggccttctatataaaggaaactaccttaaccggagcctgtcagccggctcagattctgaacaacttgcaaatattagtgtcgaggaattggatgagattcgcgaagccttccgtgttcttgatcgagatggtaatggtttcatcagcaagcaggagctgggcatggccatgcgcagtttagggtatatgccttctgaagtggagctggccattataatgcagcgcctggacatggacggtgatggtcaggtggatttcgacgagtttatgacaattttgggacccaagctggttagttcagaaggaagagacggcttcctcggtaatacaatcgactcaattttctggcagtttgacatgcagcggattactctggaagaattgaaacacattctctatcacgcatttagagatcacctcaccatgaaggatatagagaacatcataatcaacgaggaagagtccttgaatgagaccagcggaaattgtcagaccgagttcgaaggtgtccattcacagaagcagaaccgtcaaacatgcgtacgaaagagcctgatctgcgcctttgccatggctttcataatcagcgttatgctcatcgctgccaatcagatacttaggagcgggatggagtag

SEQ ID NO: 26526 - DNA, 660 bp, Artificial Sequence
  derived and/or modified sequence
atgccttttcatcatgtgactgctggcctcctatataagggaaactacttaaaccgatctctgtctgcagggagtgacagcgagcaactggcaaacatttccgtggaagaactggacgaaatacgggaggcattccgggtgctggaccgcgatggtaatggctttatctcaaaacaagagctaggcatggccatgaggagcctcggatatatgcctagcgaggtggaattggccatcatcatgcagcgtctggatatggatggagatggacaggtggattttgacgagttcatgaccatcctgggaccaaagctggtgtctagcgaaggaagagacggctttttgggcaacaccatcgattcgatcttctggcagttcgacatgcagcggattacactggaggagctgaaacacatcctgtaccacgctttcagggaccacctgacgatgaaggatatagagaacattatcatcaacgaggaagagtccttaaatgagacctctgggaattgccagacggagttcgaaggcgtgcacagtcaaaagcaaaaccggcagacctgtgtgagaaaatccctcatttgtgcgttcgccatggccttcatcatatcagttatgctgatcgctgccaatcaaattttgagaagcggtatggaatag

SEQ ID NO: 26527 - DNA, 660 bp, Artificial Sequence
  derived and/or modified sequence
atgccttttcaccacgtgacagctggactgctgtacaagggaaattaccttaaccggagcctgtctgcagggtctgacagtgagcagctggctaacatatccgtcgaggaattggacgaaatacgcgaggcatttcgggtccttgatagagacggcaacggattcatatcgaaacaggaattgggcatggctatgcgctccttgggttacatgccaagtgaagtggagctggctataatcatgcagcgtctcgatatggatggagacggccaggttgatttcgacgagttcatgactattcttggccctaagctggtaagtagcgaggggcgcgacggctttcttggtaacaccatagattccattttttggcagttcgatatgcagcgcattacactcgaggaactcaagcatattttgtatcacgccttccgcgaccatctgactatgaaagacatagaaaatatcattataaatgaggaagagtcactgaacgagacttcagggaactgtcagaccgagttcgagggcgtacactctcagaagcagaatcgtcagacttgtgtacgcaagtctctgatatgtgctttcgcgatggcgttcataatttcagtaatgctgatcgcagctaaccaaatccttaggtcaggcatggaatag

SEQ ID NO: 26528 - DNA, 660 bp, Artificial Sequence
  derived and/or modified sequence
atgcccttccatcacgtgaccgcaggacttttatacaagggcaattatcttaacaggtcactctcagcaggatccgacagcgagcagctagccaatattagcgtggaggagctggacgaaattcgggaagccttcagagttttggacagagacggcaatggttttatttccaagcaggagctgggcatggccatgcggtctttaggttacatgccctctgaagtggagctagctatcatcatgcagaggcttgacatggacggcgacggtcaggttgatttcgatgagttcatgactatcctcggccccaagctggtctcaagtgagggcagggacggttttcttgggaatacaatagactctatcttttggcagttcgatatgcaacggattaccctggaggaactcaaacacattctttatcacgcctttcgcgatcatctcaccatgaaagacatcgagaacattattatcaacgaggaagagtccctgaatgaaacatcaggaaattgtcagactgaattcgagggagtccactcccagaaacagaaccgacagacatgtgttaggaaatcgctgatatgtgccttcgctatggctttcattatttctgtgatgctgatagcggctaaccaaattctcaggagcggaatggaatag

SEQ ID NO: 26529 - DNA, 660 bp, Artificial Sequence
  derived and/or modified sequence
atgcccttccaccacgtgacagctggcctgctgtacaagggcaactacctgaacagaagcctgtctgctggcagtgacagcgagcagctggccaacatctctgtggaggagctggatgagatccgggaggccttccgggtgctggacagagatggaaatggcttcatcagcaagcaggagctgggcatggccatgaggagcctgggctacatgcccagcgaggtggagctggccatcatcatgcagaggctggacatggatggagatggccaggtggactttgatgagttcatgaccatcctgggccccaagctggtgagcagcgagggcagagatggcttcctgggcaacaccatcgacagcatcttctggcagtttgacatgcagaggatcaccctggaggagctgaagcacatcctgtaccacgccttccgggaccacctgaccatgaaggacatcgagaacatcatcatcaatgaggaggagagcctgaatgagaccagcggcaactgccagacagaatttgaaggagtgcacagccagaagcagaaccggcagacctgtgtgaggaagagcctcatctgtgcctttgccatggccttcatcatctctgtgatgctgattgctgccaaccagatcctgcggagcggcatggagtag

SEQ ID NO: 26530 - DNA, 660 bp, Artificial Sequence
  derived and/or modified sequence
atgcccttccaccacgtgaccgccggcctgctgtacaagggcaactatttgaataggtctctttcggctggttccgacagcgagcagctggccaatatttccgtggaagagttagacgaaatccgcgaggctttccgcgttctcgaccgggatggaaacggcttcatcagtaaacaggagctgggcatggccatgcgctccctaggctatatgccatccgaggtcgaattagccattattatgcagcgcttggatatggacggcgacggccaggtggatttcgacgagtttatgaccattctgggcccaaagctggtttcctccgaaggccgggatgggtttctcggcaacactatcgactcaatcttttggcaatttgacatgcagcgaatcactctagaggagctgaagcatatattgtatcacgcttttagagaccaccttacaatgaaggacatcgagaacatcatcattaacgaggaggaatccctgaacgagacctccggaaattgtcagaccgagttcgagggggtccacagccaaaagcagaacaggcaaacgtgcgtgagaaagtccttaatctgtgcctttgcaatggccttcatcatcagcgttatgctgatcgcagcaaatcaaatcctgaggtccggcatggaatag

SEQ ID NO: 26531 - DNA, 660 bp, Artificial Sequence
  derived and/or modified sequence
atgcccttccaccacgtgaccgccggcctgctgtacaagggcaactatctgaataggtctctcagcgccggctctgattcggagcagctggcgaacattagtgttgaagagctggacgagatcagagaagcgtttagggtgttggatcgggatggcaatgggttcatctccaagcaagaacttggaatggctatgcgttccctgggctacatgccaagcgaggtggaactagcaataatcatgcagcgccttgatatggacggcgatgggcaggtggattttgatgaattcatgaccatcttgggccctaagctggtgagttcggaaggtcgcgacggattcctggggaacactattgattcaattttctggcaatttgacatgcagcgcattactctcgaagagctcaagcacatactgtaccatgccttcagagatcacctgacaatgaaggacattgaaaatatcattattaatgaggaagagtctcttaacgagacgtccgggaattgccagacggagttcgaaggcgtacatagccagaagcagaatcggcaaacctgcgtcaggaagtcactcatctgcgccttcgcaatggccttcattatctctgtgatgctcatcgcagcgaatcagatccttcgttctggaatggagtag

SEQ ID NO: 26532 - DNA, 660 bp, Artificial Sequence
  derived and/or modified sequence
atgcccttccaccacgtgaccgccggcctgctgtacaagggcaactacctcaacaggtccttatccgctgggagtgacagcgaacaactggccaacatctcagtcgaggagctggacgagatcagggaagcgtttcgtgtcttagatcgcgatggtaatggtttcatctcaaagcaggaactgggcatggcaatgcgtagcctgggctacatgccgagcgaagttgagcttgccatcattatgcagagactggatatggatggcgacgggcaggtggactttgacgaattcatgacaatcttgggacctaagttggtgtcatcagagggacgcgacgggtttctcggaaacacaattgacagcattttctggcagttcgatatgcagagaattacactggaggaactcaaacatatcctttaccatgcgttccgcgatcatctgacaatgaaagacattgaaaacattatcatcaacgaggaagagtccttaaacgaaactagtggtaattgtcagaccgaatttgagggcgtccacagtcagaagcagaaccgccagacttgcgttcgcaagtctctgatctgcgcctttgctatggccttcattatttccgtgatgttaatcgcagctaatcagatcctgagaagcggcatggagtag

SEQ ID NO: 26533 - DNA, 660 bp, Artificial Sequence
  derived and/or modified sequence
atgcccttccaccacgtgaccgccggcctgctgtacaagggcaactatctgaaccggagcctgagcgccgggtcagattccgagcaactggccaacatcagcgtggaagaactggacgagatccgcgaggctttccgcgtcctggaccgggacggtaatggctttatcagcaaacaggagctcggaatggctatgcgttcgcttggttatatgccgtccgaggtagaactggccataatcatgcaacgactggatatggacggagacgggcaggtggattttgatgagtttatgactatattggggccaaagctggtgagcagtgagggtcgggacggctttctaggcaacaccattgactccattttctggcagtttgatatgcagaggatcacattagaagagttgaagcatatcttataccacgcatttagggatcacttaaccatgaaagatattgaaaatattattatcaacgaggaagagtcactgaacgagacaagcggcaattgccagactgaattcgagggtgtgcactcccagaagcagaacagacagacatgcgtacggaagtcactaatctgcgcttttgctatggccttcatcatctccgtgatgctgattgctgcaaatcagatactccgtagcggcatggagtag

SEQ ID NO: 26534 - DNA, 660 bp, Artificial Sequence
  derived and/or modified sequence
atgcccttccaccacgtcacagccggtctgttgtataagggcaattatttgaatcgtagcctgtccgcgggtagcgattcagaacagctagcaaacattagcgttgaagaactggacgaaataagggaagcattccgcgtattggaccgcgatggaaatggcttcatcagtaaacaggagctaggaatggccatgaggagtctgggctacatgcctagcgaggtcgaactggccataatcatgcagcgcctagatatggacggcgatgggcaagttgatttcgacgaatttatgacaattctggggcctaagctggtgagcagtgaggggagagacggttttctcggcaatacgatcgactcaattttttggcagttcgacatgcagcgaataaccctcgaagagctcaaacacatcctgtaccatgcgtttagagatcatctaaccatgaaggacatcgaaaacatcataataaacgaggaggagagcctgaacgaaaccagtgggaactgccagactgagtttgagggagtgcacagccagaagcaaaacaggcaaacctgtgttcgaaagtccctgatctgcgcctttgccatggcttttataatatctgttatgcttatcgccgctaaccaaattctgagatccggcatggagtag

SEQ ID NO: 26535 - DNA, 660 bp, Artificial Sequence
  derived and/or modified sequence
atgcccttccatcatgtgacagcaggcctactttacaaaggcaattaccttaacagaagccttagcgccggatctgattctgaacagctcgcaaacatatcggtggaggaattggatgagattcgagaggccttcagagtcctggacagggatgggaacggctttattagtaagcaagaacttgggatggctatgcgctcattgggatatatgcccagcgaggtggagttagcaataataatgcagagactagatatggacggcgatggccaggtggactttgatgagttcatgaccattctgggtccaaaactcgtcagttccgagggccgtgacggtttcctagggaacacaattgacagtatcttctggcagtttgacatgcagcgcatcaccctggaggagctgaaacacattctttatcatgcattcagggatcatctcacgatgaaagacatcgagaatattattatcaatgaggaagagtcactgaacgaaacgtcagggaactgtcagacagagttcgagggggtgcactcccagaagcaaaatagacagacatgcgtccgcaagtcccttatttgcgcctttgccatggcttttataatcagtgtgatgttgatcgccgctaatcagattctgagatccgggatggaatag

SEQ ID NO: 26536 - DNA, 660 bp, Artificial Sequence
  derived and/or modified sequence
atgccttttcaccacgtgactgccggtctactgtataagggcaactatttgaacaggagcctgagtgctggatcagattcagagcaattggcaaacatttcagtcgaggagctggatgagattagagaggccttcagggttctcgatcgggacggcaacggatttattagcaaacaagagttggggatggccatgcggtccctcggctatatgccctcagaggtcgagttggcaatcattatgcaaaggttagacatggatggtgatggtcaggtggacttcgacgaattcatgaccatactgggacctaaactggtcagttcagagggacgtgatggctttctcggtaacaccattgactccatcttctggcagtttgatatgcaacgtataaccctggaagagctaaaacatatcctgtatcacgcctttagagaccatcttactatgaaagacatagaaaacatcatcattaatgaggaggagagcttgaacgagacatctggcaactgccagactgagtttgagggtgtccattcccagaagcagaaccgtcagacctgtgtgaggaagagcttgatctgtgcctttgccatggcttttatcatatcagtgatgctcatcgctgctaaccagatccttagatctggcatggaatag

SEQ ID NO: 26537 - DNA, 660 bp, Artificial Sequence
  derived and/or modified sequence
atgcctttccaccacgtgacagctggcttgctgtacaaagggaactacctgaaccggtccctgagcgccggttccgattctgagcagctggcaaatatctctgtggaagagttggacgagatcagagaagcatttagggtactggacagggatggcaatgggttcatttccaagcaagagctagggatggcaatgcgctctctcggctacatgccctctgaggtggagctcgccatcatcatgcagcgtttggacatggacggcgacggccaagtggatttcgacgaattcatgactatactcggaccaaagctggtgtccagtgaagggagggacggatttctgggcaacactattgactcgattttctggcagtttgacatgcaacgtatcacattggaggaactgaagcacattctctatcacgcttttagggaccacctgaccatgaaagatatcgagaatattatcattaacgaagaagagtctctgaacgagacgtctggcaactgccagactgagttcgagggcgttcactcccagaaacaaaatcgacaaacttgcgtgcgtaagagcctgatctgtgcatttgcaatggccttcattatctccgtgatgttgatagccgctaatcaaattctgaggtccggtatggagtag

SEQ ID NO: 26538 - DNA, 660 bp, Artificial Sequence
  derived and/or modified sequence
atgccgttccaccatgtgaccgccggcttgttgtacaaggggaattacctcaaccgatcgctctctgctggcagtgacagcgaacagctggctaatatctccgtggaggagctcgatgaaatccgagaggcctttcgggttctggaccgggatgggaacggcttcatctccaagcaggagctgggcatggccatgcgctctttggggtacatgccaagcgaggtggagctggccatcatcatgcagcgcttggacatggacggggatggccaggtggattttgatgaattcatgaccattcttggccccaaactggtgtcttcagaaggtcgcgatggttttcttgggaacacgatagacagcatattctggcagtttgacatgcaaaggataactctggaagagttgaagcacattctctatcatgccttccgagaccacctaacgatgaaggacattgagaacatcattatcaatgaggaagagagcctgaatgagacctcggggaactgccaaacagagtttgaaggagtgcattcccagaagcagaacagacagacctgcgtccggaagagcctcatatgcgcctttgctatggccttcatcatcagtgtcatgctgattgcagccaaccagatactccggagcggcatggagtag

SEQ ID NO: 26539 - protein, 508 aa, Artificial Sequence
  derived and/or modified sequence
MDPPRASHLSPRKKRPRQTGALMASSPQDIKFQDLVVFILEKKMGTTRRAFLMELARRKGFRVENELSDSVTHIVAENNSGSDVLEWLQAQKVQVSSQPELLDVSWLIECIRAGKPVEMTGKHQLVVRRDYSDSTNPGPPKTPPIAVQKISQYACQRRTTLNNCNQIFTDAFDILAENCEFRENEDSCVTFMRAASVLKSLPFTIISMKDTEGIPCLGSKVKGIIEEIIEDGESSEVKAVLNDERYQSFKLFTSVFGVGLKTSEKWFRMGFRTLSKVRSDKSLKFTRMQKAGFLYYEDLVSCVTRAEAEAVSVLVKEAVWAFLPDAFVTMTGGFRRGKKMGHDVDFLITSPGSTEDEEQLLQKVMNLWEKKGLLLYYDLVESTFEKLRLPSRKVDALDHFQKCFLIFKLPRQRVDSDQSSWQEGKTWKAIRVDLVLCPYERRAFALLGWTGSRFERDLRRYATHERKMILDNHALYDKTKRIFLKAESEEEIFAHLGLDYIEPWERNA

SEQ ID NO: 26540 - DNA, 1527 bp, Artificial Sequence
  derived and/or modified sequence
atggacccccccagagccagccacctgagccccagaaagaagagacccagacagaccggcgccctgatggccagcagcccccaggacatcaagttccaggacctggtggtgttcatcctggagaagaagatgggcaccaccagaagagccttcctgatggagctggccagaagaaagggcttcagagtggagaacgagctgagcgacagcgtgacccacatcgtggccgagaacaacagcggcagcgacgtgctggagtggctgcaggcccagaaggtgcaggtgagcagccagcccgagctgctggacgtgagctggctgatcgagtgcatcagagccggcaagcccgtggagatgaccggcaagcaccagctggtggtgagaagagactacagcgacagcaccaaccccggcccccccaagaccccccccatcgccgtgcagaagatcagccagtacgcctgccagagaagaaccaccctgaacaactgcaaccagatcttcaccgacgccttcgacatcctggccgagaactgcgagttcagagagaacgaggacagctgcgtgaccttcatgagagccgccagcgtgctgaagagcctgcccttcaccatcatcagcatgaaggacaccgagggcatcccctgcctgggcagcaaggtgaagggcatcatcgaggagatcatcgaggacggcgagagcagcgaggtgaaggccgtgctgaacgacgagagataccagagcttcaagctgttcaccagcgtgttcggcgtgggcctgaagaccagcgagaagtggttcagaatgggcttcagaaccctgagcaaggtgagaagcgacaagagcctgaagttcaccagaatgcagaaggccggcttcctgtactacgaggacctggtgagctgcgtgaccagagccgaggccgaggccgtgagcgtgctggtgaaggaggccgtgtgggccttcctgcccgacgccttcgtgaccatgaccggcggcttcagaagaggcaagaagatgggccacgacgtggacttcctgatcaccagccccggcagcaccgaggacgaggagcagctgctgcagaaggtgatgaacctgtgggagaagaagggcctgctgctgtactacgacctggtggagagcaccttcgagaagctgagactgcccagcagaaaggtggacgccctggaccacttccagaagtgcttcctgatcttcaagctgcccagacagagagtggacagcgaccagagcagctggcaggagggcaagacctggaaggccatcagagtggacctggtgctgtgcccctacgagagaagagccttcgccctgctgggctggaccggcagcagattcgagagagacctgagaagatacgccacccacgagagaaagatgatcctggacaaccacgccctgtacgacaagaccaagagaatcttcctgaaggccgagagcgaggaggagatcttcgcccacctgggcctggactacatcgagccctgggagagaaacgcctag

SEQ ID NO: 26541 - DNA, 2016 bp, Artificial Sequence
  derived and/or modified sequence
acactttggcaggaagctgttgccagggcagcacctgtgaagccctggcctggcttcagagtctgctggtgagatgacatcaaaacccttcgtgtaggagggtggcagtctccctcccttctggagacaccaccagatgggccagccagaggcagcagcagcctcttcccatggatccaccacgagcgtcccacttgagccctcggaagaagagaccccggcagacgggtgccttgatggcctcctctcctcaagacatcaaatttcaagatttggtcgtcttcattttggagaagaaaatgggaaccacccgcagagcgttcctcatggagctggcccgcaggaaagggttcagggttgaaaatgagctcagtgattctgtcacccacatcgtagcagagaacaactcgggttcggatgttctggagtggcttcaagcacagaaagtacaagtcagctcacaaccagagctcctcgatgtctcctggctgatcgaatgcataagagcagggaaaccggtggaaatgacaggaaaacaccagcttgttgtgagaagagactattcagatagcaccaacccaggccccccgaagactccaccaattgctgtacaaaagatctcccagtatgcgtgtcagagaagaaccactttaaacaactgtaaccagatattcacggatgcctttgatatactggctgaaaactgtgagtttagagaaaatgaagactcctgtgtgacatttatgagagcagcttctgtattgaaatctctgccattcacaatcatcagtatgaaggacacagaaggaattccctgcctggggtccaaggtgaagggtatcatagaggagattattgaagatggagaaagttctgaagttaaagctgtgttaaatgatgaacgatatcaatccttcaaactctttacttctgtatttggagtggggctgaagacttctgagaagtggttcaggatgggtttcagaactctgagtaaagtaaggtcggacaaaagcctgaaatttacacgaatgcagaaagcaggatttctgtattatgaagaccttgtcagctgtgtgaccagggcagaagcagaggccgtcagtgtgctggttaaagaggctgtctgggcatttcttccggatgctttcgtcaccatgacaggagggttccggaggggtaagaagatggggcatgatgtagattttttaattaccagcccaggatcaacagaggatgaagagcaacttttacagaaagtgatgaacttatgggaaaagaagggattacttttatattatgaccttgtggagtcaacatttgaaaagctcaggttgcctagcaggaaggttgatgctttggatcattttcaaaagtgctttctgattttcaaattgcctcgtcaaagagtggacagtgaccagtccagctggcaggaaggaaagacctggaaggccatccgtgtggatttagttctgtgcccctacgagcgtcgtgcctttgccctgttgggatggactggctcccggtttgagagagacctccggcgctatgccacacatgagcggaagatgattctggataaccatgctttatatgacaagaccaagaggatattcctcaaagcagaaagtgaagaagaaatttttgcgcatctgggattggattatattgaaccgtgggaaagaaatgcctaggaaagtgttgtcaacatttttttcctattcttttcaagttaaataaattatgcttcatattagtaaaagatgccataggagagtttggggttatttaggtcttattgaaatgcagattgctactagaaataaataactttggaaacatgggaaggtgccactggtaatgggtaaggttctaataggccatgtttatgactgttgcatagaattcacaatgcatttttcaagagaaatgatgttgtcactggtggctcattcagggaagctcatcaaagcccactttgttcgcagtgtagctgaaatactgtctatctct

SEQ ID NO: 26542 - DNA, 1527 bp, Artificial Sequence
  derived and/or modified sequence
atggatccccccagagcctcccatctctctccccgaaagaagcgcccacggcagacaggggcgctcatggcaagctctcctcaggatatcaaattccaggacctcgtggtgtttatcctagagaaaaagatgggcacaacccgccgcgcattccttatggagctcgctcgcagaaaaggcttccgggtcgagaacgagctttctgactccgtgacccatatagtggcagagaataattccggcagtgacgtcttggagtggctccaggctcagaaggtgcaagttagctcacagccagagctgcttgatgtgagttggctgatcgaatgtatccgcgcagggaagcccgtggaaatgaccgggaaacaccaacttgtggttcgccgcgactattctgactccaccaaccccgggcctcccaagacaccaccaatagctgtacaaaaaatttcccagtatgcctgccaaaggagaaccactttgaacaactgcaatcaaattttcacagatgccttcgacatcctcgctgagaactgcgagttccgggagaacgaggatagctgcgtcacttttatgagagccgcctctgtattgaagagcctacccttcacaatcatttccatgaaagacacggaaggaatcccatgcctgggttccaaagtaaaggggataattgaagagatcattgaagatggagagtccagcgaggtcaaggctgtgttgaatgatgaaagatatcaatcatttaaattgtttacttctgtgttcggcgtgggcctcaaaacgagcgagaagtggttcaggatgggctttaggactctgtccaaggtgaggtcagacaagtccctgaagtttacacggatgcagaaagcaggctttttgtattacgaggacttggtgtcatgtgtgacccgcgcagaagccgaggctgtgagtgtgttggtcaaagaggctgtctgggcctttctgcctgacgctttcgtaactatgacagggggatttagacgcggaaaaaaaatgggacacgatgtcgatttcctgataactagcccagggtccaccgaagacgaggaacagcttctccaaaaagtcatgaacctctgggaaaaaaaagggctcctgttatattatgacctggttgagagcaccttcgagaaactaaggctcccctctcggaaagtggatgcattagatcatttccagaagtgttttttgatattcaaacttccaaggcagcgcgtggactctgatcagagctcatggcaggaggggaagacctggaaggctataagggttgaccttgtgctctgtccgtatgagcgacgagccttcgcactcctgggctggacaggcagtcggtttgagcgcgatctcagaaggtatgccacacacgaacgcaaaatgatcctggacaatcacgcactgtacgacaagacaaaacgcattttcctaaaagccgagagcgaagaagagatcttcgcccacttgggtcttgattacatcgagccatgggaaagaaatgcttag

SEQ ID NO: 26543 - DNA, 1527 bp, Artificial Sequence
  derived and/or modified sequence
atggaccccccccgggccagccacctgagccccaggaagaagaggccccggcagacaggagccctgatggccagcagcccccaggacatcaagttccaggacctggtggtgttcatcctggagaagaagatgggcaccacccggcgggccttcctgatggagctggcccggaggaagggcttccgggtggagaatgagctgagtgacagcgtgacccacatcgtggccgagaacaacagcggcagtgatgtgctggagtggctgcaggcccagaaggtgcaggtgagcagccagcctgagctgctggatgtgtcctggctgattgagtgcatccgggccggcaagcctgtggagatgaccgggaagcaccagctggtggtgcggcgggactacagcgacagcaccaaccctggcccccccaagaccccacccatcgctgtgcagaagatcagccagtatgcctgccagaggaggaccaccctgaacaactgcaaccagatcttcacagatgcctttgacatcctggccgagaactgtgagttcagagaaaatgaagacagctgtgtgaccttcatgagagctgcctctgtgctgaagagcctgcccttcaccatcatctccatgaaggacacagagggcatcccctgcctgggcagcaaggtgaagggcatcatcgaggagatcattgaagatggagagagcagcgaggtgaaggctgtgctgaatgatgagcgctaccagagcttcaagctgttcacctctgtgtttggagtgggcctgaagaccagcgagaagtggttcaggatgggcttccgcaccctgagcaaggtgcggagtgacaagagcctgaagttcaccaggatgcagaaggccggcttcctgtactatgaggacctggtgtcctgtgtgaccagggctgaggccgaggccgtgtctgtgctggtgaaggaggccgtgtgggccttcctgcctgatgcctttgtgaccatgactggaggcttcagaagaggcaagaagatgggccatgatgtggacttcctgatcaccagccctggcagcacagaagatgaggagcagctgctgcagaaggtgatgaacctgtgggagaagaagggcctgctgctgtactatgacctggtggagagcacctttgagaagctgcggctgcccagcaggaaggtggatgccctggaccacttccagaagtgcttcctgatcttcaagctgccccggcagagggtggacagcgaccagagctcctggcaggagggcaagacctggaaggccatccgggtggacctggtgctgtgcccctatgaaagaagagcctttgccctgctgggctggacaggcagcagatttgagcgggacctgcggcgctatgccacccatgagaggaagatgatcctggacaaccacgccctgtatgacaagaccaagaggatcttcctgaaggccgagagcgaggaggagatctttgcccacctgggcctggactacatcgagccctgggagagaaatgcctag

SEQ ID NO: 26544 - DNA, 1527 bp, Artificial Sequence
  derived and/or modified sequence
atggaccccccccgggccagccacctgagcccccggaagaagcggccacggcagacgggtgccctgatggcgtctagccctcaggacataaagtttcaggatctggtggtgtttattttagaaaagaagatggggacgacacgcagggcatttctcatggagctggctcgcaggaaaggattccgagtcgagaacgagctgagcgatagtgtgactcatattgtggccgagaataatagcggctctgacgtcctagaatggctgcaagctcagaaggtgcaggtatcctcgcaacccgagctgctggatgtctcttggctcatcgagtgcattcgagccgggaaacccgtagagatgactgggaaacatcagctggtggttcgtcgtgactatagcgactctaccaatcccgggcctcccaagactccacctatcgctgtacagaaaatcagccaatatgcctgccagcgaaggactacactgaacaattgcaatcaaatattcaccgacgcttttgacatattggccgaaaattgcgaattcagagaaaatgaggacagctgcgtgacatttatgagagcggcaagtgtcttgaaatctctccccttcaccataatcagcatgaaagatacagagggcattccttgtctcggcagcaaagttaaggggattattgaggagattatcgaggatggggagtcgtccgaggtcaaggctgtcttaaacgatgagcgctaccaatcattcaaactcttcacctccgttttcggggttgggctgaagaccagtgagaaatggttccggatggggtttcgtaccttgagtaaagtgcgctccgacaaatccttgaagtttactagaatgcaaaaagctggattcctgtactatgaagatcttgtcagctgcgtgacacgggctgaggctgaggcagtctctgtgttggtgaaagaggctgtgtgggctttcctgcccgatgcctttgttaccatgaccggcggtttcagaaggggcaagaagatgggacacgacgtggatttcctaattacgtctccagggagcactgaagacgaggagcagctgctgcagaaggtaatgaacctgtgggagaagaaaggtctgctgctgtactatgacctggtggagtcgacattcgagaagctaaggctcccatcacggaaagtggacgcactagaccacttccagaagtgtttcttgatcttcaaacttccacgtcagcgggttgattcagaccagtcttcgtggcaagagggaaagacttggaaggccattagggtggacctggttctgtgcccctatgagagaagggctttcgcactcctgggatggaccggaagtcggtttgagcgggatctaaggcggtatgcgactcatgagcgcaagatgatacttgataatcatgccctctacgacaaaactaaacgtatctttcttaaggcggagtcagaagaagagatttttgcccacttaggccttgactatatagaaccttgggagcggaacgcttag

SEQ ID NO: 26545 - DNA, 1527 bp, Artificial Sequence
  derived and/or modified sequence
atggatcctccccgagctagtcatctgtctcctagaaaaaaaagaccccgtcagaccggtgccctgatggcgtcttctccacaagacatcaaatttcaggatcttgttgtattcattttggagaaaaaaatgggcacaactagacgagcatttttgatggaactcgcccgacgtaagggattccgcgtggagaacgagctatcagattctgttacacacattgttgccgagaacaactcaggctcggacgttttagaatggctgcaggctcagaaggttcaggtgtcatcgcaaccggaactgttggacgtgagctggctgattgagtgcattcgtgccggaaaacctgttgagatgaccggtaaacaccaattagtagtaaggagggattatagcgatagcaccaacccaggaccaccaaagaccccacctatcgcggtccagaagataagccagtacgcgtgtcaaagaagaactactcttaataattgtaaccagatcttcacagatgctttcgatatccttgctgagaactgtgagttccgtgagaatgaagactcttgtgtgacatttatgcgggcagcctcagtgttaaaatcgctgcctttcaccattataagtatgaaagacaccgaaggcataccttgcttaggcagtaaagttaagggtatcattgaggagattatcgaagatggagagtctagcgaagttaaagcagtcttgaatgacgagaggtaccagtctttcaaattgtttacgagcgtgttcggcgtgggactcaagacctccgagaagtggtttagaatgggctttagaacgctgagtaaagtccggtctgacaaatcacttaaattcacgcgcatgcaaaaagcaggattcctctattacgaagacttggtcagctgtgtgacacgcgctgaggccgaggccgtgtccgtgctggttaaagaagctgtctgggccttcctccctgatgcgtttgtgacaatgacggggggattcaggaggggaaaaaaaatggggcacgacgtagactttctcatcacatctccaggctctaccgaggacgaggaacagctcctgcaaaaagtcatgaatctgtgggagaaaaagggtctgctgctttattatgatttggtggaaagcacattcgagaaactacgtctgccttctcgcaaagtcgacgccctggatcatttccagaaatgctttctgatctttaagctgcctcgccaacgggtcgattccgaccagtcatcctggcaggaagggaagacctggaaagccattagggtcgaccttgtgctctgtccctatgagaggagggcatttgcgctgttgggatggactggttccagattcgagcgagacctgcgaagatatgcaacccatgaaagaaagatgatcttagataatcacgcactctatgacaaaactaaacggatttttctgaaagcagaatccgaagaagaaatctttgcccatttaggcttggattacattgaaccttgggagcgcaacgcatag

SEQ ID NO: 26546 - protein, 641 aa, Artificial Sequence
  derived and/or modified sequence
MRKLRPKDSREPAPGSPVRSGCLQRLSHYSGIQRPFLVLPPLMEWIRVAVAHAGHRRSFSMDSDDVRQAARLLLPGVDCEPRQLRADDCFCASRKLDAVAIEAKFKQDLGFRMLNCGRTDLVKQAVSLLGPDGINTMSEQGMTPLMYACVRGDEAMVQMLLDAGADLNVEVVSTPHKYPSVHPETRHWTALTFAVLHGHIPVVQLLLDAGAKVEGSVEHGEENYSETPLQLAAAVGNFELVSLLLERGADPLIGTMYRNGISTTPQGDMNSFSQAAAHGHRNVFRKLLAQPEKEKSDILSLEEILAEGTDLAETAPPPLCASRNSKAKLRALREAMYHSAEHGYVDVTIDIRSIGVPWTLHTWLESLRIAFQQHRRPLIQCLLKEFKTIQEEEYTEELVTQGLPLMFEILKASKNEVISQQLCVIFTHCYGPYPIPKLTEIKRKQTSRLDPHFLNNKEMSDVTFLVEGRPFYAHKVLLFTASPRFKALLSSKPTNDGTCIEIGYVKYSIFQLVMQYLYYGGPESLLIKNNEIMELLSAAKFFQLEALQRHCEIICAKSINTDNCVDIYNHAKFLGVTELSAYCEGYFLKNMMVLIENEAFKQLLYDKNGEGTGQDVLQDLQRTLAIRIQSIHLSSSKGSVV

SEQ ID NO: 26547 - DNA, 1926 bp, Artificial Sequence
  derived and/or modified sequence
atgagaaagctgagacccaaggacagcagagagcccgcccccggcagccccgtgagaagcggctgcctgcagagactgagccactacagcggcatccagagacccttcctggtgctgccccccctgatggagtggatcagagtggccgtggcccacgccggccacagaagaagcttcagcatggacagcgacgacgtgagacaggccgccagactgctgctgcccggcgtggactgcgagcccagacagctgagagccgacgactgcttctgcgccagcagaaagctggacgccgtggccatcgaggccaagttcaagcaggacctgggcttcagaatgctgaactgcggcagaaccgacctggtgaagcaggccgtgagcctgctgggccccgacggcatcaacaccatgagcgagcagggcatgacccccctgatgtacgcctgcgtgagaggcgacgaggccatggtgcagatgctgctggacgccggcgccgacctgaacgtggaggtggtgagcaccccccacaagtaccccagcgtgcaccccgagaccagacactggaccgccctgaccttcgccgtgctgcacggccacatccccgtggtgcagctgctgctggacgccggcgccaaggtggagggcagcgtggagcacggcgaggagaactacagcgagacccccctgcagctggccgccgccgtgggcaacttcgagctggtgagcctgctgctggagagaggcgccgaccccctgatcggcaccatgtacagaaacggcatcagcaccaccccccagggcgacatgaacagcttcagccaggccgccgcccacggccacagaaacgtgttcagaaagctgctggcccagcccgagaaggagaagagcgacatcctgagcctggaggagatcctggccgagggcaccgacctggccgagaccgcccccccccccctgtgcgccagcagaaacagcaaggccaagctgagagccctgagagaggccatgtaccacagcgccgagcacggctacgtggacgtgaccatcgacatcagaagcatcggcgtgccctggaccctgcacacctggctggagagcctgagaatcgccttccagcagcacagaagacccctgatccagtgcctgctgaaggagttcaagaccatccaggaggaggagtacaccgaggagctggtgacccagggcctgcccctgatgttcgagatcctgaaggccagcaagaacgaggtgatcagccagcagctgtgcgtgatcttcacccactgctacggcccctaccccatccccaagctgaccgagatcaagagaaagcagaccagcagactggacccccacttcctgaacaacaaggagatgagcgacgtgaccttcctggtggagggcagacccttctacgcccacaaggtgctgctgttcaccgccagccccagattcaaggccctgctgagcagcaagcccaccaacgacggcacctgcatcgagatcggctacgtgaagtacagcatcttccagctggtgatgcagtacctgtactacggcggccccgagagcctgctgatcaagaacaacgagatcatggagctgctgagcgccgccaagttcttccagctggaggccctgcagagacactgcgagatcatctgcgccaagagcatcaacaccgacaactgcgtggacatctacaaccacgccaagttcctgggcgtgaccgagctgagcgcctactgcgagggctacttcctgaagaacatgatggtgctgatcgagaacgaggccttcaagcagctgctgtacgacaagaacggcgagggcaccggccaggacgtgctgcaggacctgcagagaaccctggccatcagaatccagagcatccacctgagcagcagcaagggcagcgtggtgtag

SEQ ID NO: 26548 - DNA, 552 bp, Artificial Sequence
  derived and/or modified sequence
atgagcgacgtgaccttcctggtggagggcagacccttctacgcccacaaggtgctgctgttcaccgccagccccagattcaaggccctgctgagcagcaagcccaccaacgacggcacctgcatcgagatcggctacgtgaagtacagcatcttccagctggtgatgcagtacctgtactacggcggccccgagagcctgctgatcaagaacaacgagatcatggagctgctgagcgccgccaagttcttccagctggaggccctgcagagacactgcgagatcatctgcgccaagagcatcaacaccgacaactgcgtggacatctacaaccacgccaagttcctgggcgtgaccgagctgagcgcctactgcgagggctacttcctgaagaacatgatggtgctgatcgagaacgaggccttcaagcagctgctgtacgacaagaacggcgagggcaccggccaggacgtgctgcaggacctgcagagaaccctggccatcagaatccagagcatccacctgagcagcagcaagggcagcgtggtgtag

SEQ ID NO: 26549 - DNA, 1926 bp, Artificial Sequence
  derived and/or modified sequence
atgcgtaagttaagaccgaaagatagtcgagaaccggcgcctggctcccccgtcagaagtggatgcctacaacgactctcacactacagcgggattcagcgcccgtttctggtactccctccactgatggaatggatacgggtggccgtggcccacgcggggcatcggaggtccttcagcatggactccgacgatgtccgacaggcagctcgccttctcttaccaggagtggactgcgagcctagacagctccgtgcagatgactgtttctgcgcttccagaaaactagatgctgtggccattgaggccaagttcaagcaggatttggggttccgtatgttaaattgtggacgaaccgacctggtgaagcaggctgtcagcttgttaggtcctgatgggattaacaccatgtcagagcagggtatgacaccactgatgtatgcgtgtgtgcggggggacgaggccatggtccagatgctgttggacgccggtgctgacctgaacgtggaggttgtctcaacccctcacaaatacccttccgtccaccccgaaaccagacactggactgcccttacattcgccgtgctgcacggccacattcctgtggttcagctcctgctggatgccggcgctaaggttgagggttccgttgaacacggggaggaaaattactccgaaactcccctccaacttgccgcagccgtgggcaacttcgagcttgtatcccttttgctggaacggggagccgatcctcttattggcactatgtaccgtaatgggatttcaactactccgcagggagatatgaattctttctctcaagcagcggcccacggacatagaaacgtattccgaaaacttttggcccaacctgaaaaggagaagagtgatatattgtccttagaagaaatcttggccgagggtacagacctcgctgagaccgcgccacctccactctgtgccagccgaaatagcaaagcgaaactgcgggctctgcgtgaagccatgtatcacagtgctgaacacgggtacgttgacgtaacaattgacatcaggtccattggcgtgccctggacacttcatacatggctggagtctctcagaatcgcgtttcaacagcaccgccgcccccttatccagtgtttgctgaaagagttcaagacaattcaagaagaggaatacaccgaggaactggtcactcagggtttgccactgatgtttgagatcttaaaggcttcaaaaaatgaagtaatcagccagcagctgtgcgttatctttacccactgctacggcccctaccctatacccaaacttacagagataaaaaggaaacagacctcgcgcctggacccacattttctcaacaacaaagagatgtccgatgttacctttttggtggaaggtagaccgttctacgcgcataaggtgctgcttttcacagcctcaccacggttcaaggccctcctctcaagtaaacctacgaacgatggaacatgtatcgaaattggctacgtcaaatactctatcttccagctggtcatgcagtacttgtactatggcgggccagagtccctcctgatcaaaaacaacgagattatggaactcctgtctgcagccaagtttttccaactggaagccctgcaaaggcattgtgagattatctgtgcgaagtctatcaacaccgacaactgtgtcgacatttataatcacgccaagttcctcggtgtcaccgaactgtccgcctattgtgagggctacttcctgaagaatatgatggttctcatagagaatgaggcttttaaacaactcttgtatgacaaaaacggcgaaggtaccggacaagatgtcctgcaggatttgcaacgaacccttgctatccgtattcagtccatccatctgtcatcctcaaagggaagcgtagtttag

SEQ ID NO: 26550 - DNA, 552 bp, Artificial Sequence
  derived and/or modified sequence
atgtccgatgtgacgttcttggtggaggggcggcccttttacgcccacaaagtgcttctgttcactgcttctccacgcttcaaagcactgcttagctccaaacctactaacgatggcacctgtatcgaaattggctacgtaaagtacagcatattccagttagttatgcaatacttgtactatgggggtcctgaaagcctgttgatcaagaacaatgaaatcatggaactgctgtctgctgccaagttttttcaactagaagcgctacagcgtcactgcgaaattatttgtgctaaatcaatcaacaccgacaactgcgtagacatttacaatcatgcaaaattcctcggagtaaccgagctgagcgcctactgtgagggctatttcctgaaaaatatgatggtattgatcgagaacgaggcctttaaacagctgctatatgataagaatggcgagggaaccgggcaggatgtcctccaagatctccagcgtaccctggccatcaggatacagtccatacacctgtcatccagtaagggcagtgttgtctag

SEQ ID NO: 26551 - DNA, 1926 bp, Artificial Sequence
  derived and/or modified sequence
atgaggaagctgcggcccaaggacagccgggagcccgcccctggcagccctgtgcgcagcggctgcctgcagaggctgagccactacagcggcatccagaggcccttcctggtgctgccccccctgatggagtggatccgggtggccgtggcccatgctggccaccggcgctccttctccatggacagtgatgatgtgcggcaggccgcccggctgctgctgcccggggtggactgtgagccccggcagctgcgggcagatgactgcttctgtgccagcaggaagctggatgctgtggccatcgaggccaagttcaagcaggacctgggcttcaggatgctgaactgtggccgcacagacctggtgaagcaggccgtgtccctgctgggcccagatggcatcaacaccatgtctgagcagggcatgacccccctgatgtatgcctgtgtgagaggagatgaggccatggtgcagatgctgctggatgctggagctgacctgaatgtggaggtggtgtccaccccccacaagtaccccagcgtgcaccctgagaccaggcactggacagccctgacctttgctgtgctgcacggccacatccctgtggtgcagctgctgctggatgctggggccaaggtggagggctctgtggagcacggggaggagaactacagcgagacccccctgcagctggccgctgctgtgggcaactttgagctggtgtccctgctgctggagagaggagctgaccccctgattggcaccatgtacagaaatggcatcagcaccaccccccagggcgacatgaacagcttcagccaggccgccgcccacggccacagaaatgtgttcaggaagctgctggcccagcctgagaaggagaagagtgacatcctgagcctggaggagatcctggccgagggcacagacctggccgagacagcccccccacccctgtgtgccagcaggaacagcaaggccaagctgcgggccctgcgggaggccatgtaccacagcgctgagcacggctacgtggatgtgaccatcgacatccgcagcattggagtgccctggaccctgcacacctggctggagagcctgagaattgccttccagcagcacagaagacccctcatccagtgcctgctgaaggagttcaagaccatccaggaggaggagtacacagaggagctggtgacccagggcctgcccctgatgtttgagatcctgaaggccagcaagaatgaagtcatcagccagcagctgtgtgtgatcttcacccactgctacggcccctaccccatccccaagctgacagagatcaagaggaagcagaccagccggctggacccccacttcctgaacaacaaggagatgtctgatgtgaccttcctggtggagggccggcccttctacgcccacaaggtgctgctcttcaccgccagcccccgcttcaaggccctgctgagcagcaagcccaccaatgatggcacctgcatcgagatcggctacgtgaagtacagcatcttccagctggtgatgcagtacctgtactatggaggccctgagagcctgctgatcaagaacaatgagatcatggagctgctgtctgctgccaagttcttccagctggaggccctgcagaggcactgtgagatcatctgtgccaagagcatcaacacagacaactgtgtggacatctacaaccacgccaagttcctgggcgtgacagagctgagcgcctactgtgagggctacttcctgaagaacatgatggtgctgattgaaaatgaggccttcaagcagctgctgtatgacaagaatggagagggcaccggccaggatgtgctgcaggacctgcagaggaccctggccatccgcatccagagcatccacctgagcagcagcaaaggatctgtggtgtag

SEQ ID NO: 26552 - DNA, 552 bp, Artificial Sequence
  derived and/or modified sequence
atgtctgatgtgaccttcctggtggagggccggcccttctacgcccacaaggtgctgctcttcaccgccagcccccgcttcaaggccctgctgagcagcaagcccaccaatgatggcacctgcatcgagatcggctacgtgaagtacagcatcttccagctggtgatgcagtacctgtactatggaggccctgagagcctgctgatcaagaacaatgagatcatggagctgctgtctgctgccaagttcttccagctggaggccctgcagaggcactgtgagatcatctgtgccaagagcatcaacacagacaactgtgtggacatctacaaccacgccaagttcctgggcgtgacagagctgagcgcctactgtgagggctacttcctgaagaacatgatggtgctgattgaaaatgaggccttcaagcagctgctgtatgacaagaatggagagggcaccggccaggatgtgctgcaggacctgcagaggaccctggccatccgcatccagagcatccacctgagcagcagcaaaggatctgtggtgtag

SEQ ID NO: 26553 - DNA, 1926 bp, Artificial Sequence
  derived and/or modified sequence
atgcggaagctgcggcccaaggacagccgggagcccgcccccggctctcccgtgcgctccggttgcttgcagcgtctcagccactattcaggcatccagcggccattcctggtgttgcccccactcatggagtggatccgtgttgccgtagcccatgctggccacaggaggtccttctccatggactctgacgacgtccgacaggccgcccggctgctccttcccggcgtagattgtgagccacgccaactccgggccgatgactgtttctgcgcatcacgcaaactcgatgcggtggctattgaagctaaattcaagcaagacctaggcttccggatgctgaattgcggacggactgatttagtgaaacaggccgtgagcctgctggggcctgacggtattaacaccatgagcgaacaaggcatgaccccgcttatgtatgcttgtgtgcgaggagacgaggccatggtgcagatgctgctggatgctggagccgacctgaacgttgaggtcgtttctaccccccacaagtacccctccgtacaccccgagacccgtcactggaccgcgttgacctttgccgtactccacggtcatatcccagtggtgcagttgcttttagacgctggcgctaaagtggaaggaagtgtggagcacggtgaggaaaactactccgagactcctctgcaactagccgcagccgtgggaaatttcgagcttgtcagcctgctcctggagcgcggcgccgatccccttattggcacaatgtatcgaaacgggatttccacaactccccagggtgatatgaatagtttcagtcaggccgctgcccatgggcacagaaatgtgttccgcaaactactcgcccagccagagaaagaaaaaagcgacatccttagcttagaagagatcctggctgaaggaacagacctcgccgagaccgctccgcctccgttgtgcgcatcacgaaattcaaaggcgaaattgcgggccctcagggaagccatgtaccatagtgcagaacacggctacgtggatgtgactatagacattaggtcgatcggcgtcccttggacactgcatacttggctggagagcctccgcattgccttccaacagcatagacgcccccttatccagtgtctgctaaaggagtttaaaacaattcaagaagaggagtatacagaggagttggtgacccagggtttgcccctgatgtttgaaatcttgaaggcctccaagaatgaagtcatttcccagcaactgtgtgtcatcttcacgcactgttatgggccttaccctatacccaagctgaccgagatcaaaaggaaacagacatcccgactcgacccccattttcttaataacaaggagatgtcagacgtcaccttccttgtggagggccggccattctatgcacacaaggtactgctcttcacagcttctccgaggtttaaggcactactgtcttccaaacctacaaatgacggaacttgtatcgaaattgggtatgtcaaatacagcatcttccaactggttatgcagtacctctattacggaggaccagaatctctgttgattaagaataacgaaattatggagttactgtctgcagcgaagtttttccagctggaagctctgcagaggcactgcgagattatatgcgccaaatctatcaatacagataactgcgtggacatatacaaccacgccaagttcctgggtgtgaccgagcttagcgcctattgcgaggggtacttcctgaaaaacatgatggtgttgatcgagaacgaagcctttaagcagctactctacgacaagaatggagagggaacgggccaggatgttctgcaggacctacaaaggactctggcaattaggattcaatccatacacctaagcagtagtaaagggagcgtggtgtag

SEQ ID NO: 26554 - DNA, 552 bp, Artificial Sequence
  derived and/or modified sequence
atgagcgacgtgaccttcctggtggagggccggcccttctacgcccacaaggtcctcctcttcactgcgagcccgcgcttcaaagccttactgagttccaagccaaccaacgacggcacctgcatcgagatcggctacgtgaaatattccatcttccagctggtgatgcagtacctgtactatggtggccccgagtccttgctcatcaagaacaatgagatcatggaattgctgtctgccgctaagtttttccaattggaggcactccagaggcactgcgagataatttgtgcaaagtccattaatacagacaactgcgtggatatctataaccacgccaagtttctcggggtcaccgaactgtccgcatactgcgagggctactttctgaagaatatgatggtgttaatagaaaatgaggcatttaagcagctgttgtacgacaagaatggcgagggcaccggtcaggacgttctgcaggacctgcagagaaccctggctattaggatacagtccattcacttgtctagtagtaaaggctccgtggtctag

SEQ ID NO: 26555 - DNA, 1926 bp, Artificial Sequence
  derived and/or modified sequence
atgagaaagttgcgcccaaaggattcacgagagcctgcccctggtagccccgtccgctcaggatgcctacagcgcctgtctcactactccgggatccagcgcccatttcttgttctgccccctctgatggagtggattcgtgtggccgtggcccacgccggtcatcgtagaagcttctccatggattccgatgacgtgcgccaggccgctagactcctgctgcccggagtggactgcgaacccaggcaactcagggcggacgactgtttttgcgcctcccgcaaactggacgcagtggccatagaagctaagttcaaacaggacctaggatttcgaatgctgaactgtggtagaaccgatctcgtaaagcaagcggtgagcctcctagggcctgatggcattaataccatgtcggagcaagggatgactcccctgatgtacgcttgtgtgcggggagacgaagccatggtccaaatgcttctggacgctggggcagatctgaatgtggaggtggtcagcacaccccacaagtacccgtctgtgcaccccgaaactcggcattggactgcactcacctttgccgtcctgcatgggcatatccctgtcgtccagctgctcttagatgccggagcaaaagtcgaagggtccgtggaacatggtgaagaaaactactctgaaactccactgcagctggccgctgctgttgggaattttgaactggtgtcattgctgctggagagaggtgctgaccccctcatcggaacgatgtatcgtaatgggatcagcaccacaccacagggcgacatgaactcgttctctcaagccgcagcccacggccaccgaaacgtctttaggaaactgctcgcacagcctgagaaggaaaaatctgacattctcagcctggaagaaatcctggcggaggggaccgacctggccgagaccgctccccctcccttgtgcgcatcaagaaactccaaagccaagctgagagctttgagagaagcaatgtaccattccgcagagcatggctacgtggacgtcacgattgatatcagatctataggcgtcccttggaccctgcacacctggctagagagcctgagaattgcattccagcagcaccgcaggcccctgatccaatgtttgctgaaggagttcaaaacaatacaggaggaggagtacacagaagaactggtgacccaagggctgcccctcatgttcgaaatcttaaaggcatctaaaaatgaggtgatctctcagcagctgtgcgtgatctttacccattgttatggaccttatcctattcccaagctgaccgaaattaagcggaagcaaacctcaaggctggacccccactttctgaataataaagaaatgtccgacgtgacgttcttggtggaagggaggcctttttacgcccacaaggttttactgttcacggcctcccctcggttcaaggcgctgctgtctagcaagcccactaacgacgggacctgtattgagattggatacgtgaagtacagcatcttccagctcgtcatgcagtacttgtattacggcggacccgagtcactgctgataaaaaacaacgagattatggagctcttgtcagctgcaaagttcttccagctcgaggctttgcagcgacattgtgaaatcatctgcgcgaagtccattaatacggacaactgcgtcgacatttacaaccacgccaagtttctgggcgtgacagagctgagtgcttattgtgagggttattttttaaaaaacatgatggtgctgatagagaacgaggcctttaagcagctcctgtacgacaaaaacggcgagggaactggccaggatgtattgcaggatctgcagcgtactctggccattcgcattcagtccatccatctgtcctcgtctaaggggtcagtggtctag

SEQ ID NO: 26556 - DNA, 552 bp, Artificial Sequence
  derived and/or modified sequence
atgtcggacgttactttcctggtagaagggcgaccattctacgcccacaaagtgttactgtttaccgcaagcccgcgatttaaggcattgctgagtagcaaacccacaaacgacggcacctgcatcgagataggttacgtgaaatactcgattttccagcttgttatgcagtacctgtattatggcggacctgagtcactccttattaagaataacgagatcatggaactacttagcgcagcaaaattctttcagttagaagcactgcaacgacactgcgaaattatttgcgcaaagtccataaacactgataactgtgtggatatctataatcatgctaaatttcttggtgttacagagttgtccgcgtattgtgaagggtattttttaaagaacatgatggtgctcatagaaaatgaggcgtttaagcagctgctgtatgataaaaacggagagggaactggtcaggatgtgttgcaggacctccaacgcaccttggcgattcggattcagagtatccacctgtcctcaagcaaggggtccgtggtctag

SEQ ID NO: 26557 - DNA, 4107 bp, Artificial Sequence
  derived and/or modified sequence
aaagagctccagaaagacgacagggacgaggctgcagatgggaagggagtgctagcggacaccttaggcttgggtccacaatcagggagccccaaatagaaataacacggggcgctgattggttttccgccgctccagaccctgcgcttggtgcttcaagtgactcatccttatgttcacatgatcgccgagagggataatattcccagatcagttacctcctagcctttcctagtcacattatccccaggctacagatgaggaaactgaggcccaaggattccagagagcctgccccggggtcaccggtgcggtccggatgtctccaaaggctctcccactactctggaattcagaggcccttcctcgtgctgccgccgctgatggagtggatccgggtggccgtggcgcacgccggccaccgccgcagcttctccatggacagcgacgacgtccgccaggcggcccggctgctgctgcccggcgtggactgcgagccgcgccagctcagggccgacgactgcttttgtgcatctcgaaagctggatgcggtggccatcgaagccaagtttaagcaggacctgggtttccggatgctgaactgtggacgaacagacctggtgaagcaggcagtgtctctgctggggcccgatgggatcaacaccatgagcgaacagggcatgactcccctgatgtatgcctgcgtccgtggggacgaggcgatggttcagatgctgctggatgccggagctgacctgaatgtggaggttgtcagtactcctcataaatatccatccgtccaccccgagacccgccattggacggctctgacttttgctgtgttgcatggacatattcctgtagttcagctcctcctggatgctggggccaaggtggaaggctcagtggagcatggcgaggagaactactcggaaacacccctccagctggcagctgctgtaggaaattttgagctggttagtttgctgttggagcgtggtgccgatcccctgataggaaccatgtacaggaatggaatttctacaaccccccagggtgatatgaactctttcagccaggctgcagcccacggacacaggaatgtgttccgcaaactgctcgcccagccagagaaggagaagagtgatatcctgtccctggaggagattctggccgaggggactgacctggcggagacagccccgccccccttgtgcgccagccgcaacagcaaggccaaactgagggccctgagggaggccatgtatcacagcgctgagcatggctacgtggatgtcacaattgatatcaggagcataggcgtcccgtggactctgcacacgtggctggagtctttgcggatcgccttccagcagcaccgcaggcctctcatccagtgcttgttaaaggagtttaagaccattcaggaggaggaatacacggaggagctcgttacccaaggcctgcccctgatgtttgagatcctgaaagcgagcaagaatgaagtgatcagccagcagctgtgcgtcatcttcacacactgctacgggccctaccccatccccaagctcacagaaatcaaacggaaacagacctcgcgcttggatcctcattttcttaacaataaagaaatgtctgatgttacatttctggtagaaggaagaccattttatgctcacaaagtgctgttatttacagcctctccaaggttcaaagcactcctctccagcaagccgacaaatgatggcacctgcatagagattggttatgtgaaatactccatctttcagctggttatgcagtatctctactatggtggcccagagtcactgctcattaaaaacaatgagatcatggagcttctgtctgctgctaagtttttccagctggaggctttgcagcgacactgtgagattatctgtgcgaaaagcatcaataccgacaactgtgtggatatttacaaccatgccaagtttcttggagtcacagagctctcagcatattgcgaaggctactttctcaaaaacatgatggtcctcattgaaaacgaagcattcaagcagctcctgtatgacaaaaatggtgaagggaccggccaggatgtgctccaggacttacagaggacgttggccatcagaattcagtccatccacttgtcgtcttccaaaggttccgtggtatgaaacgcctagtgcagggaatgcttcccgggaactttccagttctcctgccgcattggctttacacaaacacagacaaattccacctggcacctgtttttggctgggccaaggagctgcctctactgctcccacgtgttcctgttgaaaaacaaaggactttccactggtctgcagatcagatcagctgggtccagagtttaatgggcaactggacaaccaagttaaccccaattgaaagcacccctaggaccattgaacacccactgccggggaccactgtccagtgaatggattgaggccttttaaaggtcactcaggttccaggttgacagttggaggacttcaccgtaccaaccctgaagagattgtattacacattaaggaccttggtagctgtgcttcagcaaacgtcaaccatggtagcaaattggtgaggctgtgaccaataatgaggaaataatctggcaaatttttaggggtgggaacttttttaaatgttcatttaaaaaaaaacaaaaacagggcagtcttgtagtttaaaatatatttctaaaagcttaacagttcgttttcaactaaattgtgtttagggatctgtgtttgagatttttctttatttcttttttttttttaaatagtaagtcacaggtccacactgtgtaaacatgcatctgataagatactgctgatattctaaacaagttgaaataatcttgccttagtgatcatgattacacaaaagaggtgcactgccaataagtatctctaattcaatagttgaaagcaacctgcatgctaatcgtggtttcggggtgagaataaaacacccccacataacatgcatttgcatgggcccgaacctgtgaaatgttacgtttgtgcttcatttttgccaaggtaaaaatgttccatcatttctagctaaaactccatttggtgaaaccaacatatccatttcttttcctagttacggatgatttggggatgcttttgcagaaatgtgttcatagatgatgctgaatgggggaggggggcagcacgtcagagaatttactattaatcccagagttttctctgtattctcagaagatgttaatagtttgttactagccagagagtatgactatgttagattatttttaaagatgaaacatgtatgataggatggattctttctgtattctgagagtgtacagtacaggattattataatgaaagtttatatcaacagggtttcgttggctctgccatatattataagcaaaagagattggtaaagtgccacagtattccagataacttttcagttgcggcctttcttctcgttctttaatttgaaacctagatacatgcagtaaaaactaggagaatgacttttacccttggggacagccaagttttgttgataaacctatttcctagcatgccttcaggaagttgtgccagaccctagattgtgaaggacccactgttcttctgttgtacgagctccctgaaccattgttcagaggaccaatgtcacatcgcttcatgggcatggcccatggagcatctgggtgatatctgtctacagtattggctcttctgcgaggctgatacacaaggcctctcttccacatgatcatttgcaaacctcccccagcccctaccatccaatgtggaaggaaaacaagaactgcctgaagaagagtccaagctacagatacacagcgtgtgcattgcggctgtcaccttcctcctcccacttctgtatcctcagagatgctgcgtggatgtttccttaacctcagctgacttccctgtgaatgtctaatgctagttcagggcctccaggcattgatttgtacagtggtaactcccaatgaggcttctgttatcatttggtgtgctttctctgtcattaaaagaaatgattttcccaggc

SEQ ID NO: 26558 - DNA, 811 bp, Artificial Sequence
  derived and/or modified sequence
agcgtttgtctcgttaatggagaacacagtcacaggatcaaaagggctaatttcaggataattctcctgaaatcctgctaatttcaggataattcactgcttccagaattttagagtactggtaaagaatgaagtgatcagccagcagctgtgcgtcatcttcacacactgctacgggccctaccccatccccaagctcacagaaatcaaacggaaacagacctcgcgcttggatcctcattttcttaacaataaagaaatgtctgatgttacatttctggtagaaggaagaccattttatgctcacaaagtgctgttatttacagcctctccaaggttcaaagcactcctctccagcaagccgacaaatgatggcacctgcatagagattggttatgtgaaatactccatctttcagctggttatgcagtatctctactatggtggcccagagtcactgctcattaaaaacaatgagatcatggagcttctgtctgctgctaagtttttccagctggaggctttgcagcgacactgtgagattatctgtgcgaaaagcatcaataccgacaactgtgtggatatttacaaccatgccaagtttcttggagtcacagagctctcagcatattgcgaaggctactttctcaaaaacatgatggtcctcattgaaaacgaagcattcaagcagctcctgtatgacaaaaatggtgaagggaccggccaggatgtgctccaggacttacagaggacgttggccatcagaattcagtccatccacttgtcgtcttccaaaggttccgtggtatga

SEQ ID NO: 26559 - DNA, 774 bp, Artificial Sequence
  derived and/or modified sequence
atggtgggggctgggatctctaccccatctgggatccctgattttagatccccaggctccgggctctacagcaacctccaacaatacgacttaccttatcctgaggccatttttgaactgccgttttttttccacaatccgaagcctttcttcaccctcgctaaggagctctatcccggcaactataagcctaatgtgacgcactactttttgcgcctgctgcatgacaagggactgctcctccggctctatacccagaatatcgacggactcgagcgggtcagcggaatccccgcgagtaaactggtcgaggcgcacggcactttcgcaagtgcgacttgcaccgtctgccagaggcccttccctggcgaggacatcagggccgatgtgatggcagaccgcgtgccgagatgtccagtctgcacaggagtggtgaaaccagacatagtgttctttggcgagcccttgccacagcggttcctgctgcacgtggtggactttcccatggccgacctattgcttattcttgggacgtccctggaggtggagcctttcgcctctctgacggaggctgtcaggtcgagcgttccccgcttacttatcaacagggatttggtgggacccttggcatggcacccaagatccagggatgttgcacagctgggtgacgtggtgcacggtgtagagtctcttgtggagctccttgggtggacagaagaaatgagggacctggtgcagcgagaaactggcaagcttgacggaccagacaagtag

SEQ ID NO: 26560 - DNA, 774 bp, Artificial Sequence
  derived and/or modified sequence
atggtgggcgccggcatcagcacccccagcggcatcccagacttccgcagccctggcagcggcctgtacagcaacctgcagcagtatgacctgccctacccagaggccatctttgagctgcccttcttcttccacaaccccaagcccttcttcaccctggccaaggagctgtacccaggcaactacaagcccaacgtgacccactacttcctgcggctgctgcatgacaagggcctgctgctgcggctgtacacccagaacattgatggcctggagcgggtgtctggcatcccagccagcaagctggtggaggcccacggcacctttgccagcgccacctgcaccgtgtgccagaggcccttccctggagaggacatccgggcagatgtgatggctgacagagtgccccgctgccctgtgtgcaccggggtggtgaagccagacatcgtgttcttcggggagcccctgccccagcgcttcctgctgcacgtggtggacttccccatggctgacctgctgctgatcctgggcaccagcctggaggtggagccctttgccagcctgacagaagctgtgcgcagctctgtgccccggctgctgatcaacagagacctggtgggccccctggcctggcaccccaggagcagagatgtggcccagctgggagatgtggtgcacggcgtggagagcctggtggagctgctgggctggacagaggagatgagggacctggtgcagcgggagaccgggaagctggatggccctgacaagtag

SEQ ID NO: 26561 - DNA, 774 bp, Artificial Sequence
  derived and/or modified sequence
atggtgggcgccggcatcagcacccccagcggcatccccgacttccggagcccaggctccggactctacagtaacttacagcagtacgatttgccctaccccgaggccatctttgaactcccattcttttttcataaccccaaaccattcttcacacttgctaaagagctataccctggcaactataagccaaacgttacacactactttcttaggctcctgcatgacaagggcctccttctgcgtctgtatacccagaacattgacggcctggaaagggtatcgggcattccagcctcaaaactagtggaggcacatggcacatttgcaagcgccacatgcacagtgtgtcagagacccttccccggagaggatatcagggcagatgtcatggccgatagagtgccacggtgtcctgtatgtaccggagtcgttaaacctgacatcgtcttttttggggagcccctgccacagagattccttctgcatgtagtggactttcctatggctgacctgctgctgatcctaggtaccagcctagaagtggaaccattcgcctctctgactgaggctgttaggagcagcgtgccccggctgttgatcaacagagacctcgtggggcccctggcttggcatcctcgcagcagggacgtagcacagctcggtgatgtagtgcatggagtggaaagcctggtcgaactgctgggatggactgaagaaatgagagacctcgtccagagggagacaggtaaactcgatggccctgataagtag

SEQ ID NO: 26562 - DNA, 774 bp, Artificial Sequence
  derived and/or modified sequence
atggtcggggctgggatttcaacgccatccggtatcccggactttcggagcccgggatcagggttatactcaaacctgcaacagtacgacctcccttatccagaagccatattcgagctcccattctttttccataaccccaagccattcttcacccttgccaaggagctataccctggaaattataagcctaatgtgacacactatttccttcgtctcctgcacgacaaaggtttgcttttgagactctacacccagaacatcgacgggttagagagggtgtccggcataccggcttccaagctggtggaggcgcatgggacttttgcctcagcaacttgtaccgtctgtcagcgcccttttcccggagaagacattcgcgcagatgttatggctgatagggtgccaagatgtccagtctgtactggggtggtcaaacccgatatcgtctttttcggtgagcctctgccacagcgttttctccttcacgtggtggacttccccatggccgatctgctgcttatccttggtacaagccttgaggtcgagccgtttgcttcattgaccgaggctgtccgttctagcgtaccgcgactgttaattaacagggatctggtaggacccctggcctggcacccccgttctcgggacgtcgcacaacttggcgacgtcgtgcacggagttgagagcctggtagagctgcttgggtggaccgaagaaatgcgcgatctagttcagcgtgagaccggcaaactcgatggccctgacaaatag

SEQ ID NO: 26563 - DNA, 774 bp, Artificial Sequence
  derived and/or modified sequence
atggtgggcgccggcatcagcacccccagcggcatccccgacttcagaagccccggcagcggcctgtacagcaacctgcagcagtacgacctgccctaccccgaggccatcttcgagctgcccttcttcttccacaaccccaagcccttcttcaccctggccaaggagctgtaccccggcaactacaagcccaacgtgacccactacttcctgagactgctgcacgacaagggcctgctgctgagactgtacacccagaacatcgacggcctggagagagtgagcggcatccccgccagcaagctggtggaggcccacggcaccttcgccagcgccacctgcaccgtgtgccagagacccttccccggcgaggacatcagagccgacgtgatggccgacagagtgcccagatgccccgtgtgcaccggcgtggtgaagcccgacatcgtgttcttcggcgagcccctgccccagagattcctgctgcacgtggtggacttccccatggccgacctgctgctgatcctgggcaccagcctggaggtggagcccttcgccagcctgaccgaggccgtgagaagcagcgtgcccagactgctgatcaacagagacctggtgggccccctggcctggcaccccagaagcagagacgtggcccagctgggcgacgtggtgcacggcgtggagagcctggtggagctgctgggctggaccgaggagatgagagacctggtgcagagagagaccggcaagctggacggccccgacaagtag

SEQ ID NO: 26564 - protein, 379 aa, Artificial Sequence
  derived and/or modified sequence
MSSPSLSDLGKREPAAAADERGTQQRRACANATWNSIHNGVIAVFQRKGLPDQELFSLNEGVRQLLKTELGSFFTEYLQNQLLTKGMVILRDKIRFYEGQKLLDSLAETWDFFFSDVLPMLQAIFYPVQGKEPSVRQLALLHFRNAITLSVKLEDALARAHARVPPAIVQMLLVLQGVHESRGVTEDYLRLETLVQKVVSPYLGTYGLHSSEGPFTHSCILEKRLLRRSRSGDVLAKNPVVRSKSYNTPLLNPVQEHEAEGAAAGGTSIRRHSVSEMTSCPEPQGFSDPPGQGPTGTFRSSPAPHSGPCPSRLYPTTQPPEQGLDPTRSSLPRSSPENLVDQILESVDSDSEGIFIDFGRGRGSGMSDLEGSGGRQSVV

SEQ ID NO: 26565 - protein, 267 aa, Artificial Sequence
  derived and/or modified sequence
MSSPSLSDLGKREPAAAADERGTQQRRACANATWNSIHNGVIAVFQRKGLPDQELFSLNEGVRQLLKTELGSFFTEYLQNQLLTKGMVILRDKIRFYEGQKLLDSLAETWDFFFSDVLPMLQAIFYPVQGKEPSVRQLALLHFRNAITLSVKLEDALARAHARVPPAIVQMLLVLQGVHESRGVTEDYLRLETLVQKVVSPYLGTYGLHSSEGPFTHSCILEKRLLRRSRSGDVLAKNPVVRSKSYNTPLLNPVQEHEAEGAAAGGT

SEQ ID NO: 26566 - protein, 226 aa, Artificial Sequence
  derived and/or modified sequence
MSSPSLSDLGKREPAAAADERGTQQRRACANATWNSIHNGVIAVFQRKGLPDQELFSLNEGVRQLLKTELGSFFTEYLQNQLLTKGMVILRDKIRFYEGQKLLDSLAETWDFFFSDVLPMLQAIFYPVQGKEPSVRQLALLHFRNAITLSVKLEDALARAHARVPPAIVQMLLVLQGVHESRGVTEDYLRLETLVQKVVSPYLGTYGLHSSEGPFTHSCILEKRLL

SEQ ID NO: 26567 - DNA, 1140 bp, Artificial Sequence
  derived and/or modified sequence
atgagcagccccagcctgagcgacctgggcaagagagagcccgccgccgccgccgacgagagaggcacccagcagagaagagcctgcgccaacgccacctggaacagcatccacaacggcgtgatcgccgtgttccagagaaagggcctgcccgaccaggagctgttcagcctgaacgagggcgtgagacagctgctgaagaccgagctgggcagcttcttcaccgagtacctgcagaaccagctgctgaccaagggcatggtgatcctgagagacaagatcagattctacgagggccagaagctgctggacagcctggccgagacctgggacttcttcttcagcgacgtgctgcccatgctgcaggccatcttctaccccgtgcagggcaaggagcccagcgtgagacagctggccctgctgcacttcagaaacgccatcaccctgagcgtgaagctggaggacgccctggccagagcccacgccagagtgccccccgccatcgtgcagatgctgctggtgctgcagggcgtgcacgagagcagaggcgtgaccgaggactacctgagactggagaccctggtgcagaaggtggtgagcccctacctgggcacctacggcctgcacagcagcgagggccccttcacccacagctgcatcctggagaagagactgctgagaagaagcagaagcggcgacgtgctggccaagaaccccgtggtgagaagcaagagctacaacacccccctgctgaaccccgtgcaggagcacgaggccgagggcgccgccgccggcggcaccagcatcagaagacacagcgtgagcgagatgaccagctgccccgagccccagggcttcagcgacccccccggccagggccccaccggcaccttcagaagcagccccgccccccacagcggcccctgccccagcagactgtaccccaccacccagccccccgagcagggcctggaccccaccagaagcagcctgcccagaagcagccccgagaacctggtggaccagatcctggagagcgtggacagcgacagcgagggcatcttcatcgacttcggcagaggcagaggcagcggcatgagcgacctggagggcagcggcggcagacagagcgtggtgtag

SEQ ID NO: 26568 - DNA, 804 bp, Artificial Sequence
  derived and/or modified sequence
atgagcagccccagcctgagcgacctgggcaagagagagcccgccgccgccgccgacgagagaggcacccagcagagaagagcctgcgccaacgccacctggaacagcatccacaacggcgtgatcgccgtgttccagagaaagggcctgcccgaccaggagctgttcagcctgaacgagggcgtgagacagctgctgaagaccgagctgggcagcttcttcaccgagtacctgcagaaccagctgctgaccaagggcatggtgatcctgagagacaagatcagattctacgagggccagaagctgctggacagcctggccgagacctgggacttcttcttcagcgacgtgctgcccatgctgcaggccatcttctaccccgtgcagggcaaggagcccagcgtgagacagctggccctgctgcacttcagaaacgccatcaccctgagcgtgaagctggaggacgccctggccagagcccacgccagagtgccccccgccatcgtgcagatgctgctggtgctgcagggcgtgcacgagagcagaggcgtgaccgaggactacctgagactggagaccctggtgcagaaggtggtgagcccctacctgggcacctacggcctgcacagcagcgagggccccttcacccacagctgcatcctggagaagagactgctgagaagaagcagaagcggcgacgtgctggccaagaaccccgtggtgagaagcaagagctacaacacccccctgctgaaccccgtgcaggagcacgaggccgagggcgccgccgccggcggcacctag

SEQ ID NO: 26569 - DNA, 681 bp, Artificial Sequence
  derived and/or modified sequence
atgagcagccccagcctgagcgacctgggcaagagagagcccgccgccgccgccgacgagagaggcacccagcagagaagagcctgcgccaacgccacctggaacagcatccacaacggcgtgatcgccgtgttccagagaaagggcctgcccgaccaggagctgttcagcctgaacgagggcgtgagacagctgctgaagaccgagctgggcagcttcttcaccgagtacctgcagaaccagctgctgaccaagggcatggtgatcctgagagacaagatcagattctacgagggccagaagctgctggacagcctggccgagacctgggacttcttcttcagcgacgtgctgcccatgctgcaggccatcttctaccccgtgcagggcaaggagcccagcgtgagacagctggccctgctgcacttcagaaacgccatcaccctgagcgtgaagctggaggacgccctggccagagcccacgccagagtgccccccgccatcgtgcagatgctgctggtgctgcagggcgtgcacgagagcagaggcgtgaccgaggactacctgagactggagaccctggtgcagaaggtggtgagcccctacctgggcacctacggcctgcacagcagcgagggccccttcacccacagctgcatcctggagaagagactgctgtag

SEQ ID NO: 26570 - DNA, 1140 bp, Artificial Sequence
  derived and/or modified sequence
atgtcctcaccgtctctctccgatctaggaaagcgggaacccgcagctgctgccgacgaaagaggtacacagcagaggcgggcttgtgctaatgccacatggaatagtattcacaacggagtgatcgctgtcttccagcggaaaggcttacccgatcaagaactgttctcattaaacgaaggggtccgccagttactcaagacagaactcggatcttttttcaccgagtacctgcagaaccagctgttgaccaagggaatggtcattctgcgcgacaagattaggttctatgaggggcagaaactcctcgactccttggccgaaacgtgggacttcttcttctcagatgtgctgcccatgcttcaggccatcttctatcctgtgcagggtaaggaaccatctgtacggcaacttgcgctactccactttaggaacgcaataacgctgtccgtgaagctcgaggacgccttagcacgtgctcatgcccgcgtaccaccggcaattgtgcaaatgctgcttgtgctgcagggcgtccacgagagcaggggggtgactgaggactatttgaggctcgaaaccctggtacaaaaagtggtgagcccatacctgggaacctacggcttgcattcctctgaaggcccatttactcattcttgtatactggagaaacgactgttgagaaggagtaggtctggcgacgtgctggccaagaaccctgtggtgaggtcgaaatcctataacactcccctgttgaatcctgttcaggagcacgaggccgagggtgctgccgccggcgggacctccatacggcgacacagtgtgtccgagatgacatcttgcccagaaccccagggattctctgatcctccaggacagggtcccacaggtacattcagatcttctccggcccctcattctgggccatgcccctcacgtctctatcctacaacccaacctcccgaacagggcttagaccccacgcgctccagcttgcctcgctccagtcccgagaacttagtcgatcagatcctcgagagcgttgatagcgacagtgaaggtatttttatcgacttcggccgcggcaggggcagcgggatgtccgatttggagggatcagggggccgccagtctgtggtttag

SEQ ID NO: 26571 - DNA, 804 bp, Artificial Sequence
  derived and/or modified sequence
atgagctccccctcactgagcgatcttggaaagcgcgaaccagcagctgctgccgacgagagaggcacacagcaaagaagggcctgtgccaacgccacatggaatagcattcataatggcgttatagctgtctttcagaggaagggtctcccggatcaggagctcttttcattaaacgagggggtcaggcagctactgaaaactgaactgggctcattctttactgagtatctgcaaaatcagcttctgaccaaaggaatggtaatcctgagagataagatccggttttatgagggtcagaagctcctcgactcccttgcagagacctgggattttttcttcagcgatgtgctgcctatgctccaagccatattttaccctgttcaaggaaaagaacccagtgtacgccagctcgccttgctccacttcagaaacgccatcacactgagtgtgaagctggaagacgcactggcgagagcccatgctcgagtgcctcccgccatagtgcagatgctgttggtgctgcagggagtccacgagtcaaggggcgttactgaggactacctgcgactggagactctcgtgcagaaggtcgtcagtccctaccttgggacctacggcttacacagctcggagggcccgtttacccactcttgtatactcgagaaaaggctgctgagacggtcaaggtccggtgacgttctagctaaaaatcctgttgtccggtccaagagctacaatacgccactcttgaatccggttcaggagcatgaagccgaaggtgcagcggccgggggcacttag

SEQ ID NO: 26572 - DNA, 681 bp, Artificial Sequence
  derived and/or modified sequence
atgagcagcccttctctttctgatctaggaaagcgtgagcccgccgctgccgctgatgagcgaggcactcagcaacggcgcgcgtgtgccaacgccacttggaacagcatccacaacggcgttattgccgtgttccagcggaagggtctccccgatcaagagcttttcagtctgaatgaaggggtcaggcagttgctgaaaacagaacttgggtccttttttactgagtatttacagaaccaactacttaccaaaggcatggttatcctccgcgataagatcaggttctatgagggacaaaaactactggactcactcgctgagacttgggacttcttcttctcagacgtgctgcccatgctccaggccatcttttaccctgtacagggaaaagaaccctctgtgagacagctcgctcttcttcacttcaggaatgcaatcactctgtccgtgaaactggaagatgcgctcgcacgggcccatgccagagtgcccccggctatcgttcaaatgttgctggtcctgcagggcgtccacgagtccaggggtgtgaccgaagactacctgcggttggagactttggtgcaaaaagtggtaagcccctacctggggacatacggcctgcactcctctgaagggccatttacccattcttgcattttggaaaagcgcctcctgtag

SEQ ID NO: 26573 - DNA, 1140 bp, Artificial Sequence
  derived and/or modified sequence
atgagcagccccagcctgagtgacctgggcaagcgggagcctgctgctgctgctgatgagcggggcacccagcagaggcgggcctgtgccaatgccacctggaacagcatccacaatggagtgattgctgtgttccagaggaagggcctgcctgaccaggagctgttcagcctgaatgaaggagtgcggcagctgctgaagacagagctgggcagcttcttcacagagtacctgcagaaccagctgctgaccaagggcatggtgatcctgcgggacaagatccgcttctatgagggccagaagctgctggacagcctggccgagacctgggacttcttcttcagtgatgtgctgcccatgctgcaggccatcttctaccctgtgcagggcaaggagcccagcgtgcggcagctggccctgctgcacttcagaaatgccatcaccctgtctgtgaagctggaggatgccctggcccgggcccacgcccgggtgcccccagccatcgtgcagatgctgctggtgctgcagggcgtgcatgagagcagaggagtgacagaggactacctgcggctggagaccctggtgcagaaggtggtgagcccctacctgggcacctacggcctgcacagcagcgagggccccttcacccacagctgcatcctggagaagaggctgctgcggcgcagccgctctggagatgtgctggccaagaaccctgtggtgcgcagcaagagctacaacacccccctgctgaaccctgtgcaggagcatgaagctgagggcgctgctgctgggggcaccagcatccgccgccacagcgtgtctgagatgaccagctgcccagagccccagggcttcagtgaccccccaggccagggccccaccggcaccttccgcagcagccctgccccccacagcggcccctgccccagccggctgtaccccaccacccagcccccagagcagggcctggaccccaccaggagcagcctgcccaggagcagccctgagaacctggtggaccagatcctggagagcgtggacagcgacagcgagggcatcttcatcgactttggccggggccggggcagcggcatgtctgacctggagggcagcggcggccggcagagcgtggtgtag

SEQ ID NO: 26574 - DNA, 804 bp, Artificial Sequence
  derived and/or modified sequence
atgagcagccccagcctgagtgacctgggcaagcgggagcctgctgctgctgctgatgagcggggcacccagcagaggcgggcctgtgccaatgccacctggaacagcatccacaatggagtgattgctgtgttccagaggaagggcctgcctgaccaggagctgttcagcctgaatgaaggagtgcggcagctgctgaagacagagctgggcagcttcttcacagagtacctgcagaaccagctgctgaccaagggcatggtgatcctgcgggacaagatccgcttctatgagggccagaagctgctggacagcctggccgagacctgggacttcttcttcagtgatgtgctgcccatgctgcaggccatcttctaccctgtgcagggcaaggagcccagcgtgcggcagctggccctgctgcacttcagaaatgccatcaccctgtctgtgaagctggaggatgccctggcccgggcccacgcccgggtgcccccagccatcgtgcagatgctgctggtgctgcagggcgtgcatgagagcagaggagtgacagaggactacctgcggctggagaccctggtgcagaaggtggtgagcccctacctgggcacctacggcctgcacagcagcgagggccccttcacccacagctgcatcctggagaagaggctgctgcggcgcagccgctctggagatgtgctggccaagaaccctgtggtgcgcagcaagagctacaacacccccctgctgaaccctgtgcaggagcatgaagctgagggcgctgctgctgggggcacctag

SEQ ID NO: 26575 - DNA, 681 bp, Artificial Sequence
  derived and/or modified sequence
atgagcagccccagcctgagtgacctgggcaagcgggagcctgctgctgctgctgatgagcggggcacccagcagaggcgggcctgtgccaatgccacctggaacagcatccacaatggagtgattgctgtgttccagaggaagggcctgcctgaccaggagctgttcagcctgaatgaaggagtgcggcagctgctgaagacagagctgggcagcttcttcacagagtacctgcagaaccagctgctgaccaagggcatggtgatcctgcgggacaagatccgcttctatgagggccagaagctgctggacagcctggccgagacctgggacttcttcttcagtgatgtgctgcccatgctgcaggccatcttctaccctgtgcagggcaaggagcccagcgtgcggcagctggccctgctgcacttcagaaatgccatcaccctgtctgtgaagctggaggatgccctggcccgggcccacgcccgggtgcccccagccatcgtgcagatgctgctggtgctgcagggcgtgcatgagagcagaggagtgacagaggactacctgcggctggagaccctggtgcagaaggtggtgagcccctacctgggcacctacggcctgcacagcagcgagggccccttcacccacagctgcatcctggagaagaggctgctgtag

SEQ ID NO: 26576 - DNA, 1140 bp, Artificial Sequence
  derived and/or modified sequence
atgagcagccccagcctgagcgacctgggcaagcgggagcccgccgccgcagcagatgaaaggggcacacaacaacgccgcgcctgcgccaatgcaacttggaacagcattcataacggtgtaatcgcagtattccagcgtaagggcctgcccgatcaagagttattttctctcaatgagggagtgcgccagttgcttaagacagagctggggagcttttttactgaatacttgcagaatcagttgttgaccaagggaatggtaatcctcagagacaaaattcgtttctatgaagggcagaaattgctcgactcacttgccgaaacttgggattttttttttagcgatgtgctgcccatgttgcaggccatcttctatcccgtgcagggcaaggagccttcagtgaggcagttggctcttcttcattttagaaacgcgatcacactgtctgtcaaattggaggatgccctggctcgcgcccatgccagggttccacccgcaatcgtgcagatgttactggtgttgcagggagttcatgagtctcgaggagttacagaggattatcttagacttgagaccttggtgcagaaggtggtgtccccatacttaggaacgtatggcctgcactccagcgagggccctttcactcattcatgtattttagagaaacgtcttctgcggaggtcccggtctggagacgtcctggctaaaaaccccgttgtgcgatcaaagtcttacaatactcccctgctcaacccggtgcaggaacacgaggctgagggcgccgccgctggcggaacatccattcggcggcattccgtttcggaaatgacgagctgcccagaaccccagggattctccgatcctcccggccagggaccaacgggcacattcagaagctcccctgcaccacattctgggccctgtcctagcaggctgtacccaactacgcagcccccggaacagggtcttgatccgactcgctcaagtctcccgaggtcctcccctgagaacctcgtcgatcagatcctggagtccgtggactccgacagtgagggcatctttatcgactttgggcgaggtcggggaagcggcatgagtgacctcgaagggagcggcggccgccagagtgtcgtgtag

SEQ ID NO: 26577 - DNA, 804 bp, Artificial Sequence
  derived and/or modified sequence
atgagcagccccagcctgagcgacctgggcaagcgggagcccgccgcagccgctgatgagaggggcactcagcagcggcgggcgtgtgctaacgccacctggaacagcatccataatggcgtgattgcggtctttcagcgcaaaggccttcccgaccaagaactgtttagccttaacgagggggtccgacagcttcttaagacggaactgggatccttttttactgagtacctgcagaaccagctgctgaccaaaggcatggtaatcctacgcgacaaaatccgattctacgaaggccagaaattactggactccctggctgaaacatgggacttctttttttcagatgtcctccccatgctacaggcaattttctacccagtgcagggaaaagagcctagcgtgcgccagctggcacttctgcacttccggaatgccattacactctcagtcaagctggaggacgccctcgcacgagcacatgctcgtgtgccgcccgccattgtacagatgctgcttgtattgcaaggcgtgcatgagtcacgaggagtgaccgaggattaccttcggctggagaccttagtacagaaggtagtgagtccctatctggggacttacggtctacatagcagcgaagggcccttcactcacagttgtattctggaaaagagacttttaaggcgttcaagatccggtgatgtgcttgccaagaacccggtcgtgcggagcaagtcttataataccccactgctaaacccggtccaggagcacgaggctgagggcgccgctgcaggtggtacctag

SEQ ID NO: 26578 - DNA, 681 bp, Artificial Sequence
  derived and/or modified sequence
atgagcagccccagcctgagcgacctgggcaagcgggagcccgccgccgccgccgatgaacgcgggacgcagcagcgacgcgcttgcgccaatgccacatggaattcaatccataatggtgtgatcgctgttttccaacgaaagggactgcctgaccaggaactgttttctttaaacgaaggtgtacggcagctgctgaaaacggaattaggaagcttttttacagaatatctccagaatcagctgctgacaaagggaatggtgatcctgcgggacaaaattcgtttttatgaagggcagaaactgctggatagcctggccgagacctgggatttcttcttcagcgatgtcttgccaatgctacaggcaattttctacccagtgcagggtaaagaaccgtctgtacggcagttggccttgttgcattttcggaacgccataacgttgagtgttaaattggaggatgccctggcccgagcccatgcccgcgtgccacctgcaatagtgcagatgcttctagttttacagggcgtccatgagtcccgtggcgttactgaggactacttgcggctggagaccctcgtgcagaaggtcgtgtctccctatcttggaacttacggcctgcactcctccgaaggcccatttacgcactcctgtattctggagaagcgcctgttgtag

SEQ ID NO: 26579 - DNA, 1140 bp, Artificial Sequence
  derived and/or modified sequence
atgtcttcgccctctctttcggatttgggcaaaagggagccagctgcggctgctgacgagagaggaacacagcagcgacgtgcttgtgctaatgccacttggaattctatccacaacggcgtgattgccgtgttccagagaaaaggactcccagaccaggagctgttttctctgaacgagggcgtgcggcagctgctcaagacagaactgggatcgttcttcactgagtacctgcagaatcagcttctgacaaaaggtatggtgattctgcgcgataaaatccgcttctacgaggggcagaaactgcttgactcgttggccgagacatgggatttctttttctctgacgtactgccaatgttgcaggcaattttttacccagtacagggaaaggaaccgagtgtgcggcagctggccctgttacacttccggaacgcgattacactgtctgtaaagttggaagacgcgctcgctagggcccatgcaagagtgcctccagcgattgtacaaatgcttcttgttctgcaaggggttcacgagagtaggggcgtgactgaagactatctgcgtctagagacactcgtgcaaaaggtggttagcccatatctgggcacatatgggctccacagcagcgagggcccattcacccattcttgcatcctggagaaaagactgttaaggagaagtagatcgggggacgtcctagctaagaacccagttgtgagaagtaagagctataacaccccgctgctcaatcccgtacaggaacacgaggctgaaggcgctgctgcaggcggaaccagcattaggaggcactcagtttccgagatgacctcatgtccagagccccagggcttctctgacccacctgggcagggtcctacaggcacctttcgctcatcacctgcgccacacagcggaccttgtcctagtcggttatatccaacaactcagccacccgaacagggtctggatcccacacggtcttccctaccgaggtcctctccagagaatctagtggatcagatacttgaatccgttgactccgattctgagggaatcttcatcgactttggtagaggcagaggctccggtatgagcgatctggaaggctctggaggcagacagtccgtggtgtag

SEQ ID NO: 26580 - DNA, 804 bp, Artificial Sequence
  derived and/or modified sequence
atgtccagcccatccctctccgatttgggcaaacgcgagccagcagccgctgctgacgaacgcggtacccagcagagacgggcatgcgcaaacgcaacatggaacagcatccataacggtgttatcgcggtgtttcagcgaaaaggcctgcctgatcaggaactttttagccttaacgagggtgtgcgccagctcctcaaaacagaactcggttccttctttacagaataccttcaaaatcagctgctaactaagggtatggtaatactgagggacaagataaggttctacgagggacagaagctactcgactctctcgccgaaacttgggactttttttttagcgacgtcctgcctatgttgcaggctatcttttatcctgtgcagggcaaggaaccttctgttaggcagctagccctgcttcactttcgaaatgccatcacactgagcgtgaaactggaggacgccctggcaagagcccatgctagggtgcctcctgctatcgtgcagatgctcctggtactccagggcgtgcatgaatctagaggtgtgacggaagactacctcagactggagaccctggtgcagaaggtggtgtctccatacctcggcacatacggactccattcttcggaggggccattcacccattcttgcatccttgaaaaacggctgctcaggagatctcgtagtggggatgtactggctaagaatcccgtcgtcaggtcgaagtcgtacaacactcccttgctgaaccccgtccaagagcacgaagcggagggagcggctgcgggaggaacctag

SEQ ID NO: 26581 - DNA, 681 bp, Artificial Sequence
  derived and/or modified sequence
atgtcctcccccagtctctcggaccttgggaagagggaacccgcagccgcagccgacgaacgaggcacccaacagcggcgtgcctgcgctaacgcaacatggaatagcatccataacggagtgattgccgtgtttcagcgcaaaggcttgccggatcaggagcttttctcactgaatgagggagtgcggcagctgctcaagactgaactgggctcgttcttcacggaatacctgcagaaccaactcctcacgaagggtatggttattctccgcgataaaattcgattttatgaggggcaaaaattgctcgactctctggccgagacgtgggatttctttttttctgatgtgctgcccatgctgcaggccatattctaccccgtccaggggaaggagcccagcgtccgtcagctagctctgctgcatttcagaaacgcaattacacttagtgtgaaactcgaggacgccctcgcccgagctcatgccagagtcccgcctgctatagtgcaaatgcttctcgtgctgcaaggtgtgcacgagtctcggggtgtcacagaagattatctgcgcctcgagactttggtgcagaaagtagtgagtccctacttggggacttacggacttcatagttccgaaggcccatttactcatagctgcattctcgaaaagagattactgtag

SEQ ID NO: 26582 - DNA, 1140 bp, Artificial Sequence
  derived and/or modified sequence
atgtctagcccgtccctctcggatctcggaaagcgggagccggctgccgcagcagatgaaaggggaacacaacagcgccgggcttgtgcaaatgcaacctggaacagtattcataatggcgtgatagccgtctttcagcgcaaggggctacctgatcaagagcttttcagcctcaacgagggcgttaggcagctcttaaaaacggagctaggtagcttttttaccgagtaccttcagaatcaactgctgaccaagggcatggtaatactgcgggacaaaattaggttttatgagggacaaaaattgctcgatagcctcgcagagacctgggattttttcttctccgacgtgctgcccatgctccaggcaatcttttacccagtgcagggcaaggagccctcagttagacagcttgctctcttgcatttccgcaacgcaattaccctttctgtgaaactcgaagatgctttggcccgcgcccatgccagggtcccacccgccatcgttcagatgcttctcgtcctgcaaggcgtgcacgagtcccgaggtgtgacagaagactatctgcgcctcgagacactggtgcaaaaagtcgttagcccctatctaggcacctatggactgcattcctcagagggcccctttacacattcttgcattctggaaaaacgactgcttcgaagaagccggagcggcgatgtgctggcaaagaatcccgtcgtgagatccaagtcttataacacgcctctcctcaatcctgtccaagaacacgaagcagaaggcgccgcagctgggggcactagcattcgacgtcacagcgtctccgaaatgacttcctgccccgagcctcagggtttttcagatccaccaggtcagggccctacagggacttttcgctcttcaccggccccccattctggaccatgccctagcaggttatatcctactacacaaccacctgagcagggactggatccaacaagatcgtcattaccccggagttcaccagagaatctcgtagaccagattttagaaagcgtcgatagtgattctgagggtattttcattgactttgggagaggacgcggttctggcatgtcagaccttgaagggagcggcggtagacagagtgttgtgtag

SEQ ID NO: 26583 - DNA, 1140 bp, Artificial Sequence
  derived and/or modified sequence
atgagtagccccagcctgtccgacttgggaaagagagaaccagctgcggctgccgatgagagggggactcagcaaaggcgtgcctgtgccaacgctacctggaactcgatacataatggcgtcattgcagtctttcagagaaagggcttaccagaccaggagttattttccttaaacgagggagtccgccagcttctgaagactgaacttggctcatttttcaccgaataccttcagaaccaattattgaccaaaggtatggtaattctgagagacaagatccggttttacgagggacagaagctgcttgattctctggctgaaacttgggatttttttttctctgacgttctacccatgctgcaggccatcttttatccagtccaggggaaggagccctccgtacggcagcttgcactgctccacttccgcaacgctatcaccttatccgtaaagttagaggatgcccttgcacgggcccacgcacgagtacctcccgcaattgtgcaaatgttactggttctgcagggggttcacgagagcagaggtgtaactgaagactatttacgtctggagactctagtgcaaaaggtggtaagcccgtatctaggaacctacggcctccatagctccgaaggcccattcacccattcttgcatacttgaaaagagattgttacggagatcgcgctcaggcgacgttctggctaagaatccagtggtgcgtagcaagagttataatactcccttgttaaatccagtccaagaacatgaggccgagggagcagccgcaggaggtacttcgatcaggcgccactccgtgtcagagatgacaagctgccctgaaccccaagggttttccgatccgccaggccagggccccacagggacatttaggtcttcaccggccccccattctggaccatgccctagcaggttatatcctactacacaaccacctgagcagggactggatccaacaagatcgtcattaccccggagttcaccagagaatctcgtagaccagattttagaaagcgtcgatagtgattctgagggtattttcattgactttgggagaggacgcggttctggcatgtcagaccttgaagggagcggcggtagacagagtgttgtgtag

SEQ ID NO: 26584 - RNA, 1140 nt, Artificial Sequence
  derived and/or modified sequence
augucuagcccgucccucucggaucucggaaagcgggagccggcugccgcagcagaugaaaggggaacacaacagcgccgggcuugugcaaaugcaaccuggaacaguauucauaauggcgugauagccgucuuucagcgcaaggggcuaccugaucaagagcuuuucagccucaacgagggcguuaggcagcucuuaaaaacggagcuagguagcuuuuuuaccgaguaccuucagaaucaacugcugaccaagggcaugguaauacugcgggacaaaauuagguuuuaugagggacaaaaauugcucgauagccucgcagagaccugggauuuuuucuucuccgacgugcugcccaugcuccaggcaaucuuuuacccagugcagggcaaggagcccucaguuagacagcuugcucucuugcauuuccgcaacgcaauuacccuuucugugaaacucgaagaugcuuuggcccgcgcccaugccagggucccacccgccaucguucagaugcuucucguccugcaaggcgugcacgagucccgaggugugacagaagacuaucugcgccucgagacacuggugcaaaaagucguuagccccuaucuaggcaccuauggacugcauuccucagagggccccuuuacacauucuugcauucuggaaaaacgacugcuucgaagaagccggagcggcgaugugcuggcaaagaaucccgucgugagauccaagucuuauaacacgccucuccucaauccuguccaagaacacgaagcagaaggcgccgcagcugggggcacuagcauucgacgucacagcgucuccgaaaugacuuccugccccgagccucaggguuuuucagauccaccaggucagggcccuacagggacuuuucgcucuucaccggccccccauucuggaccaugcccuagcagguuauauccuacuacacaaccaccugagcagggacuggauccaacaagaucgucauuaccccggaguucaccagagaaucucguagaccagauuuuagaaagcgucgauagugauucugaggguauuuucauugacuuugggagaggacgcgguucuggcaugucagaccuugaagggagcggcgguagacagaguguuguguag

SEQ ID NO: 26585 - RNA, 1140 nt, Artificial Sequence
  derived and/or modified sequence
augaguagccccagccuguccgacuugggaaagagagaaccagcugcggcugccgaugagagggggacucagcaaaggcgugccugugccaacgcuaccuggaacucgauacauaauggcgucauugcagucuuucagagaaagggcuuaccagaccaggaguuauuuuccuuaaacgagggaguccgccagcuucugaagacugaacuuggcucauuuuucaccgaauaccuucagaaccaauuauugaccaaagguaugguaauucugagagacaagauccgguuuuacgagggacagaagcugcuugauucucuggcugaaacuugggauuuuuuuuucucugacguucuacccaugcugcaggccaucuuuuauccaguccaggggaaggagcccuccguacggcagcuugcacugcuccacuuccgcaacgcuaucaccuuauccguaaaguuagaggaugcccuugcacgggcccacgcacgaguaccucccgcaauugugcaaauguuacugguucugcaggggguucacgagagcagagguguaacugaagacuauuuacgucuggagacucuagugcaaaaggugguaagcccguaucuaggaaccuacggccuccauagcuccgaaggcccauucacccauucuugcauacuugaaaagagauuguuacggagaucgcgcucaggcgacguucuggcuaagaauccaguggugcguagcaagaguuauaauacucccuuguuaaauccaguccaagaacaugaggccgagggagcagccgcaggagguacuucgaucaggcgccacuccgugucagagaugacaagcugcccugaaccccaaggguuuuccgauccgccaggccagggccccacagggacauuuaggucuucaccggccccccauucuggaccaugcccuagcagguuauauccuacuacacaaccaccugagcagggacuggauccaacaagaucgucauuaccccggaguucaccagagaaucucguagaccagauuuuagaaagcgucgauagugauucugaggguauuuucauugacuuugggagaggacgcgguucuggcaugucagaccuugaagggagcggcgguagacagaguguuguguag

SEQ ID NO: 26586 - protein, 197 aa, Artificial Sequence
  derived and/or modified sequence
MADKVLKEKRKLFIHSMGEGTINGLLDELLQTRVLNQEEMEKVKRENATVMDKTRALIDSVIPKGAQACQICITYICEEDSYLAETLGLSAALQAVQDNPAMPTCSSPEGRIKLCFLEDAQRIWKQKLQRCHVQNTIIKWSERYTSGSFEMQWLFLRTNFIERFWRNILLLPLHKGSLYPRIPGLGKELQTGTHKLS

SEQ ID NO: 26587 - DNA, 594 bp, Artificial Sequence
  derived and/or modified sequence
atggccgacaaggtgctgaaggagaagagaaagctgttcatccacagcatgggcgagggcaccatcaacggcctgctggacgagctgctgcagaccagagtgctgaaccaggaggagatggagaaggtgaagagagagaacgccaccgtgatggacaagaccagagccctgatcgacagcgtgatccccaagggcgcccaggcctgccagatctgcatcacctacatctgcgaggaggacagctacctggccgagaccctgggcctgagcgccgccctgcaggccgtgcaggacaaccccgccatgcccacctgcagcagccccgagggcagaatcaagctgtgcttcctggaggacgcccagagaatctggaagcagaagctgcagagatgccacgtgcagaacaccatcatcaagtggagcgagagatacaccagcggcagcttcgagatgcagtggctgttcctgagaaccaacttcatcgagagattctggagaaacatcctgctgctgcccctgcacaagggcagcctgtaccccagaatccccggcctgggcaaggagctgcagaccggcacccacaagctgagctag

SEQ ID NO: 26588 - DNA, 594 bp, Artificial Sequence
  derived and/or modified sequence
atggctgataaggtactgaaggagaagaggaagctgtttattcactcaatgggcgagggtacaatcaacgggctgctggatgaactactccaaaccagggtgctcaaccaggaagagatggagaaggtgaagagagagaacgcgaccgttatggacaagacaagggctcttatagatagcgtcatcccaaagggcgcacaggcatgccagatttgcatcacctacatatgcgaggaggatagctatttagcggagaccctggggctgagcgccgccctgcaggccgtccaggataatcctgcgatgcccacatgcagtagccccgaaggtcgtataaagctgtgcttccttgaggacgcccaaaggatatggaaacagaaactgcagaggtgtcatgtacagaatacaatcatcaagtggtctgagaggtacacctctgggagtttcgaaatgcaatggctcttcctcaggactaattttatcgagcggttctggaggaacatcttgctgctgcccctgcataagggttcattatatcctcggatcccaggacttggaaaagaactgcagacaggaacccacaagttatcgtag

SEQ ID NO: 26589 - DNA, 594 bp, Artificial Sequence
  derived and/or modified sequence
atggctgacaaggtgctgaaggagaagaggaagctgttcatccacagcatgggagagggcaccatcaatggcctgctggatgagctgctgcagaccagggtgctgaaccaggaggagatggagaaggtgaagcgggagaatgccaccgtgatggacaagacccgggccctgattgacagcgtcatccccaagggggcccaggcctgccagatctgcatcacctacatctgtgaagaagattcctacctggccgagaccctgggcctgtctgctgccctgcaggccgtgcaggacaacccagccatgcccacctgcagcagccctgagggccgcatcaagctgtgcttcctggaggatgcccagaggatctggaagcagaagctgcagcgctgccacgtgcagaacaccatcatcaagtggagcgagcgctacaccagcggcagctttgagatgcagtggctgttcctgcggaccaacttcatcgagcgcttctggaggaacatcctgctgctgcccctgcacaagggcagcctgtacccccgcatccctggcctgggcaaggagctgcagacaggcacccacaagctgtcctag

SEQ ID NO: 26590 - DNA, 594 bp, Artificial Sequence
  derived and/or modified sequence
atggccgacaaggtgctgaaggagaagcggaagctgttcatccactctatgggagaaggaaccataaacgggcttctggatgagctgctgcaaaccagagtgctgaatcaggaggagatggaaaaagtgaagcgcgaaaatgcaaccgtgatggataaaactagagccctgattgactctgtgatacccaagggagcccaggcctgccaaatttgtattacgtacatatgtgaagaagactcttacttagccgagacccttggcctgagtgctgcactgcaggctgtgcaggataacccagccatgcccacctgcagcagtcccgaaggtagaatcaaactatgcttcctggaggacgctcagcggatctggaaacaaaaacttcagcggtgtcatgtgcagaacactatcattaaatggagcgagaggtatacttcaggttccttcgagatgcagtggctcttcctgcggactaactttattgagagattctggcgtaacatcctcctgttgcccctccataaaggttccttataccctagaattcccggcttaggcaaagagttacaaaccgggacgcataaactgtcttag

SEQ ID NO: 26591 - DNA, 594 bp, Artificial Sequence
  derived and/or modified sequence
atggccgacaaggttctgaaagagaaaagaaagctgttcatccattctatgggcgagggcacgattaacggtttgctcgatgagcttctccagacccgagtgctgaaccaggaggaaatggaaaaggtgaagagggaaaacgccactgttatggacaagactcgcgcactgattgatagcgttattcccaaaggcgctcaagcgtgccagatttgcattacctatatttgtgaggaggactcatatttggcagaaaccctcggactttccgccgcactgcaggccgtccaggataatccagcaatgccaacctgtagtagtcccgaaggtcgcatcaaattgtgcttcttagaagatgctcaacgaatttggaagcagaaactacagcggtgccacgtgcagaacacaatcatcaagtggtcagagagatacacctccggaagcttcgagatgcagtggctcttcttgcggacaaactttattgagaggttttggcgtaacattctgctgctgccactccataagggctctctctaccccagaatcccgggtctcggcaaagagcttcaaaccgggactcacaagctgagttag

SEQ ID NO: 26592 - DNA, 613 bp, Artificial Sequence
  derived and/or modified sequence
gtgtacacgccctgccaaaaaggaaggcgaaacatactttcagtttcagcccacacaagaagggtaggagagaaaagccatggccgacaaggtcctgaaggagaagagaaagctgtttatccattccatgggtgaaggtacaataaatggcttactggatgaattattacagacaagggtgctgaaccaggaagagatggagaaagtaaaacgtgaaaatgctacagttatggataagacccgagctttgattgactccgttattccgaaaggggcacaggcatgccaaatttgcatcacatacatttgtgaagaagacagttacctggcagagacgctgggactctcagcaggtccgatacctggaaattagcttagtacacaagactcccaattactattttcttccttcccagctcttcaggcagtgcaggacaacccagctatgcccacatgctcaagcccagaaggcagaatcaagctttgctttctagaagacgctcaaaggatatggaaacaaaagttgcagaggtgccatgttcagaatacaataataaagtggagtgaaagatatacttcaggcagttttgaaatgcagtggctttttcttaga

SEQ ID NO: 26593 - DNA, 686 bp, Artificial Sequence
  derived and/or modified sequence
gggtaggagagaaaagccatggccgacaaggtcctgaaggagaagagaaagctgtttatccattccatgggtgaaggtacaataaatggcttactggatgaattattacagacaagggtgctgaaccaggaagagatggagaaagtaaaacgtgaaaatgctacagttatggataagacccgagctttgattgactccgttattccgaaaggggcacaggcatgccaaatttgcatcacatacatttgtgaagaagacagttacctggcagagacgctgggactctcagcagctcttcaggcagtgcaggacaacccagctatgcccacatgctcaagcccagaaggcagaatcaagctttgctttctagaagacgctcaaaggatatggaaacaaaagttgcagaggtgccatgttcagaatacaataataaagtggagtgaaagatatacttcaggcagttttgaaatgcagtggctttttcttagaaccaattttattgagcggttctggaggaacatacttctgctccccttgcataaaggatctctatatcctagaatcccaggtttaggtaaagagttgcaaactggaactcataaattatcatagtcttcacccagtctgtctcttagaatttatttcccactgacacaaacaagccattttgtctgcttgtataaccc

SEQ ID NO: 26594 - DNA, 503 bp, Artificial Sequence
  derived and/or modified sequence
gggaggagagaaaagccatggccgacaaggtcctgaaggagaagagaaagctgtttatccattccatgggtgaaggtacaataaatggcttactggatgaattattacagacaagggtgctgaaccaggaagagatggagaaagtaaaacgtgaaaatgctacagttatggataagacccgagctttgattgactccgttattccgaaaggggcacaggcatgccaaatttgcatcacatacatttgtgaagaagacagttacctggcagagacgctgggactctcagcaggtccgatacctggaaattagcttagtacacaagactcccaattactattttcttccttcccagctcttcaggcagtgcaggacaacccagctatgcccacatgctcaagcccagaaggcagaatcaagctttgctttctagaagacgctcaaaggatatggaaacaaaagttgcagaggtgccatgttcagaatacaataataaagtggagt

SEQ ID NO: 26595 - protein, 427 aa, Artificial Sequence
  derived and/or modified sequence
MEAMAASTSLPDPGDFDRNVPRICGVCGDRATGFHFNAMTCEGCKGFFRRSMKRKALFTCPFNGDCRITKDNRRHCQACRLKRCVDIGMMKEFILTDEEVQRKREMILKRKEEEALKDSLRPKLSEEQQRIIAILLDAHHKTYDPTYSDFCQFRPPVRVNDGGGSHPSRPNSRHTPSFSGDSSSSCSDHCITSSDMMDSSSFSNLDLSEEDSDDPSVTLELSQLSMLPHLADLVSYSIQKVIGFAKMIPGFRDLTSEDQIVLLKSSAIEVIMLRSNESFTMDDMSWTCGNQDYKYRVSDVTKAGHSLELIEPLIKFQVGLKKLNLHEEEHVLLMAICIVSPDRPGVQDAALIEAIQDRLSNTLQTYIRCRHPPPGSHLLYAKMIQKLADLRSLNEEHSKQYRCLSFQPECSMKLTPLVLEVFGNEIS

SEQ ID NO: 26596 - protein, 250 aa, Artificial Sequence
  derived and/or modified sequence
MEAMAASTSLPDPGDFDRNVPRICGVCGDRATGFHFNAMTCEGCKGFFRRSMKRKALFTCPFNGDCRITKDNRRHCQACRLKRCVDIGMMKEFILTDEEVQRKREMILKRKEEEALKDSLRPKLSEEQQRIIAILLDAHHKTYDPTYSDFCQFRPPVRVNDGGGSHPSRPNSRHTPSFSGDSSSSCSDHCITSSDMMDSSSFSNLDLSEEDSDDPSVTLELSQLSMLPHLADLVSYSIQKVIGFAKMIPG

SEQ ID NO: 26597 - protein, 101 aa, Artificial Sequence
  derived and/or modified sequence
MEAMAASTSLPDPGDFDRNVPRICGVCGDRATGFHFNAMTCEGCKGFFRRSMKRKALFTCPFNGDCRITKDNRRHCQACRLKRCVDIGMMKEFILTDEEVQ

SEQ ID NO: 26598 - protein, 106 aa, Artificial Sequence
  derived and/or modified sequence
MEAMAASTSLPDPGDFDRNVPRICGVCGDRATGFHFNAMTCEGCKGFFRRSMKRKALFTCPFNGDCRITKDNRRHCQACRLKRCVDIGMMKEFILTDEEVQRKREM

SEQ ID NO: 26599 - protein, 477 aa, Artificial Sequence
  derived and/or modified sequence
MEWRNKKRSDWLSMVLRTAGVEEAFGSEVSVRPHRRAPLGSTYLPPAPSGMEAMAASTSLPDPGDFDRNVPRICGVCGDRATGFHFNAMTCEGCKGFFRRSMKRKALFTCPFNGDCRITKDNRRHCQACRLKRCVDIGMMKEFILTDEEVQRKREMILKRKEEEALKDSLRPKLSEEQQRIIAILLDAHHKTYDPTYSDFCQFRPPVRVNDGGGSHPSRPNSRHTPSFSGDSSSSCSDHCITSSDMMDSSSFSNLDLSEEDSDDPSVTLELSQLSMLPHLADLVSYSIQKVIGFAKMIPGFRDLTSEDQIVLLKSSAIEVIMLRSNESFTMDDMSWTCGNQDYKYRVSDVTKAGHSLELIEPLIKFQVGLKKLNLHEEEHVLLMAICIVSPDRPGVQDAALIEAIQDRLSNTLQTYIRCRHPPPGSHLLYAKMIQKLADLRSLNEEHSKQYRCLSFQPECSMKLTPLVLEVFGNEIS

SEQ ID NO: 26600 - DNA, 4669 bp, Artificial Sequence
  derived and/or modified sequence
ctgcttgtcaaaaggcggcagcggagccgtgtgcgccgggagcgcggaacagcttgtccacccgccggccggaccagaagcctttgggtctgaagtgtctgtgagacctcacagaagagcacccctgggctccacttacctgccccctgctccttcagggatggaggcaatggcggccagcacttccctgcctgaccctggagactttgaccggaacgtgccccggatctgtggggtgtgtggagaccgagccactggctttcacttcaatgctatgacctgtgaaggctgcaaaggcttcttcaggcgaagcatgaagcggaaggcactattcacctgccccttcaacggggactgccgcatcaccaaggacaaccgacgccactgccaggcctgccggctcaaacgctgtgtggacatcggcatgatgaaggagttcattctgacagatgaggaagtgcagaggaagcgggagatgatcctgaagcggaaggaggaggaggccttgaaggacagtctgcggcccaagctgtctgaggagcagcagcgcatcattgccatactgctggacgcccaccataagacctacgaccccacctactccgacttctgccagttccggcctccagttcgtgtgaatgatggtggagggagccatccttccaggcccaactccagacacactcccagcttctctggggactcctcctcctcctgctcagatcactgtatcacctcttcagacatgatggactcgtccagcttctccaatctggatctgagtgaagaagattcagatgacccttctgtgaccctagagctgtcccagctctccatgctgccccacctggctgacctggtcagttacagcatccaaaaggtcattggctttgctaagatgataccaggattcagagacctcacctctgaggaccagatcgtactgctgaagtcaagtgccattgaggtcatcatgttgcgctccaatgagtccttcaccatggacgacatgtcctggacctgtggcaaccaagactacaagtaccgcgtcagtgacgtgaccaaagccggacacagcctggagctgattgagcccctcatcaagttccaggtgggactgaagaagctgaacttgcatgaggaggagcatgtcctgctcatggccatctgcatcgtctccccagatcgtcctggggtgcaggacgccgcgctgattgaggccatccaggaccgcctgtccaacacactgcagacgtacatccgctgccgccacccgcccccgggcagccacctgctctatgccaagatgatccagaagctagccgacctgcgcagcctcaatgaggagcactccaagcagtaccgctgcctctccttccagcctgagtgcagcatgaagctaacgccccttgtgctcgaagtgtttggcaatgagatctcctgactaggacagcctgtggcggtgcctgggtggggctgctcctccagggccacgtgccaggcccggggctggcggctactcagcagccctcctcaccccgtctggggttcagcccctcctctgccacctcccctatccacccagcccattctctctcctgtccaacctaacccctttcctgcgggcttttccccggtcccttgagacctcagccatgaggagttgctgtttgtttgacaaagaaacccaagtgggggcagagggcagaggctggaggcagggccttgcccagagatgcctccaccgctgcctaagtggctgctgactgatgttgagggaacagacaggagaaatgcatccattcctcagggacagagacacctgcacctccccccactgcaggccccgcttgtccagcgcctagtggggtctccctctcctgcctactcacgataaataatcggcccacagctcccaccccacccccttcagtgcccaccaacatcccattgccctggttatattctcacgggcagtagctgtggtgaggtgggttttcttcccatcactggagcaccaggcacgaacccacctgctgagagacccaaggaggaaaaacagacaaaaacagcctcacagaagaatatgacagctgtccctgtcaccaagctcacagttcctcgccctgggtctaaggggttggttgaggtggaagccctccttccacggatccatgtagcaggactgaattgtccccagtttgcagaaaagcacctgccgacctcgtcctccccctgccagtgccttacctcctgcccaggagagccagccctccctgtcctcctcggatcaccgagagtagccgagagcctgctcccccaccccctccccaggggagagggtctggagaagcagtgagccgcatcttctccatctggcagggtgggatggaggagaagaattttcagaccccagcggctgagtcatgatctccctgccgcctcaatgtggttgcaaggccgctgttcacccacagggctaagagctagcgctgccgcaccccagagtgtgggaagggagagcggggcagtctcgggtggctagtcagagagagtgtttgggggttccgtgatgtagggtaaggtgccttcttattctcactccaccacccaaaagtcaaaaggtgcctgtgaggcaggggcggagtgatacaacttcaagtgcatgctctctgcagccagcccagcccagctggtgggaagcgtctgtccgtttactccaaggtggggtctttgtgagagtgagctgtaggtgtgcgggaccggtacagaaaggcgttcttcgaggtggatcacagaggcttcttcagatcagtgcttgagtttggggaatgcggccgcattccctgagtcaccaggaatgttaaagtcagtgggaacgtgactgccccaactcctggaagctgtgtccttgcacctgcatccgtagttccctgaaaacccagagaggaatcagacttcacactgcaagagccttggtgtccacctggccccatgtctctcagaattcttcaggtggaaaaacatctgaaagccacgttccttactgcagaatagcatatatatcgcttaatcttaaatttattagatatgagttgttttcagactcagactccatttgtattatagtctaatatacagggtagcaggtaccactgatttggagatatttatggggggagaacttacattgtgaaacttctgtacattaattattattgctgttgttattttacaagggtctagggagagacccttgtttgattttagctgcagaacgtattggtccagcttgctcttcagtgggagaaaacacttgtaagttgctaaacgagtcaatcccctcattcaggaaaactgacagaggagggcgtgactcacccaagcatatataactagctagaagtgggccaggacaggcccggcgcggtggctcacgcctgtaatcccagcagtttgggaggtcgaggtaggtggatcacctgaggtcgggagttcgagaccaacctgaccaacatggagaaaccctgtctctattaaaaatacaaaaaaaaaaaaaaaaaaaatagccgggcatggtggcgcaagcctgtaatcccagctactcaggaggctgaggcagaagaattgaacccaggaggtggaggttgcagtgagctgagatcgtgccgttactctccaacctggacaacaagagcgaaactccgtcttagaagtggaccaggacaggaccagattttggagtcatggtccggtgtccttttcactacaccatgtttgagctcagacccccactctcattccccaggtggctgacccagtccctgggggaagccctggatttcagaaagagcaagtctggatctgggaccctttccttccttccctggcttgtaactccaccaacccatcagaaggagaaggaaggagactcacctctgcctcaatgtgaatcagaccctaccccaccacgatgtggccctggcctgctgggctctccacctcagccttggataatgctgttgcctcatctataacatgcatttgtctttgtaatgtcaccaccttcccagctctccctctggccctgccttcttcggggaactcctggaaatatcagttactcagccctgggccccaccacctaggccactcctccaaaggaagtctaggagctgggaggaaaagaaaagaggggaaaatgagtttttatggggctgaacggggagaaaaggtcatcatcgattctactttagaatgagagtgtgaaatagacatttgtaaatgtaaaacttttaaggtatatcattataactgaaggagaaggtgccccaaaatgcaagattttccacaagattcccagagacaggaaaatcctctggctggctaactggaagcatgtaggagaatccaagcgaggtcaacagagaaggcaggaatgtgtggcagatttagtgaaagctagagatatggcagcgaaaggatgtaaacagtgcctgctgaatgatttccaaagagaaaaaaagtttgccagaagtttgtcaagtcaaccaatgtagaaagctttgcttatggtaataaaaatggctcatacttatatagcacttactttgttgcaagtactgctgtaaataaatgctttatgcaaaccaaaaaaaaaaaaaaaaaa

SEQ ID NO: 26601 - DNA, 1434 bp, Artificial Sequence
  derived and/or modified sequence
atggagtggagaaacaagaagagaagcgactggctgagcatggtgctgagaaccgccggcgtggaggaggccttcggcagcgaggtgagcgtgagaccccacagaagagcccccctgggcagcacctacctgccccccgcccccagcggcatggaggccatggccgccagcaccagcctgcccgaccccggcgacttcgacagaaacgtgcccagaatctgcggcgtgtgcggcgacagagccaccggcttccacttcaacgccatgacctgcgagggctgcaagggcttcttcagaagaagcatgaagagaaaggccctgttcacctgccccttcaacggcgactgcagaatcaccaaggacaacagaagacactgccaggcctgcagactgaagagatgcgtggacatcggcatgatgaaggagttcatcctgaccgacgaggaggtgcagagaaagagagagatgatcctgaagagaaaggaggaggaggccctgaaggacagcctgagacccaagctgagcgaggagcagcagagaatcatcgccatcctgctggacgcccaccacaagacctacgaccccacctacagcgacttctgccagttcagaccccccgtgagagtgaacgacggcggcggcagccaccccagcagacccaacagcagacacacccccagcttcagcggcgacagcagcagcagctgcagcgaccactgcatcaccagcagcgacatgatggacagcagcagcttcagcaacctggacctgagcgaggaggacagcgacgaccccagcgtgaccctggagctgagccagctgagcatgctgccccacctggccgacctggtgagctacagcatccagaaggtgatcggcttcgccaagatgatccccggcttcagagacctgaccagcgaggaccagatcgtgctgctgaagagcagcgccatcgaggtgatcatgctgagaagcaacgagagcttcaccatggacgacatgagctggacctgcggcaaccaggactacaagtacagagtgagcgacgtgaccaaggccggccacagcctggagctgatcgagcccctgatcaagttccaggtgggcctgaagaagctgaacctgcacgaggaggagcacgtgctgctgatggccatctgcatcgtgagccccgacagacccggcgtgcaggacgccgccctgatcgaggccatccaggacagactgagcaacaccctgcagacctacatcagatgcagacaccccccccccggcagccacctgctgtacgccaagatgatccagaagctggccgacctgagaagcctgaacgaggagcacagcaagcagtacagatgcctgagcttccagcccgagtgcagcatgaagctgacccccctggtgctggaggtgttcggcaacgagatcagctag

SEQ ID NO: 26602 - DNA, 1434 bp, Artificial Sequence
  derived and/or modified sequence
atggaatggaggaacaagaagcgtagcgattggctaagcatggtgctaagaacggcaggcgtggaggaggccttcgggagcgaagtgtccgttaggccacatcgtagagccccattggggagtacatacctccctcctgccccgagcgggatggaggcaatggccgccagcacatctctccccgaccccggggactttgaccggaacgtgcctcgcatttgcggggtgtgcggcgacagagcaaccgggttccacttcaatgccatgacctgcgaggggtgcaaaggtttcttccggagatccatgaaacgaaaggcgttgttcacctgccccttcaacggagactgtaggataacgaaagacaacagacgccattgccaggcatgccggctcaagcgctgtgtggacattggaatgatgaaggagtttatcctgactgacgaggaggtccagcggaagcgggagatgattctgaaacggaaagaggaggaagcacttaaagatagcttacgccccaagctgagtgaagagcagcagaggatcatcgccatcctgttggacgctcaccacaagacctatgaccccacatattcagatttctgccaattcaggcctcctgtccgggtcaacgatggcgggggatcccatccctcccgccctaatagccggcacactccttcattctcaggcgacagcagcagttcctgctcagaccactgtattacctcctctgatatgatggactcgtcatccttctcaaacttggatcttagtgaagaagattccgatgatccatcagttactttagagttgtcccagttgtctatgctaccgcacttggccgacctggtgtcctactccattcaaaaagtgattggcttcgccaagatgattcccggcttccgggacctgacgagcgaggatcagatcgtactgctaaagtcatcagctattgaagtgatcatgctgaggagcaacgaaagtttcacaatggatgacatgtcttggacatgtggaaatcaggattacaaatatcgcgtgtcagacgtaaccaaagctgggcattctctagaactgatcgagcccctgatcaagttccaagtgggattgaaaaagctgaacctgcacgaggaagaacatgtactgttgatggccatttgtatcgtcagtcccgatcggcctggagtgcaggatgctgccctgattgaagcaattcaggaccggctgtcaaataccctgcaaacctacattcgctgtcgacaccctccacccggaagtcacctgctctacgcgaagatgatccagaagctggccgatctccggtccctgaatgaagagcatagcaaacagtaccgatgtctgagcttccagcctgagtgtagcatgaagctgacacctttggttctggaggtatttggcaatgaaatcagctag

SEQ ID NO: 26603 - DNA, 1434 bp, Artificial Sequence
  derived and/or modified sequence
atggagtggaggaacaagaagagaagtgactggctgtccatggtgctgaggacagctggggtggaggaggcctttggaagtgaggtgtctgtgcggccccacagaagagcccccctgggcagcacctacctgcccccagcccccagcggcatggaggccatggccgccagcaccagcctgcctgaccccggggactttgacagaaatgtgccccgcatctgtggggtgtgtggggaccgggccaccggcttccacttcaatgccatgacctgtgagggctgcaagggcttcttcagaagatccatgaagaggaaggccctcttcacctgccccttcaatggagactgccgcatcaccaaggacaacagaagacactgccaggcctgccgcctgaagagatgtgtggacatcggcatgatgaaggagttcatcctgacagatgaggaggtgcagaggaagcgggagatgatcctgaagaggaaggaggaggaggccctgaaggacagcctgcggcccaagctgtctgaggagcagcagaggatcatcgccatcctgctggatgcccaccacaagacctatgaccccacctacagcgacttctgccagttccggccccctgtgcgggtgaatgatggcggcggcagccaccccagccggcccaacagccgccacacccccagcttcagcggggacagcagcagcagctgcagcgaccactgcatcaccagcagtgacatgatggacagcagcagcttcagcaacctggacctgtctgaggaggacagtgatgaccccagcgtgaccctggagctgagccagctgtccatgctgccccacctggccgacctggtgtcctacagcatccagaaggtgattggatttgccaagatgatccctggcttccgggacctgaccagcgaggaccagatcgtgctgctgaagagcagcgccatcgaggtgatcatgctgcggagcaatgaaagcttcaccatggatgacatgtcctggacctgtggcaaccaggactacaagtacagagtgtctgatgtgaccaaggccggccacagcctggagctgattgagcccctcatcaagttccaggtgggcctgaagaagctgaacctgcacgaggaggagcacgtgctgctgatggccatctgcatcgtgtccccagacaggcctggggtgcaggatgctgccctgattgaggccatccaggaccggctgagcaacaccctgcagacctacatccgctgccgccaccccccacctggcagccacctgctgtatgccaagatgatccagaagctggccgacctgcggagcctgaatgaggagcacagcaagcagtaccgctgcctgtccttccagccagaatgttccatgaagctgacccccctggtgctggaggtgtttggaaatgagatctcctag

SEQ ID NO: 26604 - DNA, 1434 bp, Artificial Sequence
  derived and/or modified sequence
atggagtggcggaacaagaagcggagcgactggctgagcatggtgctacgaaccgctggcgtcgaggaagccttcggtagcgaggtgtctgtccgtcctcatcgaagagcgccactaggatctacttacctgccgccggccccgagcggaatggaagctatggccgcatccacaagtctgcccgaccccggagatttcgacagaaacgtgccccgcatctgtggggtgtgcggagatagagctactggattccattttaatgccatgacatgtgagggctgtaagggtttcttccggcggtctatgaagagaaaagccctgtttacctgcccattcaatggagactgccggatcaccaaagataaccgcagacattgtcaggcttgccggttgaagaggtgtgtggacatcggcatgatgaaagagtttatcttgacagacgaggaggtgcagagaaagcgggaaatgatcctcaagagaaaagaggaggaggctttaaaggacagtctgagacctaagttgagcgaggagcagcagcggattatcgcaatactgctggacgcccaccacaagacttatgatcccacatatagcgatttctgccagttccggcccccggtgcgagtgaacgatgggggcggatctcaccccagcagacccaatagcagacatactcccagtttcagcggcgattctagcagcagctgctcagatcattgtataacatcctcagacatgatggacagcagttccttttctaacctggatttgagcgaagaggactccgacgaccccagcgtgacactagagctcagtcagttaagtatgctgccacatctagccgacctggtcagctatagtattcaaaaagtcattggtttcgctaagatgatccccggcttccgcgatttaacgagcgaggaccagatagttctgttgaaaagcagcgctatcgaggtgatcatgttgcggtcaaacgagagtttcacaatggacgatatgtcttggacctgcggcaaccaggattacaaatacagggtgagtgatgtgacaaaggccggccatagtcttgaactgattgagcccctgattaaatttcaagtggggctgaagaaactgaatctgcatgaagaggagcatgtgttgctgatggcaatctgtattgtgtcacctgacaggcccggggttcaggacgctgctctcatcgaggcaattcaggataggcttagtaacaccctccaaacttatatccgctgcagacatccaccaccgggctcacatctactgtatgcgaagatgattcaaaaactggccgatctgcgcagcttgaacgaagagcactccaagcaataccggtgcctgagctttcagcctgagtgctccatgaaattaacccctttggtcctcgaagtgttcggtaacgaaattagctag

SEQ ID NO: 26605 - DNA, 1434 bp, Artificial Sequence
  derived and/or modified sequence
atggagtggcgaaacaagaagcggtccgactggctgtctatggtcctgcggaccgccggtgttgaagaagctttcggatctgaggtgagtgtgaggccacacagaagggcacccttgggctccacttacctgccaccggcaccaagcggaatggaggctatggccgctagcacctctcttcccgatcccggtgatttcgatcgaaacgtgcctcggatctgcggagtgtgcggggatcgcgctacagggtttcattttaatgccatgacatgcgaggggtgcaaaggtttctttcgaaggtctatgaagcgaaaagcactgttcacgtgccccttcaatggagactgccggattaccaaagacaacaggagacactgccaggcctgtagactgaagagatgcgtggacatcggcatgatgaaggagttcatcctgacagacgaggaggttcagagaaagcgggagatgatcctgaagaggaaagaagaagaggccctgaaagattctttgcgcccaaagctttcggaagaacagcaaaggattatagccatattacttgatgcccaccacaaaacctacgaccctacctatagtgatttttgccaatttagaccacccgtgagagtgaatgacggcggtgggagtcatccctctaggccaaactccaggcacaccccctccttctcaggcgactcctcctcaagttgttctgaccattgtatcacgagtagcgatatgatggactcttcatccttcagtaatctggatctcagtgaagaggatagcgacgatccttccgtcactctggaattatctcagctctcaatgcttccccatctggcggacttggtgtcttattccattcagaaagtcattggcttcgccaaaatgattcctggcttcagagaccttaccagcgaagaccagatcgttctgcttaagtcatcagcgattgaagtgataatgctcagatctaatgagagctttactatggatgacatgtcttggacttgcggcaaccaggattataaataccgtgtgtctgatgtgactaaggcaggacattcactggagcttatagagccgctgattaaattccaggtaggtttgaagaagctcaacctacatgaggaagaacacgtgctgcttatggcaatttgcatcgtaagtccggatcgcccaggcgtacaggatgcagccctcatcgaagcgatccaggacagattgtcgaacaccttacaaacttatatacgctgcagacatccacctccgggaagccacctgttatatgccaagatgatacagaagcttgcagacctcaggtccttgaatgaagaacacagcaaacaataccgctgcctgagtttccagcccgaatgcagtatgaagttaacaccgctggtcctggaagtcttcggcaatgaaattagctag

SEQ ID NO: 26606 - DNA, 4773 bp, Artificial Sequence
  derived and/or modified sequence
ctgcttgtcaaaaggcggcagcggagccgtgtgcgccgggagcgcggaacagcttgtccacccgccggccggaccagggctcctgaacctagcccagctggacggagaaatggactctagcctcctctgatagcctcatgccaggccccgtgcacattgctttgcttgcctccctcaatcctcatagcttctctttgggaagcctttgggtctgaagtgtctgtgagacctcacagaagagcacccctgggctccacttacctgccccctgctccttcagggatggaggcaatggcggccagcacttccctgcctgaccctggagactttgaccggaacgtgccccggatctgtggggtgtgtggagaccgagccactggctttcacttcaatgctatgacctgtgaaggctgcaaaggcttcttcaggcgaagcatgaagcggaaggcactattcacctgccccttcaacggggactgccgcatcaccaaggacaaccgacgccactgccaggcctgccggctcaaacgctgtgtggacatcggcatgatgaaggagttcattctgacagatgaggaagtgcagaggaagcgggagatgatcctgaagcggaaggaggaggaggccttgaaggacagtctgcggcccaagctgtctgaggagcagcagcgcatcattgccatactgctggacgcccaccataagacctacgaccccacctactccgacttctgccagttccggcctccagttcgtgtgaatgatggtggagggagccatccttccaggcccaactccagacacactcccagcttctctggggactcctcctcctcctgctcagatcactgtatcacctcttcagacatgatggactcgtccagcttctccaatctggatctgagtgaagaagattcagatgacccttctgtgaccctagagctgtcccagctctccatgctgccccacctggctgacctggtcagttacagcatccaaaaggtcattggctttgctaagatgataccaggattcagagacctcacctctgaggaccagatcgtactgctgaagtcaagtgccattgaggtcatcatgttgcgctccaatgagtccttcaccatggacgacatgtcctggacctgtggcaaccaagactacaagtaccgcgtcagtgacgtgaccaaagccggacacagcctggagctgattgagcccctcatcaagttccaggtgggactgaagaagctgaacttgcatgaggaggagcatgtcctgctcatggccatctgcatcgtctccccagatcgtcctggggtgcaggacgccgcgctgattgaggccatccaggaccgcctgtccaacacactgcagacgtacatccgctgccgccacccgcccccgggcagccacctgctctatgccaagatgatccagaagctagccgacctgcgcagcctcaatgaggagcactccaagcagtaccgctgcctctccttccagcctgagtgcagcatgaagctaacgccccttgtgctcgaagtgtttggcaatgagatctcctgactaggacagcctgtggcggtgcctgggtggggctgctcctccagggccacgtgccaggcccggggctggcggctactcagcagccctcctcaccccgtctggggttcagcccctcctctgccacctcccctatccacccagcccattctctctcctgtccaacctaacccctttcctgcgggcttttccccggtcccttgagacctcagccatgaggagttgctgtttgtttgacaaagaaacccaagtgggggcagagggcagaggctggaggcagggccttgcccagagatgcctccaccgctgcctaagtggctgctgactgatgttgagggaacagacaggagaaatgcatccattcctcagggacagagacacctgcacctccccccactgcaggccccgcttgtccagcgcctagtggggtctccctctcctgcctactcacgataaataatcggcccacagctcccaccccacccccttcagtgcccaccaacatcccattgccctggttatattctcacgggcagtagctgtggtgaggtgggttttcttcccatcactggagcaccaggcacgaacccacctgctgagagacccaaggaggaaaaacagacaaaaacagcctcacagaagaatatgacagctgtccctgtcaccaagctcacagttcctcgccctgggtctaaggggttggttgaggtggaagccctccttccacggatccatgtagcaggactgaattgtccccagtttgcagaaaagcacctgccgacctcgtcctccccctgccagtgccttacctcctgcccaggagagccagccctccctgtcctcctcggatcaccgagagtagccgagagcctgctcccccaccccctccccaggggagagggtctggagaagcagtgagccgcatcttctccatctggcagggtgggatggaggagaagaattttcagaccccagcggctgagtcatgatctccctgccgcctcaatgtggttgcaaggccgctgttcacccacagggctaagagctagcgctgccgcaccccagagtgtgggaagggagagcggggcagtctcgggtggctagtcagagagagtgtttgggggttccgtgatgtagggtaaggtgccttcttattctcactccaccacccaaaagtcaaaaggtgcctgtgaggcaggggcggagtgatacaacttcaagtgcatgctctctgcagccagcccagcccagctggtgggaagcgtctgtccgtttactccaaggtggggtctttgtgagagtgagctgtaggtgtgcgggaccggtacagaaaggcgttcttcgaggtggatcacagaggcttcttcagatcagtgcttgagtttggggaatgcggccgcattccctgagtcaccaggaatgttaaagtcagtgggaacgtgactgccccaactcctggaagctgtgtccttgcacctgcatccgtagttccctgaaaacccagagaggaatcagacttcacactgcaagagccttggtgtccacctggccccatgtctctcagaattcttcaggtggaaaaacatctgaaagccacgttccttactgcagaatagcatatatatcgcttaatcttaaatttattagatatgagttgttttcagactcagactccatttgtattatagtctaatatacagggtagcaggtaccactgatttggagatatttatggggggagaacttacattgtgaaacttctgtacattaattattattgctgttgttattttacaagggtctagggagagacccttgtttgattttagctgcagaacgtattggtccagcttgctcttcagtgggagaaaacacttgtaagttgctaaacgagtcaatcccctcattcaggaaaactgacagaggagggcgtgactcacccaagcatatataactagctagaagtgggccaggacaggcccggcgcggtggctcacgcctgtaatcccagcagtttgggaggtcgaggtaggtggatcacctgaggtcgggagttcgagaccaacctgaccaacatggagaaaccctgtctctattaaaaatacaaaaaaaaaaaaaaaaaaaatagccgggcatggtggcgcaagcctgtaatcccagctactcaggaggctgaggcagaagaattgaacccaggaggtggaggttgcagtgagctgagatcgtgccgttactctccaacctggacaacaagagcgaaactccgtcttagaagtggaccaggacaggaccagattttggagtcatggtccggtgtccttttcactacaccatgtttgagctcagacccccactctcattccccaggtggctgacccagtccctgggggaagccctggatttcagaaagagcaagtctggatctgggaccctttccttccttccctggcttgtaactccaccaacccatcagaaggagaaggaaggagactcacctctgcctcaatgtgaatcagaccctaccccaccacgatgtggccctggcctgctgggctctccacctcagccttggataatgctgttgcctcatctataacatgcatttgtctttgtaatgtcaccaccttcccagctctccctctggccctgccttcttcggggaactcctggaaatatcagttactcagccctgggccccaccacctaggccactcctccaaaggaagtctaggagctgggaggaaaagaaaagaggggaaaatgagtttttatggggctgaacggggagaaaaggtcatcatcgattctactttagaatgagagtgtgaaatagacatttgtaaatgtaaaacttttaaggtatatcattataactgaaggagaaggtgccccaaaatgcaagattttccacaagattcccagagacaggaaaatcctctggctggctaactggaagcatgtaggagaatccaagcgaggtcaacagagaaggcaggaatgtgtggcagatttagtgaaagctagagatatggcagcgaaaggatgtaaacagtgcctgctgaatgatttccaaagagaaaaaaagtttgccagaagtttgtcaagtcaaccaatgtagaaagctttgcttatggtaataaaaatggctcatacttatatagcacttactttgttgcaagtactgctgtaaataaatgctttatgcaaacc

SEQ ID NO: 26607 - DNA, 4762 bp, Artificial Sequence
  derived and/or modified sequence
ggggacaggggtgaggccagagacggacggacgcaggggcccggcccaaggcgagggagaacagcggcactgaggcagaaaggaagagggcggtgtgttcacccgcagcccaatccatcactcagcaactcctagacgctggtagaaagttcctccgaggagcctgccatccagtcgtgcgtgcagaagcctttgggtctgaagtgtctgtgagacctcacagaagagcacccctgggctccacttacctgccccctgctccttcagggatggaggcaatggcggccagcacttccctgcctgaccctggagactttgaccggaacgtgccccggatctgtggggtgtgtggagaccgagccactggctttcacttcaatgctatgacctgtgaaggctgcaaaggcttcttcaggcgaagcatgaagcggaaggcactattcacctgccccttcaacggggactgccgcatcaccaaggacaaccgacgccactgccaggcctgccggctcaaacgctgtgtggacatcggcatgatgaaggagttcattctgacagatgaggaagtgcagaggaagcgggagatgatcctgaagcggaaggaggaggaggccttgaaggacagtctgcggcccaagctgtctgaggagcagcagcgcatcattgccatactgctggacgcccaccataagacctacgaccccacctactccgacttctgccagttccggcctccagttcgtgtgaatgatggtggagggagccatccttccaggcccaactccagacacactcccagcttctctggggactcctcctcctcctgctcagatcactgtatcacctcttcagacatgatggactcgtccagcttctccaatctggatctgagtgaagaagattcagatgacccttctgtgaccctagagctgtcccagctctccatgctgccccacctggctgacctggtcagttacagcatccaaaaggtcattggctttgctaagatgataccaggattcagagacctcacctctgaggaccagatcgtactgctgaagtcaagtgccattgaggtcatcatgttgcgctccaatgagtccttcaccatggacgacatgtcctggacctgtggcaaccaagactacaagtaccgcgtcagtgacgtgaccaaagccggacacagcctggagctgattgagcccctcatcaagttccaggtgggactgaagaagctgaacttgcatgaggaggagcatgtcctgctcatggccatctgcatcgtctccccagatcgtcctggggtgcaggacgccgcgctgattgaggccatccaggaccgcctgtccaacacactgcagacgtacatccgctgccgccacccgcccccgggcagccacctgctctatgccaagatgatccagaagctagccgacctgcgcagcctcaatgaggagcactccaagcagtaccgctgcctctccttccagcctgagtgcagcatgaagctaacgccccttgtgctcgaagtgtttggcaatgagatctcctgactaggacagcctgtggcggtgcctgggtggggctgctcctccagggccacgtgccaggcccggggctggcggctactcagcagccctcctcaccccgtctggggttcagcccctcctctgccacctcccctatccacccagcccattctctctcctgtccaacctaacccctttcctgcgggcttttccccggtcccttgagacctcagccatgaggagttgctgtttgtttgacaaagaaacccaagtgggggcagagggcagaggctggaggcagggccttgcccagagatgcctccaccgctgcctaagtggctgctgactgatgttgagggaacagacaggagaaatgcatccattcctcagggacagagacacctgcacctccccccactgcaggccccgcttgtccagcgcctagtggggtctccctctcctgcctactcacgataaataatcggcccacagctcccaccccacccccttcagtgcccaccaacatcccattgccctggttatattctcacgggcagtagctgtggtgaggtgggttttcttcccatcactggagcaccaggcacgaacccacctgctgagagacccaaggaggaaaaacagacaaaaacagcctcacagaagaatatgacagctgtccctgtcaccaagctcacagttcctcgccctgggtctaaggggttggttgaggtggaagccctccttccacggatccatgtagcaggactgaattgtccccagtttgcagaaaagcacctgccgacctcgtcctccccctgccagtgccttacctcctgcccaggagagccagccctccctgtcctcctcggatcaccgagagtagccgagagcctgctcccccaccccctccccaggggagagggtctggagaagcagtgagccgcatcttctccatctggcagggtgggatggaggagaagaattttcagaccccagcggctgagtcatgatctccctgccgcctcaatgtggttgcaaggccgctgttcacccacagggctaagagctagcgctgccgcaccccagagtgtgggaagggagagcggggcagtctcgggtggctagtcagagagagtgtttgggggttccgtgatgtagggtaaggtgccttcttattctcactccaccacccaaaagtcaaaaggtgcctgtgaggcaggggcggagtgatacaacttcaagtgcatgctctctgcagccagcccagcccagctggtgggaagcgtctgtccgtttactccaaggtggggtctttgtgagagtgagctgtaggtgtgcgggaccggtacagaaaggcgttcttcgaggtggatcacagaggcttcttcagatcagtgcttgagtttggggaatgcggccgcattccctgagtcaccaggaatgttaaagtcagtgggaacgtgactgccccaactcctggaagctgtgtccttgcacctgcatccgtagttccctgaaaacccagagaggaatcagacttcacactgcaagagccttggtgtccacctggccccatgtctctcagaattcttcaggtggaaaaacatctgaaagccacgttccttactgcagaatagcatatatatcgcttaatcttaaatttattagatatgagttgttttcagactcagactccatttgtattatagtctaatatacagggtagcaggtaccactgatttggagatatttatggggggagaacttacattgtgaaacttctgtacattaattattattgctgttgttattttacaagggtctagggagagacccttgtttgattttagctgcagaacgtattggtccagcttgctcttcagtgggagaaaacacttgtaagttgctaaacgagtcaatcccctcattcaggaaaactgacagaggagggcgtgactcacccaagcatatataactagctagaagtgggccaggacaggcccggcgcggtggctcacgcctgtaatcccagcagtttgggaggtcgaggtaggtggatcacctgaggtcgggagttcgagaccaacctgaccaacatggagaaaccctgtctctattaaaaatacaaaaaaaaaaaaaaaaaaaatagccgggcatggtggcgcaagcctgtaatcccagctactcaggaggctgaggcagaagaattgaacccaggaggtggaggttgcagtgagctgagatcgtgccgttactctccaacctggacaacaagagcgaaactccgtcttagaagtggaccaggacaggaccagattttggagtcatggtccggtgtccttttcactacaccatgtttgagctcagacccccactctcattccccaggtggctgacccagtccctgggggaagccctggatttcagaaagagcaagtctggatctgggaccctttccttccttccctggcttgtaactccaccaacccatcagaaggagaaggaaggagactcacctctgcctcaatgtgaatcagaccctaccccaccacgatgtggccctggcctgctgggctctccacctcagccttggataatgctgttgcctcatctataacatgcatttgtctttgtaatgtcaccaccttcccagctctccctctggccctgccttcttcggggaactcctggaaatatcagttactcagccctgggccccaccacctaggccactcctccaaaggaagtctaggagctgggaggaaaagaaaagaggggaaaatgagtttttatggggctgaacggggagaaaaggtcatcatcgattctactttagaatgagagtgtgaaatagacatttgtaaatgtaaaacttttaaggtatatcattataactgaaggagaaggtgccccaaaatgcaagattttccacaagattcccagagacaggaaaatcctctggctggctaactggaagcatgtaggagaatccaagcgaggtcaacagagaaggcaggaatgtgtggcagatttagtgaaagctagagatatggcagcgaaaggatgtaaacagtgcctgctgaatgatttccaaagagaaaaaaagtttgccagaagtttgtcaagtcaaccaatgtagaaagctttgcttatggtaataaaaatggctcatacttatatagcacttactttgttgcaagtactgctgtaaataaatgctttatgcaaaccaa

SEQ ID NO: 26608 - DNA, 937 bp, Artificial Sequence
  derived and/or modified sequence
cggcagcggagccgtgtgcgccgggagcgcggaacagcttgtccacccgccggccggaccagggctcctgaacctagcccagctggacggagaaatggactctagcctcctctgatagcctcatgccaggccccgtgcacattgctttgcttgcctccctcaatcctcatagcttctctttgggggatggaggcaatggcggccagcacttccctgcctgaccctggagactttgaccggaacgtgccccggatctgtggggtgtgtggagaccgagccactggctttcacttcaatgctatgacctgtgaaggctgcaaaggcttcttcaggcgaagcatgaagcggaaggcactattcacctgccccttcaacggggactgccgcatcaccaaggacaaccgacgccactgccaggcctgccggctcaaacgctgtgtggacatcggcatgatgaaggagttcattctgacagatgaggaagtgcagaggaagcgggagatgatcctgaagcggaaggaggaggaggccttgaaggacagtctgcggcccaagctgtctgaggagcagcagcgcatcattgccatactgctggacgcccaccataagacctacgaccccacctactccgacttctgccagttccggcctccagttcgtgtgaatgatggtggagggagccatccttccaggcccaactccagacacactcccagcttctctggggactcctcctcctcctgctcagatcactgtatcacctcttcagacatgatggactcgtccagcttctccaatctggatctgagtgaagaagattcagatgacccttctgtgaccctagagctgtcccagctctccatgctgccccacctggctgacctggtcagttacagcatccaaaaggtcattggctttgctaagatgataccaggat

SEQ ID NO: 26609 - DNA, 596 bp, Artificial Sequence
  derived and/or modified sequence
gggctgtctctgcttgtcaaaaggcggcagcggagccgtgtgcgccgggagcgcggaacagcttgtccacccgccggccggaccagggctcctgaacctagcccagctggacggagaaatggactctagcctcctctgatagcctcatgccaggccccgtgcacattgctttgcttgcctccctcaatcctcatagcttctctttgggaagcctttgggtctgaagtgtctgtgagacctcacagaagagcacccctgggctccacttacctgccccctgctccttcagggatggaggcaatggcggccagcacttccctgcctgaccctggagactttgaccggaacgtgccccggatctgtggggtgtgtggagaccgagccactggctttcacttcaatgctatgacctgtgaaggctgcaaaggcttcttcaggcgaagcatgaagcggaaggcactattcacctgccccttcaacggggactgccgcatcaccaaggacaaccgacgccactgccaggcctgccggctcaaacgctgtgtggacatcggcatgatgaaggagttcattctgacagatgaggaagtgcagag

SEQ ID NO: 26610 - DNA, 3554 bp, Artificial Sequence
  derived and/or modified sequence
aaaaggcggcagcggagccgtgtgcgccgggagcgcggaacagcttgtccacccgccggccggaccagaagcctttgggtctgaagtgtctgtgagacctcacagaagagcacccctgggctccacttacctgccccctgctccttcagggatggaggcaatggcggccagcacttccctgcctgaccctggagactttgaccggaacgtgccccggatctgtggggtgtgtggagaccgagccactggctttcacttcaatgctatgacctgtgaaggctgcaaaggcttcttcaggcgaagcatgaagcggaaggcactattcacctgccccttcaacggggactgccgcatcaccaaggacaaccgacgccactgccaggcctgccggctcaaacgctgtgtggacatcggcatgatgaaggagttcattctgacagatgaggaagtgcagaggaagcgggagatgatcctgaagcggaaggaggaggaggccttgaaggacagtctgcggcccaagctgtctgaggagcagcagcgcatcattgccatactgctggacgcccaccataagacctacgaccccacctactccgacttctgccagttccggcctccagttcgtgtgaatgatggtggagggagccatccttccaggcccaactccagacacactcccagcttctctggggactcctcctcctcctgctcagatcactgtatcacctcttcagacatgatggactcgtccagcttctccaatctggatctgagtgaagaagattcagatgacccttctgtgaccctagagctgtcccagctctccatgctgccccacctggctgacctggtcagttacagcatccaaaaggtcattggctttgctaagatgataccaggattcagagacctcacctctgaggaccagatcgtactgctgaagtcaagtgccattgaggtcatcatgttgcgctccaatgagtccttcaccatggacgacatgtcctggacctgtggcaaccaagactacaagtaccgcgtcagtgacgtgaccaaagccggacacagcctggagctgattgagcccctcatcaagttccaggtgggactgaagaagctgaacttgcatgaggaggagcatgtcctgctcatggccatctgcatcgtctccccagatcgtcctggggtgcaggacgccgcgctgattgaggccatccaggaccgcctgtccaacacactgcagacgtacatccgctgccgccacccgcccccgggcagccacctgctctatgccaagatgatccagaagctagccgacctgcgcagcctcaatgaggagcactccaagcagtaccgctgcctctccttccagcctgagtgcagcatgaagctaacgccccttgtgctcgaagtgtttggcaatgagatctcctgactaggacagcctgtggcggtgcctgggtggggctgctcctccagggccacgtgccaggcccggggctggcggctactcagcagccctcctcaccccgtctggggttcagcccctcctctgccacctcccctatccacccagcccattctctctcctgtccaacctaacccctttcctgcgggcttttccccggtcccttgagacctcagccatgaggagttgctgtttgtttgacaaagaaacccaagtgggggcagagggcagaggctggaggcagggccttgcccagagatgcctccaccgctgcctaagtggctgctgactgatgttgagggaacagacaggagaaatgcatccattcctcagggacagagacacctgcacctccccccactgcaggccccgcttgtccagcgcctagtggggtctccctctcctgcctactcacgataaataatcggcccacagctcccaccccacccccttcagtgcccaccaacatcccattgccctggttatattctcacgggcagtagctgtggtgaggtgggttttcttcccatcactggagcaccaggcacgaacccacctgctgagagacccaaggaggaaaaacagacaaaaacagcctcacagaagaatatgacagctgtccctgtcaccaagctcacagttcctcgccctgggtctaaggggttggttgaggtggaagccctccttccacggatccatgtagcaggactgaattgtccccagtttgcagaaaagcacctgccgacctcgtcctccccctgccagtgccttacctcctgcccaggagagccagccctccctgtcctcctcggatcaccgagagtagccgagagcctgctcccccaccccctccccaggggagagggtctggagaagcagtgagccgcatcttctccatctggcagggtgggatggaggagaagaattttcagaccccagcggctgagtcatgatctccctgccgcctcaatgtggttgcaaggccgctgttcacccacagggctaagagctagcgctgccgcaccccagagtgtgggaagggagagcggggcagtctcgggtggctagtcagagagagtgtttgggggttccgtgatgtagggtaaggtgccttcttattctcactccaccacccaaaagtcaaaaggtgcctgtgaggcaggggcggagtgatacaacttcaagtgcatgctctctgcagccagcccagcccagctggtgggaagcgtctgtccgtttactccaaggtggggtctttgtgagagtgagctgtaggtgtgcgggaccggtacagaaaggcgttcttcgaggtggatcacagaggcttcttcagatcagtgcttgagtttggggaatgcggccgcattccctgagtcaccaggaatgttaaagtcagtgggaacgtgactgccccaactcctggaagctgtgtccttgcacctgcatccgtagttccctgaaaacccagagaggaatcagacttcacactgcaagagccttggtgtccacctggccccatgtctctcagaattcttcaggtggaaaaacatctgaaagccacgttccttactgcagaatagcatatatatcgcttaatcttaaatttattagatatgagttgttttcagactcagactccatttgtattatagtctaatatacagggtagcaggtaccactgatttggagatatttatggggggagaacttacattgtgaaacttctgtacattaattattattgctgttgttattttacaagggtctagggagagacccttgtttgattttagctgcagaacgtattggtccagcttgctcttcagtgggagaaaacacttgtaagttgctaaacgagtcaatcccctcattcaggaaaactgacagaggagggcgtgactcacccaagcatatataactagctagaagtgggccaggacaggcccggcgcggtggctcacgcctgtaatcccagcagtttgggaggtcgaggtaggtggatcacctgaggtcgggagttcgagaccaacctgaccaacatggagaaaccctgtctctattaaaaatacaaaaaaaaaaaaaaaaa

SEQ ID NO: 26611 - DNA, 562 bp, Artificial Sequence
  derived and/or modified sequence
gatgacatggcatgcctgctcccaacaagccacttctgtttgcagtcactgatctggggactaaagtccctggaaagagcctctcgtgcccacttccttagagactggggaggcggtcagcgctccgccttagataaaaggtttccccttcttcatttcagaagcctttgggtctgaagtgtctgtgagacctcacagaagagcacccctgggctccacttacctgccccctgctccttcagggatggaggcaatggcggccagcacttccctgcctgaccctggagactttgaccggaacgtgccccggatctgtggggtgtgtggagaccgagccactggctttcacttcaatgctatgacctgtgaaggctgcaaaggcttcttcaggcgaagcatgaagcggaaggcactattcacctgccccttcaacggggactgccgcatcaccaaggacaaccgacgccactgccaggcctgccggctcaaacgctgtgtggacatcggcatgatgaaggagttcattctgacagatgaggaagtgcagaggaagcgggagatg

SEQ ID NO: 26612 - DNA, 3925 bp, Artificial Sequence
  derived and/or modified sequence
gtgtgcgccgggagcgcggaacagcttgtccacccgccggccggaccaggtgcgaacccgggagcagcgggaaagggggtctcaggatagggactcggggtcggggcgtctgggataccggggcctgagcgcccggctgcgagcattagagtctaagtctcagcggtaaacttggctactgaggtccgggctgtcgtgccatgaggctgggacactaaggggcactgaggtttgagaaagctgaagttcgtgccaggctggcgaggggagcagcgacatcctcggcgcttaggagaaatgctccgctaacacagtgcttagcacttgggcaacaagaagtatttgtttccttcttctgtcggggcgccttggcatggagtggaggaataagaaaaggagcgattggctgtcgatggtgctcagaactgctggagtggaggaagcctttgggtctgaagtgtctgtgagacctcacagaagagcacccctgggctccacttacctgccccctgctccttcagggatggaggcaatggcggccagcacttccctgcctgaccctggagactttgaccggaacgtgccccggatctgtggggtgtgtggagaccgagccactggctttcacttcaatgctatgacctgtgaaggctgcaaaggcttcttcaggcgaagcatgaagcggaaggcactattcacctgccccttcaacggggactgccgcatcaccaaggacaaccgacgccactgccaggcctgccggctcaaacgctgtgtggacatcggcatgatgaaggagttcattctgacagatgaggaagtgcagaggaagcgggagatgatcctgaagcggaaggaggaggaggccttgaaggacagtctgcggcccaagctgtctgaggagcagcagcgcatcattgccatactgctggacgcccaccataagacctacgaccccacctactccgacttctgccagttccggcctccagttcgtgtgaatgatggtggagggagccatccttccaggcccaactccagacacactcccagcttctctggggactcctcctcctcctgctcagatcactgtatcacctcttcagacatgatggactcgtccagcttctccaatctggatctgagtgaagaagattcagatgacccttctgtgaccctagagctgtcccagctctccatgctgccccacctggctgacctggtcagttacagcatccaaaaggtcattggctttgctaagatgataccaggattcagagacctcacctctgaggaccagatcgtactgctgaagtcaagtgccattgaggtcatcatgttgcgctccaatgagtccttcaccatggacgacatgtcctggacctgtggcaaccaagactacaagtaccgcgtcagtgacgtgaccaaagccggacacagcctggagctgattgagcccctcatcaagttccaggtgggactgaagaagctgaacttgcatgaggaggagcatgtcctgctcatggccatctgcatcgtctccccagatcgtcctggggtgcaggacgccgcgctgattgaggccatccaggaccgcctgtccaacacactgcagacgtacatccgctgccgccacccgcccccgggcagccacctgctctatgccaagatgatccagaagctagccgacctgcgcagcctcaatgaggagcactccaagcagtaccgctgcctctccttccagcctgagtgcagcatgaagctaacgccccttgtgctcgaagtgtttggcaatgagatctcctgactaggacagcctgtggcggtgcctgggtggggctgctcctccagggccacgtgccaggcccggggctggcggctactcagcagccctcctcaccccgtctggggttcagcccctcctctgccacctcccctatccacccagcccattctctctcctgtccaacctaacccctttcctgcgggcttttccccggtcccttgagacctcagccatgaggagttgctgtttgtttgacaaagaaacccaagtgggggcagagggcagaggctggaggcagggccttgcccagagatgcctccaccgctgcctaagtggctgctgactgatgttgagggaacagacaggagaaatgcatccattcctcagggacagagacacctgcacctccccccactgcaggccccgcttgtccagcgcctagtggggtctccctctcctgcctactcacgataaataatcggcccacagctcccaccccacccccttcagtgcccaccaacatcccattgccctggttatattctcacgggcagtagctgtggtgaggtgggttttcttcccatcactggagcaccaggcacgaacccacctgctgagagacccaaggaggaaaaacagacaaaaacagcctcacagaagaatatgacagctgtccctgtcaccaagctcacagttcctcgccctgggtctaaggggttggttgaggtggaagccctccttccacggatccatgtagcaggactgaattgtccccagtttgcagaaaagcacctgccgacctcgtcctccccctgccagtgccttacctcctgcccaggagagccagccctccctgtcctcctcggatcaccgagagtagccgagagcctgctcccccaccccctccccaggggagagggtctggagaagcagtgagccgcatcttctccatctggcagggtgggatggaggagaagaattttcagaccccagcggctgagtcatgatctccctgccgcctcaatgtggttgcaaggccgctgttcacccacagggctaagagctagcgctgccgcaccccagagtgtgggaagggagagcggggcagtctcgggtggctagtcagagagagtgtttgggggttccgtgatgtagggtaaggtgccttcttattctcactccaccacccaaaagtcaaaaggtgcctgtgaggcaggggcggagtgatacaacttcaagtgcatgctctctgcagccagcccagcccagctggtgggaagcgtctgtccgtttactccaaggtggggtctttgtgagagtgagctgtaggtgtgcgggaccggtacagaaaggcgttcttcgaggtggatcacagaggcttcttcagatcagtgcttgagtttggggaatgcggccgcattccctgagtcaccaggaatgttaaagtcagtgggaacgtgactgccccaactcctggaagctgtgtccttgcacctgcatccgtagttccctgaaaacccagagaggaatcagacttcacactgcaagagccttggtgtccacctggccccatgtctctcagaattcttcaggtggaaaaacatctgaaagccacgttccttactgcagaatagcatatatatcgcttaatcttaaatttattagatatgagttgttttcagactcagactccatttgtattatagtctaatatacagggtagcaggtaccactgatttggagatatttatggggggagaacttacattgtgaaacttctgtacattaattattattgctgttgttattttacaagggtctagggagagacccttgtttgattttagctgcagaacgtattggtccagcttgctcttcagtgggagaaaacacttgtaagttgctaaacgagtcaatcccctcattcaggaaaactgacagaggagggcgtgactcacccaagcatatataactagctagaagtgggccaggacaggcccggcgcggtggctcacgcctgtaatcccagcagtttgggaggtcgaggtaggtggatcacctgaggtcgggagttcgagaccaacctgaccaacatggagaaaccctgtctctattaaaaatacaaaaaaaaaaaaaaaa

SEQ ID NO: 26613 - protein, 1177 aa, Artificial Sequence
  derived and/or modified sequence
MVPCWNHGNITRSKAEELLSRTGKDGSFLVRASESISRAYALCVLYRNCVYTYRILPNEDDKFTVQASEGVSMRFFTKLDQLIEFYKKENMGLVTHLQYPVPLEEEDTGDDPEEDTVESVVSPPELPPRNIPLTASSCEAKEVPFSNENPRATETSRPSLSETLFQRLQSMDTSGLPEEHLKAIQDYLSTQLAQDSEFVKTGSSSLPHLKKLTTLLCKELYGQMLRTVPGIGKVKEEDHVPGEANPINMVSKLSQLTSLLSSIEDKVKALLHEGPESPHRPSLIPPVTFEVKAESLGIPQKMQLKVDVESGKLIIKKSKDGSEDKFYSHKKILQLIKSQKFLNKLVILVETEKEKILRKEYVFADSKKREGFCQLLQQMKNKHSEQPEPDMITIFIGTWNMGNAPPPKKITSWFLSKGQGKTRDDSADYIPHDIYVIGTQEDPLSEKEWLEILKHSLQEITSVTFKTVAIHTLWNIRIVVLAKPEHENRISHICTDNVKTGIANTLGNKGAVGVSFMFNGTSLGFVNSHLTSGSEKKLRRNQNYMNILRFLALGDKKLSPFNITHRFTHLFWFGDLNYRVDLPTWEAETIIQKIKQQQYADLLSHDQLLTERREQKVFLHFEEEEITFAPTYRFERLTRDKYAYTKQKATGMKYNLPSWCDRVLWKSYPLVHVVCQSYGSTSDIMTSDHSPVFATFEAGVTSQFVSKNGPGTVDSQGQIEFLRCYATLKTKSQTKFYLEFHSSCLESFVKSQEGENEEGSEGELVVKFGETLPKLKPIISDPEYLLDQHILISIKSSDSDESYGEGCIALRLEATETQLPIYTPLTHHGELTGHFQGEIKLQTSQGKTREKLYDFVKTERDESSGPKTLKSLTSHDPMKQWEVTSRAPPCSGSSITEIINPNYMGVGPFGPPMPLHVKQTLSPDQQPTAWSYDQPPKDSPLGPCRGESPPTPPGQPPISPKKFLPSTANRGLPPRTQESRPSDLGKNAGDTLPQEDLPLTKPEMFENPLYGSLSSFPKPAPRKDQESPKMPRKEPPPCPEPGILSPSIVLTKAQEADRGEGPGKQVPAPRLRSFTCSSSAEGRAAGGDKSQGKPKTPVSSQAPVPAKRPIKPSRSEINQQTPPTPTPRPPLPVKSPAVLHLQHSKGRDYRDNTELPHHGKHRPEEGPPGPLGRTAMQ

SEQ ID NO: 26614 - protein, 810 aa, Artificial Sequence
  derived and/or modified sequence
KREGFCQLLQQMKNKHSEQPEPDMITIFIGTWNMGNAPPPKKITSWFLSKGQGKTRDDSADYIPHDIYVIGTQEDPLSEKEWLEILKHSLQEITSVTFKTVAIHTLWNIRIVVLAKPEHENRISHICTDNVKTGIANTLGNKGAVGVSFMFNGTSLGFVNSHLTSGSEKKLRRNQNYMNILRFLALGDKKLSPFNITHRFTHLFWFGDLNYRVDLPTWEAETIIQKIKQQQYADLLSHDQLLTERREQKVFLHFEEEEITFAPTYRFERLTRDKYAYTKQKATGMKYNLPSWCDRVLWKSYPLVHVVCQSYGSTSDIMTSDHSPVFATFEAGVTSQFVSKNGPGTVDSQGQIEFLRCYATLKTKSQTKFYLEFHSSCLESFVKSQEGENEEGSEGELVVKFGETLPKLKPIISDPEYLLDQHILISIKSSDSDESYGEGCIALRLEATETQLPIYTPLTHHGELTGHFQGEIKLQTSQGKTREKLYDFVKTERDESSGPKTLKSLTSHDPMKQWEVTSRAPPCSGSSITEIINPNYMGVGPFGPPMPLHVKQTLSPDQQPTAWSYDQPPKDSPLGPCRGESPPTPPGQPPISPKKFLPSTANRGLPPRTQESRPSDLGKNAGDTLPQEDLPLTKPEMFENPLYGSLSSFPKPAPRKDQESPKMPRKEPPPCPEPGILSPSIVLTKAQEADRGEGPGKQVPAPRLRSFTCSSSAEGRAAGGDKSQGKPKTPVSSQAPVPAKRPIKPSRSEINQQTPPTPTPRPPLPVKSPAVLHLQHSKGRDYRDNTELPHHGKHRPEEGPPGPLGRTAMQ

SEQ ID NO: 26615 - protein, 941 aa, Artificial Sequence
  derived and/or modified sequence
RPQVPGEANPINMVSKLSQLTSLLSSIEDKVKALLHEGPESPHRPSLIPPVTFEVKAESLGIPQKMQLKVDVESGKLIIKKSKDGSEDKFYSHKKILQLIKSQKFLNKLVILVETEKEKILRKEYVFADSKKREGFCQLLQQMKNKHSEQPEPDMITIFIGTWNMGNAPPPKKITSWFLSKGQGKTRDDSADYIPHDIYVIGTQEDPLSEKEWLEILKHSLQEITSVTFKTVAIHTLWNIRIVVLAKPEHENRISHICTDNVKTGIANTLGNKGAVGVSFMFNGTSLGFVNSHLTSGSEKKLRRNQNYMNILRFLALGDKKLSPFNITHRFTHLFWFGDLNYRVDLPTWEAETIIQKIKQQQYADLLSHDQLLTERREQKVFLHFEEEEITFAPTYRFERLTRDKYAYTKQKATGMKYNLPSWCDRVLWKSYPLVHVVCQSYGSTSDIMTSDHSPVFATFEAGVTSQFVSKNGPGTVDSQGQIEFLRCYATLKTKSQTKFYLEFHSSCLESFVKSQEGENEEGSEGELVVKFGETLPKLKPIISDPEYLLDQHILISIKSSDSDESYGEGCIALRLEATETQLPIYTPLTHHGELTGHFQGEIKLQTSQGKTREKLYDFVKTERDESSGPKTLKSLTSHDPMKQWEVTSRAPPCSGSSITEIINPNYMGVGPFGPPMPLHVKQTLSPDQQPTAWSYDQPPKDSPLGPCRGESPPTPPGQPPISPKKFLPSTANRGLPPRTQESRPSDLGKNAGDTLPQEDLPLTKPEMFENPLYGSLSSFPKPAPRKDQESPKMPRKEPPPCPEPGILSPSIVLTKAQEADRGEGPGKQVPAPRLRSFTCSSSAEGRAAGGDKSQGKPKTPVSSQAPVPAKRPIKPSRSEINQQTPPTPTPRPPLPVKSPAVLHLQHSKGRDYRDNTELPHHGKHRPEEGPPGPLGRTAMQ

SEQ ID NO: 26616 - protein, 941 aa, Artificial Sequence
  derived and/or modified sequence
PPQVPGEANPINMVSKLSQLTSLLSSIEDKVKALLHEGPESPHRPSLIPPVTFEVKAESLGIPQKMQLKVDVESGKLIIKKSKDGSEDKFYSHKKILQLIKSQKFLNKLVILVETEKEKILRKEYVFADSKKREGFCQLLQQMKNKHSEQPEPDMITIFIGTWNMGNAPPPKKITSWFLSKGQGKTRDDSADYIPHDIYVIGTQEDPLSEKEWLEILKHSLQEITSVTFKTVAIHTLWNIRIVVLAKPEHENRISHICTDNVKTGIANTLGNKGAVGVSFMFNGTSLGFVNSHLTSGSEKKLRRNQNYMNILRFLALGDKKLSPFNITHRFTHLFWFGDLNYRVDLPTWEAETIIQKIKQQQYADLLSHDQLLTERREQKVFLHFEEEEITFAPTYRFERLTRDKYAYTKQKATGMKYNLPSWCDRVLWKSYPLVHVVCQSYGSTSDIMTSDHSPVFATFEAGVTSQFVSKNGPGTVDSQGQIEFLRCYATLKTKSQTKFYLEFHSSCLESFVKSQEGENEEGSEGELVVKFGETLPKLKPIISDPEYLLDQHILISIKSSDSDESYGEGCIALRLEATETQLPIYTPLTHHGELTGHFQGEIKLQTSQGKTREKLYDFVKTERDESSGPKTLKSLTSHDPMKQWEVTSRAPPCSGSSITEIINPNYMGVGPFGPPMPLHVKQTLSPDQQPTAWSYDQPPKDSPLGPCRGESPPTPPGQPPISPKKFLPSTANRGLPPRTQESRPSDLGKNAGDTLPQEDLPLTKPEMFENPLYGSLSSFPKPAPRKDQESPKMPRKEPPPCPEPGILSPSIVLTKAQEADRGEGPGKQVPAPRLRSFTCSSSAEGRAAGGDKSQGKPKTPVSSQAPVPAKRPIKPSRSEINQQTPPTPTPRPPLPVKSPAVLHLQHSKGRDYRDNTELPHHGKHRPEEGPPGPLGRTAMQ

SEQ ID NO: 26617 - protein, 596 aa, Artificial Sequence
  derived and/or modified sequence
MVPCWNHGNITRSKAEELLSRTGKDGSFLVRASESISRAYALCVLYRNCVYTYRILPNEDDKFTVQASEGVSMRFFTKLDQLIEFYKKENMGLVTHLQYPVPLEEEDTGDDPEEDTVESVVSPPELPPRNIPLTASSCEAKEVPFSNENPRATETSRPSLSETLFQRLQSMDTSGLPEEHLKAIQDYLSTQLAQDSEFVKTGSSSLPHLKKLTTLLCKELYGYCLEVLLSYPLSLLSQVPGEANPINMVSKLSQLTSLLSSIEDKVKALLHEGPESPHRPSLIPPVTFEVKAESLGIPQKMQLKVDVESGKLIIKKSKDGSEDKFYSHKKILQLIKSQKFLNKLVILVETEKEKILRKEYVFADSKKREGFCQLLQQMKNKHSEQPEPDMITIFIGTWNMGNAPPPKKITSWFLSKGQGKTRDDSADYIPHDIYVIGTQEDPLSEKEWLEILKHSLQEITSVTFKTVAIHTLWNIRIVVLAKPEHENRISHICTDNVKTGIANTLGNKGAVGVSFMFNGTSLGFVNSHLTSGSEKKLRRNQNYMNILRFLALGDKKLSPFNITHRFTHLFWFGDLNYRVDLPTWEAETIIQKIKQQ

SEQ ID NO: 26618 - DNA, 3534 bp, Artificial Sequence
  derived and/or modified sequence
atggtgccctgctggaatcacggcaatatcacgagatctaaggccgaagagctcctttcacgcacagggaaagacggaagctttctcgtcagagctagtgagtccatctcacgggcctacgctctgtgtgttctttatcgcaattgtgtttatacctaccggatcctgccaaatgaagatgacaagttcactgtgcaggccagcgaaggcgtgtcaatgcgcttcttcacgaaattagatcagctaattgaattttataaaaaagagaatatgggacttgtgacacacctacagtatccggtgccactggaagaggaggacacaggcgatgatcccgaagaggacactgtcgaatctgtagtgtccccccctgagctgccacctaggaatatccctctgacagcgagttcatgtgaagccaaggaggtgccattttccaatgaaaatccacgagcgacagaaacgtcgcgtccttctctgagcgagaccctcttccagcgcctccagagcatggatacatcggggctcccagaggagcatctgaaagcgattcaagactacctttcaactcaattggcgcaagattccgaattcgtcaagactggctcaagctcactgccccacctaaaaaaacttacaactctgctgtgcaaagagctgtatggccaaatgctgagaactgtgccaggaattggaaaagttaaggaggaggaccacgtaccgggtgaagccaatcccatcaacatggtgagtaagctgagtcagctgacttcactcttatcgagcattgaagataaggtcaaggccctgttgcacgaagggcctgaaagcccccatcgtcctagtctgatcccgcccgtgactttcgaagtgaaagccgaatccttgggcatccctcagaagatgcaactgaaggttgatgtcgagtccggtaagctgattatcaaaaaaagcaaggatggctccgaagataaattctacagccataagaagatcttacaactgattaagtcacaaaagtttctcaacaagcttgtcattctggttgagactgaaaaggagaagatcctgaggaaggaatacgttttcgccgatagcaaaaagagagaaggcttttgtcagctgctccagcagatgaaaaataaacactccgaacagccagagcccgatatgattaccatttttataggaacctggaatatgggtaatgctcctccacctaagaagatcacctcctggttcctctctaaaggtcaaggcaaaaccagagatgactctgctgattacatcccccacgatatctatgtcattggtacccaggaggaccctttatcagaaaaagagtggcttgaaattttgaagcacagccttcaggaaattaccagcgtgaccttcaagacggttgctattcatactctgtggaacattagaatcgttgttctggcaaaacctgagcatgaaaaccgcatttctcatatctgtacagacaacgttaagacaggtattgcaaacacacttgggaacaaaggcgcagtcggagtctcttttatgtttaacggcacctccttaggctttgttaattcccacctgaccagcggctctgaaaagaaactgaggcggaaccagaactacatgaacatattgagatttttggcgctcggtgacaagaagcttagtccattcaatattacgcatcggttcacacacctgttttggttcggcgacttgaactaccgagtggatctgccaacgtgggaagccgagacaataattcagaagataaagcagcaacagtatgccgatctcctgagtcatgaccagttattgactgaacgcagagaacaaaaagtgttccttcatttcgaggaggaggaaatcacctttgcgccgacgtacaggtttgaaaggctcactagggacaagtatgcctatacgaagcaaaaggcgactgggatgaaatataacctgcctagctggtgtgatcgtgtactgtggaaatcctaccctttagtgcatgttgtttgccagtcttacggcagcacgtccgacatcatgacctccgaccactctcctgtgttcgcgacctttgaggccggggtcacatcccaattcgtctccaaaaacggcccaggcaccgttgactcacagggccagatcgagttccttcggtgttatgccacgctgaaaacaaaaagtcagacgaagttttacctggagttccacagtagctgtctcgagtcatttgtaaaaagccaagagggggaaaatgaagaaggctctgaaggggagctggtggttaaattcggtgaaaccctgcctaagctgaagccaatcatttccgatcccgaatacctgctcgatcaacacatcctgatttccataaaatcttcggatagcgacgaaagctacggtgagggctgtattgcactgaggctggaggcaaccgaaacgcagctacctatttacactccactgacccatcacggcgaattaactggccacttccagggcgaaattaaactgcagacctcacaaggcaaaactagagaaaagctttatgatttcgtgaaaaccgagcgagatgaatcttccggtcctaaaactctgaaatctttaacatcacacgatccgatgaaacagtgggaagttaccagtcgcgctcctccctgctctggatcttcaatcaccgagattatcaatcccaactacatgggtgtgggcccatttggcccccccatgcccctgcatgttaaacagaccctttctccagatcagcagcccacagcctggtcttatgatcaacctccaaaggattccccactgggcccatgtagaggagaaagcccaccaacccctcctggacagcctcccatttcccccaagaaatttctgccctccaccgcaaacagaggtctaccacccagaacccaggagagtcgtccgtccgacctggggaagaacgccggggatactttacctcaggaggacctgcccctcaccaagcctgagatgtttgagaacccactttacggctcactgtctagttttcccaaaccggctcctcgcaaagatcaggagtctcccaagatgccaagaaaggagccccccccttgcccagagccggggatcctttccccctcgatcgtgttgacaaaggctcaagaggcagacagaggagagggacctggcaaacaagtcccagccccaagacttcggtcatttacctgcagtagctccgccgaaggccgggccgccggaggcgataaatcccagggtaagcccaagactcctgtgagctcccaggctcctgtcccagctaaaaggcctatcaaaccctcgcgatctgagatcaaccagcagacccctcccactcccacgccccgtcccccactcccggtgaaaagtcccgccgttctgcacttgcagcactcaaagggtagagactatagggataacaccgaattgccacaccatggcaagcatcgtccagaggaaggccctcctggaccccttggccggaccgccatgcagtag

SEQ ID NO: 26619 - DNA, 1791 bp, Artificial Sequence
  derived and/or modified sequence
atggtgccatgctggaatcatgggaacatcaccaggagtaaagccgaggaactcctgtcaagaacaggtaaggatggaagtttcctggtgcgggccagcgagtccatcagccgtgcctacgctctgtgtgtactctatcggaattgcgtctatacttatcgcatactaccaaatgaggatgacaaatttacagtccaggcatccgagggagttagtatgagatttttcacgaaattagatcagctgatcgagttttacaagaaagaaaacatgggcctcgtaacacatttgcagtaccccgtcccactggaggaagaggatacgggggatgacccggaagaagacacggtggagtctgttgtgtccccccccgagctacctccccggaacattcctcttacagccagctcctgcgaagccaaggaggtccccttttccaacgagaaccccagggcaaccgagaccagtcgaccctctctgtctgagaccctcttccagcgcttgcagtctatggacacgtctgggcttcccgaagaacatttgaaagcgatccaggattacctctccacacagcttgcacaggatagcgagttcgtcaaaacaggtagctccagcctgccacaccttaaaaaactgaccacactgctatgtaaggagctatacggttattgcctcgaggtcctgttgtcctatcctctttcattgttgagtcaggtccccggcgaagctaatcctatcaatatggtgagcaaactgagtcagctgacttcactccttagctccatcgaagacaaagtaaaggccctgcttcatgaaggcccagagagcccccatagaccaagcctcattcccccagtcacttttgaagtgaaagcagaaagccttgggattccacagaagatgcagctgaaggttgacgtagagtccgggaagcttattatcaagaagagcaaggatgggagcgaggacaagttttactcccacaaaaagattctgcaattgattaaatcacagaaattcctgaacaagctggtaatactcgtcgaaaccgagaaagagaaaattttgcggaaagaatatgtttttgccgactcgaagaaaagagagggcttttgtcagctgctgcagcagatgaagaataagcatagcgagcagcctgagccagatatgatcacgatttttatcgggacatggaacatggggaatgcccctcctccaaaaaagattacgtcatggtttctctcaaagggacaggggaaaactagagatgatagtgctgattacattccacatgatatttatgtaattggtactcaagaagaccccttaagcgagaaagaatggctggaaattctgaagcacagcttgcaagaaattaccagcgttacatttaagactgttgcaatccacaccctgtggaacatcaggattgttgtgctcgccaagccggagcatgaaaatagaatttcccatatatgcacagataacgtcaaaactgggattgccaatacattgggcaataagggcgccgtaggcgttagctttatgtttaacggcactagtttggggttcgtgaatagccacttaacgtcagggtccgagaagaagctgagacgcaatcagaactacatgaacattctccggttcctagccctaggggacaaaaaactctccccttttaacatcactcaccgctttacacatctgttttggtttggagatctgaactaccgggtagacttgcccacttgggaggctgaaacgataattcagaagataaaacagcaatag

SEQ ID NO: 26620 - DNA, 4728 bp, Artificial Sequence
  derived and/or modified sequence
atggtcccctgctggaaccatggcaacatcacccgctccaaggcggaggagctgctttccaggacaggcaaggacgggagcttcctcgtgcgtgccagcgagtccatctcccgggcatacgcgctctgcgtgctgtatcggaattgcgtttacacttacagaattctgcccaatgaagatgataaattcactgttcaggcatccgaaggcgtctccatgaggttcttcaccaagctggaccagctcatcgagttttacaagaaggaaaacatggggctggtgacccatctgcaataccctgtgccgctggaggaagaggacacaggcgacgaccctgaggaggacacagtagaaagtgtcgtgtctccacccgagctgcccccaagaaacatcccgctgactgccagctcctgtgaggccaaggaggttcctttttcaaacgagaatccccgagcgaccgagaccagccggccgagcctctccgagacattgttccagcgactgcaaagcatggacaccagtgggcttccagaagagcatcttaaggccatccaagattatttaagcactcagctcgcccaggactctgaatttgtgaagacagggtccagcagtcttcctcacctgaagaaactgaccacactgctctgcaaggagctctatgggcagatgctgagaactgttcctgggatagggaaagtcaaggaggaggaccatgttcctggtgaggccaatcccatcaacatggtgtccaagctcagccaactgacaagcctgttgtcgtccattgaagacaaggtcaaggccttgctgcacgagggtcctgagtctccgcaccggccctcccttatccctccagtcacctttgaggtgaaggcagagtctctggggattcctcagaaaatgcagctcaaagtcgacgttgagtctgggaaactgatcattaagaagtccaaggatggttctgaggacaagttctacagccacaagaaaatcctgcagctcattaagtcacagaaatttctgaataagttggtgatcttggtggaaacagagaaggagaagatcctgcggaaggaatatgtttttgctgactccaaaaagagagaaggcttctgccagctcctgcagcagatgaagaacaagcactcagagcagccggagcccgacatgatcaccatcttcatcggcacctggaacatgggtaacgccccccctcccaagaagatcacgtcctggtttctctccaaggggcagggaaagacgcgggacgactctgcggactacatcccccatgacatttacgtgatcggcacccaagaggaccccctgagtgagaaggagtggctggagatcctcaaacactccctgcaagaaatcaccagtgtgacttttaaaacagtcgccatccacacgctctggaacatccgcatcgtggtgctggccaagcctgagcacgagaaccggatcagccacatctgtactgacaacgtgaagacaggcattgcaaacacactggggaacaagggagccgtgggggtgtcgttcatgttcaatggaacctccttagggttcgtcaacagccacttgacttcaggaagtgaaaagaaactcaggcgaaaccaaaactatatgaacattctccggttcctggccctgggcgacaagaagctgagtccctttaacatcactcaccgcttcacgcacctcttctggtttggggatcttaactaccgtgtggatctgcctacctgggaggcagaaaccatcatccagaaaatcaagcagcagcagtacgcagacctcctgtcccacgaccagctgctcacagagaggagggagcagaaggtcttcctacacttcgaggaggaagaaatcacgtttgccccaacctaccgttttgagagactgactcgggacaaatacgcctacaccaagcagaaagcgacagggatgaagtacaacttgccttcctggtgtgaccgagtcctctggaagtcttatcccctggtgcacgtggtgtgtcagtcttatggcagtaccagcgacatcatgacgagtgaccacagccctgtctttgccacatttgaggcaggagtcacttcccagtttgtctccaagaacggtcccgggactgttgacagccaaggacagattgagtttctcaggtgctatgccacattgaagaccaagtcccagaccaaattctacctggagttccactcgagctgcttggagagttttgtcaagagtcaggaaggagaaaatgaagaaggaagtgagggggagctggtggtgaagtttggtgagactcttccaaagctgaagcccattatctctgaccctgagtacctgctagaccagcacatcctcatcagcatcaagtcctctgacagcgacgaatcctatggcgagggctgcattgcccttcggttagaggccacagaaacgcagctgcccatctacacgcctctcacccaccatggggagttgacaggccacttccagggggagatcaagctgcagacctctcagggcaagacgagggagaagctctatgactttgtgaagacggagcgtgatgaatccagtgggccaaagaccctgaagagcctcaccagccacgaccccatgaagcagtgggaagtcactagcagggcccctccgtgcagtggctccagcatcactgaaatcatcaaccccaactacatgggagtggggccctttgggccaccaatgcccctgcacgtgaagcagaccttgtcccctgaccagcagcccacagcctggagctacgaccagccgcccaaggactccccgctggggccctgcaggggagaaagtcctccgacacctcccggccagccgcccatatcacccaagaagtttttaccctcaacagcaaaccggggtctccctcccaggacacaggagtcaaggcccagtgacctggggaagaacgcaggggacacgctgcctcaggaggacctgccgctgacgaagcccgagatgtttgagaaccccctgtatgggtccctgagttccttccctaagcctgctcccaggaaggaccaggaatcccccaaaatgccgcggaaggaacccccgccctgcccggaacccggcatcttgtcgcccagcatcgtgctcaccaaagcccaggaggctgatcgcggcgaggggcccggcaagcaggtgcccgcgccccggctgcgctccttcacgtgctcatcctctgccgagggcagggcggccggcggggacaagagccaagggaagcccaagaccccggtcagctcccaggccccggtgccggccaagaggcccatcaagccttccagatcggaaatcaaccagcagaccccgcccaccccgacgccgcggccgccgctgccagtcaagagcccggcggtgctgcacctccagcactccaagggccgcgactaccgcgacaacaccgagctcccgcatcacggcaagcaccggccggaggaggggccaccagggcctctaggcaggactgccatgcagtgaagccctcagtgagctgccactgagtcgggagcccagaggaacggcgtgaagccactggaccctctcccgggacctcctgctggctcctcctgcccagcttcctatgcaaggctttgtgttttcaggaaagggcctagcttctgtgtggcccacagagttcactgcctgtgagacttagcaccaagtgctgaggctggaagaaaaacgcacaccagacgggcaacaaacagtctgggtccccagctcgctcttggtacttgggaccccagtgcctcgttgagggcgccattctgaagaaaggaactgcagcgccgatttgagggtggagatatagataataataatattaataataataatggccacatggatcgaacactcatgatgtgccaagtgctgtgctaagtgctttacgaacattcgtcatatcaggatgacctcgagagctgaggctctagccacctaaaaccacgtgcccaaacccaccagtttaaaacggtgtgtgttcggaggggtgaaagcattaagaagcccagtgccctcctggagtgagacaagggctcggccttaaggagctgaagagtctgggtagcttgtttagggtacaagaagcctgttctgtccagcttcagtgacacaagctgctttagctaaagtcccgcgggttccggcatggctaggctgagagcagggatctacctggcttctcagttctttggttggaaggagcaggaaatcagctcctattctccagtggagagatctggcctcagcttgggctagagatgccaaggcctgtgccaggttccctgtgccctcctcgaggtgggcagccatcaccagccacagttaagccaagccccccaacatgtattccatcgtgctggtagaagagtctttgctgttgctcccgaaagccgtgctctccagcctggctgccagggagggtgggcctcttggttccaggctcttgaaatagtgcagccttttcttcctatctctgtggctttcagctctgcttccttggttattaggagaatagatgggtgatgtctttccttatgttgctttttcaacatagcagaattaatgtagggagctaaatccagtggtgtgtgtgaatgcagaagggaatgcaccccacattcccatgatggaagtctgcgtaaccaataaattgtgcctttctcactc

SEQ ID NO: 26621 - DNA, 2180 bp, Artificial Sequence
  derived and/or modified sequence
atggtcccctgctggaaccatggcaacatcacccgctccaaggcggaggagctgctttccaggacaggcaaggacgggagcttcctcgtgcgtgccagcgagtccatctcccgggcatacgcgctctgcgtgctgtatcggaattgcgtttacacttacagaattctgcccaatgaagatgataaattcactgttcaggcatccgaaggcgtctccatgaggttcttcaccaagctggaccagctcatcgagttttacaagaaggaaaacatggggctggtgacccatctgcaataccctgtgccgctggaggaagaggacacaggcgacgaccctgaggaggacacagtagaaagtgtcgtgtctccacccgagctgcccccaagaaacatcccgctgactgccagctcctgtgaggccaaggaggttcctttttcaaacgagaatccccgagcgaccgagaccagccggccgagcctctccgagacattgttccagcgactgcaaagcatggacaccagtgggcttccagaagagcatcttaaggccatccaagattatttaagcactcagctcgcccaggactctgaatttgtgaagacagggtccagcagtcttcctcacctgaagaaactgaccacactgctctgcaaggagctctatgggtattgtttggaggtcttgttatcatatcctctttccctcctctcccaggttcctggtgaggccaatcccatcaacatggtgtccaagctcagccaactgacaagcctgttgtcgtccattgaagacaaggtcaaggccttgctgcacgagggtcctgagtctccgcaccggccctcccttatccctccagtcacctttgaggtgaaggcagagtctctggggattcctcagaaaatgcagctcaaagtcgacgttgagtctgggaaactgatcattaagaagtccaaggatggttctgaggacaagttctacagccacaagaaaatcctgcagctcattaagtcacagaaatttctgaataagttggtgatcttggtggaaacagagaaggagaagatcctgcggaaggaatatgtttttgctgactccaaaaagagagaaggcttctgccagctcctgcagcagatgaagaacaagcactcagagcagccggagcccgacatgatcaccatcttcatcggcacctggaacatgggtaacgccccccctcccaagaagatcacgtcctggtttctctccaaggggcagggaaagacgcgggacgactctgcggactacatcccccatgacatttacgtgatcggcacccaagaggaccccctgagtgagaaggagtggctggagatcctcaaacactccctgcaagaaatcaccagtgtgacttttaaaacagtcgccatccacacgctctggaacatccgcatcgtggtgctggccaagcctgagcacgagaaccggatcagccacatctgtactgacaacgtgaagacaggcattgcaaacacactggggaacaagggagccgtgggggtgtcgttcatgttcaatggaacctccttagggttcgtcaacagccacttgacttcaggaagtgaaaagaaactcaggcgaaaccaaaactatatgaacattctccggttcctggccctgggcgacaagaagctgagtccctttaacatcactcaccgcttcacgcacctcttctggtttggggatcttaactaccgtgtggatctgcctacctgggaggcagaaaccatcatccagaaaatcaagcagcagcagtacgcagacctcctgtcccacgaccagctgctcacagagaggagggagcagaaggtcttcctacacttcgaggaggaagaaatcacgtttgccccaacctaccgttttgagagactgactcgggacaaatacgcctacaccaagcagaaagcgacagggatgaagtacaacttgccttcctggtgtgaccgagtcctctggaagtcttatcccctggtgcacgtggtgtgtcagtcttatggcagtaccagcgacatcatgacgagtgaccacagccctgtctttgccacatttgaggcaggagtcacttcccagtttgtctccaagaacggtcccgggactgttgacagccaaggacagattgagtttctcaggtgctatgccacatt

SEQ ID NO: 26622 - DNA, 3534 bp, Artificial Sequence
  derived and/or modified sequence
atggtgccctgctggaaccacggcaacatcaccaggagcaaggccgaggagctgctgagcaggacaggcaaggatggcagcttcctggtgcgggccagcgagagcatcagccgggcctatgccctgtgtgtgctgtacagaaactgtgtgtacacctaccgcatcctgcccaatgaagatgacaagttcaccgtgcaggccagcgagggcgtgtccatgaggttcttcaccaagctggaccagctgattgagttctacaagaaggagaacatgggcctggtgacccacctgcagtaccctgtgcccctggaggaggaggacacaggagatgatcctgaggaggacacagtggagagcgtggtgtccccacctgagctgcccccaagaaacatccccctgacagccagcagctgtgaggccaaggaggtgcccttcagcaatgaaaacccccgggccacagagaccagccggcccagcctgtctgagaccctcttccagaggctgcagagcatggacaccagcggcctgcctgaggagcacctgaaggccatccaggactacctgagcacccagctggcccaggacagcgagtttgtgaagacaggcagcagcagcctgccccacctgaagaagctgaccaccctgctgtgcaaggagctgtatggccagatgctgaggacagtgcccggcatcggcaaggtgaaggaggaggaccacgtgcctggagaggccaaccccatcaacatggtgtccaagctgagccagctgaccagcctgctgagcagcattgaggacaaggtgaaggccctgctgcacgagggccctgagagcccccaccggcccagcctcatcccccctgtgacctttgaggtgaaggccgagagcctgggcatcccccagaagatgcagctgaaggtggatgtggagagcggcaagctgatcatcaagaagagcaaggatggcagcgaggacaagttctacagccacaagaagatcctgcagctgatcaagagccagaagttcctgaacaagctggtgatcctggtggagacagagaaggagaagatcctgaggaaggagtatgtgtttgctgacagcaagaagcgggagggcttctgccagctgctgcagcagatgaagaacaagcacagcgagcagcctgagccagacatgatcaccatcttcatcggcacctggaacatgggaaatgcccccccacccaagaagatcacctcctggttcctgagcaagggccagggcaagaccagagatgacagcgctgactacatcccccatgacatctacgtgattggcacccaggaggaccccctgtctgagaaggagtggctggagatcctgaagcacagcctgcaggagatcacctctgtgaccttcaagacagtggccatccacaccctgtggaacatccgcatcgtggtgctggccaagccagagcatgaaaatcgcatcagccacatctgcacagacaacgtgaagacaggcatcgccaacaccctgggcaacaagggagctgtgggcgtgtccttcatgtttaatggcaccagcctgggctttgtgaacagccacctgaccagcggcagcgagaagaagctgcggaggaaccagaactacatgaacatcctgcgcttcctggccctgggggacaagaagctgagccccttcaacatcacccaccgcttcacccacctgttctggtttggagacctgaactacagagtggacctgcccacctgggaggccgagaccatcatccagaagatcaagcagcagcagtatgctgacctgctgagccatgaccagctgctgacagagcggcgggagcagaaggtgttcctgcactttgaggaggaggagatcacctttgcccccacctacagatttgagcggctgacccgggacaagtatgcctacaccaagcagaaggccaccggcatgaagtacaacctgcccagctggtgtgacagagtgctgtggaagagctaccccctggtgcacgtggtgtgccagagctatggcagcaccagtgacatcatgaccagtgaccacagccctgtgtttgccacctttgaggccggcgtgaccagccagtttgtgtccaagaatggacctggcaccgtggacagccagggccagatcgagttcctgcgctgctacgccaccctgaagaccaagagccagaccaagttctacctggagttccacagcagctgcctggagagctttgtgaagagccaggagggagaaaatgaggagggcagcgagggggagctggtggtgaagtttggagagaccctgcccaagctgaagcccatcatcagtgaccctgagtacctgctggaccagcacatcctgatcagcatcaagagcagtgacagtgatgagagctatggagagggctgcatcgccctgcggctggaggccacagagacccagctgcccatctacacccccctgacccaccacggggagctgaccggccacttccagggcgagatcaagctgcagaccagccagggcaagacccgggagaagctgtatgactttgtgaagacagaaagagatgagagcagcggccccaagaccctgaagagcctgaccagccatgaccccatgaagcagtgggaggtgaccagccgggccccaccctgcagcggcagcagcatcacagagatcatcaaccccaactacatgggcgtgggcccctttggaccacccatgcccctgcacgtgaagcagaccctgagcccagaccagcagcccacagcctggagctatgaccagccccccaaggacagccccctgggcccctgccgcggggagagcccccccaccccacctggccagccccccatcagccccaagaagttcctgcccagcacagccaacagaggcctgccccccaggacccaggagagccggcccagcgacctgggcaagaatgctggggacaccctgccccaggaggacctgcccctgaccaagccagagatgtttgagaaccccctgtatggcagcctgagcagcttccccaagccagcccccaggaaggaccaggagagccccaagatgcccaggaaggagcccccaccctgcccagagcccggcatcctgagccccagcatcgtgctgaccaaggcccaggaggccgacagaggagagggccctgggaagcaggtgcctgccccccggctgcgctccttcacctgcagcagcagcgctgagggccgggctgctggaggagacaagagccagggcaagcccaagacccctgtgagcagccaggcccctgtgcctgccaagaggcccatcaagcccagccgctctgagatcaaccagcagaccccacccacccccacccccaggcctcccctgcctgtgaagagccctgctgtgctgcacctgcagcacagcaagggccgggactacagagacaacacagagctgccccaccacggcaagcacaggcctgaggagggccccccaggccccctgggccgcacagccatgcagtag

SEQ ID NO: 26623 - DNA, 1791 bp, Artificial Sequence
  derived and/or modified sequence
atggtgccctgctggaaccacggcaacatcaccaggagcaaggccgaggagctgctgagcaggacaggcaaggatggcagcttcctggtgcgggccagcgagagcatcagccgggcctatgccctgtgtgtgctgtacagaaactgtgtgtacacctaccgcatcctgcccaatgaagatgacaagttcaccgtgcaggccagcgagggcgtgtccatgaggttcttcaccaagctggaccagctgattgagttctacaagaaggagaacatgggcctggtgacccacctgcagtaccctgtgcccctggaggaggaggacacaggagatgatcctgaggaggacacagtggagagcgtggtgtccccacctgagctgcccccaagaaacatccccctgacagccagcagctgtgaggccaaggaggtgcccttcagcaatgaaaacccccgggccacagagaccagccggcccagcctgtctgagaccctcttccagaggctgcagagcatggacaccagcggcctgcctgaggagcacctgaaggccatccaggactacctgagcacccagctggcccaggacagcgagtttgtgaagacaggcagcagcagcctgccccacctgaagaagctgaccaccctgctgtgcaaggagctgtatggctactgcctggaggtgctgctgagctaccccctgagcctgctgagccaggtgcctggagaggccaaccccatcaacatggtgtccaagctgagccagctgaccagcctgctgagcagcattgaggacaaggtgaaggccctgctgcacgagggccctgagagcccccaccggcccagcctcatcccccctgtgacctttgaggtgaaggccgagagcctgggcatcccccagaagatgcagctgaaggtggatgtggagagcggcaagctgatcatcaagaagagcaaggatggcagcgaggacaagttctacagccacaagaagatcctgcagctgatcaagagccagaagttcctgaacaagctggtgatcctggtggagacagagaaggagaagatcctgaggaaggagtatgtgtttgctgacagcaagaagcgggagggcttctgccagctgctgcagcagatgaagaacaagcacagcgagcagcctgagccagacatgatcaccatcttcatcggcacctggaacatgggaaatgcccccccacccaagaagatcacctcctggttcctgagcaagggccagggcaagaccagagatgattctgctgactacatcccccatgacatctacgtgattggcacccaggaggaccccctgtctgagaaggagtggctggagatcctgaagcacagcctgcaggagatcacctctgtgaccttcaagacagtggccatccacaccctgtggaacatcagaattgtggtgctggccaagccagagcacgagaaccgcatcagccacatctgcacagacaacgtgaagacaggaattgccaacaccctgggcaacaagggagctgtgggcgtgtccttcatgttcaacggcaccagcctgggctttgtgaacagccacctgaccagcggcagcgagaagaagctgcggaggaaccagaactacatgaacatcctgcgcttcctggccctgggggacaagaagctgagccccttcaacatcacccaccgcttcacccacctgttctggtttggagacctgaactacagagtggacctgcccacctgggaggccgagaccatcatccagaagatcaagcagcagtag

SEQ ID NO: 26624 - DNA, 3534 bp, Artificial Sequence
  derived and/or modified sequence
atggtgccctgctggaaccacggcaacatcacccggagcaaggccgaagagcttcttagtaggactggcaaagacgggagttttttagtgagggcctccgagagcatttcacgcgcatatgctctgtgcgtcctgtaccgcaattgcgtgtatacttaccgaatccttcccaacgaagatgacaagttcaccgtccaggccagcgagggggtgtctatgcgctttttcaccaagctcgaccagctgatagaattctacaaaaaggagaacatggggcttgtcactcatcttcagtatcccgtccccctcgaggaggaagacacaggggacgaccctgaagaggacaccgtcgagtctgtggtgagccctccggagctcccccctagaaacataccactgacagcatcctcgtgcgaggcgaaagaggtgcctttctcaaatgaaaaccctagggcaactgaaactagtcgcccaagtctcagcgaaaccctttttcagcgcctgcaaagcatggataccagcggcctgcctgaagaacacctcaaagctattcaggactatctgtcaactcagttggcgcaggatagtgagtttgtcaagacgggcagttcatctcttccccatctgaaaaaactaactacccttctctgtaaagagttgtacggccagatgctgcgaacggtgcccggaattgggaaagtgaaggaggaggaccacgtgcctggagaggccaacccaataaacatggtgtctaagttgtcccagttgacaagcttactgtcctcaatcgaagacaaggtaaaggcacttctgcatgaaggcccagaaagcccgcacaggccatcccttattccccctgtgacgtttgaagtgaaagctgagtcgctgggtatccctcaaaaaatgcaactgaaagttgacgtcgaatcaggaaaactgataattaaaaaaagcaaggacgggtcagaagacaagttttactcccacaaaaaaatcctgcagcttattaaaagccaaaaattcttgaacaagttagttattctggttgaaactgaaaaagaaaaaattctgagaaaggaatacgtattcgctgatagcaaaaagagagaaggtttctgtcagctcctccagcagatgaagaataagcactcggagcagccagagcccgatatgataacaatcttcatcgggacttggaatatgggcaacgcccctccacctaaaaagatcacgtcctggttcttgagcaagggacagggaaagactcgggacgattcggcggactacatcccacacgatatttacgtgattggaactcaggaagaccctctgagcgagaaagaatggttagagatcctcaagcattcgctgcaggagataacctctgtaacctttaagactgttgcaatccatacactgtggaacattcggatcgtggtcctagcaaagcctgaacatgaaaacaggatctcccacatatgtacagacaacgttaaaactggtattgcaaataccctgggaaacaagggagccgtgggcgtgtcattcatgttcaacgggacaagcctcggatttgtaaactctcacctgacttcaggttcagagaagaagttgcgacgtaatcagaactacatgaatatactcaggttcctcgcccttggcgataaaaaactctccccgtttaatattacacacaggttcacacatctgttctggttcggggacctgaactacagggtcgatctcccaacatgggaggcggagactatcattcagaagatcaagcaacagcaatatgctgacctgttaagtcacgatcagcttctcacagaacggcgagagcagaaggtctttctccacttcgaagaagaagaaatcacctttgcccccacatatcgatttgagaggctgactcgggataagtacgcatacactaagcagaaggccaccggtatgaaatataatctacctagttggtgtgaccgcgtcctatggaagtcttacccccttgtccatgtcgtatgtcagagttacgggtcgacctccgacataatgacgagcgaccatagccctgttttcgcaacattcgaggctggagtgacttcccagtttgtttccaagaacggccccggaaccgtagattcacagggacagatagagtttctccggtgttacgctaccctgaaaacgaagagccagacaaagttttacctggagtttcactcttcttgcctggaaagctttgtaaagtcgcaagaaggggagaatgaggaagggagcgagggagaactggtcgtgaagttcggcgagactcttcccaaactgaagcccattatcagcgaccctgaatatcttttggaccaacatattctgatctccatcaaaagcagcgacagtgatgagtcttacggcgagggatgtatagcccttaggctggaggccaccgagacccaactgcctatatacactcctttgacccatcacggggaactgactgggcactttcaaggagagattaagttacagactagtcaagggaaaacccgggagaagctgtacgactttgtcaagacagagagggatgaatcgagcggccccaagacactgaaatcgctgacgtctcatgacccaatgaagcaatgggaagtcaccagtcgcgcccctccgtgctctggttcctctataacagaaataattaatcctaattacatgggcgtcggccccttcggccctcctatgcctctgcatgtcaaacagacactgtctccggaccagcagcccacagcttggtcatatgatcagcctcccaaggactcacccctgggcccatgtagaggggagtccccacccacaccaccaggccagccccccatctcccccaagaagtttttaccctccacagctaataggggcctcccaccgcgcacgcaagagtctaggcctagcgacctgggcaaaaatgccggtgatactctgcctcaggaagacctgcccctcacaaagcccgaaatgtttgaaaaccccctgtacggcagtctttcaagttttccaaaacctgctccaagaaaagaccaggagagtcctaagatgccccggaaagagccacccccgtgtcctgagcccggaatcttgtccccgagcatcgtgctgacaaaagcacaggaagccgaccggggcgaagggccggggaaacaggttcccgcacctcgcctgcggagcttcacctgctcctcctccgcagagggcagggctgccggcggcgacaagagtcagggtaagcctaagacccctgttagctcccaggcccccgttccagccaagcgcccaattaaaccgtctcgctccgaaatcaaccagcagacacctcctacgccaacccccagaccccccttgccagtgaagtctcctgcagtgttacatctacagcatagcaaaggccgagactaccgcgataatacagaattgccccaccacggcaagcacagacctgaagagggtcctcccggacctctcgggagaacagcaatgcaatag

SEQ ID NO: 26625 - DNA, 1791 bp, Artificial Sequence
  derived and/or modified sequence
atggtgccctgctggaaccacggcaacatcacccggagcaaggccgaagagctcttgagcaggacaggcaaagatggaagcttcctggtgagagcatccgagagtatttctagggcatacgccctgtgtgtgttatatcgaaactgcgtatacacataccgaatcctccccaacgaagacgataaattcactgtgcaggcttctgagggtgttagcatgaggttttttacaaagctggaccagctgatcgaattctacaaaaaagagaacatgggcctggtcacccatctacaatatccggtcccactggaggaggaagataccggagatgaccccgaggaggacactgtcgaaagcgtcgtgagcccgccagagctcccgcctcggaacattcctctcacagcgagctcctgcgaagccaaagaggtgccgttctccaatgaaaacccgcgtgcaactgagacgtctcgccccagcctgagcgagacactattccaacgtctgcagtctatggacacatcaggcttacctgaagagcatttaaaagcgatccaggattacctctcaacccaactagcccaagatagtgagtttgtcaaaacgggcagttcttcattgccacaccttaaaaaactcaccactcttctctgcaaggaactctacggctactgcctggaagtgctgcttagctacccgctgtctctgttatcccaagtgcctggtgaggctaacccgattaacatggtatccaagttgtcacaactcacatccttgctgagcagcatagaggacaaagtcaaagctctcctgcacgagggaccagagtcgccacaccgtcctagtttgatccctccagtcaccttcgaggttaaagctgagagtttaggcatcccacaaaaaatgcagctgaaggtagatgtagaatcaggcaaactcatcataaagaaaagcaaggatggcagtgaagataaattctacagtcataaaaagatactgcagctgatcaaatctcagaagtttttaaataagctcgtgatcctggtggagaccgagaaggaaaagatacttagaaaagaatacgtttttgccgactcgaagaaaagggagggcttttgccaattgctgcagcaaatgaagaacaagcattcggagcagccagaacccgacatgatcacaatctttatcgggacttggaatatgggcaatgctcctcctcctaaaaagataacctcatggtttctcagcaagggtcaggggaagaccagagacgatagtgcagattatattcctcacgatatttatgtgataggaacccaagaggatcccttgagcgaaaaggagtggctggagattctgaaacatagtctgcaggagatcacatctgtaaccttcaaaaccgttgcaatccataccctgtggaatattcgcatcgttgttctcgctaaacccgagcacgagaatcgaatttcacatatctgtactgataacgtcaaaactgggattgccaacacgctgggtaacaaaggggcagtaggcgtgtcctttatgtttaatgggacctctctgggcttcgtcaactctcatctcacctcgggcagtgagaaaaagctgagaaggaaccagaactatatgaacattttgcgcttccttgccttgggggacaagaagctgagcccctttaatatcacccacaggtttacgcacctcttctggttcggggacctcaattaccgtgtagatcttccaacctgggaggccgagaccatcatccagaagataaagcagcaatag

SEQ ID NO: 26626 - DNA, 3534 bp, Artificial Sequence
  derived and/or modified sequence
atggtcccatgctggaatcacggaaacataactcggtctaaggccgaggagctgttatcccgcacagggaaagacgggtcttttcttgtcagggcgtcagaaagtatttcccgggcttatgcactttgtgtcctttaccggaattgtgtgtacacctatcgcattctgcctaacgaagatgacaagttcaccgttcaagcctcagaaggcgtgagcatgcgatttttcactaagctcgatcagcttatagagttctacaagaaagagaacatgggtctcgtaacgcacctgcagtatccggttcccttagaggaggaggataccggagatgatcccgaggaagacactgtcgaaagtgtcgttagcccgcctgaactccctcccagaaacatacccctgactgcttcatcatgtgaagccaaagaagtgccgttcagtaacgagaatcccagggcaactgagacctcacgcccatctctcagcgagacactattccaaaggctgcaaagcatggatacgagcggcctgcccgaggagcatctcaaagcaatccaggactacctgagcacccagctagctcaggactccgaatttgttaaaaccggctctagtagcttaccacacctgaagaagttgactactctgctgtgcaaggagctgtacggccagatgctgcggactgtgccgggtatcgggaaggtgaaggaggaggatcacgtgcccggagaggccaaccctatcaacatggtaagtaagctgtcccaactgacaagcctcctgtcttccatcgaagacaaggtgaaagcactgctgcatgaaggccctgaatccccccaccgccctagcctcattcccccagtgaccttcgaggtgaaagctgagagtctggggatcccacagaagatgcagctgaaagtagacgtggaaagtggaaaattgatcatcaagaagagcaaggacggctcagaggataagttctatagtcacaaaaagattctacagctcatcaaaagtcaaaaatttctgaacaagttggtcattttggtcgagacagagaaagaaaagatcctccgcaaggagtatgtgttcgccgatagcaagaaacgagagggcttttgccagctcctacagcagatgaagaataagcactcagagcagcctgagccagatatgataaccatctttatagggacatggaacatggggaatgcaccccctcctaaaaaaatcacctcatggttcttgtcgaagggtcagggtaagactcgggacgattcggccgattatatcccccatgacatctacgtcatcgggactcaggaagaccccctgtccgagaaggagtggctggagattctgaaacacagcctgcaagagattacctcagttacttttaagacagtcgccatccacaccctgtggaacatcagaattgtggtcctcgcaaagcccgaacacgagaaccgaatcagtcatatttgtacagacaacgtgaagaccggcatcgcgaatacgctgggaaacaagggggctgtaggcgtgtcatttatgtttaacggcactagtctggggttcgtcaactctcatcttacctctggctctgagaagaaactccgacgcaaccagaactacatgaatatcttgagattcctggcccttggcgacaaaaagctcagtcccttcaacattacacacaggtttactcacctgttctggttcggtgatctcaactaccgcgttgatctccccacctgggaggccgaaacaattattcagaagattaaacagcagcagtatgctgacctgctatctcatgaccaactccttaccgagagacgcgagcaaaaagtttttctgcacttcgaagaggaagagattaccttcgctcctacatacagatttgagcgtctaacccgcgacaagtatgcatacacgaaacaaaaggctacgggcatgaagtataacttgccctcctggtgcgatcgggtgctatggaaatcatatccattggtgcacgtcgtctgccagagttacgggtcgacttccgacattatgacttctgaccattcacccgtgttcgctacatttgaagccggagtcacatcccaatttgtgtcaaaaaatggaccagggaccgtggatagtcaaggtcaaattgagtttctcaggtgctacgctactctgaagaccaagagtcaaaccaagttttacttggagtttcacagttcctgccttgagagcttcgttaagtcccaggaaggcgagaatgaagaaggttctgaaggggagcttgtagtaaaattcggagagaccctgccaaagttaaaacctattatctcagaccccgagtacctgctagatcagcacatactcatcagtatcaaatcctctgactccgacgaatcttacggtgaaggctgtatcgctctgcggctcgaagcaactgaaacccagctgcccatttacacacctctaacgcatcatggagaactgactggccactttcagggcgagatcaaattgcagacaagtcaggggaaaacccgggagaagttgtacgacttcgtgaagacagaacgcgacgaatccagcggacctaagacacttaagagccttacaagccatgatcccatgaagcaatgggaagttacaagcagggccccaccctgctccggatcctctatcactgagataatcaaccctaattatatgggcgttggtcccttcggcccacccatgcctctgcatgtaaaacaaaccctgagcccagatcaacagcccacagcttggagctatgaccagccaccaaaagactcccccctcggcccatgccgaggggaatctcctccgacacccccaggtcagccacctatttctcccaagaaattcttaccttccactgcaaatcgaggccttcctcccagaacccaggaatcccgcccatccgacctgggcaagaacgctggagataccttacctcaagaagatcttccactgactaaacccgagatgtttgagaatcccctgtatggcagtctgtcatcatttccaaaacctgcaccccgtaaagaccaggagtccccaaaaatgccgaggaaagaacctcctccgtgtccagagcctggaatcctctccccctccattgtgctgacaaaagcacaggaggcagacagaggcgagggaccgggaaagcaggtgcctgccccaaggttgagatcgttcacgtgcagttcaagtgctgaaggacgcgcagccggtggcgataagtcccagggcaaacctaaaactccggtatcttctcaggcacctgtgccagccaagcggccaattaaaccttccagaagcgagatcaaccaacagacacccccaacaccaaccccacggccacctctaccagtgaaatctccagccgtcttacacctccagcattccaaaggacgggattatagggataacaccgaactgcctcaccacggcaaacatcgaccagaggaggggccacccggtccacttggccgtactgccatgcagtag

SEQ ID NO: 26627 - DNA, 1791 bp, Artificial Sequence
  derived and/or modified sequence
atggttccctgttggaaccatggaaacattacccgatccaaagcggaagagctgttgtcccggaccggaaaggatgggagctttttagtcagagcatctgagagcatctctcgtgcctacgctttgtgtgttctctataggaactgtgtatatacatacagaatcctcccgaacgaggatgacaagttcaccgtccaggctagcgagggagtgtcaatgcgcttttttaccaaattggaccaactaatcgaattttacaagaaagaaaacatgggattggtgacacacctccagtacccggtgccattggaggaggaggacaccggagatgaccccgaggaggacacagtagagtctgtggtttcccccccagagctgccacccaggaacatccccctaacggctagttcatgtgaggctaaggaggtaccattttcgaatgaaaaccctagagctactgagacttctcggcctagtctcagtgagacactgtttcagaggctccagagtatggatactagtggcctgcctgaggaacacttgaaagccattcaagattatctgtctacacaactcgcgcaagacagtgagtttgtgaagaccggttcttcaagcctgccccatcttaagaaactgacaactctgctttgtaaggaactgtatgggtattgtctggaagtgctgctcagttatccactttctctgctgagccaagtcccaggagaagcaaatcccatcaatatggtttccaagctgtcacaacttacaagccttctcagctccatcgaggacaaggttaaggccctcctccacgaggggccagagtcaccccacaggccttccctgatacctcccgttactttcgaagtgaaggcagaaagtctgggaatcccacaaaaaatgcaacttaaagtcgacgtggagtccggaaaactgattataaagaaaagcaaggatggcagtgaggacaagttttactctcataaaaagattctgcagcttattaaaagccagaagttccttaataagctggtgatcctggtcgagacggaaaaagagaaaatcctcaggaaagaatacgtgttcgctgacagcaagaagcgggagggattctgtcagctcctgcaacaaatgaaaaataagcactcagaacagcccgagcctgacatgattaccatctttataggaacctggaacatggggaatgccccaccacctaaaaaaattactagctggtttcttagcaaggggcagggcaagacgcgagatgacagcgctgactatatccctcacgacatatatgtgatcgggacccaggaggatccgctttctgagaaggagtggctggagatcctcaaacacagcctgcaagagattacttcagtcacctttaagacggtcgctatccacacactttggaacatcaggattgtggtcttagccaagcctgagcatgagaatagaattagtcatatttgtacagacaatgtgaaaactggaatcgccaacacgctcggcaacaaaggggctgtgggagtgtccttcatgtttaatgggacttccctcgggtttgtcaacagccacctgacctcggggtctgaaaagaagctccgacggaaccaaaattacatgaacatcttaaggtttttagcactgggcgacaaaaagttaagcccgttcaatatcacgcacaggtttacgcacttattttggttcggtgacctgaactacagggtagacttacctacatgggaggccgaaacgatcattcaaaagatcaagcagcaatag

SEQ ID NO: 26628 - DNA, 3534 bp, Artificial Sequence
  derived and/or modified sequence
atggtgccctgctggaaccacggcaacatcaccagaagcaaggccgaggagctgctgagcagaaccggcaaggacggcagcttcctggtgagagccagcgagagcatcagcagagcctacgccctgtgcgtgctgtacagaaactgcgtgtacacctacagaatcctgcccaacgaggacgacaagttcaccgtgcaggccagcgagggcgtgagcatgagattcttcaccaagctggaccagctgatcgagttctacaagaaggagaacatgggcctggtgacccacctgcagtaccccgtgcccctggaggaggaggacaccggcgacgaccccgaggaggacaccgtggagagcgtggtgagcccccccgagctgccccccagaaacatccccctgaccgccagcagctgcgaggccaaggaggtgcccttcagcaacgagaaccccagagccaccgagaccagcagacccagcctgagcgagaccctgttccagagactgcagagcatggacaccagcggcctgcccgaggagcacctgaaggccatccaggactacctgagcacccagctggcccaggacagcgagttcgtgaagaccggcagcagcagcctgccccacctgaagaagctgaccaccctgctgtgcaaggagctgtacggccagatgctgagaaccgtgcccggcatcggcaaggtgaaggaggaggaccacgtgcccggcgaggccaaccccatcaacatggtgagcaagctgagccagctgaccagcctgctgagcagcatcgaggacaaggtgaaggccctgctgcacgagggccccgagagcccccacagacccagcctgatcccccccgtgaccttcgaggtgaaggccgagagcctgggcatcccccagaagatgcagctgaaggtggacgtggagagcggcaagctgatcatcaagaagagcaaggacggcagcgaggacaagttctacagccacaagaagatcctgcagctgatcaagagccagaagttcctgaacaagctggtgatcctggtggagaccgagaaggagaagatcctgagaaaggagtacgtgttcgccgacagcaagaagagagagggcttctgccagctgctgcagcagatgaagaacaagcacagcgagcagcccgagcccgacatgatcaccatcttcatcggcacctggaacatgggcaacgcccccccccccaagaagatcaccagctggttcctgagcaagggccagggcaagaccagagacgacagcgccgactacatcccccacgacatctacgtgatcggcacccaggaggaccccctgagcgagaaggagtggctggagatcctgaagcacagcctgcaggagatcaccagcgtgaccttcaagaccgtggccatccacaccctgtggaacatcagaatcgtggtgctggccaagcccgagcacgagaacagaatcagccacatctgcaccgacaacgtgaagaccggcatcgccaacaccctgggcaacaagggcgccgtgggcgtgagcttcatgttcaacggcaccagcctgggcttcgtgaacagccacctgaccagcggcagcgagaagaagctgagaagaaaccagaactacatgaacatcctgagattcctggccctgggcgacaagaagctgagccccttcaacatcacccacagattcacccacctgttctggttcggcgacctgaactacagagtggacctgcccacctgggaggccgagaccatcatccagaagatcaagcagcagcagtacgccgacctgctgagccacgaccagctgctgaccgagagaagagagcagaaggtgttcctgcacttcgaggaggaggagatcaccttcgcccccacctacagattcgagagactgaccagagacaagtacgcctacaccaagcagaaggccaccggcatgaagtacaacctgcccagctggtgcgacagagtgctgtggaagagctaccccctggtgcacgtggtgtgccagagctacggcagcaccagcgacatcatgaccagcgaccacagccccgtgttcgccaccttcgaggccggcgtgaccagccagttcgtgagcaagaacggccccggcaccgtggacagccagggccagatcgagttcctgagatgctacgccaccctgaagaccaagagccagaccaagttctacctggagttccacagcagctgcctggagagcttcgtgaagagccaggagggcgagaacgaggagggcagcgagggcgagctggtggtgaagttcggcgagaccctgcccaagctgaagcccatcatcagcgaccccgagtacctgctggaccagcacatcctgatcagcatcaagagcagcgacagcgacgagagctacggcgagggctgcatcgccctgagactggaggccaccgagacccagctgcccatctacacccccctgacccaccacggcgagctgaccggccacttccagggcgagatcaagctgcagaccagccagggcaagaccagagagaagctgtacgacttcgtgaagaccgagagagacgagagcagcggccccaagaccctgaagagcctgaccagccacgaccccatgaagcagtgggaggtgaccagcagagcccccccctgcagcggcagcagcatcaccgagatcatcaaccccaactacatgggcgtgggccccttcggcccccccatgcccctgcacgtgaagcagaccctgagccccgaccagcagcccaccgcctggagctacgaccagccccccaaggacagccccctgggcccctgcagaggcgagagcccccccaccccccccggccagccccccatcagccccaagaagttcctgcccagcaccgccaacagaggcctgccccccagaacccaggagagcagacccagcgacctgggcaagaacgccggcgacaccctgccccaggaggacctgcccctgaccaagcccgagatgttcgagaaccccctgtacggcagcctgagcagcttccccaagcccgcccccagaaaggaccaggagagccccaagatgcccagaaaggagccccccccctgccccgagcccggcatcctgagccccagcatcgtgctgaccaaggcccaggaggccgacagaggcgagggccccggcaagcaggtgcccgcccccagactgagaagcttcacctgcagcagcagcgccgagggcagagccgccggcggcgacaagagccagggcaagcccaagacccccgtgagcagccaggcccccgtgcccgccaagagacccatcaagcccagcagaagcgagatcaaccagcagaccccccccacccccacccccagaccccccctgcccgtgaagagccccgccgtgctgcacctgcagcacagcaagggcagagactacagagacaacaccgagctgccccaccacggcaagcacagacccgaggagggcccccccggccccctgggcagaaccgccatgcagtag

SEQ ID NO: 26629 - DNA, 1791 bp, Artificial Sequence
  derived and/or modified sequence
atggtgccctgctggaaccacggcaacatcaccagaagcaaggccgaggagctgctgagcagaaccggcaaggacggcagcttcctggtgagagccagcgagagcatcagcagagcctacgccctgtgcgtgctgtacagaaactgcgtgtacacctacagaatcctgcccaacgaggacgacaagttcaccgtgcaggccagcgagggcgtgagcatgagattcttcaccaagctggaccagctgatcgagttctacaagaaggagaacatgggcctggtgacccacctgcagtaccccgtgcccctggaggaggaggacaccggcgacgaccccgaggaggacaccgtggagagcgtggtgagcccccccgagctgccccccagaaacatccccctgaccgccagcagctgcgaggccaaggaggtgcccttcagcaacgagaaccccagagccaccgagaccagcagacccagcctgagcgagaccctgttccagagactgcagagcatggacaccagcggcctgcccgaggagcacctgaaggccatccaggactacctgagcacccagctggcccaggacagcgagttcgtgaagaccggcagcagcagcctgccccacctgaagaagctgaccaccctgctgtgcaaggagctgtacggctactgcctggaggtgctgctgagctaccccctgagcctgctgagccaggtgcccggcgaggccaaccccatcaacatggtgagcaagctgagccagctgaccagcctgctgagcagcatcgaggacaaggtgaaggccctgctgcacgagggccccgagagcccccacagacccagcctgatcccccccgtgaccttcgaggtgaaggccgagagcctgggcatcccccagaagatgcagctgaaggtggacgtggagagcggcaagctgatcatcaagaagagcaaggacggcagcgaggacaagttctacagccacaagaagatcctgcagctgatcaagagccagaagttcctgaacaagctggtgatcctggtggagaccgagaaggagaagatcctgagaaaggagtacgtgttcgccgacagcaagaagagagagggcttctgccagctgctgcagcagatgaagaacaagcacagcgagcagcccgagcccgacatgatcaccatcttcatcggcacctggaacatgggcaacgcccccccccccaagaagatcaccagctggttcctgagcaagggccagggcaagaccagagacgacagcgccgactacatcccccacgacatctacgtgatcggcacccaggaggaccccctgagcgagaaggagtggctggagatcctgaagcacagcctgcaggagatcaccagcgtgaccttcaagaccgtggccatccacaccctgtggaacatcagaatcgtggtgctggccaagcccgagcacgagaacagaatcagccacatctgcaccgacaacgtgaagaccggcatcgccaacaccctgggcaacaagggcgccgtgggcgtgagcttcatgttcaacggcaccagcctgggcttcgtgaacagccacctgaccagcggcagcgagaagaagctgagaagaaaccagaactacatgaacatcctgagattcctggccctgggcgacaagaagctgagccccttcaacatcacccacagattcacccacctgttctggttcggcgacctgaactacagagtggacctgcccacctgggaggccgagaccatcatccagaagatcaagcagcagtag

SEQ ID NO: 26630 - protein, 612 aa, Artificial Sequence
  derived and/or modified sequence
MAAETLLSSLLGLLLLGLLLPASLTGGVGSLNLEELSEMRYGIEILPLPVMGGQSQSSDVVIVSSKYKQRYECRLPAGAIHFQREREEETPAYQGPGIPELLSPMRDAPCLLKTKDWWTYEFCYGRHIQQYHMEDSEIKGEVLYLGYYQSAFDWDDETAKASKQHRLKRYHSQTYGNGSKCDLNGRPREAEVRFLCDEGAGISGDYIDRVDEPLSCSYVLTIRTPRLCPHPLLRPPPSAAPQAILCHPSLQPEEYMAYVQRQADSKQYGDKIIEELQDLGPQVWSETKSGVAPQKMAGASPTKDDSKDSDFWKMLNEPEDQAPGGEEVPAEEQDPSPEAADSASGAPNDFQNNVQVKVIRSPADLIRFIEELKGGTKKGKPNIGQEQPVDDAAEVPQREPEKERGDPERQREMEEEEDEDEDEDEDEDERQLLGEFEKELEGILLPSDRDRLRSEVKAGMERELENIIQETEKELDPDGLKKESERDRAMLALTSTLNKLIKRLEEKQSPELVKKHKKKRVVPKKPPPSPQPTGKIEIKIVRPWAEGTEEGARWLTDEDTRNLKEIFFNILVPGAEEAQKERQRQKELESNYRRVWGSPGGEGTGDLDEFDF

SEQ ID NO: 26631 - DNA, 1839 bp, Artificial Sequence
  derived and/or modified sequence
atggcagccgagactttattgtcttccctgttgggactacttctgctgggactcctgctcccagccagtctgacaggtggtgtgggaagcctgaatctagaagagttgtctgagatgagatatgggatcgaaatacttcctctacctgttatgggaggtcaatcacagagcagcgatgtggtgatcgtgtcatctaagtataagcagaggtacgagtgcaggcttcctgcaggcgccatccatttccaacgcgagagggaagaggagacccctgcctatcagggtcccggaattccagaacttctctccccaatgagagatgctccttgcctgctgaaaacgaaagactggtggacatacgagttctgctacggccgccacattcagcagtaccatatggaagattctgaaatcaagggagaagtcttgtacctcggatactaccagtccgcattcgactgggatgatgagaccgccaaagcttctaaacagcataggctcaaacgataccacagtcagacctatggcaacggcagtaagtgcgatttgaatggccggccaagggaagccgaggtgaggtttctctgtgacgagggcgctggcatttctggggactatatcgaccgtgtggacgagccactgtcttgctcgtacgtgctcaccattaggacccctagattgtgcccacacccacttcttcggccccctccatcggcagcccctcaagctattctctgccacccatctctgcagcccgaggaatacatggcctacgttcaacgccaggccgactcaaaacagtacggagacaagatcatcgaagagctgcaagacttgggaccccaggtgtggtctgagacgaagtcaggagttgcccctcagaagatggcgggggccagtcctacaaaggacgactccaaggactctgacttttggaaaatgcttaatgagccagaggatcaagccccaggcggcgaggaggtgcctgcagaagaacaggatcccagccctgaggccgccgattccgcgtcgggagctcctaatgacttccagaataatgttcaggtaaaagtgatccgctctcccgcggatcttattagattcatcgaggagctcaaaggaggaactaagaagggcaagccaaacattggtcaggagcagccggttgatgacgctgctgaagtgccccagagggagccagagaaggaaaggggcgacccagaaaggcagcgcgagatggaagaggaggaggacgaagacgaggatgaggatgaagacgaggatgagaggcaactcctaggagaatttgagaaggaactcgaagggattctgctcccatcagatagggacaggctacggagtgaggttaaggccggcatggaaagagaattggagaacatcatccaagaaactgaaaaagagcttgatcctgacggcttgaagaaagaatcagagcgcgatagggcaatgctcgctctgaccagtacactcaataagctgattaagcggctggaagaaaaacaaagtccagaactggtcaagaagcacaaaaaaaaacgggtggtccccaagaagccgcctccatctcctcagcctacggggaaaatagagattaaaatcgtacggccttgggccgaaggaactgaggaaggtgctagatggctcactgacgaagatacccgcaatctgaaggaaatattcttcaatatactggtgcctggtgcagaggaggcccagaaggagcgtcaaaggcagaaggaactggagtccaattatcgacgcgtgtggggctcaccaggtggggaaggtacgggggacttggacgagttcgatttttag

SEQ ID NO: 26632 - DNA, 1839 bp, Artificial Sequence
  derived and/or modified sequence
atggctgctgagaccctgctgagcagcctgctgggcctgctgctgctgggcctgctgctgcctgccagcctgactggaggagtgggcagcctgaacctggaggagctgtctgagatgagatatggaattgagatcctgcccctgcctgtgatgggcggccagagccagagcagtgatgtggtgattgtgagcagcaagtacaagcagagatatgagtgccgcctgcctgctggggccatccacttccagcgggagcgggaggaggagaccccagcctaccagggccctggcatccctgagctgctgagccccatgagagatgccccctgcctgctgaagaccaaggactggtggacctatgagttctgctacggccgccacatccagcagtaccacatggaggacagcgagatcaagggggaggtgctgtacctgggctactaccagagcgcctttgactgggatgatgaaacagccaaggccagcaagcagcaccggctgaagcgctaccacagccagacctatggaaatggcagcaaatgtgacctgaatggccggccccgggaggccgaggtgcgcttcctgtgtgatgaaggagctggcatcagcggggactacatcgacagagtggatgagcccctgagctgcagctatgtgctgaccatccgcaccccccggctgtgcccccaccccctgctgcggcccccacccagcgctgccccccaggccatcctgtgccaccccagcctgcagcctgaggagtacatggcctacgtgcagaggcaggccgacagcaagcagtacggggacaagatcatcgaggagctgcaggacctgggcccccaggtgtggagcgagaccaagtctggagtggccccccagaagatggccggggccagccccaccaaggatgacagcaaggacagcgacttctggaagatgctgaatgaacctgaggaccaggcccctggaggagaggaggtgcctgctgaggagcaggaccccagccctgaggccgctgacagcgccagcggggccccaaatgacttccagaacaacgtgcaggtgaaggtgatccgcagccctgctgacctgatccgcttcatcgaggagctgaagggcggcaccaagaagggcaagcccaacatcggccaggagcagcctgtggatgatgctgctgaggtgccccagcgggagcctgagaaggagcggggggaccctgagcggcagcgggagatggaggaggaggaggatgaagatgaagatgaagatgaagatgaagatgagcggcagctgctgggggagtttgagaaggagctggagggcatcctgctgcccagcgaccgggaccggctgcggtctgaggtgaaggccggcatggagcgggagctggagaacatcatccaggagacagagaaggagctggaccctgatggcctgaagaaggagagcgagcgggaccgggccatgctggccctgaccagcaccctgaacaagctgatcaagaggctggaggagaagcagagccctgagctggtgaagaagcacaagaagaagagggtggtgcccaagaagcccccacccagcccccagcccaccgggaagattgagatcaagatcgtgcggccctgggccgagggcacagaggagggcgcccgctggctgacagatgaggacaccaggaacctgaaggagatcttcttcaacatcctggtgcctggagctgaggaggcccagaaggagcggcagaggcagaaggagctggagagcaactacagaagagtgtggggcagccctggaggagagggcaccggggacctggatgaatttgacttctag

SEQ ID NO: 26633 - DNA, 1839 bp, Artificial Sequence
  derived and/or modified sequence
atggccgccgagaccctgctgagcagcctgctgggcctgctgctgctagggctcctcctgcctgcttctttaactggcggagtcggcagcctgaacctagaggaactgagcgagatgaggtacgggatagaaatactgcccttgcccgtgatggggggccagagtcagtcttcggatgtcgtcattgtgagcagcaagtacaaacagagatatgagtgtcgtttgcccgcgggcgccatccattttcagcgagagagggaagaggagacaccagcataccagggaccagggatacccgagctcctctctcctatgagggacgccccttgtctgctcaaaacaaaagactggtggacatatgagttctgttacgggcgacacattcagcagtatcatatggaggactctgaaattaaaggagaggttctgtatttaggctactaccagtccgcctttgattgggatgacgagacagccaaggcctcaaagcaacatcgtcttaagcggtatcacagccagacttatggtaacggatctaaatgtgatctgaacggccggccacgggaggctgaagtaagattcctgtgcgatgagggggccgggatctcaggcgattacatcgaccgcgtggatgagcctctgtcttgctcatatgtgctcacaatccggaccccacgcctgtgcccccacccattgctgcgaccaccacctagcgccgccccccaagctatcctgtgtcacccaagtctgcaacctgaggaatatatggcttatgttcagcgccaggccgatagcaagcagtacggcgataagatcatcgaggagcttcaggatctcggccctcaggtgtggagcgagacaaaaagtggtgtggcaccacaaaagatggccggtgcttcgccaacaaaagatgattccaaagactccgatttctggaaaatgctgaatgagcctgaggaccaggcccctggtggagaagaggtcccagcggaagaacaggacccgagtccagaggccgctgactcagcgagcggagcaccaaacgattttcaaaacaatgtgcaggtaaaagtgatcaggtcacccgctgacctgattcggttcatagaggaattaaaaggaggcacaaaaaagggcaaacccaatattggtcaggagcaacccgtagatgacgccgctgaggtgccccaaagggagcccgaaaaagagaggggcgacccagagcgtcagagagaaatggaagaagaagaagatgaagatgaggatgaagatgaagatgaggacgagagacagctgctaggggagtttgaaaaagagctcgaaggaatactgctgccgagtgaccgcgataggctccgtagtgaagtgaaagcaggtatggagcgagagctggaaaatattattcaggaaacagagaaggagctggaccccgatggcctgaaaaaagaaagcgagagagaccgggccatgctggctctcacttctaccctcaacaagctcatcaagcgattagaagagaagcagtccccagaactggtgaaaaagcacaaaaagaaaagggtggttccgaaaaagcccccccctagcccccagcccactgggaagattgagatcaagatcgtcagaccttgggccgagggcacagaggagggagctagatggctgaccgacgaagacacccgcaaccttaaagaaattttcttcaatatcctggtgcctggagctgaagaggctcagaaagagagacagcggcagaaggaactcgagtctaactacaggcgggtttgggggtctccaggaggtgaaggcaccggagacctcgatgagtttgatttttag

SEQ ID NO: 26634 - DNA, 2135 bp, Artificial Sequence
  derived and/or modified sequence
ctgaccaatcacggacagcgattgatatttctaatcgtcgtgatccacctccccaggaccttggagccacgtttacaaataggaatagggtacgtgggagggatagaacgtacagccaataaaatcatgtggcgccgatgggcgtgttgaggccgctgcctggcttagggcggaaacagattctctgcataagaaggggaacgaaagatggcggcggaaacgctgctgtccagtttgttaggactgctgcttctgggactcctgttacccgcaagtctgaccggcggtgtcgggagcctgaacctggaggagctgagtgagatgcgttatgggatcgagatcctgccgttgcctgtcatgggagggcagagccaatcttcggacgtggtgattgtctcctctaagtacaaacagcgctatgagtgtcgcctgccagctggagctattcacttccagcgtgaaagggaggaggaaacacctgcttaccaagggcctgggatccctgagttgttgagcccaatgagagatgctccctgcttgctgaagacaaaggactggtggacatatgaattctgttatggacgccacatccagcaataccacatggaagattcagagatcaaaggtgaagtcctctatctcggctactaccaatcagccttcgactgggatgatgaaacagccaaggcctccaagcagcatcgtcttaaacgctaccacagccagacctatggcaatgggtccaagtgcgaccttaatgggaggccccgggaggccgaggttcggttcctctgtgacgagggtgcaggtatctctggggactacatcgatcgcgtggacgagcccttgtcctgctcttatgtgctgaccattcgcactcctcggctctgcccccaccctctcctccggcccccacccagtgctgcaccgcaggccatcctctgtcacccttccctacagcctgaggagtacatggcctacgttcagaggcaagccgactcaaagcagtatggagataaaatcatagaggagctgcaagatctaggcccccaagtgtggagtgagaccaagtctggggtggcaccccaaaagatggcaggtgcgagcccgaccaaggatgacagtaaggactcagatttctggaagatgcttaatgagccagaggaccaggccccaggaggggaggaggtgccggctgaggagcaggacccaagccctgaggcagcagattcagcttctggtgctcccaatgattttcagaacaacgtgcaggtcaaagtcattcgaagccctgcggatttgattcgattcatagaggagctgaaaggtggaacaaaaaaggggaagccaaatataggccaagagcagcctgtggatgatgctgcagaagtccctcagagggaaccagagaaggaaaggggtgatccagaacggcagagagagatggaagaagaggaggatgaggatgaggatgaggatgaagatgaggatgaacggcagttactgggagaatttgagaaggaactggaagggatcctgcttccgtcagaccgagaccggctccgttcggaggtgaaggctggcatggagcgggaactggaaaacatcatccaggagacagagaaagagctggacccagatgggctgaagaaggagtcagagcgggatcgggcaatgctggctctcacatccactctcaacaaactcatcaaaagactggaggaaaaacagagtccagagctggtgaagaagcacaagaaaaagagggttgtccccaaaaagcctcccccatcaccccaacctacagggaaaattgagatcaaaattgtccgcccatgggctgaagggactgaagagggtgcacgttggctgactgatgaggacacgagaaacctcaaggagatcttcttcaatatcttggtgccgggagctgaagaggcccagaaggaacgccagcggcagaaagagctggagagcaattaccgccgggtgtggggctctccaggtggggagggcacaggggacctggacgaatttgacttctgagaccaacactacacttgacccttcacggaatccagactcttcctggactggcttgcctcctccccacctccccaccctggaacccctga

SEQ ID NO: 26635 - DNA, 1839 bp, Artificial Sequence
  derived and/or modified sequence
atggctgcggagactttgcttagctccttactaggcctgctgctgctggggctgctgctccccgcatctcttactgggggtgtggggagcctgaatctggaggagctttccgagatgcggtacggcattgaaattctaccgcttcctgtcatgggtggccaaagccaatcatccgacgtagtgatcgtgagtagtaaatataagcaacggtacgagtgtcggctccctgcgggagccatccacttccagcgggagcgtgaggaagaaactcccgcttaccaggggccagggattccagagttgctgtcacccatgcgcgatgccccttgtttgctaaaaacaaaagactggtggacttacgagttttgctatggacgacatatccaacaatatcatatggaagatagtgaaatcaagggggaggtgctatacctcggatactaccagagtgctttcgactgggacgatgaaaccgccaaggcttcgaagcaacatagattaaaaagatatcattcacagacctacgggaatggatccaaatgtgacctgaacggccgaccaagggaagcggaggtcagatttctgtgcgacgaaggggctggtatcagcggcgactacattgatcgggtcgacgagcctctgtcatgctcctatgtgttaacgatccgaacccccaggctgtgcccgcaccctctgctcaggccacctccgagcgctgcccctcaagccatcctctgtcacccctccctgcagcccgaagagtacatggcatatgtccaaagacaggctgacagcaaacagtacggggacaagattatcgaggaactgcaagacctggggcctcaagtgtggtctgagactaaaagtggtgtcgcccctcagaaaatggccggagcgtcaccgacgaaggacgatagcaaggacagtgacttctggaagatgctgaacgaacccgaagatcaggcgccaggaggagaggaagtccccgctgaagaacaagatccttccccagaagccgctgattccgctagtggcgctcctaacgatttccaaaacaatgtccaggttaaagtgatccggtcccctgccgaccttatccgcttcatcgaggagctcaaagggggaaccaagaagggcaaacctaacatcggacaggagcagcctgtcgacgacgccgcagaggtccctcagagagaaccagagaaagaacgaggtgatccagagaggcagcgggaaatggaagaggaagaagacgaagatgaagatgaggacgaagacgaggacgagcggcagctgctaggagagttcgagaaggaactggagggcatcctgctaccatccgatcgggaccgactgcgcagtgaggtgaaagccggaatggaacgtgagctggaaaacatcatacaggagaccgagaaggaactggacccagacggccttaaaaaggagtccgagcgtgacagggcgatgctggccctgacctccaccctcaacaagctgattaagcggcttgaggaaaagcagagccccgaactggtgaagaagcacaagaaaaagagagtggtgcctaagaagccccctccctccccgcagccaacaggcaaaatcgaaatcaagattgtgaggccctgggccgagggtactgaagaaggggctagatggctcacagatgaagacacaaggaacctgaaagaaatttttttcaacatcctggtaccaggagcggaggaagcgcaaaaggagcgccagagacagaaggagctcgagagtaactaccgcagagtctggggatctcctggaggtgaaggcactggggatttggacgagtttgacttctag

SEQ ID NO: 26636 - DNA, 1839 bp, Artificial Sequence
  derived and/or modified sequence
atggccgccgagaccctgctgagcagcctgctgggcctgctgctgctgggcctgctgctgcccgccagcctgaccggcggcgtgggcagcctgaacctggaggagctgagcgagatgagatacggcatcgagatcctgcccctgcccgtgatgggcggccagagccagagcagcgacgtggtgatcgtgagcagcaagtacaagcagagatacgagtgcagactgcccgccggcgccatccacttccagagagagagagaggaggagacccccgcctaccagggccccggcatccccgagctgctgagccccatgagagacgccccctgcctgctgaagaccaaggactggtggacctacgagttctgctacggcagacacatccagcagtaccacatggaggacagcgagatcaagggcgaggtgctgtacctgggctactaccagagcgccttcgactgggacgacgagaccgccaaggccagcaagcagcacagactgaagagataccacagccagacctacggcaacggcagcaagtgcgacctgaacggcagacccagagaggccgaggtgagattcctgtgcgacgagggcgccggcatcagcggcgactacatcgacagagtggacgagcccctgagctgcagctacgtgctgaccatcagaacccccagactgtgcccccaccccctgctgagacccccccccagcgccgccccccaggccatcctgtgccaccccagcctgcagcccgaggagtacatggcctacgtgcagagacaggccgacagcaagcagtacggcgacaagatcatcgaggagctgcaggacctgggcccccaggtgtggagcgagaccaagagcggcgtggccccccagaagatggccggcgccagccccaccaaggacgacagcaaggacagcgacttctggaagatgctgaacgagcccgaggaccaggcccccggcggcgaggaggtgcccgccgaggagcaggaccccagccccgaggccgccgacagcgccagcggcgcccccaacgacttccagaacaacgtgcaggtgaaggtgatcagaagccccgccgacctgatcagattcatcgaggagctgaagggcggcaccaagaagggcaagcccaacatcggccaggagcagcccgtggacgacgccgccgaggtgccccagagagagcccgagaaggagagaggcgaccccgagagacagagagagatggaggaggaggaggacgaggacgaggacgaggacgaggacgaggacgagagacagctgctgggcgagttcgagaaggagctggagggcatcctgctgcccagcgacagagacagactgagaagcgaggtgaaggccggcatggagagagagctggagaacatcatccaggagaccgagaaggagctggaccccgacggcctgaagaaggagagcgagagagacagagccatgctggccctgaccagcaccctgaacaagctgatcaagagactggaggagaagcagagccccgagctggtgaagaagcacaagaagaagagagtggtgcccaagaagcccccccccagcccccagcccaccggcaagatcgagatcaagatcgtgagaccctgggccgagggcaccgaggagggcgccagatggctgaccgacgaggacaccagaaacctgaaggagatcttcttcaacatcctggtgcccggcgccgaggaggcccagaaggagagacagagacagaaggagctggagagcaactacagaagagtgtggggcagccccggcggcgagggcaccggcgacctggacgagttcgacttctag

SEQ ID NO: 26637 - protein, 597 aa, Artificial Sequence
  derived and/or modified sequence
MAAETLLSSLLGLLLLGLLLPASLTGGVGSLNLEELSEMRYGIEILPLPVMGGQSQSSDVVIVSSKYKQRYECRLPAGAIHFQREREEETPAYQGPGIPELLSPMRDAPCLLKTKDWWTYEFCYGRHIQQYHMEDSEIKGEVLYLGYYQSAFDWDDETAKASKQHRLKRYHSQTYGNGSKCDLNGRPREAEVRFLCDEGAGISGDYIDRVDEPLSCSYVLTIRTPRLCPHPLLRPPPSAAPQAILCHPSLQPEEYMAYVQRQADSKQYGDKIIEELQDLGPQVWSETKSGVAPQKMAGASPTKDDSKDSDFWKMLNEPEDQAPGGEEVPAEEQDPSPEAADSASGAPNDFQNNVQVKVIRSPADLIRFIEELKGGTKKGKPNIGQEQPVDDAAEVPQREPEKERGDPERQREMEEEEDEDEDEDEDEDERQLLGEFEKELEGILLPSDRDRLRSETEKELDPDGLKKESERDRAMLALTSTLNKLIKRLEEKQSPELVKKHKKKRVVPKKPPPSPQPTGKIEIKIVRPWAEGTEEGARWLTDEDTRNLKEIFFNILVPGAEEAQKERQRQKELESNYRRVWGSPGGEGTGDLDEFDF

SEQ ID NO: 26638 - DNA, 1794 bp, Artificial Sequence
  derived and/or modified sequence
atggccgccgagaccctcctcagcagccttcttggccttctcctgctaggcctgctcctgcccgcctcactcactggaggggtcgggagtcttaacctggaagaattgagtgaaatgcggtacggcattgaaatactacctcttcctgttatgggtggccagagtcagtcttctgacgtagtgatcgtcagctccaagtacaaacagaggtacgagtgtcgtttaccagcgggtgccattcacttccaaagggagcgtgaagaggagacccccgcgtaccagggccccggaatccccgagttgctctctcctatgagagatgcaccttgtctacttaagacaaaagactggtggacatacgagttctgttatggacggcacattcagcaatatcatatggaagattccgagattaagggtgaggtcttatacctcgggtactaccagtcggccttcgattgggacgatgagaccgctaaagcaagcaagcagcacagattaaaaagatatcatagccagacatacggaaatggttctaagtgtgacctaaatggcagacctagagaggcagaagtccgcttcctttgcgatgagggcgcaggcatatctggggattacatcgatcgcgtggacgaacccctgtcttgctcctatgtcctgaccatcagaacaccgcgcctgtgtcctcatcctctgttgaggccgcccccctccgctgctcctcaggctattctgtgtcaccctagcctgcagcctgaggagtatatggcctatgtccagcgccaggctgatagcaagcaatacggtgataagataatagaggagttacaggacctgggtccacaagtctggtccgagacaaagtcaggcgtggccccacagaagatggcgggggcctcaccgaccaaagacgattcaaaggattccgatttctggaagatgctgaacgagcccgaagatcaggcccctgggggagaggaagtcccggccgaagagcaggatccctccccagaggccgccgactctgcgtctggggccccaaatgactttcagaacaatgtccaggtgaaggtgatcaggtcacccgccgatttaatcaggtttatcgaagagttaaaaggagggactaagaagggcaaacccaacattggacaagagcaacccgttgatgatgctgctgaggtccctcagagggaaccagaaaaagaacgcggagatcctgagagacaaagggaaatggaggaggaggaggacgaggatgaggatgaggatgaagacgaggatgagaggcagctactcggtgagttcgagaaggaactggagggcatcctgctgccctccgatagagatcgcctgcggagcgagactgaaaaggaactggatcccgacggcctgaagaaagaaagcgagcgcgaccgggccatgctggctttaacttccaccctgaataaactcatcaagaggcttgaagagaagcaatcgcccgagttggttaagaaacataagaagaagagggtggttccaaagaaacccccaccttccccacagcccacaggcaagattgagattaaaattgtgaggccatgggcagagggaactgaggagggcgctaggtggctcacagatgaggacactcgcaatctgaaggaaatcttctttaatatcctggtgcccggggcagaagaagctcaaaaagagcggcagaggcaaaaggagctcgagagtaactaccgacgggtctgggggtctcccggaggggagggcacaggcgatctggatgagttcgacttttag

SEQ ID NO: 26639 - DNA, 1794 bp, Artificial Sequence
  derived and/or modified sequence
atggctgctgagaccctgctgagcagcctgctgggcctgctgctgctgggcctgctgctgcctgccagcctgactggaggagtgggcagcctgaacctggaggagctgtctgagatgagatatggaattgagatcctgcccctgcctgtgatgggcggccagagccagagcagtgatgtggtgattgtgagcagcaagtacaagcagagatatgagtgccgcctgcctgctggggccatccacttccagcgggagcgggaggaggagaccccagcctaccagggccctggcatccctgagctgctgagccccatgagagatgccccctgcctgctgaagaccaaggactggtggacctatgagttctgctacggccgccacatccagcagtaccacatggaggacagcgagatcaagggggaggtgctgtacctgggctactaccagagcgcctttgactgggatgatgaaacagccaaggccagcaagcagcaccggctgaagcgctaccacagccagacctatggaaatggcagcaaatgtgacctgaatggccggccccgggaggccgaggtgcgcttcctgtgtgatgaaggagctggcatcagcggggactacatcgacagagtggatgagcccctgagctgcagctatgtgctgaccatccgcaccccccggctgtgcccccaccccctgctgcggcccccacccagcgctgccccccaggccatcctgtgccaccccagcctgcagcctgaggagtacatggcctacgtgcagaggcaggccgacagcaagcagtacggggacaagatcatcgaggagctgcaggacctgggcccccaggtgtggagcgagaccaagtctggagtggccccccagaagatggccggggccagccccaccaaggatgacagcaaggacagcgacttctggaagatgctgaatgaacctgaggaccaggcccctggaggagaggaggtgcctgctgaggagcaggaccccagccctgaggccgctgacagcgccagcggggccccaaatgacttccagaacaacgtgcaggtgaaggtgatccgcagccctgctgacctgatccgcttcatcgaggagctgaagggcggcaccaagaagggcaagcccaacatcggccaggagcagcctgtggatgatgctgctgaggtgccccagcgggagcctgagaaggagcggggggaccctgagcggcagcgggagatggaggaggaggaggatgaagatgaagatgaagatgaagatgaagatgagcggcagctgctgggggagtttgagaaggagctggagggcatcctgctgcccagcgaccgggaccggctgcggagtgaaacagagaaggagctggaccctgatggcctgaagaaggagagcgagcgggaccgggccatgctggccctgaccagcaccctgaacaagctgatcaagaggctggaggagaagcagagccctgagctggtgaagaagcacaagaagaagagggtggtgcccaagaagcccccacccagcccccagcccaccgggaagattgagatcaagatcgtgcggccctgggccgagggcacagaggagggcgcccgctggctgacagatgaggacaccaggaacctgaaggagatcttcttcaacatcctggtgcctggagctgaggaggcccagaaggagcggcagaggcagaaggagctggagagcaactaccgccgggtgtggggcagccctggaggagagggcactggagacctggatgaatttgacttctag

SEQ ID NO: 26640 - DNA, 1794 bp, Artificial Sequence
  derived and/or modified sequence
atggccgccgagaccctgctgagcagcctgctgggcctgctgctgctcgggctgttgctccccgctagcctgactggcggagttggctctctgaacctagaggaactgtccgagatgaggtatggaatagagatccttcctctgcctgtcatgggaggccagagccagtcttcggacgtggttatcgtaagcagtaagtacaagcagagatacgaatgtcgtttgcccgccggcgctatacactttcagcgagaaagggaggaagaaaccccagcatatcagggacctggaattcctgaattattatcccctatgcgtgatgcgccttgtctgctgaaaaccaaagattggtggacgtacgagttttgttatggaaggcatattcaacagtatcatatggaagacagtgagattaaaggcgaagtgctgtatctgggatactaccagtccgctttcgattgggatgatgaaactgcaaaggctagtaagcagcaccgtctgaaaaggtatcacagccaaacatacggcaatggttccaagtgtgatcttaatggacggcctagggaagccgaggtgagatttctgtgtgatgaaggcgcgggtatcagcggagactacatcgacagagtggatgaacccctaagctgctcatatgttctgacaatccgaacaccacgactgtgcccccaccccctactgcgtccgccccctagcgcagctccccaggcaatactctgtcaccctagcctgcaaccggaggagtacatggcttatgtacagcggcaagccgactccaaacaatatggcgataagatcatcgaagaactgcaagatctcggtccacaggtgtggtctgaaacaaagtcaggcgtggccccccagaaaatggccggtgcgagtccaaccaaagatgattctaaggactctgatttttggaagatgttgaacgagcctgaagaccaggcccccggcggcgaagaggtgccagcagaggagcaggatcctagccccgaggcagccgactcagctagcggtgctcccaacgatttccagaataacgtacaagtcaaagtgatccgaagtccagctgaccttatccggtttatcgaggaattgaaagggggcaccaaaaaggggaagcctaacatcggtcaggagcagcccgttgatgacgcagcagaagtgccccagagagaaccagaaaaagaacgtggcgaccccgagcggcagcgggagatggaggaggaagaggatgaagatgaagatgaggatgaagacgaagacgaacggcagctgttaggggagtttgaaaaagagctggagggaatcctgctgcccagcgatcgcgatagactgcgcagtgaaaccgagaaagagttggatcctgatggcttgaagaaggaaagtgagcgagaccgggccatgctggcattaacaagtacacttaacaaattaatcaagaggttggaagaaaaacagtcaccagagctggtgaagaaacacaagaagaagagagtggtgcccaaaaaacctccaccttctcctcaacccaccggcaagatcgagatcaagattgtgaggccctgggccgaagggactgaagagggggcgagatggctcacagacgaggacacacgcaacttaaaagagatcttttttaacatcctcgtcccaggggccgaggaggcccagaaagagcgccagcgacagaaggagctggagtcaaactacagacgagtgtgggggagtcccggaggggagggtacgggcgacctggacgaattcgatttctag

SEQ ID NO: 26641 - DNA, 2457 bp, Artificial Sequence
  derived and/or modified sequence
gaaggggaacgaaagatggcggcggaaacgctgctgtccagtttgttaggactgctgcttctgggactcctgttacccgcaagtctgaccggcggtgtcgggagcctgaacctggaggagctgagtgagatgcgttatgggatcgagatcctgccgttgcctgtcatgggagggcagagccaatcttcggacgtggtgattgtctcctctaagtacaaacagcgctatgagtgtcgcctgccagctggagctattcacttccagcgtgaaagggaggaggaaacacctgcttaccaagggcctgggatccctgagttgttgagcccaatgagagatgctccctgcttgctgaagacaaaggactggtggacatatgaattctgttatggacgccacatccagcaataccacatggaagattcagagatcaaaggtgaagtcctctatctcggctactaccaatcagccttcgactgggatgatgaaacagccaaggcctccaagcagcatcgtcttaaacgctaccacagccagacctatggcaatgggtccaagtgcgaccttaatgggaggccccgggaggccgaggttcggttcctctgtgacgagggtgcaggtatctctggggactacatcgatcgcgtggacgagcccttgtcctgctcttatgtgctgaccattcgcactcctcggctctgcccccaccctctcctccggcccccacccagtgctgcaccgcaggccatcctctgtcacccttccctacagcctgaggagtacatggcctacgttcagaggcaagccgactcaaagcagtatggagataaaatcatagaggagctgcaagatctaggcccccaagtgtggagtgagaccaagtctggggtggcaccccaaaagatggcaggtgcgagcccgaccaaggatgacagtaaggactcagatttctggaagatgcttaatgagccagaggaccaggccccaggaggggaggaggtgccggctgaggagcaggacccaagccctgaggcagcagattcagcttctggtgctcccaatgattttcagaacaacgtgcaggtcaaagtcattcgaagccctgcggatttgattcgattcatagaggagctgaaaggtggaacaaaaaaggggaagccaaatataggccaagagcagcctgtggatgatgctgcagaagtccctcagagggaaccagagaaggaaaggggtgatccagaacggcagagagagatggaagaagaggaggatgaggatgaggatgaggatgaagatgaggatgaacggcagttactgggagaatttgagaaggaactggaagggatcctgcttccgtcagaccgagaccggctccgttcggagacagagaaagagctggacccagatgggctgaagaaggagtcagagcgggatcgggcaatgctggctctcacatccactctcaacaaactcatcaaaagactggaggaaaaacagagtccagagctggtgaagaagcacaagaaaaagagggttgtccccaaaaagcctcccccatcaccccaacctacagggaaaattgagatcaaaattgtccgcccatgggctgaagggactgaagagggtgcacgttggctgactgatgaggacacgagaaacctcaaggagatcttcttcaatatcttggtgccgggagctgaagaggcccagaaggaacgccagcggcagaaagagctggagagcaattaccgccgggtgtggggctctccaggtggggagggcacaggggacctggacgaatttgacttctgagaccaacactacacttgacccttcacggaatccagactcttcctggactggcttgcctcctccccacctccccaccctggaacccctgagggccaaacagcagagtggagctgagctgtggacctctcgggcaactctgtgggtgtgggggccctgggtgaatgctgctgcccctgctggcagccaccttgagacctcaccgggcctgtgatatttgctctcctgaactctcactcaatcctcttcctctcctctgtggcttttcctgttattgtcccctaatgataggatattccctgctgcctacctggagattcagtaggatcttttgagtggaggtgggtagagagagcaaggagggcaggacacttagcaggcactgagcaagcaggcccccacctgcccttagtgatgtttggagtcgttttaccctcttctattgaattgccttgggatttccttctccctttccctgcccaccctgtcccctacaatttgtgcttctgagttgaggagccttcacctctgttgctgaggaaatggtagaatgctgcctatcacctccagcacaatcccagtgaaaaaggtgtgaagcacccaccatgttcttgaacaatcaggtttctaaataaacaactggaccatcaa

SEQ ID NO: 26642 - DNA, 1794 bp, Artificial Sequence
  derived and/or modified sequence
atggccgcagagactctactgtccagcctgctggggttactactcttggggttgctattgcccgcaagccttaccgggggagtgggttcactcaatctcgaggaacttagcgagatgaggtatgggatagagattctgcccctgccggtcatgggtgggcaatcacaaagtagcgacgtagtgatagtctccagcaagtataagcagcgttatgaatgccgcctgccggctggggcaattcacttccaaagagaaagagaggaagagaccccggcatatcaaggaccaggaatccctgaacttctctcccccatgcgcgatgccccttgtctcttgaagaccaaggattggtggacatacgagttctgttatggacgccatatccagcagtaccatatggaagattccgagataaaaggcgaggtcctctatcttggctactaccaatccgcctttgactgggacgacgagactgcaaaggcttcaaaacagcaccgccttaagcgctatcactctcaaacatacggtaacggatctaaatgcgatcttaacggcaggccaagggaagccgaggtgcgattcctttgtgatgaaggcgctgggatcagcggggactacattgaccgagtggacgaacccctgtcctgctcttatgtcttgactatccggacccctaggctgtgtccacaccccctgcttagaccacccccttctgctgccccacaagccatcctgtgccatccatctctccaaccggaagaatatatggcctacgttcagcgccaggccgactcgaagcaatatggggacaaaataatcgaggaactgcaggatctcggcccacaggtgtggtcagagactaagagtggtgtcgcccctcagaagatggcaggcgcatctccaactaaagatgattccaaagattcagatttctggaaaatgctcaatgaacctgaagaccaggccccagggggagaggaagtcccagctgaagagcaggaccctagccctgaagcagccgactccgcatctggcgctcctaacgacttccagaacaatgtgcaggtcaaagtcattagatcccctgcagatctgatccggttcattgaagagctgaagggaggcaccaaaaagggcaaacccaacatcggccaggagcagcctgtggatgacgctgcggaggtgccacagagggagccagagaaggaaagaggagaccctgagcgtcaacgtgagatggaggaagaggaggacgaagacgaggatgaagacgaagacgaagatgagcgacagctgctgggagagtttgagaaagaattagaggggatcctgctgccttcagaccgcgatcggttgcgtagcgaaactgaaaaagagttggatcccgatgggctgaagaaggagagtgaaagagaccgagcgatgttggctctgaccagtacattgaacaagctgataaaacgcctggaagaaaaacaatctccggaattggtgaagaagcacaagaagaagagggtggttcctaaaaaacccccaccttctccacagcctaccggcaagatcgagatcaagattgtccgcccatgggctgaggggacagaggaaggcgctcggtggcttaccgacgaggatacccgcaatctaaaggagatttttttcaacattttggtccctggagctgaggaggctcagaaggagcggcagagacagaaggaactcgagtcaaactatcggagagtgtgggggtcccctggcggagaaggaaccggcgatctggatgaattcgatttttag

SEQ ID NO: 26643 - DNA, 1794 bp, Artificial Sequence
  derived and/or modified sequence
atggccgccgagaccctgctgagcagcctgctgggcctgctgctgctgggcctgctgctgcccgccagcctgaccggcggcgtgggcagcctgaacctggaggagctgagcgagatgagatacggcatcgagatcctgcccctgcccgtgatgggcggccagagccagagcagcgacgtggtgatcgtgagcagcaagtacaagcagagatacgagtgcagactgcccgccggcgccatccacttccagagagagagagaggaggagacccccgcctaccagggccccggcatccccgagctgctgagccccatgagagacgccccctgcctgctgaagaccaaggactggtggacctacgagttctgctacggcagacacatccagcagtaccacatggaggacagcgagatcaagggcgaggtgctgtacctgggctactaccagagcgccttcgactgggacgacgagaccgccaaggccagcaagcagcacagactgaagagataccacagccagacctacggcaacggcagcaagtgcgacctgaacggcagacccagagaggccgaggtgagattcctgtgcgacgagggcgccggcatcagcggcgactacatcgacagagtggacgagcccctgagctgcagctacgtgctgaccatcagaacccccagactgtgcccccaccccctgctgagacccccccccagcgccgccccccaggccatcctgtgccaccccagcctgcagcccgaggagtacatggcctacgtgcagagacaggccgacagcaagcagtacggcgacaagatcatcgaggagctgcaggacctgggcccccaggtgtggagcgagaccaagagcggcgtggccccccagaagatggccggcgccagccccaccaaggacgacagcaaggacagcgacttctggaagatgctgaacgagcccgaggaccaggcccccggcggcgaggaggtgcccgccgaggagcaggaccccagccccgaggccgccgacagcgccagcggcgcccccaacgacttccagaacaacgtgcaggtgaaggtgatcagaagccccgccgacctgatcagattcatcgaggagctgaagggcggcaccaagaagggcaagcccaacatcggccaggagcagcccgtggacgacgccgccgaggtgccccagagagagcccgagaaggagagaggcgaccccgagagacagagagagatggaggaggaggaggacgaggacgaggacgaggacgaggacgaggacgagagacagctgctgggcgagttcgagaaggagctggagggcatcctgctgcccagcgacagagacagactgagaagcgagaccgagaaggagctggaccccgacggcctgaagaaggagagcgagagagacagagccatgctggccctgaccagcaccctgaacaagctgatcaagagactggaggagaagcagagccccgagctggtgaagaagcacaagaagaagagagtggtgcccaagaagcccccccccagcccccagcccaccggcaagatcgagatcaagatcgtgagaccctgggccgagggcaccgaggagggcgccagatggctgaccgacgaggacaccagaaacctgaaggagatcttcttcaacatcctggtgcccggcgccgaggaggcccagaaggagagacagagacagaaggagctggagagcaactacagaagagtgtggggcagccccggcggcgagggcaccggcgacctggacgagttcgacttctag

SEQ ID NO: 26644 - protein, 652 aa, Artificial Sequence
  derived and/or modified sequence
MAAETLLSSLLGLLLLGLLLPASLTGGVGSLNLEELSEMRYGIEILPLPVMGGQSQSSDVVIVSSKYKQRYECRLPAGAIHFQREREEETPAYQGPGIPELLSPMRDAPCLLKTKDWWTYEFCYGRHIQQYHMEDSEIKGEVLYLGYYQSAFDWDDETAKASKQHRLKRYHSQTYGNGSKCDLNGRPREAEVRFLCDEGAGISGDYIDRVDEPLSCSYVLTIRTPRLCPHPLLRPPPSAAPQAILCHPSLQPEEYMAYVQRQADSKQYGDKIIEELQDLGPQVWSETKSGVAPQKMAGASPTKDDSKDSDFWKMLNEPEDQAPGGEEVPAEEQDPSPEAADSASGAPNDFQNNVQVKVIRSPADLIRFIEELKGGTKKGKPNIGQEQPVDDAAEVPQREPEKERGDPERQREMEEEEDEDEDEDEDEDERQLLGEFEKELEGILLPSDRDRLRSETEKELDPDGLKKESERDRAMLALTSTLNKLIKRLEEKQSPELVKKHKKKRVVPKKPPPSPQPTEEDPEHRVRVRVTKLRLGGPNQDLTVLEMKRENPQLKQIEGLVKELLEREGLTAAGKIEIKIVRPWAEGTEEGARWLTDEDTRNLKEIFFNILVPGAEEAQKERQRQKELESNYRRVWGSPGGEGTGDLDEFDF

SEQ ID NO: 26645 - DNA, 1959 bp, Artificial Sequence
  derived and/or modified sequence
atggccgccgagacactgctctcctcactgttaggcctgctgctgctcgggctgctgctgccagcctcactgactggtggggtgggatctcttaatctggaggagctgagcgaaatgcgctacggaatagaaatcctacctctcccagtgatggggggtcagagtcagtctagcgacgtggttattgtgagttcaaaatacaaacagcgatacgaatgtaggttgcctgcaggtgccatccacttccaacgggaaagagaggaagagaccccagcctatcagggccccggaatccccgaacttctgagtcctatgcgggacgctccctgcctgttgaaaacaaaagattggtggacatatgagttctgctatggtcgacacattcagcaatatcacatggaggatagcgagatcaaaggagaagtgctttatcttggttactaccagagtgcctttgactgggacgatgagactgctaaagcctccaaacagcatcgactaaagcgttatcattcccagacttatggtaacggaagtaaatgtgacctgaatggcaggccacgagaggccgaagtccggttcttgtgtgacgaaggggccggaatttcaggagattatattgacagggtggatgagcccctgagttgctcatatgtgctcactattcgcaccccccgcctgtgcccgcaccctctgctcagacctccgcctagtgcagccccacaagcaattctgtgccacccttcactacaacctgaagagtatatggcatatgtgcagagacaggcagattctaaacagtacggtgataagatcattgaggagctgcaggacctgggcccgcaggtgtggtctgagaccaaatctggtgtggcaccgcagaagatggcgggagcttcgcccaccaaggacgactccaaggattctgatttctggaaaatgctgaatgagccagaagaccaggctcccgggggagaggaggtgccagctgaggagcaggatcctagtcctgaggcggcagatagcgcgtccggtgccccaaacgacttccagaataacgtccaggtgaaggttattagaagtccggcagatctgatcaggttcattgaagagctcaagggtggcaccaaaaaaggcaaaccgaatatcggacaagagcagccagtcgatgacgccgctgaagttccacagcgggagcccgagaaggaaagaggagaccccgaacggcagcgagagatggaagaagaagaagacgaagacgaggacgaagacgaagacgaggatgaacgccagctgttaggtgaatttgagaaggaattggaaggaattctactccctagcgaccgggaccgactaagaagcgagactgagaaagagctcgatcctgatgggcttaagaaggagtctgaacgagaccgtgccatgctcgccctgacaagtacattgaataagctgatcaaaagattggaggaaaaacaatcccctgaactggttaagaaacacaagaaaaagcgagtggtgcctaagaaaccccctcccagcccccagcccaccgaggaggacccagagcaccgggtgagagtccgtgtgacaaaacttcgtctcggcggtcccaatcaggacctgaccgttttggaaatgaagcgcgagaatccacagctgaaacagatagagggcctggtgaaagagttgctggagcgcgaggggctgaccgctgccggcaaaattgagatcaagatcgtccgaccttgggcggaaggcactgaagagggagcaaggtggcttactgacgaagacacgcggaatctgaaggaaatattttttaatattttggttcccggagctgaggaggcgcagaaagaaaggcagcgtcagaaggagctggagagtaactataggcgggtgtggggttctcctggtggcgaaggtaccggcgacttggatgagttcgatttttag

SEQ ID NO: 26646 - DNA, 1959 bp, Artificial Sequence
  derived and/or modified sequence
atggctgctgagaccctgctgagcagcctgctgggcctgctgctgctgggcctgctgctgcctgccagcctgactggaggagtgggcagcctgaacctggaggagctgtctgagatgagatatggaattgagatcctgcccctgcctgtgatgggcggccagagccagagcagtgatgtggtgattgtgagcagcaagtacaagcagagatatgagtgccgcctgcctgctggggccatccacttccagcgggagcgggaggaggagaccccagcctaccagggccctggcatccctgagctgctgagccccatgagagatgccccctgcctgctgaagaccaaggactggtggacctatgagttctgctacggccgccacatccagcagtaccacatggaggacagcgagatcaagggggaggtgctgtacctgggctactaccagagcgcctttgactgggatgatgaaacagccaaggccagcaagcagcaccggctgaagcgctaccacagccagacctatggaaatggcagcaaatgtgacctgaatggccggccccgggaggccgaggtgcgcttcctgtgtgatgaaggagctggcatcagcggggactacatcgacagagtggatgagcccctgagctgcagctatgtgctgaccatccgcaccccccggctgtgcccccaccccctgctgcggcccccacccagcgctgccccccaggccatcctgtgccaccccagcctgcagcctgaggagtacatggcctacgtgcagaggcaggccgacagcaagcagtacggggacaagatcatcgaggagctgcaggacctgggcccccaggtgtggagcgagaccaagtctggagtggccccccagaagatggccggggccagccccaccaaggatgacagcaaggacagcgacttctggaagatgctgaatgaacctgaggaccaggcccctggaggagaggaggtgcctgctgaggagcaggaccccagccctgaggccgctgacagcgccagcggggccccaaatgacttccagaacaacgtgcaggtgaaggtgatccgcagccctgctgacctgatccgcttcatcgaggagctgaagggcggcaccaagaagggcaagcccaacatcggccaggagcagcctgtggatgatgctgctgaggtgccccagcgggagcctgagaaggagcggggggaccctgagcggcagcgggagatggaggaggaggaggatgaagatgaagatgaagatgaagatgaagatgagcggcagctgctgggggagtttgagaaggagctggagggcatcctgctgcccagcgaccgggaccggctgcggagtgaaacagagaaggagctggaccctgatggcctgaagaaggagagcgagcgggaccgggccatgctggccctgaccagcaccctgaacaagctgatcaagaggctggaggagaagcagagccctgagctggtgaagaagcacaagaagaagagggtggtgcccaagaagcccccacccagcccccagcccacagaggaggaccctgagcaccgggtgcgggtgcgggtgaccaagctgcggctgggcggccccaaccaggacctgactgtgctggagatgaagcgggagaacccccagctgaagcagatcgagggcctggtgaaggagctgctggagcgggagggcctgacagctgctgggaagattgagatcaagatcgtgcggccctgggccgagggcacagaggagggcgcccgctggctgacagatgaggacaccaggaacctgaaggagatcttcttcaacatcctggtgcctggagctgaggaggcccagaaggagcggcagaggcagaaggagctggagagcaactacagaagagtgtggggcagccctggaggagagggcaccggggacctggatgaatttgacttctag

SEQ ID NO: 26647 - DNA, 1959 bp, Artificial Sequence
  derived and/or modified sequence
atggccgccgagaccctgctgagcagcctgctgggcctgctgctgcttgggctgctgttaccggcaagcctgacagggggggtaggatccctcaatttggaggagctcagcgagatgcggtacggcatagaaatactcccgctcccagtcatgggggggcagagccagtcatcggatgtagtaatcgtcagttccaaatataagcagcggtatgagtgccggctgcccgcaggtgctatccacttccagagggaaagggaagaggagacccctgcctatcagggtcccggcattccggaactactatcacccatgcgagacgctccctgcttgctgaaaaccaaggactggtggacctatgagttctgttacggccgtcacatccagcagtatcacatggaggatagcgagatcaaaggcgaggttctctaccttggctattaccagtctgcattcgactgggatgacgagacagctaaagcttcaaagcagcaccgactcaaaagataccacagccaaacctacgggaacggctccaagtgtgaccttaacgggcgcccaagagaagccgaagtcaggtttctctgcgatgagggcgctggtattagcggggattatattgatcgcgtggatgagccgcttagctgtagctatgtcctgacgatacgcactccacgtttatgtccacacccgcttcttcgtccccccccatcagcggccccacaagccatcctgtgccatccatccctccagcccgaggagtatatggcatacgtacagcggcaggccgattccaaacagtacggagacaagatcattgaagaattgcaggacctcggcccacaggtctggagtgagactaaaagcggagttgcaccacagaaaatggccggggccagtccgacaaaagacgactcgaaggattctgacttctggaaaatgttgaatgaacccgaggatcaagccccgggcggcgaggaagtgcccgcggaggagcaggatccaagcccggaagccgctgattctgcttccggagccccgaacgactttcagaataatgtacaggtcaaggttatccgaagccccgccgatctgattagatttatagaggaactgaaggggggaacaaagaaggggaagcccaacatcgggcaggagcagcctgtggatgacgctgccgaggtgccccaaagggagcccgaaaaggaaaggggagaccctgaacgccagcgcgagatggaagaagaggaagacgaagatgaagacgaagacgaggacgaggatgagcggcagctcctgggagagtttgagaaagagctcgagggaatactgctgccttccgacagggatagacttcggtctgagactgaaaaagagctggatcctgacggtctgaagaaggaatctgaacgcgatagagcaatgctcgccctgacaagcactctgaataagctcataaagcggcttgaagaaaaacagtcgcccgagttggtgaagaagcacaagaagaagcgcgtagtgcctaagaagccaccaccgtcaccgcagccgactgaggaagatcccgagcatcgtgtgagggtgagagtaactaagttacgcctgggtggtccaaatcaggaccttactgtactcgagatgaaaagagagaacccccagcttaaacagattgagggtcttgttaaagagctcctggagagagaaggtttaactgccgctgggaagatcgagatcaagattgttcggccctgggctgaaggcacagaggaaggtgcccgatggctgacagatgaagacactcgaaacctgaaggagatctttttcaatatccttgtccccggggccgaggaggctcagaaagagagacaaagacagaaggagctggaatccaactacaggagagtatggggatcgccagggggagaaggcacaggggaccttgatgagtttgatttttag

SEQ ID NO: 26648 - DNA, 2091 bp, Artificial Sequence
  derived and/or modified sequence
aagaaggggaacgaaagatggcggcggaaacgctgctgtccagtttgttaggactgctgcttctgggactcctgttacccgcaagtctgaccggcggtgtcgggagcctgaacctggaggagctgagtgagatgcgttatgggatcgagatcctgccgttgcctgtcatgggagggcagagccaatcttcggacgtggtgattgtctcctctaagtacaaacagcgctatgagtgtcgcctgccagctggagctattcacttccagcgtgaaagggaggaggaaacacctgcttaccaagggcctgggatccctgagttgttgagcccaatgagagatgctccctgcttgctgaagacaaaggactggtggacatatgaattctgttatggacgccacatccagcaataccacatggaagattcagagatcaaaggtgaagtcctctatctcggctactaccaatcagccttcgactgggatgatgaaacagccaaggcctccaagcagcatcgtcttaaacgctaccacagccagacctatggcaatgggtccaagtgcgaccttaatgggaggccccgggaggccgaggttcggttcctctgtgacgagggtgcaggtatctctggggactacatcgatcgcgtggacgagcccttgtcctgctcttatgtgctgaccattcgcactcctcggctctgcccccaccctctcctccggcccccacccagtgctgcaccgcaggccatcctctgtcacccttccctacagcctgaggagtacatggcctacgttcagaggcaagccgactcaaagcagtatggagataaaatcatagaggagctgcaagatctaggcccccaagtgtggagtgagaccaagtctggggtggcaccccaaaagatggcaggtgcgagcccgaccaaggatgacagtaaggactcagatttctggaagatgcttaatgagccagaggaccaggccccaggaggggaggaggtgccggctgaggagcaggacccaagccctgaggcagcagattcagcttctggtgctcccaatgattttcagaacaacgtgcaggtcaaagtcattcgaagccctgcggatttgattcgattcatagaggagctgaaaggtggaacaaaaaaggggaagccaaatataggccaagagcagcctgtggatgatgctgcagaagtccctcagagggaaccagagaaggaaaggggtgatccagaacggcagagagagatggaagaagaggaggatgaggatgaggatgaggatgaagatgaggatgaacggcagttactgggagaatttgagaaggaactggaagggatcctgcttccgtcagaccgagaccggctccgttcggagacagagaaagagctggacccagatgggctgaagaaggagtcagagcgggatcgggcaatgctggctctcacatccactctcaacaaactcatcaaaagactggaggaaaaacagagtccagagctggtgaagaagcacaagaaaaagagggttgtccccaaaaagcctcccccatcaccccaacctacagaggaggatcctgagcacagagtccgggtccgggtcaccaagctccgtctcggaggccctaatcaggatctgactgtcctcgagatgaaacgggaaaacccacagctgaaacaaatcgaggggctggtgaaggagctgctggagagggagggactcacagctgcagggaaaattgagatcaaaattgtccgcccatgggctgaagggactgaagagggtgcacgttggctgactgatgaggacacgagaaacctcaaggagatcttcttcaatatcttggtgccgggagctgaagaggcccagaaggaacgccagcggcagaaagagctggagagcaattaccgccgggtgtggggctctccaggtggggagggcacaggggacctggacgaatttgacttctgagaccaacactacacttgacccttcacggaatccagactcttcctggactggcttgcctcctccccacctccccaccctggaacccctgagggccaaacagcagagtggagctgag

SEQ ID NO: 26649 - DNA, 1959 bp, Artificial Sequence
  derived and/or modified sequence
atggcagctgagaccctattgagttccctactgggcttgctgctgctcggcctgctgctgccggcttctcttaccggcggtgtcggatccctgaacctagaagagctgtctgagatgaggtacggtatcgagattctgccgctgcctgtgatgggagggcaaagccagtccagtgacgttgtaattgtttccagtaagtacaaacagcgttacgaatgtcgcctccctgccggagctattcattttcagagagagcgcgaggaggaaacccccgcttaccaagggcctggcatccctgagctgctgtcacctatgagagacgctccctgccttttgaagactaaagattggtggacctacgagttttgctacggtagacacatccagcagtatcacatggaggactccgagatcaaaggtgaagtgctttatcttggctactaccaaagtgcttttgactgggatgacgaaacggctaaagcctccaagcaacataggctgaagcggtaccactcccagacctacgggaacggttccaagtgtgatctcaacggaaggcctagggaggctgaggttcggtttctttgtgatgaaggtgcgggaatctccggagactacattgatcgtgtcgatgaaccactgagttgtagttacgtgctgaccattagaacccccagactgtgccctcacccactcctgcggccacctccgagtgccgctcctcaggccatcttgtgtcatccctctttacagcccgaggagtacatggcatatgtgcagaggcaggccgatagcaagcagtatggcgacaagataattgaggagctgcaggacttaggccctcaggtgtggtccgaaaccaagtctggcgtcgctccccagaagatggccggtgcgtcccccaccaaggatgatagcaaggacagcgacttttggaaaatgctcaatgaaccagaagatcaagcccctgggggtgaggaggtgcctgctgaagagcaagacccatcccctgaggccgctgactccgcaagtggtgctccgaatgattttcagaacaatgtgcaggttaaggttataaggtctcccgcagatctgatccggttcatagaggagctgaaaggcggaaccaaaaaaggaaaaccaaacattggacaggaacagccagtcgacgacgccgcagaggtgccccaaagagagcccgagaaagagaggggagaccccgaaaggcagagggagatggaagaggaggaggacgaggacgaggacgaagatgaagatgaggatgaaagacagctcctcggcgaatttgaaaaagaattggaagggatcctcctcccatccgatagagaccgtcttagaagtgagaccgaaaaggagctggatcccgatgggctgaaaaaagagtccgaacgtgacagagccatgctggccctgacctcaacactgaataaattaatcaagcgcctggaggagaagcagtctcccgaattggtcaaaaagcacaagaagaaacgagtggtccccaaaaaaccccctccatcgcctcagccaaccgaggaagacccagaacacagggtgagggttagagttaccaaacttaggctgggaggtccaaaccaggacctgacagtcctcgaaatgaagagagagaacccacagctcaagcagatcgagggcctcgtgaaagagctcctcgaacgggaaggtctgaccgcggcaggcaaaattgagatcaaaatagttcgcccttgggccgaagggaccgaggagggggctcggtggctcactgatgaagacacgagaaacctgaaggagatattttttaatattctggtccctggggcagaggaggctcagaaagaaagacagagacagaaagagctcgagagcaattaccggagggtgtggggctcgcccggaggagagggcacaggcgacctcgacgagtttgatttttag

SEQ ID NO: 26650 - DNA, 1959 bp, Artificial Sequence
  derived and/or modified sequence
atggccgccgagaccctgctgagcagcctgctgggcctgctgctgctgggcctgctgctgcccgccagcctgaccggcggcgtgggcagcctgaacctggaggagctgagcgagatgagatacggcatcgagatcctgcccctgcccgtgatgggcggccagagccagagcagcgacgtggtgatcgtgagcagcaagtacaagcagagatacgagtgcagactgcccgccggcgccatccacttccagagagagagagaggaggagacccccgcctaccagggccccggcatccccgagctgctgagccccatgagagacgccccctgcctgctgaagaccaaggactggtggacctacgagttctgctacggcagacacatccagcagtaccacatggaggacagcgagatcaagggcgaggtgctgtacctgggctactaccagagcgccttcgactgggacgacgagaccgccaaggccagcaagcagcacagactgaagagataccacagccagacctacggcaacggcagcaagtgcgacctgaacggcagacccagagaggccgaggtgagattcctgtgcgacgagggcgccggcatcagcggcgactacatcgacagagtggacgagcccctgagctgcagctacgtgctgaccatcagaacccccagactgtgcccccaccccctgctgagacccccccccagcgccgccccccaggccatcctgtgccaccccagcctgcagcccgaggagtacatggcctacgtgcagagacaggccgacagcaagcagtacggcgacaagatcatcgaggagctgcaggacctgggcccccaggtgtggagcgagaccaagagcggcgtggccccccagaagatggccggcgccagccccaccaaggacgacagcaaggacagcgacttctggaagatgctgaacgagcccgaggaccaggcccccggcggcgaggaggtgcccgccgaggagcaggaccccagccccgaggccgccgacagcgccagcggcgcccccaacgacttccagaacaacgtgcaggtgaaggtgatcagaagccccgccgacctgatcagattcatcgaggagctgaagggcggcaccaagaagggcaagcccaacatcggccaggagcagcccgtggacgacgccgccgaggtgccccagagagagcccgagaaggagagaggcgaccccgagagacagagagagatggaggaggaggaggacgaggacgaggacgaggacgaggacgaggacgagagacagctgctgggcgagttcgagaaggagctggagggcatcctgctgcccagcgacagagacagactgagaagcgagaccgagaaggagctggaccccgacggcctgaagaaggagagcgagagagacagagccatgctggccctgaccagcaccctgaacaagctgatcaagagactggaggagaagcagagccccgagctggtgaagaagcacaagaagaagagagtggtgcccaagaagcccccccccagcccccagcccaccgaggaggaccccgagcacagagtgagagtgagagtgaccaagctgagactgggcggccccaaccaggacctgaccgtgctggagatgaagagagagaacccccagctgaagcagatcgagggcctggtgaaggagctgctggagagagagggcctgaccgccgccggcaagatcgagatcaagatcgtgagaccctgggccgagggcaccgaggagggcgccagatggctgaccgacgaggacaccagaaacctgaaggagatcttcttcaacatcctggtgcccggcgccgaggaggcccagaaggagagacagagacagaaggagctggagagcaactacagaagagtgtggggcagccccggcggcgagggcaccggcgacctggacgagttcgacttctag

SEQ ID NO: 26651 - protein, 261 aa, Artificial Sequence
  derived and/or modified sequence
MGCIQSITCKARIRRENIVVYDVCATIDQCPTRIEETSPIVLRYKTPYFKASARVVMPPIPRHETWVVGWIQACNQMEFFNTYSDLGMSSWELPDLREGRVKAISDSDGVSYPWYGNTTETVTLVGPTNKISRFSVSMNDNFYPSVTWAVPVSDSNVPLLTRIKRDQSFTTWLVAMNTTTKEKIILQTIKWRMRVDIEVDPLQLLGQRARLVGRTQQEQPRILSRMEPIPPNALVKPNANDAQVLMWRPKRGPPLVVIPPK

SEQ ID NO: 26652 - DNA, 786 bp, Artificial Sequence
  derived and/or modified sequence
atgggctgcatccagagcatcacctgcaaggccagaatcagaagagagaacatcgtggtgtacgacgtgtgcgccaccatcgaccagtgccccaccagaatcgaggagaccagccccatcgtgctgagatacaagaccccctacttcaaggccagcgccagagtggtgatgccccccatccccagacacgagacctgggtggtgggctggatccaggcctgcaaccagatggagttcttcaacacctacagcgacctgggcatgagcagctgggagctgcccgacctgagagagggcagagtgaaggccatcagcgacagcgacggcgtgagctacccctggtacggcaacaccaccgagaccgtgaccctggtgggccccaccaacaagatcagcagattcagcgtgagcatgaacgacaacttctaccccagcgtgacctgggccgtgcccgtgagcgacagcaacgtgcccctgctgaccagaatcaagagagaccagagcttcaccacctggctggtggccatgaacaccaccaccaaggagaagatcatcctgcagaccatcaagtggagaatgagagtggacatcgaggtggaccccctgcagctgctgggccagagagccagactggtgggcagaacccagcaggagcagcccagaatcctgagcagaatggagcccatcccccccaacgccctggtgaagcccaacgccaacgacgcccaggtgctgatgtggagacccaagagaggcccccccctggtggtgatcccccccaagtag

SEQ ID NO: 26653 - DNA, 786 bp, Artificial Sequence
  derived and/or modified sequence
atgggctgtattcaaagcatcacttgtaaggccaggatccgtcgcgaaaatatcgttgtctatgacgtgtgtgccacgatagaccaatgtcccacaagaattgaggaaaccagccctattgtgctgcgctacaagacgccctatttcaaggcaagcgcgcgggttgtcatgccaccgatcccaagacacgagacctgggttgtgggttggattcaggcatgcaatcaaatggagtttttcaatacatactctgacttaggaatgagtagctgggagctgcccgaccttagagagggaagagttaaggctattagcgactccgatggcgtctcctacccatggtatggaaacacaacagagactgtgacactggtgggaccaacaaacaagatctctaggttctccgtgagcatgaatgacaatttctaccccagcgtgacctgggcagttcccgtcagcgatagtaacgtgccattgctcacgcgtattaagcgagaccagtcatttacaacgtggctagtggcaatgaacactaccaccaaggaaaaaattattctccagacaattaaatggcgcatgagagtggacatcgaagtggatcccttacaacttctaggccagcgggccaggctcgtgggtcggacccagcaggaacaacccagaatccttagcaggatggaacctattccacccaatgcactcgttaaacccaacgccaacgatgcacaggtgctgatgtggcgtcccaagcgagggccacccctggttgtgattccccccaagtag

SEQ ID NO: 26654 - DNA, 786 bp, Artificial Sequence
  derived and/or modified sequence
atgggttgcatccaaagcatcacttgtaaagccagaattaggagagagaacatcgttgtatacgatgtgtgcgcaacaatcgaccaatgtcccactaggattgaagagacgagtcctattgtcctgcggtataagacaccctactttaaggccagtgcacgagtagtgatgccccctataccgcgccatgagacttgggtcgtggggtggatacaggcatgcaaccagatggagttctttaacacctactccgacttgggcatgagttcatgggagttacccgatttacgggagggaagggtcaaggctatctcagatagcgatggggtcagctatccttggtacggaaacacgactgaaaccgttaccctggtcggacctactaacaaaattagcagatttagcgtaagcatgaacgacaatttctatccttccgtgacctgggctgtgcccgtgtccgattccaatgtcccactactgactcggatcaaacgggaccagtcctttacaacctggctggtggctatgaacacgaccacaaaagagaagatcatcctccagaccatcaagtggcgcatgcgcgtcgacatcgaagtggaccctcttcagcttctcggtcaacgagcacgattagtgggacgcacacagcaggaacagcctcggattctctcgaggatggagccaatccctcccaatgccttagttaagcccaatgcgaacgatgcgcaagtgttgatgtggagaccaaagcgcggtccccccctggtagtgatccctcccaaatag

SEQ ID NO: 26655 - DNA, 1597 bp, Artificial Sequence
  derived and/or modified sequence
gtcctgtgctgctccagccgttggggctctccaccccgggccacagcctcctggcgccccccgggccgaggcagccgggccgaggagtgtcggtgtggtccggctacggggcggggccggcggcggctgctgctgctgccgccgcggaggcagacagaccgggcgctgccaccgccgccctcccccggctccatgccgccgccgctgccgcctcctcctctccggcgaggggcggggggctccggcccggggtgggcaccattcctcgcagcgccgctcccctccctgccctccgcccgggcgctggagccggcgagggcacccgccgcctcctaggagtgcaccctccgcgcgccctgccggagcgagggggcgggcgtgggcggacgtcggggcagcggggaccccgcgcggctgcaagaggagggggcttccccaaggatgcccggcggctccccgctcctaggtgcgagctgagtctgaccgggagcgagcggcgcgtcgccatgccggcgtgacgggcgcccccggctgcccgcgcgggcccccgcgctgccccacgccgcgccgtgccggcaccgggctgcaggatgggctgtatccaaagcatcacctgcaaggcgcggatccggcgcgagaacatcgtggtgtacgatgtgtgcgccaccatcgaccagtgccccacgcgcatcgaggagacctcgcccatcgtcctgcgctacaagaccccctacttcaaagcctccgcccgcgtggtcatgccccccatcccccgccacgagacctgggtggtgggctggattcaggcgtgcaatcagatggagttcttcaacacctacagcgacctgggcatgtcaagctgggaactgcctgacttgagggaagggagagtaaaagccatcagtgactcagatggggtgagctacccttggtacgggaacaccacagaaactgtgaccctggttggccccaccaacaagatctccaggttctccgtcagcatgaatgacaacttctaccccagtgtgacatgggcagtgcctgtgagtgacagcaatgtgccactgctcacaagaatcaagagagaccaaagtttcacgacctggctggtggccatgaacaccaccacaaaggagaagatcattctgcagaccatcaagtggaggatgagggtggacattgaagtggaccctcttcagctcttggggcagcgggcccggctggtgggcaggactcagcaggagcagccccggatcctgagccggatggaacccatcccccctaatgcactagtgaaacccaatgccaatgatgcccaggtcctcatgtggaggcccaagcgggggccacctctggttgtgatccctcctaagtagaagcagactggcctgactgtgtgtggatcacacgcctctgagacatgcagtgagggtgccaggggtggcaggagccaaacagagtttctgagccaaagcagacctctcggtttgccagcctttgcagccacttttgaagagtagggctgctccttgggtggtagaaccataatccttaggaaaaatcccttcctcttaggaataaagaaatcactgatttg

SEQ ID NO: 26656 - DNA, 1475 bp, Artificial Sequence
  derived and/or modified sequence
cggctgctgctgctgccgccgcggaggcagacagaccgggcgctgccaccgccgccctcccccggctccatgccgccgccgctgccgcctcctcctctccggcgaggggcggggggctccggcccggggtgggcaccattcctcgcagcgccgctcccctccctgccctccgcccgggcgctggagccggcgagggcacccgccgcctcctaggagtgcaccctccgcgcgccctgccggagcgagggggcgggcgtgggcggacgtcggggcagcggggaccccgcgcggctgcaagaggagggggcttccccaaggatgcccggcggctccccgctcctaggtgcgagctgagtctgaccgggagcgagcggcgcgtcgccatgccggcgtgacgggcgcccccggctgcccgcgcgggcccccgcgctgccccacgccgcgccgtgccggcaccgggctgcaggatgggctgtatccaaagcatcacctgcaaggcgcggatccggcgcgagaacatcgtggtgtacgatgtgtgcgccaccatcgaccagtgccccacgcgcatcgaggagacctcgcccatcgtcctgcgctacaagaccccctacttcaaagcctccgcccgcgtggtcatgccccccatcccccgccacgagacctgggtggtgggctggattcaggcgtgcaatcagatggagttcttcaacacctacagcgacctgggcatgtcaagctgggaactgcctgacttgagggaagggagagtaaaagccatcagtgactcagatggggtgagctacccttggtacgggaacaccacagaaactgtgaccctggttggccccaccaacaagatctccaggttctccgtcagcatgaatgacaacttctaccccagtgtgacatgggcagtgcctgtgagtgacagcaatgtgccactgctcacaagaatcaagagagaccaaagtttcacgacctggctggtggccatgaacaccaccacaaaggagaagatcattctgcagaccatcaagtggaggatgagggtggacattgaagtggaccctcttcagctcttggggcagcgggcccggctggtgggcaggactcagcaggagcagccccggatcctgagccggatggaacccatcccccctaatgcactagtgaaacccaatgccaatgatgcccaggtcctcatgtggaggcccaagcgggggccacctctggttgtgatccctcctaagtagaagcagactggcctgactgtgtgtggatcacacgcctctgagacatgcagtgagggtgccaggggtggcaggagccaaacagagtttctgagccaaagcagacctctcggtttgccagcctttgcagccacttttgaagagtagggctgctccttgggtggtagaaccataatccttaggaaaaatcccttcctcttaggaataaagaaatcactgatttga

SEQ ID NO: 26657 - DNA, 786 bp, Artificial Sequence
  derived and/or modified sequence
atgggctgcatccagagcatcacctgcaaggcccgcatccggcgggagaacatcgtggtgtatgatgtgtgtgccaccatcgaccagtgccccacccgcatcgaggagaccagccccatcgtgctgcgctacaagaccccctacttcaaggccagcgcccgggtggtgatgccacccatccccaggcatgagacctgggtggtgggctggatccaggcctgcaaccagatggagttcttcaacacctacagcgacctgggcatgagctcctgggagctgcctgacctgcgggagggccgggtgaaggccatcagtgacagtgatggagtgtcctacccctggtacggcaacaccacagaaacagtgaccctggtgggccccaccaacaagatcagccgcttctctgtgtccatgaatgacaacttctaccccagcgtgacctgggccgtgcctgtgtctgacagcaatgtgcccctgctgacccgcatcaagagggaccagagcttcaccacctggctggtggccatgaacaccaccaccaaggagaagatcatcctgcagaccatcaagtggaggatgagggtggacatcgaggtggaccccctgcagctgctgggccagagggcccggctggtgggccgcacccagcaggagcagccccgcatcctgagcaggatggagcccatccccccaaatgccctggtgaagcccaatgccaatgatgcccaggtgctgatgtggaggcccaagaggggcccccccctggtggtgattcctcccaagtag

SEQ ID NO: 26658 - DNA, 786 bp, Artificial Sequence
  derived and/or modified sequence
atgggctgcatccagagcatcacctgcaaggcccggatccggcgggagaacattgtcgtttatgatgtatgcgccactatcgatcagtgtcctacgagaatcgaggagacctctcccattgtgttgcgctataagacaccctattttaaagcttcagcacgagtggtgatgcctccaatcccccgccacgagacatgggtggtggggtggatccaggcgtgcaaccagatggagttttttaacacatacagcgacttggggatgagctcttgggaattgccagacctaagggagggtagagtgaaggccatcagcgatagcgacggcgtgagctatccgtggtatggaaacaccacagagactgtgactctggttggccctactaataaaattagtaggttctccgtgtccatgaatgacaacttttacccaagcgtgacatgggccgtgcctgtgtcagattcaaatgttcctttacttaccaggataaagcgtgatcagtcttttaccacctggcttgtggccatgaacactactaccaaggaaaagattatactccagacgattaaatggcgcatgcgcgtggacatcgaggtcgatcctctacagcttctcggtcagagagcacgtcttgtgggacgaacccaacaggagcagcccagaattctgtcacggatggaacctatcccacccaatgcgctcgtgaagcccaatgcgaatgacgcgcaggtcctgatgtggaggccaaagagaggaccccctctggtggttattcctcctaagtag

SEQ ID NO: 26659 - DNA, 786 bp, Artificial Sequence
  derived and/or modified sequence
atgggctgcatccagagcatcacctgcaaggcccggatccggcgggagaatattgtggtatacgatgtgtgtgccactattgatcagtgccccacgcggattgaggagacctcaccaatagtcctcaggtataagaccccgtattttaaggcctcagctagggtggtcatgcctcccatcccacggcacgaaacctgggtggttgggtggatccaggcttgcaatcagatggagtttttcaacacatattctgacctcggcatgtctagttgggagctaccagacctgagagaagggagggtgaaagctatttcagacagcgacggagtgagctatccgtggtacggaaatactactgaaacagtgacgctggtcggtcctactaataaaatttcaagattcagtgtgtccatgaacgataacttctatccgtcagtcacgtgggctgtcccagtcagcgattccaacgtccccttacttacgaggatcaaaagggaccagtccttcactacgtggcttgttgcaatgaataccaccaccaaggaaaagattattcttcagaccattaaatggcgtatgcgcgtcgatatagaggtggatcccctacagctgctaggccagcgtgctcggctggtgggcaggacccagcaggaacaaccccgcatcttatctaggatggagcccattccgcctaacgctctcgtcaaacccaacgccaatgatgctcaggtgctcatgtggaggcccaaacgtggcccacctctggttgttattccacccaaatag

SEQ ID NO: 26660 - DNA, 786 bp, Artificial Sequence
  derived and/or modified sequence
atgggatgcattcaaagcattacatgcaaagcacggattcgacgggagaatatagttgtttatgacgtgtgcgcaactatcgaccagtgtccgacccgcatcgaggagacttctccaatcgtgctgcgctacaaaacaccgtatttcaaggcttctgctcgggtggtgatgccacccatccccaggcacgagacatgggtcgttgggtggattcaggcctgcaatcagatggaattctttaacacttatagcgatctgggcatgtcttcgtgggagctgccagacttgcgtgaaggacgagtcaaggctatcagtgacagtgatggcgtgtcctacccttggtacggcaataccacagagactgtcactcttgttggacccacgaataagatatcccgcttcagtgtatcaatgaatgataatttctatccctcagtgacctgggcggtacccgtgagtgacagcaacgtgcccctgctcacccgcattaaacgagaccagtcatttaccacttggcttgttgccatgaataccaccactaaggagaaaatcatcctgcagacaattaaatggcggatgcgcgtggatatcgaggtggatccactccaactcctcgggcaacgagcccgtctggtgggcaggacacaacaagagcaacctcgtatcctgtcccgtatggagcctatcccgcctaatgccttggtgaagcccaacgccaatgatgcccaagtattgatgtggcgccctaaacgcggaccgccactagtcgtgatccctcctaagtag

SEQ ID NO: 26661 - DNA, 786 bp, Artificial Sequence
  derived and/or modified sequence
atgggttgtatacagtccataacttgtaaggctaggatccggagagagaatatagtcgtctacgacgtgtgtgccactatagatcagtgtcctacacgcatagaagagacctctccaatcgtgttgcgctataagaccccctactttaaggcatctgcccgagtcgtcatgcccccaatcccgcgacacgaaacttgggttgtgggatggatccaagcttgtaaccagatggaattttttaatacttatagcgatttagggatgtcgtcctgggaattacctgacttgcgcgagggaagagtcaaggccatatccgattcagacggagtttcatacccatggtatgggaacacgacggagaccgtgaccctggtaggaccaacaaataaaatcagcagattttctgtgtcaatgaatgacaacttctacccttccgttacatgggctgtgcctgtctccgattcaaacgtgcccctgttgaccagaatcaagagagaccaatctttcactacttggctagtcgccatgaacacaacaacaaaggagaaaattatcctgcaaacaatcaagtggaggatgagggtggatattgaggtggaccccctgcagcttttgggacagcgcgcacggttagtgggcagaacccaacaggagcagccacgtattctgagccgaatggaacccattcctccgaacgccctggtcaagcccaacgccaatgacgcgcaggtgcttatgtggcgacccaagaggggaccccctttagtggtcatccccccaaaatag

SEQ ID NO: 26662 - protein, 854 aa, Artificial Sequence
  derived and/or modified sequence
MPPCSGGDGSTPPGPSLRDRDCPAQSAEYPRDRLDPRPGSPSEASSPPFLRSRAPVNWYQEKAQVFLWHLMVSGSTTLLCLWKQPFHVSAFPVTASLAFRQSQGAGQHLYKDLQPFILLRLLMPEETQTQDQPMEEEEVETFAFQAEIAQLMSLIINTFYSNKEIFLRELISNSSDALDKIRYESLTDPSKLDSGKELHINLIPNKQDRTLTIVDTGIGMTKADLINNLGTIAKSGTKAFMEALQAGADISMIGQFGVGFYSAYLVAEKVTVITKHNDDEQYAWESSAGGSFTVRTDTGEPMGRGTKVILHLKEDQTEYLEERRIKEIVKKHSQFIGYPITLFVEKERDKEVSDDEAEEKEDKEEEKEKEEKESEDKPEIEDVGSDEEEEKKDGDKKKKKKIKEKYIDQEELNKTKPIWTRNPDDITNEEYGEFYKSLTNDWEDHLAVKHFSVEGQLEFRALLFVPRRAPFDLFENRKKKNNIKLYVRRVFIMDNCEELIPEYLNFIRGVVDSEDLPLNISREMLQQSKILKVIRKNLVKKCLELFTELAEDKENYKKFYEQFSKNIKLGIHEDSQNRKKLSELLRYYTSASGDEMVSLKDYCTRMKENQKHIYYITGETKDQVANSAFVERLRKHGLEVIYMIEPIDEYCVQQLKEFEGKTLVSVTKEGLELPEDEEEKKKQEEKKTKFENLCKIMKDILEKKVEKVVVSNRLVTSPCCIVTSTYGWTANMERIMKAQALRDNSTMGYMAAKKHLEINPDHSIIETLRQKAEADKNDKSVKDLVILLYETALLSSGFSLEDPQTHANRIYRMIKLGLGIDEDDPTADDTSAAVTEEMPPLEGDDDTSRMEEVD

SEQ ID NO: 26663 - DNA, 2565 bp, Artificial Sequence
  derived and/or modified sequence
atgcccccctgcagcggcggcgacggcagcaccccccccggccccagcctgagagacagagactgccccgcccagagcgccgagtaccccagagacagactggaccccagacccggcagccccagcgaggccagcagcccccccttcctgagaagcagagcccccgtgaactggtaccaggagaaggcccaggtgttcctgtggcacctgatggtgagcggcagcaccaccctgctgtgcctgtggaagcagcccttccacgtgagcgccttccccgtgaccgccagcctggccttcagacagagccagggcgccggccagcacctgtacaaggacctgcagcccttcatcctgctgagactgctgatgcccgaggagacccagacccaggaccagcccatggaggaggaggaggtggagaccttcgccttccaggccgagatcgcccagctgatgagcctgatcatcaacaccttctacagcaacaaggagatcttcctgagagagctgatcagcaacagcagcgacgccctggacaagatcagatacgagagcctgaccgaccccagcaagctggacagcggcaaggagctgcacatcaacctgatccccaacaagcaggacagaaccctgaccatcgtggacaccggcatcggcatgaccaaggccgacctgatcaacaacctgggcaccatcgccaagagcggcaccaaggccttcatggaggccctgcaggccggcgccgacatcagcatgatcggccagttcggcgtgggcttctacagcgcctacctggtggccgagaaggtgaccgtgatcaccaagcacaacgacgacgagcagtacgcctgggagagcagcgccggcggcagcttcaccgtgagaaccgacaccggcgagcccatgggcagaggcaccaaggtgatcctgcacctgaaggaggaccagaccgagtacctggaggagagaagaatcaaggagatcgtgaagaagcacagccagttcatcggctaccccatcaccctgttcgtggagaaggagagagacaaggaggtgagcgacgacgaggccgaggagaaggaggacaaggaggaggagaaggagaaggaggagaaggagagcgaggacaagcccgagatcgaggacgtgggcagcgacgaggaggaggagaagaaggacggcgacaagaagaagaagaagaagatcaaggagaagtacatcgaccaggaggagctgaacaagaccaagcccatctggaccagaaaccccgacgacatcaccaacgaggagtacggcgagttctacaagagcctgaccaacgactgggaggaccacctggccgtgaagcacttcagcgtggagggccagctggagttcagagccctgctgttcgtgcccagaagagcccccttcgacctgttcgagaacagaaagaagaagaacaacatcaagctgtacgtgagaagagtgttcatcatggacaactgcgaggagctgatccccgagtacctgaacttcatcagaggcgtggtggacagcgaggacctgcccctgaacatcagcagagagatgctgcagcagagcaagatcctgaaggtgatcagaaagaacctggtgaagaagtgcctggagctgttcaccgagctggccgaggacaaggagaactacaagaagttctacgagcagttcagcaagaacatcaagctgggcatccacgaggacagccagaacagaaagaagctgagcgagctgctgagatactacaccagcgccagcggcgacgagatggtgagcctgaaggactactgcaccagaatgaaggagaaccagaagcacatctactacatcaccggcgagaccaaggaccaggtggccaacagcgccttcgtggagagactgagaaagcacggcctggaggtgatctacatgatcgagcccatcgacgagtactgcgtgcagcagctgaaggagttcgagggcaagaccctggtgagcgtgaccaaggagggcctggagctgcccgaggacgaggaggagaagaagaagcaggaggagaagaagaccaagttcgagaacctgtgcaagatcatgaaggacatcctggagaagaaggtggagaaggtggtggtgagcaacagactggtgaccagcccctgctgcatcgtgaccagcacctacggctggaccgccaacatggagagaatcatgaaggcccaggccctgagagacaacagcaccatgggctacatggccgccaagaagcacctggagatcaaccccgaccacagcatcatcgagaccctgagacagaaggccgaggccgacaagaacgacaagagcgtgaaggacctggtgatcctgctgtacgagaccgccctgctgagcagcggcttcagcctggaggacccccagacccacgccaacagaatctacagaatgatcaagctgggcctgggcatcgacgaggacgaccccaccgccgacgacaccagcgccgccgtgaccgaggagatgccccccctggagggcgacgacgacaccagcagaatggaggaggtggactag

SEQ ID NO: 26664 - DNA, 2565 bp, Artificial Sequence
  derived and/or modified sequence
atgccgccctgctccggaggggacggctccacccccccgggcccctctttacgcgatcgggactgtcccgcgcagtccgcagagtaccccagggaccggctggacccaagaccaggtagcccctcagaagcctcctctcctccttttctgcggagtagagcccccgtgaactggtaccaggagaaggctcaggtgtttctctggcacttaatggtcagcggcagtaccacattgctgtgcttgtggaaacagccatttcacgtgtccgcattccccgtaacggcgagcctggcgtttcgccagtcacaaggagcaggtcagcacctctataaagatctgcagccatttatattgctgcggctcctcatgccagaagagacacagactcaggaccaacccatggaagaggaagaggtagagactttcgcgttccaagctgaaatcgcgcagctgatgagtctcataataaacacattctacagcaataaggagatcttcttaagggaattaattagcaacagtagtgacgccctcgacaagatacggtacgagagtctgacagacccgagtaagctagattcagggaaggaactgcatataaacttgatccctaacaaacaagatcgcactttgacaatcgttgacacagggattggcatgacgaaggctgacctgatcaataatctcggcactatcgccaagtcaggcaccaaggctttcatggaagccctccaagcaggcgctgacatctctatgatcggccagttcggcgtcggtttttactcagcttaccttgtggctgagaaggttaccgtcataactaagcataacgatgacgagcagtacgcatgggagagttcagcgggcggaagtttcacagtgcggacagatacgggagaaccaatgggccgtggaaccaaggtgatattgcacctgaaggaagatcaaaccgagtacctagaagagcgcaggatcaaagaaatcgtaaaaaagcactcccagttcatcgggtacccaatcacattgttcgtggagaaagagcgagataaggaggtgagtgatgacgaagctgaggaaaaggaagataaggaagaggaaaaagagaaggaagagaaggagagcgaggacaagccagagatcgaggacgtgggtagcgacgaagaagaggaaaagaaagatggtgacaagaaaaaaaagaagaagatcaaggagaagtacatcgatcaggaagaattaaataaaactaagcctatatggacgcggaatcctgatgacatcactaatgaggaatacggagagttctataaaagtctgacaaacgactgggaggatcatctggctgtcaaacacttttcggtcgagggtcaattggagtttagagctctgcttttcgtgcctcgcagggcgccatttgatctcttcgaaaacagaaagaagaagaataacattaagctgtatgtaagacgcgtgtttattatggacaactgtgaggaacttataccagagtatcttaacttcattaggggggttgtggattctgaggatcttcccctcaacatcagtagggagatgctgcaacagtccaagattctgaaagttatccgcaaaaacctggtgaagaagtgccttgagctgttcactgaactggccgaagataaagagaactataagaagttctatgagcaattcagcaagaacatcaaattgggtatccatgaggactcccaaaataggaaaaagttgagcgagttgctcagatactacaccagcgccagtggagacgagatggtttctctgaaggactactgtactcgaatgaaggagaatcagaagcatatctactacatcacgggtgaaactaaggatcaggtcgccaattccgccttcgtagaacggctgaggaagcatggccttgaggtcatctatatgattgaacccatcgatgaatactgcgtgcagcagctgaaagaattcgagggcaagaccctggtttcagtgaccaaagagggactggagcttcccgaagacgaggaagaaaagaaaaagcaggaagagaagaaaacaaaattcgaaaacctgtgcaaaattatgaaggatatcctggaaaaaaaggttgagaaggtggttgtgtcgaatagactcgttaccagcccctgctgcattgtgacctccacctacggctggacagccaatatggagaggattatgaaggctcaggctctgcgtgacaattcgacaatgggatacatggctgctaaaaaacacttagagattaaccctgaccacagtataatcgaaaccttgcgccagaaggccgaagctgataagaacgataaatctgtgaaggatttggtaatactgctttacgagacagctctcttatcaagcggattctctctggaagacccacagacacacgctaatcgcatttaccgaatgattaagcttggattgggcatagatgaggatgaccccactgccgacgataccagtgcggcggtcacggaagagatgcccccccttgaaggcgacgacgacacctccaggatggaggaagttgattag

SEQ ID NO: 26665 - DNA, 3348 bp, Artificial Sequence
  derived and/or modified sequence
gtgccgcggcaacggcgcatgcgtaggcgcgcggccgcggcggcggctggggagggttcttccggaaggttcgggaggcttctggaaaaagcgccgcgcgctgggcgggcccgtcgctatataaggcaggcgcgggggtggcgcgtcagttgcttcagcgtcccggtgtggctgtgccgttggtcctgtgcggtcacttagccaagatgcctgaggaaacccagacccaagaccaaccgatggaggaggaggaggttgagacgttcgcctttcaggcagaaattgcccagttgatgtcattgatcatcaatactttctactcgaacaaagagatctttctgagagagctcatttcaaattcatcagatgcattggacaaaatccggtatgaaagcttgacagatcccagtaaattagactctgggaaagagctgcatattaaccttataccgaacaaacaagatcgaactctcactattgtggatactggaattggaatgaccaaggctgacttgatcaataaccttggtactatcgccaagtctgggaccaaagcgttcatggaagctttgcaggctggtgcagatatctctatgattggccagttcggtgttggtttttattctgcttatttggttgctgagaaagtaactgtgatcaccaaacataacgatgatgagcagtacgcttgggagtcctcagcagggggatcattcacagtgaggacagacacaggtgaacctatgggtcgtggaacaaaagttatcctacacctgaaagaagaccaaactgagtacttggaggaacgaagaataaaggagattgtgaagaaacattctcagtttattggatatcccattactctttttgtggagaaggaacgtgataaagaagtaagcgatgatgaggctgaagaaaaggaagacaaagaagaagaaaaagaaaaagaagagaaagagtcggaagacaaacctgaaattgaagatgttggttctgatgaggaagaagaaaagaaggatggtgacaagaagaagaagaagaagattaaggaaaagtacatcgatcaagaagagctcaacaaaacaaagcccatctggaccagaaatcccgacgatattactaatgaggagtacggagaattctataagagcttgaccaatgactgggaagatcacttggcagtgaagcatttttcagttgaaggacagttggaattcagagcccttctatttgtcccacgacgtgctccttttgatctgtttgaaaacagaaagaaaaagaacaacatcaaattgtatgtacgcagagttttcatcatggataactgtgaggagctaatccctgaatatctgaacttcattagaggggtggtagactcggaggatctccctctaaacatatcccgtgagatgttgcaacaaagcaaaattttgaaagttatcaggaagaatttggtcaaaaaatgcttagaactctttactgaactggcggaagataaagagaactacaagaaattctatgagcagttctctaaaaacataaagcttggaatacacgaagactctcaaaatcggaagaagctttcagagctgttaaggtactacacatctgcctctggtgatgagatggtttctctcaaggactactgcaccagaatgaaggagaaccagaaacatatctattatatcacaggtgagaccaaggaccaggtagctaactcagcctttgtggaacgtcttcggaaacatggcttagaagtgatctatatgattgagcccattgatgagtactgtgtccaacagctgaaggaatttgaggggaagactttagtgtcagtcaccaaagaaggcctggaacttccagaggatgaagaagagaaaaagaagcaggaagagaaaaaaacaaagtttgagaacctctgcaaaatcatgaaagacatattggagaaaaaagttgaaaaggtggttgtgtcaaaccgattggtgacatctccatgctgtattgtcacaagcacatatggctggacagcaaacatggagagaatcatgaaagctcaagccctaagagacaactcaacaatgggttacatggcagcaaagaaacacctggagataaaccctgaccattccattattgagaccttaaggcaaaaggcagaggctgataagaacgacaagtctgtgaaggatctggtcatcttgctttatgaaactgcgctcctgtcttctggcttcagtctggaagatccccagacacatgctaacaggatctacaggatgatcaaacttggtctgggtattgatgaagatgaccctactgctgatgataccagtgctgctgtaactgaagaaatgccaccccttgaaggagatgacgacacatcacgcatggaagaagtagactaatctctggctgagggatgacttacctgttcagtactctacaattcctctgataatatattttcaaggatgtttttctttatttttgttaatattaaaaagtctgtatggcatgacaactactttaaggggaagataagatttctgtctactaagtgatgctgtgataccttaggcactaaagcagagctagtaatgctttttgagtttcatgttggtttattttcacagattggggtaacgtgcactgtaagacgtatgtaacatgatgttaactttgtggtctaaagtgtttagctgtcaagccggatgcctaagtagaccaaatcttgttattgaagtgttctgagctgtatcttgatgtttagaaaagtattcgttacatcttgtaggatctactttttgaacttttcattccctgtagttgacaattctgcatgtactagtcctctagaaataggttaaactgaagcaacttgatggaaggatctctccacagggcttgttttccaaagaaaagtattgtttggaggagcaaagttaaaagcctacctaagcatatcgtaaagctgttcaaaaataactcagacccagtcttgtggatggaaatgtagtgctcgagtcacattctgcttaaagttgtaacaaatacagatgagttaaaagatattgtgtgacagtgtcttatttagggggaaaggggagtatctggatgacagttagtgccaaaatgtaaaacatgaggcgctagcaggagatggttaaacactagctgctccaagggttgacatggtcttcccagcatgtactcagcaggtgtggggtggagcacacgtaggcacagaaaacaggaatgcagacaacatgcatcccctgcgtccatgagttacatgtgttctcttagtgtccacgttgttttgatgttattcatggaataccttctgtg

SEQ ID NO: 26666 - DNA, 3510 bp, Artificial Sequence
  derived and/or modified sequence
gggtgtggcctccgggcggcatggctgcttcccaggtgatgccggcttcagctagtggggtctagttgaccgttccgcagccgccagggccagcggaaagccggtcagggggaaccgcggcggggctggtgtcatgagcctgaggtgaacttgagggtgcctcctcagcggtctcccgccctgccctgaggggcgccgggaccccaaagagcggaggaagagcgccaccccgacggccaccgcttcggagccagcacgcggggtaccctacggggagcgcggatgcccccgtgttcgggcggggacggctccacccctcctgggccctcccttcgggacagggactgtcccgcccagagtgctgaatacccgcgcgaccgtctggatccccgcccaggaagcccctctgaagcctcctcgccgccgtttctgagaagcagggcacctgttaactggtaccaagaaaaggcccaagtgtttctctggcatctgatggtgtctggatccaccactctactctgtctctggaaacagcccttccacgtctctgcattccctgtcaccgcgtcactggccttcagacagagccaaggtgcagggcaacacctctacaaggatctgcagccatttatattgcttaggctactgatgcctgaggaaacccagacccaagaccaaccgatggaggaggaggaggttgagacgttcgcctttcaggcagaaattgcccagttgatgtcattgatcatcaatactttctactcgaacaaagagatctttctgagagagctcatttcaaattcatcagatgcattggacaaaatccggtatgaaagcttgacagatcccagtaaattagactctgggaaagagctgcatattaaccttataccgaacaaacaagatcgaactctcactattgtggatactggaattggaatgaccaaggctgacttgatcaataaccttggtactatcgccaagtctgggaccaaagcgttcatggaagctttgcaggctggtgcagatatctctatgattggccagttcggtgttggtttttattctgcttatttggttgctgagaaagtaactgtgatcaccaaacataacgatgatgagcagtacgcttgggagtcctcagcagggggatcattcacagtgaggacagacacaggtgaacctatgggtcgtggaacaaaagttatcctacacctgaaagaagaccaaactgagtacttggaggaacgaagaataaaggagattgtgaagaaacattctcagtttattggatatcccattactctttttgtggagaaggaacgtgataaagaagtaagcgatgatgaggctgaagaaaaggaagacaaagaagaagaaaaagaaaaagaagagaaagagtcggaagacaaacctgaaattgaagatgttggttctgatgaggaagaagaaaagaaggatggtgacaagaagaagaagaagaagattaaggaaaagtacatcgatcaagaagagctcaacaaaacaaagcccatctggaccagaaatcccgacgatattactaatgaggagtacggagaattctataagagcttgaccaatgactgggaagatcacttggcagtgaagcatttttcagttgaaggacagttggaattcagagcccttctatttgtcccacgacgtgctccttttgatctgtttgaaaacagaaagaaaaagaacaacatcaaattgtatgtacgcagagttttcatcatggataactgtgaggagctaatccctgaatatctgaacttcattagaggggtggtagactcggaggatctccctctaaacatatcccgtgagatgttgcaacaaagcaaaattttgaaagttatcaggaagaatttggtcaaaaaatgcttagaactctttactgaactggcggaagataaagagaactacaagaaattctatgagcagttctctaaaaacataaagcttggaatacacgaagactctcaaaatcggaagaagctttcagagctgttaaggtactacacatctgcctctggtgatgagatggtttctctcaaggactactgcaccagaatgaaggagaaccagaaacatatctattatatcacaggtgagaccaaggaccaggtagctaactcagcctttgtggaacgtcttcggaaacatggcttagaagtgatctatatgattgagcccattgatgagtactgtgtccaacagctgaaggaatttgaggggaagactttagtgtcagtcaccaaagaaggcctggaacttccagaggatgaagaagagaaaaagaagcaggaagagaaaaaaacaaagtttgagaacctctgcaaaatcatgaaagacatattggagaaaaaagttgaaaaggtggttgtgtcaaaccgattggtgacatctccatgctgtattgtcacaagcacatatggctggacagcaaacatggagagaatcatgaaagctcaagccctaagagacaactcaacaatgggttacatggcagcaaagaaacacctggagataaaccctgaccattccattattgagaccttaaggcaaaaggcagaggctgataagaacgacaagtctgtgaaggatctggtcatcttgctttatgaaactgcgctcctgtcttctggcttcagtctggaagatccccagacacatgctaacaggatctacaggatgatcaaacttggtctgggtattgatgaagatgaccctactgctgatgataccagtgctgctgtaactgaagaaatgccaccccttgaaggagatgacgacacatcacgcatggaagaagtagactaatctctggctgagggatgacttacctgttcagtactctacaattcctctgataatatattttcaaggatgtttttctttatttttgttaatattaaaaagtctgtatggcatgacaactactttaaggggaagataagatttctgtctactaagtgatgctgtgataccttaggcactaaagcagagctagtaatgctttttgagtttcatgttggtttattttcacagattggggtaacgtgcactgtaagacgtatgtaacatgatgttaactttgtggtctaaagtgtttagctgtcaagccggatgcctaagtagaccaaatcttgttattgaagtgttctgagctgtatcttgatgtttagaaaagtattcgttacatcttgtaggatctactttttgaacttttcattccctgtagttgacaattctgcatgtactagtcctctagaaataggttaaactgaagcaacttgatggaaggatctctccacagggcttgttttccaaagaaaagtattgtttggaggagcaaagttaaaagcctacctaagcatatcgtaaagctgttcaaaaataactcagacccagtcttgtggatggaaatgtagtgctcgagtcacattctgcttaaagttgtaacaaatacagatgagttaaaag

SEQ ID NO: 26667 - DNA, 2565 bp, Artificial Sequence
  derived and/or modified sequence
atgccaccctgcagcggaggagatggcagcaccccacctggccccagcctgcgggaccgggactgcccagcccagagcgctgagtacccccgggaccggctggacccccggcccggcagccccagcgaggccagcagcccccccttcctgcggagccgggcccctgtgaactggtaccaggagaaggcccaggtgttcctgtggcacctgatggtgtctggcagcaccaccctgctgtgcctgtggaagcagcccttccacgtgtctgccttccctgtgacagccagcctggccttccggcagagccagggcgccggccagcacctgtacaaggacctgcagcccttcatcctgctgcggctgctgatgcctgaggagacccagacccaggaccagcccatggaggaggaggaggtggagacctttgccttccaggccgagatcgcccagctgatgagcctcatcatcaacaccttctacagcaacaaggagatcttcctgcgggagctgatcagcaacagcagtgatgccctggacaagatccgctatgagagcctgacagaccccagcaagctggacagcggcaaggagctgcacatcaacctgatccccaacaagcaggacaggaccctgaccatcgtggacaccggcatcggcatgaccaaggctgacctgatcaacaacctgggcaccatcgccaagagcggcaccaaggccttcatggaggccctgcaggccggggctgacatctccatgattggccagtttggagtgggcttctacagcgcctacctggtggccgagaaggtgaccgtcatcaccaagcacaatgatgatgagcagtatgcctgggagagcagcgctgggggcagcttcaccgtgaggacagacaccggggagcccatgggccggggcaccaaggtgatcctgcacctgaaggaggaccagacagagtacctggaggagcggcgcatcaaggagatcgtgaagaagcacagccagttcatcggctaccccatcaccctgtttgtggagaaggagcgggacaaggaggtgtctgatgatgaagctgaggagaaggaggacaaggaggaggagaaggagaaggaggagaaggagagcgaggacaagccagaaattgaagatgtgggcagtgatgaggaggaggagaagaaggatggagacaagaagaagaagaagaagatcaaggagaagtacatcgaccaggaggagctgaacaagaccaagcccatctggaccagaaatccagatgacatcaccaatgaggagtatggagagttctacaagagcctgaccaatgactgggaggaccacctggccgtgaagcacttctctgtggagggccagctggagttccgggccctgctgtttgtgccccggcgggccccctttgacctgtttgaaaataggaagaagaagaacaacatcaagctgtatgtgcggcgggtcttcatcatggacaactgtgaggagctgatccctgagtacctgaacttcatccggggcgtggtggacagcgaggacctgcccctgaacatcagccgggagatgctgcagcagagcaagatcctgaaggtgatcaggaagaacctggtgaagaagtgcctggagctgttcacagagctggccgaggacaaggagaactacaagaagttctatgagcagttcagcaagaacatcaagctgggcatccacgaggacagccagaacaggaagaagctgtctgagctgctgcgctactacaccagcgccagcggagatgagatggtgtccctgaaggactactgcaccaggatgaaggagaaccagaagcacatctactacatcactggagagaccaaggaccaggtggccaacagcgcctttgtggagcggctgaggaagcacggcctggaggtgatctacatgattgagcccattgatgagtactgtgtgcagcagctgaaggagtttgagggcaagaccctggtgtctgtgaccaaggagggcctggagctgcctgaagatgaggaggagaagaagaagcaggaggagaagaagaccaagtttgagaacctgtgcaagatcatgaaggacatcctggagaagaaggtggagaaggtggtggtgagcaaccggctggtgaccagcccctgctgcatcgtgaccagcacctacggctggacagccaacatggagcgcatcatgaaggcccaggccctgcgggacaacagcaccatgggctacatggccgccaagaagcacctggagatcaacccagaccacagcatcatcgagaccctgcggcagaaggccgaggccgacaagaatgacaagtctgtgaaggacctggtgatcctgctgtatgaaacagccctgctgagcagcggcttcagcctggaggacccccagacccacgccaaccgcatctacaggatgatcaagctgggcctgggcattgatgaagatgaccccacagcagatgacaccagcgctgctgtgacagaggagatgccacccctggagggagatgatgacaccagcaggatggaggaggtggactag

SEQ ID NO: 26668 - DNA, 2565 bp, Artificial Sequence
  derived and/or modified sequence
atgcccccctgcagcggcggcgacggcagcaccccccccggccccagcctgcgagatcgtgactgtcctgcccagagtgccgagtatcctagggataggttagatcctcgtccaggttctcccagcgaagcgtccagccctccattcttgcgttccagggcacccgtgaattggtaccaagagaaagcacaggtgtttctgtggcacttgatggtttctgggagtaccaccctcctctgtctttggaaacagcctttccatgtgagtgcctttcctgtgacggcttcacttgctttcagacagtcccagggcgcaggacaacacttatacaaggacctgcaacctttcattctgcttaggctgctcatgccagaggagacccagacccaggaccagcctatggaagaggaagaagttgaaacatttgccttccaggctgaaatcgcgcagctgatgtcccttattatcaataccttctactccaataaagaaatcttcctgcgcgagctgattagtaacagttctgacgccctggacaagattcggtacgagtctctgacagatcctagcaaactggatagtggaaaggagttacatattaatctgatccccaacaagcaggatcgaactctcaccattgttgataccgggatcgggatgactaaagccgatctaatcaacaatctgggcaccatcgctaagagcgggactaaggcattcatggaagccctgcaggccggggcagacatcagcatgattgggcagtttggtgtgggcttctacagcgcgtacctggttgccgaaaaggtcacagtgattacaaagcacaacgatgacgagcagtatgcgtgggaatcctcagccggtggatcgttcaccgtgcgcacggatacaggcgagcccatgggccgcggaacaaaggtgattctccatctgaaagaggaccagacggagtacctggaggagagacgcatcaaagaaatagtgaagaagcacagccagtttattggataccctatcactcttttcgtggaaaaagagagggataaagaggtatctgatgatgaggcagaagagaaggaagataaagaagaagaaaaggagaaggaggaaaaagagtctgaggataagcccgagattgaagacgtcgggagcgacgaggaggaggagaagaaggacggggataagaaaaagaaaaagaaaatcaaggagaaatacattgaccaggaggagctgaataaaacaaaacctatttggacgcggaatcctgatgacatcaccaacgaggaatacggcgaattttataagtcacttaccaacgactgggaagaccatctagcagtgaagcacttctctgtcgaaggccagctggaattccgggctctgttatttgtcccacggcgggcaccctttgacctgttcgaaaatcgcaaaaaaaagaataacataaagctatatgtgcggagggtgttcatcatggataactgtgaagaactgatcccagagtatctgaactttatcagaggggtggtggacagcgaggatctccctctgaatataagcagagaaatgttgcagcaaagtaagatattgaaagtgatccggaaaaatctggtgaaaaagtgtctagagttgtttacagaacttgcagaggacaaagaaaactacaagaagttctacgaacaattctccaaaaacattaaactcggtattcacgaagatagtcagaaccgcaagaaactcagcgaactcctcagatactacacgagtgcatctggtgatgagatggtgtcactaaaggattactgcacgcggatgaaggagaatcagaaacatatctattacatcaccggagaaactaaagatcaggtagccaattccgcttttgtggagcggttgaggaagcatggcctggaggttatttatatgattgagcccatagacgaatactgcgttcagcagctgaaggagttcgagggaaagacattggtttccgtgacgaaggaagggcttgagctccccgaggacgaagaggagaagaagaaacaagaagagaagaagacgaagttcgaaaatctctgcaagattatgaaggacattctggaaaaaaaggtggagaaagtggtagtttccaaccgactcgtcaccagtccctgctgtattgtgaccagtacgtatgggtggaccgccaatatggagcggatcatgaaggcacaggccctgcgtgacaatagcacaatgggctacatggctgcgaagaagcacctggagataaatcccgaccatagtataatcgagactctcagacagaaggccgaggccgacaaaaacgacaaatcggtgaaagacctcgtgatcctgctttacgaaaccgctctgttgtcctctggattcagtctcgaagacccccaaacccatgcaaacaggatctaccgaatgatcaagctcggcctggggatcgacgaggatgatcccaccgccgacgataccagcgctgcggtgactgaggagatgcctcccctggagggagatgatgacacgtctagaatggaggaggtcgactag

SEQ ID NO: 26669 - DNA, 2565 bp, Artificial Sequence
  derived and/or modified sequence
atgcccccttgcagcggaggtgacggatcgactccccctggaccctcactgagagatagggattgtccggctcagagcgccgagtatcctcgagaccgcctggatccacggccaggatcgcccagtgaagcctcgtccccaccattcttgcggtcaagagcgcctgtgaattggtatcaggagaaagcccaggtcttcctgtggcacctcatggtgtcagggagtacaacactgctgtgtctgtggaagcagccgttccatgtgagcgcctttccggtgactgcttctcttgccttccggcaatctcagggagcaggccagcacctgtataaggaccttcagccatttatcctgctgcggctgcttatgcctgaagaaactcagacacaggaccagcccatggaagaggaggaggtcgaaacttttgctttccaggctgagattgctcagttaatgtctctaattataaatacattttattctaataaagaaatttttcttcgggagctgatctctaattctagcgatgcactggacaagattaggtacgagtctctgacggatccaagcaagctggactccggcaaggaattgcacataaaccttatacctaataagcaggaccggaccctcactattgtcgataccgggatcggtatgaccaaggcagacctgatcaacaacctcggcactatcgcaaagtccgggacaaaggcctttatggaggctctccaggccggagcagacatatcaatgatcggccagtttggagtggggttttattctgcctatcttgtggctgaaaaggtgacagtgattactaaacacaacgatgacgagcagtatgcttgggagagctccgctgggggaagctttaccgttaggaccgacactggcgagccaatgggcagagggacaaaggtcatcctgcacctcaaggaggaccaaaccgagtatcttgaggaacggaggataaaggagatcgtcaagaaacattctcaattcatcggttacccaatcacactctttgtggaaaaggagcgagataaagaagtctccgatgatgaagcggaggaaaaggaggacaaggaagaggagaaagagaaggaagagaaggaatccgaggataagcccgagatcgaagatgtgggatcagatgaggaggaagaaaaaaaagacggagacaagaaaaagaagaagaagattaaagaaaagtacatcgatcaggaggaacttaataaaactaaacccatttggactcgcaaccctgacgacataactaacgaagagtatggcgagttctataaaagcttgactaatgactgggaagaccacctggccgtaaagcacttctcagtggaaggccagcttgaatttagagccctcttgtttgtgcccaggcgagccccatttgatctgtttgagaaccggaaaaagaagaataacatcaagctgtatgttaggcgcgtctttatcatggataattgcgaggaactgatcccagaatatctcaatttcattcggggtgtggtggattccgaagatctgccactgaacattagccgcgagatgctgcagcagtctaaaattctaaaggtcatcaggaagaacctggtaaagaaatgcttggagctgttcactgagctcgctgaagataaagagaactacaagaagttttacgagcagtttagcaagaacatcaagcttgggatccatgaggatagccagaatcgtaagaagctgtctgagttgctccgttattacacatccgccagtggcgacgagatggtgtccctcaaggattactgcacgaggatgaaagagaaccagaaacatatctactatattaccggggagactaaagaccaggtcgccaactctgcgttcgtagaacgccttaggaagcatggcttggaagtaatatacatgattgagcccattgacgagtactgcgtgcaacagttaaaggagtttgaaggtaaaacgcttgtgagtgtcactaaagagggactggagctccccgaggacgaggaagaaaaaaagaaacaggaggaaaagaagacaaaattcgaaaacctatgtaagatcatgaaggatatcctggagaaaaaagtagaaaaagttgttgtgtctaatcggctggtcacttcaccctgttgtattgtgacttctacgtatggatggactgctaacatggagaggatcatgaaggcgcaggcactgcgggataattctaccatggggtatatggctgcgaaaaagcacctggaaatcaaccccgaccatagcatcatcgaaacgcttagacaaaaggccgaggctgataagaacgataagtcggtgaaggatctggtgattctcctgtatgaaaccgctttgctgtcaagtggtttctccttggaggatcctcagacacatgcaaatcggatttatcgcatgatcaaactggggttgggtattgacgaagacgacccgaccgctgacgatacgtccgcagcagtgacggaggaaatgcccccactggaaggggatgacgacacctcaagaatggaggaggtggattag

SEQ ID NO: 26670 - DNA, 2199 bp, Artificial Sequence
  derived and/or modified sequence
atgccagaggagacgcagactcaagatcaacctatggaggaagaggaagtggaaacgtttgcgtttcaagccgaaatcgcccaattgatgagcctgattattaacactttttattccaacaaagagatcttcctgcgagaactgatctctaactcttctgatgcactcgacaagatcaggtacgagagccttactgatccctcaaagctggattccggaaaagagctgcatatcaatctcatccccaacaaacaggaccgaaccttgactattgtggacactgggattggcatgactaaggctgatctgatcaataacctaggtacaatcgccaaatctggaacaaaagcctttatggaggctctgcaggccggggctgatatctccatgattggacagttcggcgtggggttttattctgcgtatctggttgccgagaaagtgaccgtgatcactaagcacaatgatgacgagcagtacgcgtgggagtcttctgccgggggatctttcaccgtcagaacagatactggcgaacctatgggaaggggtacgaaggtcattctgcatttgaaagaagatcaaaccgagtacttggaggaaaggcgaattaaggaaatcgtgaagaaacacagtcagttcatagggtatccaatcaccctgttcgtggaaaaggaaagagacaaggaggtgtccgatgacgaggcagaagagaaggaggacaaagaggaagagaaagagaaagaggagaaagagtccgaggataaaccagaaatagaggacgtggggtcggacgaggaggaggagaagaaggacggtgataagaagaaaaaaaagaagattaaagagaagtatattgaccaggaggagctgaacaaaacgaagccgatttggaccagaaatcctgatgatattacgaacgaggagtacggcgaattttacaagagcttgacgaatgattgggaggatcatctggccgtgaagcatttctccgtggagggccaattggaattccgcgcccttctgtttgtccctcgacgcgccccattcgatttgttcgagaaccgcaaaaagaagaacaatatcaaattgtatgtgcgacgcgtcttcatcatggataattgcgaggaactgatccccgagtatctgaattttatacgcggggttgtggattctgaggatttgcccctgaatatcagcagggaaatgctgcagcagtccaagatactgaaagtcatccgaaaaaacctcgtgaaaaagtgcctcgagctatttacagagctggcggaggacaaggaaaattataagaagttttacgaacagtttagcaagaacattaagctcggcattcacgaagacagccagaaccgaaagaagctgtccgagctgctcaggtattacacctctgccagtggtgacgagatggttagtctgaaagactactgcactaggatgaaagagaatcagaagcatatttattacataacaggagagaccaaagaccaagtggccaatagcgctttcgtggaacggctccgaaaacacggcctggaggtaatttacatgatagagccaattgacgaatactgcgtacagcagttgaaggaatttgaaggtaaaacgttggtctctgtgaccaaggagggcctcgagctgcccgaggacgaagaggagaagaagaagcaggaagaaaaaaaaactaagttcgagaatctttgcaagattatgaaggatatcctggaaaaaaaggtggagaaagttgtggttagtaacagattagtgacttcgccttgctgcattgttacctccacttatgggtggacagctaacatggagcgcataatgaaggcacaggctctacgcgacaattccacaatgggctacatggccgccaagaaacacctggagataaacccagatcatagtattatagagacactgaggcaaaaagccgaggccgataagaatgataaatctgttaaggacctggtcatccttctctatgagactgctctcctctctagcggtttctcgctggaagatccccagactcatgctaaccggatttacaggatgatcaagctcgggttggggattgatgaagacgaccccacggctgatgacaccagcgccgcagtcaccgaagagatgccccctctcgagggggacgacgatacttcaaggatggaggaggtggattag

SEQ ID NO: 26671 - DNA, 2199 bp, Artificial Sequence
  derived and/or modified sequence
atgcctgaggagacccagacccaggaccagcccatggaggaggaggaggtggagacctttgccttccaggccgagatcgcccagctgatgagcctcatcatcaacaccttctacagcaacaaggagatcttcctgcgggagctgatcagcaacagcagtgatgccctggacaagatccgctatgagagcctgacagaccccagcaagctggacagcggcaaggagctgcacatcaacctgatccccaacaagcaggacaggaccctgaccatcgtggacaccggcatcggcatgaccaaggctgacctgatcaacaacctgggcaccatcgccaagagcggcaccaaggccttcatggaggccctgcaggccggggctgacatctccatgattggccagtttggagtgggcttctacagcgcctacctggtggccgagaaggtgaccgtcatcaccaagcacaatgatgatgagcagtatgcctgggagagcagcgctgggggcagcttcaccgtgaggacagacaccggggagcccatgggccggggcaccaaggtgatcctgcacctgaaggaggaccagacagagtacctggaggagcggcgcatcaaggagatcgtgaagaagcacagccagttcatcggctaccccatcaccctgtttgtggagaaggagcgggacaaggaggtgtctgatgatgaagctgaggagaaggaggacaaggaggaggagaaggagaaggaggagaaggagagcgaggacaagccagaaattgaagatgtgggcagtgatgaggaggaggagaagaaggatggagacaagaagaagaagaagaagatcaaggagaagtacatcgaccaggaggagctgaacaagaccaagcccatctggaccagaaatccagatgacatcaccaatgaggagtatggagagttctacaagagcctgaccaatgactgggaggaccacctggccgtgaagcacttctctgtggagggccagctggagttccgggccctgctgtttgtgccccggcgggccccctttgacctgtttgaaaataggaagaagaagaacaacatcaagctgtatgtgcggcgggtcttcatcatggacaactgtgaggagctgatccctgagtacctgaacttcatccggggcgtggtggacagcgaggacctgcccctgaacatcagccgggagatgctgcagcagagcaagatcctgaaggtgatcaggaagaacctggtgaagaagtgcctggagctgttcacagagctggccgaggacaaggagaactacaagaagttctatgagcagttcagcaagaacatcaagctgggcatccacgaggacagccagaacaggaagaagctgtctgagctgctgcgctactacaccagcgccagcggagatgagatggtgtccctgaaggactactgcaccaggatgaaggagaaccagaagcacatctactacatcactggagagaccaaggaccaggtggccaacagcgcctttgtggagcggctgaggaagcacggcctggaggtgatctacatgattgagcccattgatgagtactgtgtgcagcagctgaaggagtttgagggcaagaccctggtgtctgtgaccaaggagggcctggagctgcctgaagatgaggaggagaagaagaagcaggaggagaagaagaccaagtttgagaacctgtgcaagatcatgaaggacatcctggagaagaaggtggagaaggtggtggtgagcaaccggctggtgaccagcccctgctgcatcgtgaccagcacctacggctggacagccaacatggagcgcatcatgaaggcccaggccctgcgggacaacagcaccatgggctacatggccgccaagaagcacctggagatcaacccagaccacagcatcatcgagaccctgcggcagaaggccgaggccgacaagaatgacaagtctgtgaaggacctggtgatcctgctgtatgaaacagccctgctgagcagcggcttcagcctggaggacccccagacccacgccaaccgcatctacaggatgatcaagctgggcctgggcattgatgaagatgaccccacagcagatgacaccagcgctgctgtgacagaggagatgccacccctggagggagatgatgacaccagcaggatggaggaggtggactag

SEQ ID NO: 26672 - DNA, 2199 bp, Artificial Sequence
  derived and/or modified sequence
atgcccgaggagacccagacccaggaccagcccatggaggaggaggaggtcgaaacttttgcttttcaagctgaaatcgctcagctgatgagcctgatcataaacaccttctatagcaataaggagatcttcctccgagaactaatctctaactcatctgatgcactggataagattaggtatgagagcttaaccgacccctccaagcttgactcgggaaaagagctccacattaatctgatacctaataagcaggatcgaaccttgacaatcgttgatactggcatcgggatgacaaaggccgacctgattaataatctcgggacaatcgcaaaaagcggtacaaaggcctttatggaagccctacaggcaggggccgacatttcaatgataggacagtttggggttggattttactcagcctacctggtggccgaaaaggtcacagtgataaccaagcacaacgacgatgagcagtatgcatgggaatccagcgctggaggatcctttacggtcaggacagatactggggagcccatgggcagagggacaaaagtgatcctgcacctcaaggaagaccagacagaatatctcgaagaaaggcgcatcaaagagatcgtaaagaagcacagccagttcataggttatcccattaccctgtttgtcgagaaagagcgagacaaagaagtgtctgatgatgaagcagaggagaaagaggataaagaggaggagaaagagaaggaagaaaaggagtctgaggacaaacctgaaattgaggatgtggggtcagatgaagaagaggaaaagaaagatggagacaaaaagaagaagaagaagataaaagagaagtacatagatcaggaggaactaaacaaaacaaaaccaatatggaccagaaatcccgatgatattactaacgaagaatatggagagttttacaagtctttaaccaacgattgggaagaccacttggccgtgaagcacttctcggtggagggacagctggaatttcgggcacttctgtttgtgcctcgtagagctccctttgacctgttcgagaatcgaaagaagaaaaataacattaagttgtatgtgcgccgagtctttattatggataactgtgaggagctcataccggaatatttaaatttcattcggggcgttgtagactctgaggacctgcccctgaacatttccagggagatgttacagcagagcaagattctcaaggtaatcagaaagaatttggtgaagaagtgtttggaactgttcacagaactagccgaggataaagagaactataagaagttttacgagcagtttagcaagaatattaaactgggcatccacgaagacagccagaatagaaagaaactgtcggagctgcttcggtattacacctcggcttcaggagatgagatggtgtctctaaaggattactgcacaaggatgaaggaaaaccagaaacatatctactatatcacgggcgaaacaaaagatcaggtcgcgaacagcgcgttcgtcgaacggctgcgaaaacacggcttggaggtgatttacatgatagagcccatcgatgagtattgcgttcagcagctgaaggaattcgaagggaagaccctagtgtccgtaacgaaagaaggcctggaattgcctgaggatgaggaagaaaaaaaaaagcaagaggagaagaaaaccaagttcgagaatctgtgtaaaatcatgaaggacattctggaaaaaaaagtcgagaaggtcgtagtgtcgaatagactggtgactagcccttgctgcattgtgacctcaacctacggatggacagcaaatatggagagaatcatgaaggcccaagcgctccgcgataactcaactatggggtatatggcagcgaagaaacacctggagattaatccggaccattccattattgagaccctgcgccaaaaagcagaagccgataaaaatgataagtctgttaaggacttggttatcctgttgtacgagactgctctcctgtcttcaggttttagtcttgaagacccgcagacacacgccaatagaatctacagaatgatcaagttaggtctgggcatagatgaggatgaccctaccgcggacgacacatccgctgccgtcactgaagagatgcctcccctggaaggcgacgatgacacgtcccggatggaagaagtggattag

SEQ ID NO: 26673 - DNA, 2199 bp, Artificial Sequence
  derived and/or modified sequence
atgccggaggaaactcagacacaggaccagcccatggaggaggaggaagttgaaacttttgcttttcaggctgaaatcgcgcagctcatgtcattgatcatcaatactttctattcgaacaaggagatttttctgcgggaactcatttcaaactcttccgatgccctggataagatccggtacgagagtttgacagacccctccaagctggacagtggtaaggaactgcatattaatttgattcccaacaaacaggacagaaccctcacgattgtggatacggggatcggtatgacaaaggccgatctcataaacaatctgggtaccatagccaaatctggcacaaaggcctttatggaagcactccaagcgggagccgacatcagtatgattgggcagtttggagttgggttttacagcgcttatttggtcgctgagaaggtcactgtaatcaccaaacataatgacgatgaacagtacgcttgggagagcagcgctggaggctctttcactgtgaggaccgacaccggggagccgatgggaagaggaacaaaagtcattctgcatctgaaggaggatcagaccgagtatcttgaggaacggaggattaaagaaatagtcaagaagcatagccagtttatagggtaccccattacactcttcgttgagaaggagcgagacaaagaggtgtccgatgatgaagctgaagagaaggaggataaggaagaggaaaaagagaaagaagagaaggaatccgaagataaaccagagatcgaggacgtcgggagtgacgaggaggaagagaaaaaggacggtgacaagaagaaaaaaaagaaaatcaaggaaaagtatatcgaccaggaggaactgaacaaaaccaagcctatttggactagaaaccctgatgacattacaaacgaagaatacggtgaattttataagagtttgaccaatgattgggaagaccatcttgcagttaagcacttttccgtcgaaggtcagctggagtttcgggcactgctctttgttcccagacgtgctccttttgacctgtttgaaaaccgtaaaaagaagaataacatcaagctttatgtgcggagagtgtttatcatggataactgtgaagagctgatccccgagtacttaaatttcatccgaggagtggtggattctgaggatctcccgctgaacattagccgcgagatgcttcaacagagtaaaattctcaaggttatccgaaagaatctggtgaaaaaatgcctggaactctttactgagctagccgaggacaaggagaactataaaaagttctacgagcaattttccaaaaacatcaagctgggaattcacgaagactcccagaaccggaagaaattgtcggagctgctccgctactatactagcgcgagtggggacgaaatggtgagcttaaaagactattgcactagaatgaaagagaatcagaagcacatttactatatcactggcgaaaccaaggatcaggttgctaacagcgctttcgtagagagactgagaaagcacggcttggaagtgatctatatgatcgagcccattgacgagtactgcgtgcagcagctgaaagaatttgaaggaaagacccttgtcagcgtcacaaaagaaggcttagaactccccgaggatgaagaggaaaagaaaaaacaggaggagaaaaaaactaaatttgagaatctgtgcaagattatgaaagatatcctggaaaaaaaggtggagaaggttgtcgtttcaaataggcttgtgaccagtccttgttgtatagtaacctctacatatggatggacagctaatatggagcgaattatgaaagctcaggctctgcgggataattccacaatggggtacatggcggctaagaaacatctggagatcaatcctgatcactctatcattgaaaccctgcgccagaaggccgaggcggataagaatgataaatccgtaaaggacctggttatcctcctgtatgaaacagctcttttgtcttctggttttagcctggaagatcctcagacccatgccaataggatctacagaatgatcaaactgggtcttggcattgatgaagacgatcccacagcagatgatacgtcagcagccgtgactgaagaaatgcctcccctcgagggggatgatgacacatctagaatggaagaagtcgattag

SEQ ID NO: 26674 - DNA, 2199 bp, Artificial Sequence
  derived and/or modified sequence
atgcccgaggagacccagacccaggaccagcccatggaggaggaggaggtggagaccttcgccttccaggccgagatcgcccagctgatgagcctgatcatcaacaccttctacagcaacaaggagatcttcctgagagagctgatcagcaacagcagcgacgccctggacaagatcagatacgagagcctgaccgaccccagcaagctggacagcggcaaggagctgcacatcaacctgatccccaacaagcaggacagaaccctgaccatcgtggacaccggcatcggcatgaccaaggccgacctgatcaacaacctgggcaccatcgccaagagcggcaccaaggccttcatggaggccctgcaggccggcgccgacatcagcatgatcggccagttcggcgtgggcttctacagcgcctacctggtggccgagaaggtgaccgtgatcaccaagcacaacgacgacgagcagtacgcctgggagagcagcgccggcggcagcttcaccgtgagaaccgacaccggcgagcccatgggcagaggcaccaaggtgatcctgcacctgaaggaggaccagaccgagtacctggaggagagaagaatcaaggagatcgtgaagaagcacagccagttcatcggctaccccatcaccctgttcgtggagaaggagagagacaaggaggtgagcgacgacgaggccgaggagaaggaggacaaggaggaggagaaggagaaggaggagaaggagagcgaggacaagcccgagatcgaggacgtgggcagcgacgaggaggaggagaagaaggacggcgacaagaagaagaagaagaagatcaaggagaagtacatcgaccaggaggagctgaacaagaccaagcccatctggaccagaaaccccgacgacatcaccaacgaggagtacggcgagttctacaagagcctgaccaacgactgggaggaccacctggccgtgaagcacttcagcgtggagggccagctggagttcagagccctgctgttcgtgcccagaagagcccccttcgacctgttcgagaacagaaagaagaagaacaacatcaagctgtacgtgagaagagtgttcatcatggacaactgcgaggagctgatccccgagtacctgaacttcatcagaggcgtggtggacagcgaggacctgcccctgaacatcagcagagagatgctgcagcagagcaagatcctgaaggtgatcagaaagaacctggtgaagaagtgcctggagctgttcaccgagctggccgaggacaaggagaactacaagaagttctacgagcagttcagcaagaacatcaagctgggcatccacgaggacagccagaacagaaagaagctgagcgagctgctgagatactacaccagcgccagcggcgacgagatggtgagcctgaaggactactgcaccagaatgaaggagaaccagaagcacatctactacatcaccggcgagaccaaggaccaggtggccaacagcgccttcgtggagagactgagaaagcacggcctggaggtgatctacatgatcgagcccatcgacgagtactgcgtgcagcagctgaaggagttcgagggcaagaccctggtgagcgtgaccaaggagggcctggagctgcccgaggacgaggaggagaagaagaagcaggaggagaagaagaccaagttcgagaacctgtgcaagatcatgaaggacatcctggagaagaaggtggagaaggtggtggtgagcaacagactggtgaccagcccctgctgcatcgtgaccagcacctacggctggaccgccaacatggagagaatcatgaaggcccaggccctgagagacaacagcaccatgggctacatggccgccaagaagcacctggagatcaaccccgaccacagcatcatcgagaccctgagacagaaggccgaggccgacaagaacgacaagagcgtgaaggacctggtgatcctgctgtacgagaccgccctgctgagcagcggcttcagcctggaggacccccagacccacgccaacagaatctacagaatgatcaagctgggcctgggcatcgacgaggacgaccccaccgccgacgacaccagcgccgccgtgaccgaggagatgccccccctggagggcgacgacgacaccagcagaatggaggaggtggactag

SEQ ID NO: 26675 - DNA, 3366 bp, Artificial Sequence
  derived and/or modified sequence
gcatgcgtaggcgcgcggccgcggcggcggctggggagggttcttccggaaggttcgggaggcttctggaaaaagcgccgcgcgctgggcgggcccgtcgctatataaggcaggcgcgggggtggcgcgtcagttgcttcagcgtcccggtgtggctgtgccgttggtcctgtgcggtcacttagccaagatgcctgaggaaacccagacccaagaccaaccgatggaggaggaggaggttgagacgttcgcctttcaggcagaaattgcccagttgatgtcattgatcatcaatactttctactcgaacaaagagatctttctgagagagctcatttcaaattcatcagatgcattggacaaaatccggtatgaaagcttgacagatcccagtaaattagactctgggaaagagctgcatattaaccttataccgaacaaacaagatcgaactctcactattgtggatactggaattggaatgaccaaggctgacttgatcaataaccttggtactatcgccaagtctgggaccaaagcgttcatggaagctttgcaggctggtgcagatatctctatgattggccagttcggtgttggtttttattctgcttatttggttgctgagaaagtaactgtgatcaccaaacataacgatgatgagcagtacgcttgggagtcctcagcagggggatcattcacagtgaggacagacacaggtgaacctatgggtcgtggaacaaaagttatcctacacctgaaagaagaccaaactgagtacttggaggaacgaagaataaaggagattgtgaagaaacattctcagtttattggatatcccattactctttttgtggagaaggaacgtgataaagaagtaagcgatgatgaggctgaagaaaaggaagacaaagaagaagaaaaagaaaaagaagagaaagagtcggaagacaaacctgaaattgaagatgttggttctgatgaggaagaagaaaagaaggatggtgacaagaagaagaagaagaagattaaggaaaagtacatcgatcaagaagagctcaacaaaacaaagcccatctggaccagaaatcccgacgatattactaatgaggagtacggagaattctataagagcttgaccaatgactgggaagatcacttggcagtgaagcatttttcagttgaaggacagttggaattcagagcccttctatttgtcccacgacgtgctccttttgatctgtttgaaaacagaaagaaaaagaacaacatcaaattgtatgtacgcagagttttcatcatggataactgtgaggagctaatccctgaatatctgaacttcattagaggggtggtagactcggaggatctccctctaaacatatcccgtgagatgttgcaacaaagcaaaattttgaaagttatcaggaagaatttggtcaaaaaatgcttagaactctttactgaactggcggaagataaagagaactacaagaaattctatgagcagttctctaaaaacataaagcttggaatacacgaagactctcaaaatcggaagaagctttcagagctgttaaggtactacacatctgcctctggtgatgagatggtttctctcaaggactactgcaccagaatgaaggagaaccagaaacatatctattatatcacaggtgagaccaaggaccaggtagctaactcagcctttgtggaacgtcttcggaaacatggcttagaagtgatctatatgattgagcccattgatgagtactgtgtccaacagctgaaggaatttgaggggaagactttagtgtcagtcaccaaagaaggcctggaacttccagaggatgaagaagagaaaaagaagcaggaagagaaaaaaacaaagtttgagaacctctgcaaaatcatgaaagacatattggagaaaaaagttgaaaaggtggttgtgtcaaaccgattggtgacatctccatgctgtattgtcacaagcacatatggctggacagcaaacatggagagaatcatgaaagctcaagccctaagagacaactcaacaatgggttacatggcagcaaagaaacacctggagataaaccctgaccattccattattgagaccttaaggcaaaaggcagaggctgataagaacgacaagtctgtgaaggatctggtcatcttgctttatgaaactgcgctcctgtcttctggcttcagtctggaagatccccagacacatgctaacaggatctacaggatgatcaaacttggtctgggtattgatgaagatgaccctactgctgatgataccagtgctgctgtaactgaagaaatgccaccccttgaaggagatgacgacacatcacgcatggaagaagtagactaatctctggctgagggatgacttacctgttcagtactctacaattcctctgataatatattttcaaggatgtttttctttatttttgttaatattaaaaagtctgtatggcatgacaactactttaaggggaagataagatttctgtctactaagtgatgctgtgataccttaggcactaaagcagagctagtaatgctttttgagtttcatgttggtttattttcacagattggggtaacgtgcactgtaagacgtatgtaacatgatgttaactttgtggtctaaagtgtttagctgtcaagccggatgcctaagtagaccaaatcttgttattgaagtgttctgagctgtatcttgatgtttagaaaagtattcgttacatcttgtaggatctactttttgaacttttcattccctgtagttgacaattctgcatgtactagtcctctagaaataggttaaactgaagcaacttgatggaaggatctctccacagggcttgttttccaaagaaaagtattgtttggaggagcaaagttaaaagcctacctaagcatatcgtaaagctgttcaaaaataactcagacccagtcttgtggatggaaatgtagtgctcgagtcacattctgcttaaagttgtaacaaatacagatgagttaaaagatattgtgtgacagtgtcttatttagggggaaaggggagtatctggatgacagttagtgccaaaatgtaaaacatgaggcgctagcaggagatggttaaacactagctgctccaagggttgacatggtcttcccagcatgtactcagcaggtgtggggtggagcacacgtaggcacagaaaacaggaatgcagacaacatgcatcccctgcgtccatgagttacatgtgttctcttagtgtccacgttgttttgatgttattcatggaataccttctgtgttaaatacagtcacttaattccttggccttaaaa

SEQ ID NO: 26676 - DNA, 3887 bp, Artificial Sequence
  derived and/or modified sequence
gactgcgcaggcgtgctcacctggcgtgctccacccgactgggcgtccgcaggctcctcccccgggtgtggcctccgggcggcatggctgcttcccaggtgatgccggcttcagctagtggggtctagttgaccgttccgcagccgccagggccagcggaaagccggtcagggggaaccgcggcggggctggtgtcatgagcctgaggtgaacttgagggtgcctcctcagcggtctcccgccctgccctgaggggcgccgggaccccaaagagcggaggaagagcgccaccccgacggccaccgcttcggagccagcacgcggggtaccctacggggagcgcggatgcccccgtgttcgggcggggacggctccacccctcctgggccctcccttcgggacagggactgtcccgcccagagtgctgaatacccgcgcgaccgtctggatccccgcccaggaagcccctctgaagcctcctcgccgccgtttctgagaagcagggcacctgttaactggtaccaagaaaaggcccaagtgtttctctggcatctgatggtgtctggatccaccactctactctgtctctggaaacagcccttccacgtctctgcattccctgtcaccgcgtcactggccttcagacagagccaaggtgcagggcaacacctctacaaggatctgcagccatttatattgcttaggctactgatgcctgaggaaacccagacccaagaccaaccgatggaggaggaggaggttgagacgttcgcctttcaggcagaaattgcccagttgatgtcattgatcatcaatactttctactcgaacaaagagatctttctgagagagctcatttcaaattcatcagatgcattggacaaaatccggtatgaaagcttgacagatcccagtaaattagactctgggaaagagctgcatattaaccttataccgaacaaacaagatcgaactctcactattgtggatactggaattggaatgaccaaggctgacttgatcaataaccttggtactatcgccaagtctgggaccaaagcgttcatggaagctttgcaggctggtgcagatatctctatgattggccagttcggtgttggtttttattctgcttatttggttgctgagaaagtaactgtgatcaccaaacataacgatgatgagcagtacgcttgggagtcctcagcagggggatcattcacagtgaggacagacacaggtgaacctatgggtcgtggaacaaaagttatcctacacctgaaagaagaccaaactgagtacttggaggaacgaagaataaaggagattgtgaagaaacattctcagtttattggatatcccattactctttttgtggagaaggaacgtgataaagaagtaagcgatgatgaggctgaagaaaaggaagacaaagaagaagaaaaagaaaaagaagagaaagagtcggaagacaaacctgaaattgaagatgttggttctgatgaggaagaagaaaagaaggatggtgacaagaagaagaagaagaagattaaggaaaagtacatcgatcaagaagagctcaacaaaacaaagcccatctggaccagaaatcccgacgatattactaatgaggagtacggagaattctataagagcttgaccaatgactgggaagatcacttggcagtgaagcatttttcagttgaaggacagttggaattcagagcccttctatttgtcccacgacgtgctccttttgatctgtttgaaaacagaaagaaaaagaacaacatcaaattgtatgtacgcagagttttcatcatggataactgtgaggagctaatccctgaatatctgaacttcattagaggggtggtagactcggaggatctccctctaaacatatcccgtgagatgttgcaacaaagcaaaattttgaaagttatcaggaagaatttggtcaaaaaatgcttagaactctttactgaactggcggaagataaagagaactacaagaaattctatgagcagttctctaaaaacataaagcttggaatacacgaagactctcaaaatcggaagaagctttcagagctgttaaggtactacacatctgcctctggtgatgagatggtttctctcaaggactactgcaccagaatgaaggagaaccagaaacatatctattatatcacaggtgagaccaaggaccaggtagctaactcagcctttgtggaacgtcttcggaaacatggcttagaagtgatctatatgattgagcccattgatgagtactgtgtccaacagctgaaggaatttgaggggaagactttagtgtcagtcaccaaagaaggcctggaacttccagaggatgaagaagagaaaaagaagcaggaagagaaaaaaacaaagtttgagaacctctgcaaaatcatgaaagacatattggagaaaaaagttgaaaaggtggttgtgtcaaaccgattggtgacatctccatgctgtattgtcacaagcacatatggctggacagcaaacatggagagaatcatgaaagctcaagccctaagagacaactcaacaatgggttacatggcagcaaagaaacacctggagataaaccctgaccattccattattgagaccttaaggcaaaaggcagaggctgataagaacgacaagtctgtgaaggatctggtcatcttgctttatgaaactgcgctcctgtcttctggcttcagtctggaagatccccagacacatgctaacaggatctacaggatgatcaaacttggtctgggtattgatgaagatgaccctactgctgatgataccagtgctgctgtaactgaagaaatgccaccccttgaaggagatgacgacacatcacgcatggaagaagtagactaatctctggctgagggatgacttacctgttcagtactctacaattcctctgataatatattttcaaggatgtttttctttatttttgttaatattaaaaagtctgtatggcatgacaactactttaaggggaagataagatttctgtctactaagtgatgctgtgataccttaggcactaaagcagagctagtaatgctttttgagtttcatgttggtttattttcacagattggggtaacgtgcactgtaagacgtatgtaacatgatgttaactttgtggtctaaagtgtttagctgtcaagccggatgcctaagtagaccaaatcttgttattgaagtgttctgagctgtatcttgatgtttagaaaagtattcgttacatcttgtaggatctactttttgaacttttcattccctgtagttgacaattctgcatgtactagtcctctagaaataggttaaactgaagcaacttgatggaaggatctctccacagggcttgttttccaaagaaaagtattgtttggaggagcaaagttaaaagcctacctaagcatatcgtaaagctgttcaaaaataactcagacccagtcttgtggatggaaatgtagtgctcgagtcacattctgcttaaagttgtaacaaatacagatgagttaaaagatattgtgtgacagtgtcttatttagggggaaaggggagtatctggatgacagttagtgccaaaatgtaaaacatgaggcgctagcaggagatggttaaacactagctgctccaagggttgacatggtcttcccagcatgtactcagcaggtgtggggtggagcacacgtaggcacagaaaacaggaatgcagacaacatgcatcccctgcgtccatgagttacatgtgttctcttagtgtccacgttgttttgatgttattcatggaataccttctgtgttaaatacagtcacttaattccttggccttaaaa

SEQ ID NO: 26677 - protein, 323 aa, Artificial Sequence
  derived and/or modified sequence
MSRPRMRLVVTADDFGYCPRRDEGIVEAFLAGAVTSVSLLVNGAATESAAELARRHSIPTGLHANLSEGRPVGPARRGASSLLGPEGFFLGKMGFREAVAAGDVDLPQVREELEAQLSCFRELLGRAPTHADGHQHVHVLPGVCQVFAEALQAYGVRFTRLPLERGVGGCTWLEAPARAFACAVERDARAAVGPFSRHGLRWTDAFVGLSTCGRHMSAHRVSGALARVLEGTLAGHTLTAELMAHPGYPSVPPTGGCGEGPDAFSCSWERLHELRVLTAPTLRAQLAQDGVQLCALDDLDSKRPGEEVPCEPTLEPFLEPSLL

SEQ ID NO: 26678 - DNA, 972 bp, Artificial Sequence
  derived and/or modified sequence
atgagcagacccagaatgagactggtggtgaccgccgacgacttcggctactgccccagaagagacgagggcatcgtggaggccttcctggccggcgccgtgaccagcgtgagcctgctggtgaacggcgccgccaccgagagcgccgccgagctggccagaagacacagcatccccaccggcctgcacgccaacctgagcgagggcagacccgtgggccccgccagaagaggcgccagcagcctgctgggccccgagggcttcttcctgggcaagatgggcttcagagaggccgtggccgccggcgacgtggacctgccccaggtgagagaggagctggaggcccagctgagctgcttcagagagctgctgggcagagcccccacccacgccgacggccaccagcacgtgcacgtgctgcccggcgtgtgccaggtgttcgccgaggccctgcaggcctacggcgtgagattcaccagactgcccctggagagaggcgtgggcggctgcacctggctggaggcccccgccagagccttcgcctgcgccgtggagagagacgccagagccgccgtgggccccttcagcagacacggcctgagatggaccgacgccttcgtgggcctgagcacctgcggcagacacatgagcgcccacagagtgagcggcgccctggccagagtgctggagggcaccctggccggccacaccctgaccgccgagctgatggcccaccccggctaccccagcgtgccccccaccggcggctgcggcgagggccccgacgccttcagctgcagctgggagagactgcacgagctgagagtgctgaccgcccccaccctgagagcccagctggcccaggacggcgtgcagctgtgcgccctggacgacctggacagcaagagacccggcgaggaggtgccctgcgagcccaccctggagcccttcctggagcccagcctgctgtag

SEQ ID NO: 26679 - DNA, 972 bp, Artificial Sequence
  derived and/or modified sequence
atgtcacgccctcggatgaggctggtcgtcaccgccgatgacttcggctactgccctcgtcgggatgaaggtattgtggaagccttcctcgctggcgctgtgacgtccgtgagcttgctggtgaatggcgcggccactgaaagcgctgccgagctggcaagacgacacagtatcccgacaggtttgcacgcgaacctttccgaaggccgcccagttgggccagctcgccgcggagccagttccctgttaggaccagaaggtttctttttagggaagatgggcttcagggaggccgtagcagcaggggatgtcgatttacctcaggtccgggaagaactcgaagcacagttatcctgtttcagagagcttttgggcagagcccctacacacgccgatggccaccagcacgtccatgtgctaccaggcgtatgccaggtcttcgctgaggcactgcaggcatatggtgtgaggttcacgcggctgccactggagaggggtgtcggcggttgcacctggctggaagcacctgcgagggccttcgcctgcgcagtagagagggacgcccgggcagctgtaggacctttcagcagacacggattgcggtggacagatgcctttgtggggctgagtacgtgtggacgacatatgtcggcccatagggtgagcggggcactggctcgagtattagagggtaccctggccggtcacactcttaccgccgagctcatggctcaccccgggtatcctagcgtaccaccgaccggcgggtgcggcgagggtccggatgctttcagctgtagctgggaaaggctgcacgagctgagagtactgactgctcccacgctccgagctcagttggcccaggatggagtacagctttgtgcattagacgaccttgattctaagcgccctggcgaggaggtgccttgcgagccaaccctggagccttttctggagcccagcctgctgtag

SEQ ID NO: 26680 - DNA, 972 bp, Artificial Sequence
  derived and/or modified sequence
atgagccggcccaggatgaggctggtggtgacagcagatgactttggctactgccccaggagagatgagggcatcgtggaggccttcctggccggggctgtgacctctgtgtccctgctggtgaatggagctgccacagagagcgctgctgagctggcccggcggcacagcatccccaccggcctgcacgccaacctgtctgagggccggcctgtgggccctgcccggcggggggccagcagcctgctgggccctgagggcttcttcctgggcaagatgggcttccgggaggccgtggccgctggagatgtggacctgccccaggtgcgggaggagctggaggcccagctgagctgcttccgggagctgctgggccgggcccccacccatgctgatggccaccagcacgtgcacgtgctgcccggggtgtgccaggtgtttgctgaggccctgcaggcctacggcgtgcgcttcacccggctgcccctggagcggggcgtgggcggctgcacctggctggaggccccagcccgggcctttgcctgtgctgtggagagagatgcccgggctgctgtgggccccttcagccgccacggcctgcgctggacagatgcctttgtgggcctgagcacctgtggccgccacatgtctgcccaccgggtgtctggggccctggcccgggtgctggagggcaccctggccggccacaccctgacagctgagctgatggcccaccctggctaccccagcgtgccccccaccggcggctgtggggagggcccagatgccttcagctgctcctgggagcggctgcacgagctgcgggtgctgacagcccccaccctgcgggcccagctggcccaggatggagtgcagctgtgtgccctggatgacctggacagcaagaggcctggagaggaggtgccctgtgagcccaccctggagcccttcctggagcccagcctgctgtag

SEQ ID NO: 26681 - DNA, 972 bp, Artificial Sequence
  derived and/or modified sequence
atgagccggccccggatgcggctggtggtgaccgccgacgacttcggttactgtcccagacgagatgagggtatcgtggaggccttcctggccggcgcggtaactagtgttagtctactcgtcaacggtgccgctacagagtcagcagcggagctggctcggcggcatagtataccaaccggtctgcatgccaacctgagtgagggcaggcctgtgggaccagcacggcgaggagccagttccctcctgggtccagaaggcttcttccttgggaagatggggtttcgcgaagccgtcgccgcaggcgacgtggacctgccgcaggtcagggaagagcttgaggcacaactctcatgcttcagggaactgcttggaagggctcctacccacgccgacggccaccaacacgtgcacgtgctgccaggagtttgccaggtattcgcagaggccctccaggcatacggcgttcgatttacccgccttcctcttgagagaggtgttgggggttgcacgtggctggaggcccctgcacgggcgtttgcatgcgccgtcgaaagggatgctcgcgcagcggtggggccattttcacgtcatggtctgcgatggaccgacgcctttgtcggcctctcgacgtgcgggcggcacatgtcagcccatagagtctctggcgccctggcccgcgtcctggagggaaccctggcaggccataccttaaccgccgaactcatggctcatccagggtatccatcggtgcctcccactggtggttgtggggagggccccgatgcttttagctgctcctgggaaaggctgcacgaactgcgggtgctaactgccccaacattacgggcccagcttgcgcaggacggtgtacagctctgtgctttagatgaccttgattccaaaaggcctggcgaggaggttccctgcgagccaacccttgaacctttcttggaacctagcctcctgtag

SEQ ID NO: 26682 - DNA, 972 bp, Artificial Sequence
  derived and/or modified sequence
atgtctcgtcctcgcatgagacttgttgtcactgcagacgatttcgggtactgcccacgcagggatgaggggattgtcgaggcgtttctcgctggtgccgttaccagcgtcagcttgctcgtaaacggtgctgcaacagaatcagccgcagagcttgctcgaagacacagtatacccacgggcctccacgctaatctgtcggaaggacgacccgtagggccagcccgaaggggggcatcatcactcctcggaccagagggtttcttcctggggaagatgggcttccgtgaggccgtggctgccggagacgtagatcttccacaggtgcgggaggagttggaggcccagctcagctgttttagagagctgctgggtagagccccaacccatgctgacgggcaccagcacgtgcatgtgttgcctggagtctgtcaggttttcgctgaggccctgcaggcgtatggggttaggttcacacgactccctctcgaacgaggggtgggcggatgcacttggcttgaggcgccagcccgagcctttgcctgtgccgtcgaacgcgacgccagggccgcagttgggccattctccagacacgggctgcgctggaccgacgccttcgtcggtctgtccacatgcggtcggcacatgtccgctcacagagtatccggtgcccttgccagggtgctcgagggtacgctggccggacacactctgaccgctgagttgatggcacatccagggtaccccagcgtgccaccaactggaggatgcggggaggggcctgatgccttttcttgtagctgggaaagactgcatgagctgcgggtgctgaccgccccaacccttcgcgctcagcttgcccaggacggagttcaactatgcgccctcgacgatctcgactcaaagcggcctggggaagaggtgccttgcgagcccaccttggagccattcctggagccttcactgttgtag

SEQ ID NO: 26683 - DNA, 1351 bp, Artificial Sequence
  derived and/or modified sequence
ggctgtccggcccactcccctgggagcgcgagcggtggacccaggcggccatgtcccgccctcgcatgcgcctggtggtcaccgcggacgactttggttactgcccgcgacgcgatgagggtatcgtggaggcctttctggccggggctgtgaccagcgtgtccctgctggtcaacggtgcggccacggagagcgcggcggagctggcccgcaggcacagcatccccacgggcctccacgccaacctgtccgagggccgccccgtgggtccggcccgccgtggcgcctcatcgctgctcggcccggaaggcttcttccttggcaagatgggattccgggaggcggtggcggccggagacgtggatttgcctcaggtgcgggaggagctcgaggcccaactaagctgcttccgggagctgctgggcagggcccccacgcacgcggacgggcaccagcacgtgcacgtgctcccaggcgtgtgccaggtgttcgccgaggcgctgcaggcctatggggtgcgctttacgcgactgccgctggagcgcggtgtgggtggctgcacttggctggaggcccccgcgcgtgccttcgcctgcgccgtggagcgcgacgcccgggccgccgtgggccccttctcccgccacggcctgcggtggacagacgccttcgtgggcctgagcacttgcggccggcacatgtccgctcaccgcgtgtccggggccctggcgcgggtcctggaaggtaccctagcgggccacaccctgacagccgagctgatggcgcaccccggctaccccagtgtgcctcccaccggcggctgcggtgaaggccccgacgctttctcttgctcttgggagcggctgcatgagctgcgcgtcctcaccgcgcccacgctgcgggcccagcttgcccaggatggcgtgcagctttgcgccctcgacgacctggactccaagaggccaggggaggaggtcccctgtgagcccactctggaacccttcctggaaccctccctactctgaccccctacagacaaccaagcactaatccccttagtaccaagaaaggggagccaggatttagtcctggcccagcccagagctgggacctggagcacgatctgttgacttccctgggtaggacactgccacctctgggctcaggtcctcatgcctccaaatggcatctagagtttgagcagccttcttggctgcaggcaggcctagcctgtggcagcgggctagggcccgcagagcatttggtgcccctccatgttgcaatgcaaacaccttcaccactggggcagtggggagagatggctatattaataaaataacgtgtgtctttcaaa

SEQ ID NO: 26684 - protein, 410 aa, Artificial Sequence
  derived and/or modified sequence
MEDPSGAREPRARPRERDPGRRPHPDQGRTHDRPRDRPGDPRRKRSSDGNRRRDGDRDPERDQERDGNRDRNRDRERERERERDPDRGPRRDTHRDAGPRAGEHGVWEKPRQSRTRDGARGLTWDAAAPPGPAPWEAPEPPQPQRKGDPGRRRPESEPPSERYLPSTPRPGREEVEYYQSEAEGLLECHKCKYLCTGRGVVQIVEVVLNGMVLICIVASYFVLAGFSASFSSGGGFGNNYYSPFEGTELEQVRQLDQQYTILRSPLIYGGVAVSLGLGVLTMGVLLQGAKSRTMLSGKWLLTEAAFSLLAAVGYCTGIGVYLHVALQINSTDTCKTRERLYARKGLTWMDCQLAGTDGAAATFACLLVIMYGASVVLALRSYREQKRYKGSREQPGSYSDAPEYLWSGTL

SEQ ID NO: 26685 - DNA, 1233 bp, Artificial Sequence
  derived and/or modified sequence
atggaggaccccagcggagcacgtgagcccagggcacggccaagagaacgcgatccggggcggcggcctcaccctgaccagggacgaacgcatgatcggccaagggatcgcccaggggaccctagacgcaagaggagcagcgacggaaataggcgacgggacggcgacagggaccctgagagagaccaggagcgcgatggcaacagagaccgtaaccgtgatagagaacgggagcgcgaacgcgagcgggatcccgaccgtggccctaggagggatacccaccgggatgccgggcctagagccggcgagcatggtgtttgggagaagccccggcaaagtcgcacacgcgatggtgcccgtggactgacctgggatgctgctgcccctcctgggcctgccccgtgggaggcacccgaaccaccacaaccacagcgaaaaggggatcctggtcgacgccggcctgagagcgagccaccctcggaacgctatctgccctcaacgccacggccggggcgggaagaagtcgagtactaccaatctgaggccgaagggctcctcgagtgccataaatgcaaatacctttgtactggccggggagtggtccagatcgtggaggtcgtattgaacggtatggtcctcatctgcatcgtggcatcttacttcgtgttggcaggattcagtgcctctttcagcagcggggggggcttcgggaataactattatagtcctttcgagggcactgagctcgagcaggttaggcagctcgaccagcagtacaccatcctgcgttcccccctcatctacggaggtgtcgccgtgtcactaggattaggtgttcttacgatgggcgtgctgttgcagggggcgaagagccggactatgctgtccggtaagtggctgctgacagaggccgcctttagcttgctggcagctgtggggtactgcacagggatcggggtctatctacatgtggctctgcagataaacagcactgacacatgtaagaccagggagcgcctctatgctaggaaaggacttacatggatggactgccagctcgcaggcaccgacggcgccgctgccacctttgcatgtttgttggtcatcatgtacggcgcaagtgtcgtactggcactacgcagttatagggagcaaaagcgctacaaaggctcgagagagcagccaggttcttacagcgatgctcctgagtatctgtggtctggcacactatag

SEQ ID NO: 26686 - DNA, 1233 bp, Artificial Sequence
  derived and/or modified sequence
atggaggaccccagcggggcccgggagccccgggcccggccccgggagcgggaccctggaagaagaccccacccagaccagggccgcacccatgaccggccccgggacaggcctggggaccccaggaggaagaggagcagtgatggcaacagaagaagagatggagaccgggaccctgagcgggaccaggagagagatggcaacagagacaggaacagagaccgggagcgggagcgggagcgggagcgggaccctgaccggggcccccggcgggacacccacagagatgctggccccagggctggggagcacggcgtgtgggagaagccccggcagagcaggaccagagatggagcccggggcctgacctgggatgctgctgcccctcctggccctgccccctgggaggcccctgagcccccccagccccagaggaagggggaccctggaagaagaagacctgagagcgagccccccagcgagcgctacctgcccagcaccccccggcccggccgggaggaggtggagtactaccagagcgaggccgagggcctgctggagtgccacaagtgcaagtacctgtgcaccggccggggcgtggtgcagatcgtggaggtggtgctgaatggcatggtgctgatctgcatcgtggccagctactttgtgctggccggcttcagcgccagcttcagcagcggcggcggcttcggcaacaactactacagcccctttgagggcacagagctggagcaggtgcggcagctggaccagcagtacaccatcctgcggagccccctcatctacggcggcgtggccgtgtccctgggcctgggcgtgctgaccatgggcgtgctgctgcagggcgccaagagcaggaccatgctgagcggcaagtggctgctgacagaggccgccttcagcctgctggccgctgtgggctactgcaccggcatcggcgtgtacctgcacgtggccctgcagatcaacagcacagacacctgcaagacccgggagcggctgtatgccaggaagggcctgacctggatggactgccagctggccggcacagatggagctgctgccacctttgcctgcctgctggtgatcatgtatggagcctctgtggtgctggccctgcggagctaccgggagcagaagcgctacaagggcagccgggagcagcccggcagctacagtgatgcccctgagtacctgtggagcggcaccctgtag

SEQ ID NO: 26687 - DNA, 2214 bp, Artificial Sequence
  derived and/or modified sequence
gttgccctcaggtcgctcccgggcggggacacggaacccggccatggaagatccgtcgggggctcgcgagccccgggcccggccgagagagcgggacccgggacggcgcccccacccagaccaaggccgcacccacgatcgaccgcgggaccgacccggggacccgcgcaggaagcgaagcagcgacgggaaccggcgaagggacggggaccgggacccggagagagaccaggagagggacgggaaccgcgaccggaaccgggaccgggagagggagagagagagggaaagagacccggaccgaggcccccgccgggacacacacagggacgcgggccctcgcgcaggtgaacacggagtttgggaaaaaccgcgccaaagccggacgcgggacggagcccggggactgacctgggacgcagccgcgcctcctgggcccgcgccctgggaagccccggagccgccgcagccgcagaggaagggagaccccgggcgccgcagacccgaaagtgaacccccttcggagagatatctgccctcgacccccaggcctggacgagaggaggtggaatattaccagtcagaggcggaaggactcctggaatgccacaaatgcaaatacttgtgcactgggagaggtgtggtgcagatagtggaggtggtcttgaatgggatggttctcatatgcatcgtggcctcctactttgtccttgccggattcagtgccagcttttccagcggcggtggctttgggaacaactactactcaccgttcgagggcactgagctagagcaggttcggcagctggaccagcagtacacgatcctccgctcgcccctgatatacggtggcgtggctgtttctctgggtctgggggtcctcaccatgggtgttttactccaaggagccaagagtcgaacaatgttgtcagggaagtggctcctcacggaggccgccttcagcctcctagcggcagtgggctactgcacaggcattggtgtttacctccacgtggctctgcagatcaatagcaccgacacttgcaaaacaagagagaggctctatgcccgcaagggtctcacctggatggactgccagctggcaggcaccgacggagcagcagccacctttgcttgtcttctcgtgatcatgtacggcgccagcgtggtgctggccctgcgtagctaccgagaacagaagcgctacaaaggcagccgagaacagcccggaagttacagtgatgcaccggaatatctgtggtctggaactctttgagatcttccggaacctaaatgtgaacgcacattgtttctctcaaaaagacaggtcttttaaaactccgcattagacaactatggttttcacacacttgactttataaatgctctctttggactgaggcaaagttaaagaattgaggacgggcatggtggctcatgcctgtaatcccagcactttgggaggctgaggtgggcggatcgcttgaggtcagcagattgagtccagcctggctcacatagcgaaaccctgtctctactaaaaatacaaaaaatcgccgggcatggtggctcacgcctgtaatcccagcactttaggaggccaaggcaggcagatcacctgaggtcaggtgtttgaaaccagtctggcaaacatggtgaaaccccatctctactaaaaatacaaaaattagctgggcgtggtggcaggcacctgtaattccagctactctggaggctgaggcaggagaatctcttaaacccgggaggcagaggttgcagtgagccaagaccattgcactccagcctgggcaacaagagcgagactccgtctcaaaaaaatacaaaaaatcatctgggcttggtggtgaacgcctgtaatcccagttactcaggaggctaaaccacaagaatcacttgaacctgggaggcagaggttgcagtgagcaaactccactccacgtcactgcactccagcctgggtaacagagcgaggctctgtctcaaaaacaacaactacaacaaaaaagataggacagtagattttattagaccctgaagcatactggaggctttttcatttctgcattccctgacagtgctccatagagtaggtcttcaaaggtagatagtaatctcattaccctggactgttctcataatgtaacagatcactaacactgaatcttaaaaataaagttcttttagtaattttaa

SEQ ID NO: 26688 - DNA, 1233 bp, Artificial Sequence
  derived and/or modified sequence
atggaggaccccagcggcgcccgggagccccgggcccggccccgggagagggatccagggcgccgcccgcaccctgatcaggggaggacccacgaccgcccacgagaccgtcctggggacccccggcggaaacgcagttccgatggaaataggaggagagatggtgacagggaccctgagagggaccaggagagggacggaaacagagatcgaaacagagaccgggaacgcgagagggaacgcgaacgcgatccagataggggtcccaggcgggacacccaccgggatgcgggacccagagcaggagaacacggcgtttgggaaaagcccagacaatcgcgtacgcgagacggtgcccgaggtctgacatgggacgctgccgccccccccgggccggctccttgggaggccccagaaccgccacagcctcagaggaagggagaccctggtcgacgtagacccgagtctgagcccccctccgagaggtatctcccatcaacccctcgcccaggccgcgaagaggtggagtactaccagtcagaggccgaaggtctgctggagtgtcacaaatgcaagtatctgtgtacggggcgcggcgtcgttcagatcgttgaagtggtgctgaatggtatggtcctgatttgcattgtggcctcctacttcgtgctggctgggttctccgcctctttcagctccggaggagggtttggaaataactattatagccccttcgaaggcaccgagctggagcaggtgcggcagctcgatcagcaatatacaattttgcgctcgcctctgatctacggcggagtggccgtgtctctggggctcggcgtgctgacgatgggcgttttactccagggtgcaaaatctcggacgatgctgtccggaaagtggctactcacagaggccgcattttctctcctcgctgcagtaggatactgcacaggtatcggggtatacctgcacgtggccttacagattaacagtaccgacacatgcaagacaagggaacggctatacgccagaaaaggcctgacatggatggattgccaactcgcaggaaccgacggcgccgcagcgactttcgcctgtctgctagtaatcatgtacggtgcctcagttgtcctagcactcagatcctacagagaacaaaagcgatataaagggtcccgagagcaacccggatcttactcagacgcacctgagtacctttggagcggtaccttgtag

SEQ ID NO: 26689 - DNA, 1233 bp, Artificial Sequence
  derived and/or modified sequence
atggaagatccctctggggcacgagagccaagagccagacctcgcgagagggatcccggtaggcgccctcaccctgatcaggggagaacacacgaccggcctcgtgataggccaggagaccctcgccgaaagagatctagcgatggtaaccgtcgaagggatggtgatagggatcctgagagggatcaggagcgggacggtaacagggacaggaatagagacagggagagagaacgggaacgggagagagatcctgatcgcggtcctaggagagatacacatcgcgatgcaggtcccagagctggggagcatggcgtgtgggaaaaacctcggcaatcacgtacaagagacggtgcccgaggcctgacatgggacgcagcggcaccccctgggccagctccctgggaagctcccgagccgcctcagccccagcgtaagggcgatcccggtcgacggaggccggagtcagaaccaccgagcgaaaggtacttgccttctacccctcggccagggagggaggaggtggagtattaccaaagcgaggccgaaggcttactggagtgtcacaaatgcaagtacttatgtacaggtcgcggtgtcgtgcaaattgttgaggttgtcctcaacggtatggtgctgatctgtattgtggcctcctacttcgtccttgccggttttagtgcttccttttcatcaggcggagggtttggcaacaattactactcaccgtttgaggggactgagctagagcaggtccggcagctggaccaacagtataccatcctgcgaagcccgctcatatatgggggtgtggctgtgtcgctggggcttggggtgctgaccatgggcgtcttacttcaaggcgctaagagcaggaccatgctgtccggaaaatggttactgacagaagcagcgttcagccttttggcagcggtgggttactgcacagggatcggcgtttacctgcacgtggcacttcaaatcaactctacagacacttgcaagactcgggagcgactgtatgcaaggaaagggctgacatggatggattgtcagctggcaggaacggatggggcagctgctactttcgcttgcctcttggtaattatgtatggcgctagcgtcgtgctggccctgcgaagctatcgcgaacagaaacgctataaggggagccgtgagcagcccggatcatacagtgatgcacccgagtatctttggagtggcactctatag

SEQ ID NO: 26690 - DNA, 1233 bp, Artificial Sequence
  derived and/or modified sequence
atggaggaccccagcggcgccagagagcccagagccagacccagagagagagaccccggcagaagaccccaccccgaccagggcagaacccacgacagacccagagacagacccggcgaccccagaagaaagagaagcagcgacggcaacagaagaagagacggcgacagagaccccgagagagaccaggagagagacggcaacagagacagaaacagagacagagagagagagagagagagagagagagaccccgacagaggccccagaagagacacccacagagacgccggccccagagccggcgagcacggcgtgtgggagaagcccagacagagcagaaccagagacggcgccagaggcctgacctgggacgccgccgccccccccggccccgccccctgggaggcccccgagcccccccagccccagagaaagggcgaccccggcagaagaagacccgagagcgagccccccagcgagagatacctgcccagcacccccagacccggcagagaggaggtggagtactaccagagcgaggccgagggcctgctggagtgccacaagtgcaagtacctgtgcaccggcagaggcgtggtgcagatcgtggaggtggtgctgaacggcatggtgctgatctgcatcgtggccagctacttcgtgctggccggcttcagcgccagcttcagcagcggcggcggcttcggcaacaactactacagccccttcgagggcaccgagctggagcaggtgagacagctggaccagcagtacaccatcctgagaagccccctgatctacggcggcgtggccgtgagcctgggcctgggcgtgctgaccatgggcgtgctgctgcagggcgccaagagcagaaccatgctgagcggcaagtggctgctgaccgaggccgccttcagcctgctggccgccgtgggctactgcaccggcatcggcgtgtacctgcacgtggccctgcagatcaacagcaccgacacctgcaagaccagagagagactgtacgccagaaagggcctgacctggatggactgccagctggccggcaccgacggcgccgccgccaccttcgcctgcctgctggtgatcatgtacggcgccagcgtggtgctggccctgagaagctacagagagcagaagagatacaagggcagcagagagcagcccggcagctacagcgacgcccccgagtacctgtggagcggcaccctgtag

SEQ ID NO: 26691 - protein, 351 aa, Artificial Sequence
  derived and/or modified sequence
MTWSATARGAHQPDNTAFTQQRLPAWQPLLSASIALPLFFCAGLAFIGLGLGLYYSSNGIKELEYDYTGDPGTGNCSVCAAAGQGRALPPPCSCAWYFSLPELFQGPVYLYYELTNFYQNNRRYGVSRDDAQLSGLPSALRHPVNECAPYQRSAAGLPIAPCGAIANSLFNDSFSLWHQRQPGGPYVEVPLDRSGIAWWTDYHVKFRNPPLVNGSLALAFQGTAPPPNWRRPVYELSPDPNNTGFINQDFVVWMRTAALPTFRKLYARIRQGNYSAGLPRGAYRVNITYNYPVRAFGGHKLLIFSSISWMGGKNPFLGIAYLVVGSLCILTGFVMLVVYIRYQDQDDDDEE

SEQ ID NO: 26692 - protein, 113 aa, Artificial Sequence
  derived and/or modified sequence
MEERAQHCLSRLLDNSALKQQELPIHRLYFTARRVLFVFFATGIFCLCMGIILILSARSTQEIEINYTRICANCAKLRENASNFDKECTCSIPFYLSGKMMVGEIQETRLTLH

SEQ ID NO: 26693 - DNA, 1056 bp, Artificial Sequence
  derived and/or modified sequence
atgacctggagcgccaccgccagaggcgcccaccagcccgacaacaccgccttcacccagcagagactgcccgcctggcagcccctgctgagcgccagcatcgccctgcccctgttcttctgcgccggcctggccttcatcggcctgggcctgggcctgtactacagcagcaacggcatcaaggagctggagtacgactacaccggcgaccccggcaccggcaactgcagcgtgtgcgccgccgccggccagggcagagccctgccccccccctgcagctgcgcctggtacttcagcctgcccgagctgttccagggccccgtgtacctgtactacgagctgaccaacttctaccagaacaacagaagatacggcgtgagcagagacgacgcccagctgagcggcctgcccagcgccctgagacaccccgtgaacgagtgcgccccctaccagagaagcgccgccggcctgcccatcgccccctgcggcgccatcgccaacagcctgttcaacgacagcttcagcctgtggcaccagagacagcccggcggcccctacgtggaggtgcccctggacagaagcggcatcgcctggtggaccgactaccacgtgaagttcagaaacccccccctggtgaacggcagcctggccctggccttccagggcaccgcccccccccccaactggagaagacccgtgtacgagctgagccccgaccccaacaacaccggcttcatcaaccaggacttcgtggtgtggatgagaaccgccgccctgcccaccttcagaaagctgtacgccagaatcagacagggcaactacagcgccggcctgcccagaggcgcctacagagtgaacatcacctacaactaccccgtgagagccttcggcggccacaagctgctgatcttcagcagcatcagctggatgggcggcaagaaccccttcctgggcatcgcctacctggtggtgggcagcctgtgcatcctgaccggcttcgtgatgctggtggtgtacatcagataccaggaccaggacgacgacgacgaggagtag

SEQ ID NO: 26694 - DNA, 1056 bp, Artificial Sequence
  derived and/or modified sequence
atgacctggagcgcgactgcccggggagcccaccagccggacaacacagctttcacacagcagagactgcccgcatggcaacccctcttaagtgcatctatagcactgccccttttcttttgtgccggactggcattcattggcctcggtctaggactatattacagtagcaacggaatcaaggagctggaatacgattacactggtgacccagggaccgggaattgttctgtatgcgctgctgcaggacagggaagggctctgccacccccctgttcctgcgcatggtatttctccctccccgaattatttcagggtcccgtgtatctttattatgaacttactaacttctaccagaataaccggcgctatggcgtgtcccgcgatgatgcccaactgagtggacttccctctgccttgaggcatcctgtgaatgaatgcgccccctaccagagatccgcagctggcttgcctattgcaccgtgcggagctatagccaacagtttgtttaacgacagctttagtctgtggcatcaaaggcagccgggcggtccttacgtggaggttcccctggacagatccggtatcgcatggtggacagactaccacgtaaaattccggaatccgcctttggtcaacgggtccctcgcactcgccttccagggcactgccccgcccccgaattggcggaggccggtgtacgaactatcccctgacccaaataacaccggcttcattaatcaggacttcgtcgtgtggatgaggacagctgccttgcccacttttcgcaagctctatgcccgcatccgccaaggaaattactcagctgggctgccacggggggcctatcgcgttaacatcacctacaattaccccgtcagggcctttggaggccataaactgctgatcttttcaagcataagctggatgggtggcaagaacccattcttggggattgcatatctggtcgttggctctctctgcattttaacaggattcgtgatgctggtggtttacattaggtaccaggaccaagacgacgacgacgaggaatag

SEQ ID NO: 26695 - DNA, 1056 bp, Artificial Sequence
  derived and/or modified sequence
atgacctggtctgcaacggccaggggagcccaccagccagacaataccgcctttacccagcagcggttgcccgcttggcagcccctgctgtccgctagcattgcgctgccccttttcttctgcgcaggactggcattcatcggccttgggctaggactttactactctagcaacggtataaaggagctggagtatgactatacaggtgaccccgggactggtaactgctccgtctgcgctgccgctggtcagggccgagctctgccaccaccctgtagctgtgcatggtatttctctctccctgagctgtttcaggggccagtatacttatattacgagcttacaaatttttaccagaataaccgtcgatacggcgtgtctcgggacgacgcccaactgagtgggttgcccagtgccttgcggcatccggtgaatgagtgcgcaccttaccaaaggtctgccgccggccttcctattgctccttgtggcgctatcgccaatagtttgtttaatgactctttctccctctggcaccagaggcagcccggagggccttacgtagaagttcccctcgataggtccggcattgcctggtggacggattatcacgtgaagttccggaaccctccactcgtcaacggatcgttggctctggcattccagggcacggcaccccctcccaactggaggcgacctgtatatgagctcagtcccgaccctaacaacaccggcttcatcaaccaagacttcgtagtttggatgcgaacggcggctctccccaccttccgaaagctctacgccaggattcggcagggtaattatagcgccggccttcctcgaggcgcgtacagggtaaacatcacctataactaccctgtaagggccttcggaggtcataaacttctgatcttctcatccatttcatggatgggcgggaagaacccttttcttgggattgcctacctcgtcgtgggttcactgtgcatcctgacgggattcgtaatgttggtggtctatatcagataccaggatcaggatgatgatgacgaagagtag

SEQ ID NO: 26696 - DNA, 1056 bp, Artificial Sequence
  derived and/or modified sequence
atgacctggagcgccacagcccggggggcccaccagcctgacaacacagccttcacccagcagaggctgcctgcctggcagcccctgctgagcgccagcatcgccctgcccctcttcttctgtgccggcctggccttcatcggcctgggcctgggcctgtactacagcagcaatggcatcaaggagctggagtatgactacaccggggaccccggcactggaaactgcagcgtgtgtgccgccgccggccagggccgggccctgcccccaccctgcagctgtgcctggtacttcagcctgcctgagctgttccagggccctgtgtacctgtactatgagctgaccaacttctaccagaacaacagaagatatggagtgtccagagatgatgcccagctgagcggcctgcccagcgccctgcggcaccctgtgaatgaatgtgccccctaccagaggtctgctgctggcctgcccatcgccccctgtggggccatcgccaacagcctcttcaatgacagcttcagcctgtggcaccagaggcagcccggcggcccctacgtggaggtgcccctggacaggagcggcatcgcctggtggacagactaccacgtgaagttcagaaatccacccctggtgaatggcagcctggccctggccttccagggcacagcccccccacccaactggaggaggcctgtgtatgagctgagcccagaccccaacaacacaggcttcatcaaccaggactttgtggtgtggatgaggacagctgccctgcccaccttcaggaagctgtatgcccgcatccggcagggcaactacagcgctggcctgcccaggggggcctacagagtgaacatcacctacaactaccctgtgcgggccttcggcggccacaagctgctgatcttcagcagcatctcctggatgggcggcaagaaccccttcctgggcatcgcctacctggtggtgggcagcctgtgcatcctgactggatttgtgatgctggtggtgtacatccgctaccaggaccaggatgatgatgatgaggagtag

SEQ ID NO: 26697 - DNA, 1056 bp, Artificial Sequence
  derived and/or modified sequence
atgacctggagcgccaccgcccggggcgcccaccagcccgacaacaccgccttcacccagcagaggttaccggcttggcagcccctgctcagtgcatcaatagccctgccattattcttttgtgccgggcttgcattcattggtttgggactgggcttatattacagctctaacggtattaaagaacttgagtatgactacactggagatcccgggactggcaactgctcagtttgcgccgccgccgggcaaggaagagcgcttccgcctccatgcagttgtgcctggtacttttccctcccagagctttttcaggggcccgtttacctgtattacgaactgaccaatttttatcagaacaatcggagatacggggtgagtagggatgacgcccagttaagtggactgcccagcgcactacgtcacccagtcaatgaatgtgctccttatcagcggtcagccgcagggctccctatagccccttgcggagcaattgctaactcactgttcaatgactcattctcactgtggcaccagcggcagccaggagggccctatgtggaggtgccactggacagatcagggatcgcttggtggaccgactatcatgtaaaattccgaaacccccccttggtcaatgggtctctggctctcgccttccagggcaccgcacctcctcctaattggaggagaccggtctatgagctgtccccagatcctaataacaccggctttattaatcaggatttcgtggtgtggatgagaaccgctgcgctgccaaccttccgaaagctctacgcacgcatccggcagggaaattactccgccggcctaccccgcggtgcataccgtgtaaacatcacttacaactacccagtacgagccttcggcgggcacaagctgctgattttttcttcaatatcttggatgggtgggaagaatccattccttggaattgcatatttggtggtgggatccttatgtatactgactggattcgtcatgctggtagtgtacatacgctatcaggaccaggatgatgacgacgaggaatag

SEQ ID NO: 26698 - DNA, 1056 bp, Artificial Sequence
  derived and/or modified sequence
atgacctggagcgccaccgcccggggcgcccaccagcccgacaacacagcttttacgcagcagagactgccggcctggcagccactgttgtctgcatcaattgcgctcccccttttcttctgcgccggcctggcctttatcggcttgggccttggcctttattacagcagcaacggtattaaggaattggagtatgactacactggggacccgggcaccggtaattgttccgtctgcgccgccgccgggcagggacgggcactccctcccccgtgctcctgtgcatggtacttcagcctgcccgaactattccaggggccagtttatttatattatgaactgaccaacttctaccagaataataggagatatggtgtctcacgagacgacgcccagttgtcaggcttgcccagcgccttgcgccaccccgtcaacgagtgtgccccctatcaacgaagcgcagcagggcttcccatcgccccatgtggcgctatagcaaactctctctttaatgacagtttctcactgtggcaccagcggcagcctggcggaccatacgtggaggttcccctggatcgcagcggcattgcttggtggacagattaccacgtgaagttccgcaaccctccactggtgaacgggtcattggctttggcttttcagggtaccgccccaccaccaaattggcgaaggccagtctacgagctctctccagacccgaacaacacgggcttcatcaatcaggattttgtggtgtggatgagaaccgcagctctcccaacatttaggaaattgtatgcccgcatcaggcagggaaactactctgctggtctcccccggggggcctatcgcgttaatataacatacaactatcctgtcagagccttcggtggacataagttattgatcttttctagcatcagctggatgggcggcaagaacccattcctgggcattgcctatttagttgtgggctccctgtgtatcctgactgggttcgtgatgctagtggtgtatatccgctaccaagatcaggacgatgatgacgaagagtag

SEQ ID NO: 26699 - DNA, 1056 bp, Artificial Sequence
  derived and/or modified sequence
atgacttggtccgctacagcaaggggagcccatcagccagataatacagccttcactcagcagcgtctgccagcgtggcagccgcttctctcagccagtatcgctctgccactgttcttttgtgctggtcttgcctttattggattgggcctgggcctctactacagcagcaacggtatcaaagaactggaatacgactacacaggggacccgggaactggaaactgtagtgtatgtgccgctgccggtcaaggtagggctctgcctcctccttgctcatgcgcctggtacttctccctgcctgaacttttccagggccctgtgtacctttactatgagctcaccaatttttatcagaataatcgacgttacggtgtctcgcgggatgacgctcagttaagcgggctcccgtctgcccttaggcaccccgtgaacgaatgcgccccatatcaacggtctgccgcagggttaccaattgctccgtgtggcgcaattgcgaatagtctctttaatgactcctttagcctgtggcatcagagacagcccggagggccttacgtggaggtgccactcgaccgttcgggcatagcatggtggacagattaccatgtgaaattccggaatcccccacttgtcaatggaagtctcgccctggcatttcaaggcacggccccaccccctaattggaggcggccagtgtacgagctgtcacctgatccaaataacactggattcatcaatcaggacttcgtggtttggatgaggaccgccgcactgcccactttcaggaagctgtacgccaggattcggcagggaaattactctgccggattgcccagaggggcatatagagtcaatatcacctacaactatcccgtgagggcgtttgggggacacaagctgctaatcttttcttccattagctggatgggcggtaagaaccctttcctcggcatagcatatttagtggtcggcagcctgtgcatcctcaccggctttgtaatgttagttgtgtatatcaggtatcaggaccaggacgatgatgatgaagagtag

SEQ ID NO: 26700 - DNA, 1056 bp, Artificial Sequence
  derived and/or modified sequence
atgacatggtcagcaactgcgagaggagcccaccagcctgataacactgcctttacacagcaaagactgccagcctggcaaccacttctgtcagcttcaatcgctctgccccttttcttctgcgcaggtctggctttcatcggactcggccttggcctgtattattccagcaatggaatcaaggaactcgagtacgactatacgggtgatcccggaacggggaattgctcagtctgtgcagccgcaggccagggcagggcacttccgcctccatgttcctgtgcgtggtatttctccctgcccgaactgttccaagggccagtgtacctgtactatgagctcaccaatttttaccagaacaatcgcagatatggggtgtccagggatgatgctcagctcagcgggcttccatcagcactccgccacccggtgaatgagtgtgccccataccagagatccgccgctggtctgccaattgccccatgcggggctatcgcaaatagcttgttcaacgattcattttcactctggcatcagcgtcagcccggtggaccctatgttgaggtgcctttggatagatccgggatagcatggtggacagactatcatgtgaagttcagaaatccacccctcgtcaatggaagtctggctctcgcctttcaggggaccgcacccccacctaattggcgtaggccagtttatgaattgagtccggacccaaacaacactggatttattaaccaggacttcgttgtgtggatgagaaccgctgcgttacctacattcagaaagctgtatgcccgtatcagacaggggaattattccgctgggctacctcggggtgcatacagggtgaacataacgtataattaccccgtacgggcatttggcggtcacaagctgcttattttctcttccatcagctggatgggaggaaaaaatccatttctcggtattgcctacctggtcgtgggatctctatgtatactgacgggtttcgtaatgttggtagtttatattcgttatcaagaccaagacgacgacgatgaggaatag

SEQ ID NO: 26701 - DNA, 3026 bp, Artificial Sequence
  derived and/or modified sequence
agcagtccccgggcttgcgcggcgcggagagggaggcgccccgcggcggggcccccactcggtcagcccgcgcgtcggtccccgcgcggccgccatgacctggagcgccacggcccggggcgcccaccagcccgacaacaccgccttcactcagcagcgcctccccgcctggcagccgctgctgtcggccagcatcgcgctgccgctcttcttctgcgcgggcctggccttcatcggcctgggcctgggcctctactactcctccaacggcatcaaggagctggagtacgactatacaggcgacccgggcaccggtaactgctcggtgtgcgccgcggctggccagggccgggcgctgccgcccccctgctcgtgcgcctggtacttctcgctgcccgagctcttccagggcccagtgtacctctactacgagctgaccaacttctaccagaacaaccggcgctacggcgtgtcccgcgacgacgcgcagctgagcggactccccagcgcgctgcgccaccctgtcaacgagtgcgccccctaccagcgcagcgcggccggcctgcccatcgcgccctgcggcgccatcgccaacagcctcttcaacgactccttctcgctttggcaccagcgccagcccggcgggccctacgtcgaggtgccgctcgaccgctccggcatcgcctggtggaccgactaccacgtcaagttccgcaacccgccgctggtcaacggcagcctggcgttggccttccagggcacggcgcccccgcccaactggcgccggccagtctacgagctcagccccgaccccaacaacaccggcttcatcaatcaggacttcgtggtgtggatgcgcacggcggcgctgcccacgttccgcaaactgtacgcgcgcatccgccagggcaactactcggccgggctgccgcggggcgcctaccgcgtcaacatcacctacaactacccggtgcgcgcgttcggcggccacaagctcctcatcttcagcagcatctcgtggatgggtggcaagaaccccttcctgggcatcgcctacctggtcgtcggctccctctgcatcctcaccggctttgtcatgctggtcgtctacattcgctaccaggaccaggacgacgacgacgaggagtgattccggctttccagggatccctcctgcttcttgccaaaactcttgcaaggtgcttttggcatctcctcctcgcccgtcacccaattccaacctcgcctagcttttcctccctttgtgaatgaggggaccagataagggaattaccccccttgctcttggggggctgctagactgtcttgccgcggggagggatgttgactgcagagtgaaacatccttgcaaactcttcccacctccttcacgacactgagttgccatgtgaggttcttcaagtctgagagtggaagggatccctatggagactcctattaaacccctattagaggaagagattgagagacctagcaatgtgaagtaacaaagatcaggcagctgcaagtgactcctgaatcttgagtccagggctttcgccactacagtacagtggttttcttttctttggtcggggagagtgggctggaatggagagtgaggcccacaaattacctgcagagacgtggaggcgtgagggagaacatgcttgttaaatatgcaggtagattaggagacaccaaacagagattcagacacagtaaggctgggatgagatcctcgaagctgtgttttaacaaactccactggagagtcccatattccctcaaatttgggaatcacgaccctgaaccaggttgggcctgaagcagtcaactgaattcactttttcggatagtaatttgttcccaggggcagtgacaaccatgatgttccaggtttggtctggcactctgccttgaacgtaggaagctcttgattttattgattaacatcaatcagtatgtttaaagttattctaagaagcaatagtttatttttaaaaaccttgtatagcaaaataacttaaaaccctttgtgatatcatcttaccagtttatttggtaaaaacaaacagttatttggtatttgtcagaattcttcagtgcctgctattacagctattttccaattactaacttgattatactcactcaaggcagtgcaagatcttgaagtactttttagcagttaagtaatattgaattgtattgaatagtttacatagtttattctagtctttgaaaattactgaacatggacaatgtgcatgtcattgacatctgccttagaacttctgggacaatcctgattcgagagattctatcccattatttacatataccaaaaatactttgttaatttaatgtgttggcttcccaactcctgaacacgacacaattttattattagattttgtatggtgattttaggctatgaaaacatgatcattatatgtatatagatacatttttatttgttacaaatgtttgagcagctcactagcccacccctcctctattttgggtaagagaatttactaccttttttaactatgtagttgagagcaacatgtattttgttatttttagaatggtcagtatattgctataaaattttaaatgagactatgaaagttaaagtattctgattctggttaaattaacgaatatggttccaggccctgttctctgggtttttgagagagaataaaggttatgtttgtcttacctttgttatcgagtttgctgaattcttttgaacgatgatcttaaaggcacaaacaccaccagccactttgctaatttcttaatagcagatttacattgcagcaagaaaaccatcttttatagtaacattcagttaaaatgaactcaattcattgttaacttcctaaaacagaatttgaactttatcaacctcaacgtgtatataaactagatagtcctcaatactttatcaacctcaacatgtatataaactagatagtcctcaaatactgtttgaatttaataaatgtcaattt

SEQ ID NO: 26702 - DNA, 4471 bp, Artificial Sequence
  derived and/or modified sequence
aaacagatttatcataacgtaattccctggacactcccaacttgagactgaaagctgggcgaaagcggtttgtgaagctaacctaaaagacaaaatggtctagagccaccttttccccgcaaataacagaggattaaggatctgaaatcttcaagcctccaggaccacggtgcaagccctcagcaaaaatttctgctggaggccggagcgccttttgatttcgggagactggcccaggaactctagtcacttggaaggcggaagagaaggtggtacctgagccaggtaggagccactcagaggcagcccggggccgccactcacctaggagaggaggtggagtccgatgacctggactgagaggaaacgcgagactgagtctaccaggtgaggtaaaaaacacccacctgctcacctcggaaggggcgggcgaggtgcggctcccggtgacccgcgggggtgcagcgcacctgggcggaggcggaactgggagggtgtgggcactgctcgtagggcctggaactaaactcacctgtgacggaggcagaggaggggcccgggcaaaaacccacctgagctggcgggaaacccgacccgcgagcagtccccgggcttgcgcggcgcggagagggaggcgccccgcggcggggcccccactcggtcagcccgcgcgtcggtccccgcgcggccgccatgacctggagcgccacggcccggggcgcccaccagcccgacaacaccgccttcactcagcagcgcctccccgcctggcagccgctgctgtcggccagcatcgcgctgccgctcttcttctgcgcgggcctggccttcatcggcctgggcctgggcctctactactcctccaacggcatcaaggagctggagtacgactatacaggcgacccgggcaccggtaactgctcggtgtgcgccgcggctggccagggccgggcgctgccgcccccctgctcgtgcgcctggtacttctcgctgcccgagctcttccagggcccagtgtacctctactacgagctgaccaacttctaccagaacaaccggcgctacggcgtgtcccgcgacgacgcgcagctgagcggactccccagcgcgctgcgccaccctgtcaacgagtgcgccccctaccagcgcagcgcggccggcctgcccatcgcgccctgcggcgccatcgccaacagcctcttcaacgactccttctcgctttggcaccagcgccagcccggcgggccctacgtcgaggtgccgctcgaccgctccggcatcgcctggtggaccgactaccacgtcaagttccgcaacccgccgctggtcaacggcagcctggcgttggccttccagggcacggcgcccccgcccaactggcgccggccagtctacgagctcagccccgaccccaacaacaccggcttcatcaatcaggacttcgtggtgtggatgcgcacggcggcgctgcccacgttccgcaaactgtacgcgcgcatccgccagggcaactactcggccgggctgccgcggggcgcctaccgcgtcaacatcacctacaactacccggtgcgcgcgttcggcggccacaagctcctcatcttcagcagcatctcgtggatgggtggcaagaaccccttcctgggcatcgcctacctggtcgtcggctccctctgcatcctcaccggctttgtcatgctggtcgtctacattcgctaccaggaccaggacgacgacgacgaggagtgattccggctttccagggatccctcctgcttcttgccaaaactcttgcaaggtgcttttggcatctcctcctcgcccgtcacccaattccaacctcgcctagcttttcctccctttgtgaatgaggggaccagataagggaattaccccccttgctcttggggggctgctagactgtcttgccgcggggagggatgttgactgcagagtgaaacatccttgcaaactcttcccacctccttcacgacactgagttgccatgtgaggttcttcaagtctgagagtggaagggatccctatggagactcctattaaacccctattagaggaagagattgagagacctagcaatgtgaagtaacaaagatcaggcagctgcaagtgactcctgaatcttgagtccagggctttcgccactacagtacagtggttttcttttctttggtcggggagagtgggctggaatggagagtgaggcccacaaattacctgcagagacgtggaggcgtgagggagaacatgcttgttaaatatgcaggtagattaggagacaccaaacagagattcagacacagtaaggctgggatgagatcctcgaagctgtgttttaacaaactccactggagagtcccatattccctcaaatttgggaatcacgaccctgaaccaggttgggcctgaagcagtcaactgaattcactttttcggatagtaatttgttcccaggggcagtgacaaccatgatgttccaggtttggtctggcactctgccttgaacgtaggaagctcttgatgatttgtggaatgaatttttaaaaaattactatctggggaaaactagttggcatacagagttgtaggacagggtttatgtgattcatttgatattttagtattttggtgtaaaagccaacaggcaaactttgccaggtactgtgtagaaactcgaaaatgtgaggccagtttgtacagttcagaggaaatgctttaacgtagaatcagatagctggaagagatcttcgagggaaagtaagttccctaaagtcacatctatgtctcctagctcagtgttctttgtcattgtgtgtgtgtgtgtgtgtgtgtgtgtgtgtgtgtgtgattagaaagggcttcattcataccttttcccttggacctggaaaaaaaattttttttatcttttcaaatgaaatctattgatttctagtaatcatatttgaatcaatgttaaagcatatatagtcttatatgtaaactagattcttaagattatttgaacctttgagatgaagtttacactcaactaaaatcattccattgattttattgattaacatcaatcagtatgtttaaagttattctaagaagcaatagtttatttttaaaaaccttgtatagcaaaataacttaaaaccctttgtgatatcatcttaccagtttatttggtaaaaacaaacagttatttggtatttgtcagaattcttcagtgcctgctattacagctattttccaattactaacttgattatactcactcaaggcagtgcaagatcttgaagtactttttagcagttaagtaatattgaattgtattgaatagtttacatagtttattctagtctttgaaaattactgaacatggacaatgtgcatgtcattgacatctgccttagaacttctgggacaatcctgattcgagagattctatcccattatttacatataccaaaaatactttgttaatttaatgtgttggcttcccaactcctgaacacgacacaattttattattagattttgtatggtgattttaggctatgaaaacatgatcattatatgtatatagatacatttttatttgttacaaatgtttgagcagctcactagcccacccctcctctattttgggtaagagaatttactaccttttttaactatgtagttgagagcaacatgtattttgttatttttagaatggtcagtatattgctataaaattttaaatgagactatgaaagttaaagtattctgattctggttaaattaacgaatatggttccaggccctgttctctgggtttttgagagagaataaaggttatgtttgtcttacctttgttatcgagtttgctgaattcttttgaacgatgatcttaaaggcacaaacaccaccagccactttgctaatttcttaatagcagatttacattgcagcaagaaaaccatcttttatagtaacattcagttaaaatgaactcaattcattgttaacttcctaaaacagaatttgaactttatcaacctcaacgtgtatataaactagatagtcctcaatactttatcaacctcaacatgtatataaactagatagtcctcaaatactgtttgaatttaataaatgtcaatttaaaaatttttgtagtagtcttctgcattttacttcaattataaattgcaattatttattggatattttggacttcaaagcagcagaaactttaaaactgaaatgggaaacgttttcctgcaatgatccctgtgctgtaacattttgtctggtgtctcaggcttccaggttcttgttggcctgaattcccttgttgcccagtaaatgttcactagctagaagtatcttcaggaagtgagatagaaaagagtgaacctcaacaattggactggaaatgagctttgacctaactttgtaaaataaaagcataaaagagaaa

SEQ ID NO: 26703 - protein, 860 aa, Artificial Sequence
  derived and/or modified sequence
MSRGGSYPHLLWDVRKRSLGLEDPSRLRSRYLGRREFIQRLKLEATLNVHDGCVNTICWNDTGEYILSGSDDTKLVISNPYSRKVLTTIRSGHRANIFSAKFLPCTNDKQIVSCSGDGVIFYTNVEQDAETNRQCQFTCHYGTTYEIMTVPNDPYTFLSCGEDGTVRWFDTRIKTSCTKEDCKDDILINCRRAATSVAICPPIPYYLAVGCSDSSVRIYDRRMLGTRATGNYAGRGTTGMVARFIPSHLNNKSCRVTSLCYSEDGQEILVSYSSDYIYLFDPKDDTARELKTPSAEERREELRQPPVKRLRLRGDWSDTGPRARPESERERDGEQSPNVSLMQRMSDMLSRWFEEASEVAQSNRGRGRSRPRGGTSQSDISTLPTVPSSPDLEVSETAMEVDTPAEQFLQPSTSSTMSAQAHSTSSPTESPHSTPLLSSPDSEQRQSVEASGHHTHHQSDNNNEKLSPKPGTGEPVLSLHYSTEGTTTSTIKLNFTDEWSSIASSSRGIGSHCKSEGQEESFVPQSSVQPPEGDSETKAPEESSEDVTKYQEGVSAENPVENHINITQSDKFTAKPLDSNSGERNDLNLDRSCGVPEESASSEKAKEPETSDQTSTESATNENNTNPEPQFQTEATGPSAHEETSTRDSALQDTDDSDDDPVLIPGARYRAGPGDRRSAVARIQEFFRRRKERKEMEELDTLNIRRPLVKMVYKGHRNSRTMIKEANFWGANFVMSGSDCGHIFIWDRHTAEHLMLLEADNHVVNCLQPHPFDPILASSGIDYDIKIWSPLEESRIFNRKLADEVITRNELMLEETRNTITVPASFMLRMLASLNHIRADRLEGDRSEGSGQENENEDEE

SEQ ID NO: 26704 - DNA, 2583 bp, Artificial Sequence
  derived and/or modified sequence
atgtctcggggtggaagctatccgcacctgttgtgggacgtccgaaaacgctctttaggccttgaagatccgtcaaggttacgatccagatatttgggccgtcgagagtttatccagaggctgaaactggaagctacccttaacgttcacgatggatgcgtgaacaccatatgttggaacgacactggtgagtacatcttgtctgggagcgatgacaccaaactggtaatttccaatccttattcacgcaaggtgctcaccactatccgatctggacaccgtgccaacatcttttccgcgaagtttttaccgtgcactaatgacaagcagattgtcagttgtagcggcgacggcgtcattttttacaccaatgtggagcaagatgctgagaccaataggcagtgtcagtttacttgccattatggcactacatacgagatcatgacagtacctaacgatccctacactttcctgtcatgcggcgaggacggcaccgtaaggtggttcgatacaagaataaaaacctcctgtacaaaagaagactgcaaggatgacatcttaatcaactgtcgccgagctgcgacttccgttgccatctgtcccccaattccttactacctggccgtgggttgtagcgattcctccgtgcggatctacgacagacggatgctaggcactcgagcaactggcaactacgcagggaggggcacaacaggcatggtggcgcgcttcattccgtcccacttgaataataaatcctgtcgcgtaacatcgctgtgttatagcgaagacggtcaggaaatcctagtgtcatactccagtgattacatctacctgttcgaccccaaagacgacaccgctcgagagttgaaaacaccctccgcagaggaaagaagagaagagcttcgacaacctcctgtaaagcgcttgaggctaaggggtgattggtctgatactggcccgagggccagaccagaaagcgagcgtgagagggatggagagcaatctcccaatgtgagccttatgcaacgtatgagcgacatgctctctcgttggttcgaggaagcaagtgaggtggctcagtccaatcgaggcagggggaggtcacggcccagggggggtacaagccagtctgacattagcaccctgcctacagtgccgtcttctcccgaccttgaagtgagcgagacagcaatggaagtggatactcccgccgaacagttcctccaaccttctaccagctctacaatgtcagcacaggcccattcaaccagcagtcccaccgaatccccgcatagcaccccgttgcttagcagccccgattcagagcagcggcagagcgtcgaggccagcgggcaccacactcaccaccagagcgacaataataatgaaaagttaagcccaaaacccgggacgggtgaaccagtactgtcactccattactcaactgaaggcactaccacatccaccatcaaattaaattttaccgacgagtggagtagtattgcgtcgtcttcaagaggaatcggctcacactgtaagagcgaaggtcaggaggagtctttcgtcccccagtcatcagttcagcctcccgagggcgatagtgagactaaggcacccgaagaatcaagcgaggacgtgactaagtatcaggaaggagtgtcagccgagaacccggtggaaaatcacattaacataacgcaatccgataaatttaccgccaagccactggactcaaattccggagagagaaacgatctgaatctcgaccgcagctgcggtgttcctgaagagagcgcatctagcgagaaggctaaggagccagaaacctctgaccagacatccacagaatccgccactaacgagaacaatacaaatcccgagcctcagttccaaaccgaggccaccgggccttcagctcacgaggaaacttcaacccgcgattcagccttacaggacaccgatgactcggacgatgaccccgtactcatccccggagcgcggtaccgagctggccctggggataggcgctcagccgtggccaggatccaggaattctttcggagaaggaaagagcgaaaggaaatggaggagttagataccttaaatatcaggcggccccttgtgaagatggtgtacaagggtcaccgtaactcaaggaccatgatcaaagaagcaaacttttggggtgcaaatttcgtgatgagcggctcagactgtggccatatctttatttgggacaggcacaccgcagagcacctgatgctattagaggccgataaccacgtggttaactgtctccagcctcacccttttgacccaatcctggccagctctggcattgattacgacatcaaaatctggtcacccttggaagagtcccggatcttcaaccgaaaactcgccgatgaggtcattactcgcaacgaactcatgctagaggaaaccaggaatacgatcacagtcccggcctcatttatgctgagaatgttagcaagtttgaatcacattcgggccgacaggcttgagggggatcgcagtgagggaagtggacaggagaacgagaacgaggatgaggagtag

SEQ ID NO: 26705 - DNA, 2583 bp, Artificial Sequence
  derived and/or modified sequence
atgagccggggcggcagctacccccacctgctgtgggatgtgaggaagaggagcctgggcctggaggaccccagccggctgcggagccgctacctgggccggcgggagttcatccagaggctgaagctggaggccaccctgaatgtgcatgatggctgtgtgaacaccatctgctggaatgacaccggggagtacatcctgagcggcagtgatgacaccaagctggtgatcagcaacccctacagcaggaaggtgctgaccaccatccgcagcggccaccgggccaacatcttcagcgccaagttcctgccctgcaccaatgacaagcagatcgtgtcctgcagcggagatggagtcatcttctacaccaacgtggagcaggatgctgagaccaaccggcagtgccagttcacctgccactacggcaccacctatgagatcatgacagtgcccaatgacccctacaccttcctgagctgtggggaggatggcaccgtgcgctggtttgacacccgcatcaagaccagctgcaccaaggaggactgcaaggatgacatcctgatcaactgcagaagagctgccacctctgtggccatctgcccccccatcccctactacctggccgtgggctgcagcgacagctctgtgcgcatctatgacaggaggatgctgggcacccgggccactggaaattatgccggccggggcaccaccggcatggtggcccgcttcatccccagccacctgaacaacaagagctgccgggtgaccagcctgtgctacagtgaagatggccaggagatcctggtgtcctacagcagtgactacatctacctgtttgaccccaaggatgacacagcccgggagctgaagacccccagcgctgaggagcggcgggaggagctgcggcagccccctgtgaagaggctgcggctgcggggggactggagcgacaccggcccccgggcccggcctgagagcgagcgggagagagatggagagcagagccccaacgtgtccctgatgcagaggatgtctgacatgctgagccgctggtttgaggaggccagcgaggtggcccagagcaacagaggccggggccgcagccggccccggggcggcaccagccagagcgacatcagcaccctgcccaccgtgcccagcagcccagacctggaggtgtctgaaacagccatggaggtggacaccccagctgagcagttcctgcagcccagcaccagcagcaccatgtctgcccaggcccacagcaccagcagccccacagagagcccccacagcacccccctgctgagcagcccagacagcgagcagaggcagagcgtggaggccagcggccaccacacccaccaccagagcgacaacaacaatgagaagctgagccccaagccaggcaccggggagcctgtgctgagcctgcactacagcacagagggcaccaccaccagcaccatcaagctgaacttcacagatgagtggagcagcatcgccagcagcagccggggcatcggcagccactgcaagtctgagggccaggaggagagctttgtgccccagagctctgtgcagcccccagagggggacagcgagaccaaggcccctgaggagagcagtgaagatgtgaccaagtaccaggagggcgtgtctgcagaaaatcctgtggagaaccacatcaacatcacccagagcgacaagttcaccgccaagcccctggacagcaacagcggggagagaaatgacctgaacctggacaggagctgtggggtgcctgaggagagcgccagcagcgagaaggccaaggagcctgagaccagtgaccagaccagcacagagagcgccaccaatgaaaacaacaccaaccctgagccccagttccagacagaggccaccggccccagcgcccacgaggagaccagcacccgggacagcgccctgcaggacacagatgacagtgatgatgatcctgtgctgatccctggggcccgctacagagctggccctggggaccggcgctctgctgtggcccgcatccaggagttcttcagaagaaggaaggagaggaaggagatggaggagctggacaccctgaacatcagaagacccctggtgaagatggtgtacaagggccacaggaacagcaggaccatgatcaaggaggccaacttctggggcgccaactttgtgatgagcggcagtgactgtggccacatcttcatctgggacagacacacagctgagcacctgatgctgctggaggccgacaaccacgtggtgaactgcctgcagccccacccctttgaccccatcctggccagcagcggcattgattatgacatcaagatctggagccccctggaggagagccgcatcttcaacaggaagctggctgatgaagtcatcaccagaaatgagctgatgctggaggagaccaggaacaccatcaccgtgcctgccagcttcatgctgaggatgctggccagcctgaaccacatccgggctgaccggctggagggggacagaagtgagggcagcggccaggagaatgaaaatgaagatgaggagtag

SEQ ID NO: 26706 - DNA, 2583 bp, Artificial Sequence
  derived and/or modified sequence
atgagccggggcggcagctacccccacctgctgtgggacgtgcggaaacgcagtctcggacttgaggatccctctcgattgaggtcccggtaccttggaagacgggagttcatccagcgcctaaagttggaggccactttgaacgtccacgatgggtgcgtgaatacgatctgctggaacgacaccggcgaatacatcttgtccgggtctgacgataccaagttagtgatctcaaatccgtattcaaggaaggtgcttaccaccattcgtagcggacaccgggcgaatattttttctgccaagttcctcccatgcacaaatgacaaacagattgtgtcctgctccggagatggcgtgatattctacacaaatgtcgaacaggatgcggagacaaacagacaatgtcaatttacctgccactacgggacaacctatgagattatgacagtacctaatgacccatacacctttctgagctgcggtgaagacggcaccgtgagatggtttgacaccaggatcaagaccagctgtactaaggaggattgtaaggatgacatcctgataaactgtagaagagcggctacaagcgtggcaatatgcccgcccatcccctactatttagcagtggggtgcagcgacagtagtgtacggatatacgaccgtcgcatgttgggaaccagagccaccggcaactacgccgggagaggtactacggggatggtggcccggttcatccctagtcatctgaacaataagtcatgccgggtaaccagcctgtgttactcagaggacggtcaagaaatactagtcagctattccagcgattacatctacctgttcgatcccaaggatgacaccgctcgtgaactgaaaactccttctgccgaggaacgcagagaggagcttaggcagcctccggtgaaaaggcttcgtctacgaggtgactggtccgataccggccccagggcccggcccgagtctgagagagagagagacggagaacagtcccctaacgtgtccttgatgcagagaatgtcagacatgttgagccgctggttcgaagaggccagtgaggttgctcagtcaaatagaggccgaggccggtcccgtccaagaggtggtacttcgcaatcagatataagcaccctgcccacggtaccaagcagccccgacttggaagtgtccgaaactgccatggaggtggatacccccgctgagcaattcctacaaccctccacttcatcgaccatgtccgcccaggctcactccacaagcagtccgacagagagcccacatagcacgccactgctctcaagccctgatagcgagcagagacagtctgtggaagctagcggccatcatacacatcaccagtcagacaacaacaacgaaaagctgtccccaaaaccaggtacaggtgagccagtgcttagcttacactactctaccgaggggaccactaccagcactattaaattgaacttcactgatgagtggtcctccatcgcttcctctagtagagggatcgggtcacactgcaaatcagaggggcaggaggagagtttcgttccccagtccagtgtgcaaccaccggagggcgattcagagacaaaggcccccgaagagagcagcgaggatgtcacgaagtaccaggaaggtgtgagcgctgaaaatcctgtcgagaatcatattaatatcacccagtcggacaaattcacagcaaagcccctagactcaaactcaggggagcgcaatgacctgaatctcgataggtcttgcggggtgccagaggaaagcgccagctcagaaaaggctaaagaacccgaaacaagtgaccagacttctactgaaagcgccaccaatgaaaacaataccaacccggaaccccagttccagaccgaggccacagggccgtctgcgcacgaggaaacctctacccgagactcagccctacaggacaccgacgacagtgacgatgatcctgtactaatccctggtgccagataccgtgcaggccctggtgataggcgctctgccgttgccaggatccaggagttctttcgtcgccgaaaggaaaggaaggagatggaagaactggataccctgaatattaggcgccccctggtcaagatggtgtacaaagggcatcggaattcccgcacaatgatcaaggaggctaacttttggggtgcaaattttgtgatgtcaggctccgactgcggccacatctttatttgggatagacacaccgccgagcatcttatgctgctcgaggctgacaaccacgtggtaaactgtctgcaaccacacccattcgaccccattctcgcctcatccggaatcgattacgacattaagatctggagtcccctggaagaatcccggattttcaataggaaactggctgatgaggtcattacgcgcaatgagttgatgctggaagagaccagaaatacaatcacagttcctgcatcttttatgctgcgcatgttggcttctttaaatcatatcagagccgacaggctggaaggagacaggagtgaaggcagcggtcaggagaatgaaaatgaggacgaggagtag

SEQ ID NO: 26707 - DNA, 2583 bp, Artificial Sequence
  derived and/or modified sequence
atgtctagagggggatcatacccacacctactgtgggatgttcggaaaaggagcctcggccttgaagatccctctagactcagatctcgatacttgggaaggagagagtttatccagcgtctcaaactggaagccactctgaacgtccacgatggttgcgtcaatacaatctgctggaacgacaccggtgaatatatcctgtcgggatcagacgacactaagctggttataagtaatccatacagccggaaggttctaacaacgatccgcagtgggcatagagccaacatcttctctgcaaagtttttgccttgtacgaacgataagcagattgtctcatgttccggggatggggtcatattctatacaaatgtagaacaggacgcagaaaccaacaggcaatgccagttcacttgccattacggtacgacctatgagattatgaccgtgccaaatgatccctacaccttcctctcctgcggtgaggacgggaccgtgaggtggtttgacacccggataaaaacatcttgcaccaaggaagactgcaaggatgacatcttgattaactgccgcagagccgctacatccgttgccatatgtccaccaatcccttactatctggcagtaggctgctcagactctagcgtcaggatctacgaccgtaggatgttaggaacgagagcaacaggtaactacgccggaagaggaacgacaggcatggttgcgaggtttattccatctcacctgaataacaaatcgtgtagagtaaccagtctctgttactccgaggacgggcaggagatacttgtatcctacagttccgattacatctacctgtttgatcctaaggacgacacagccagagagctgaaaacaccatctgctgaggagcgaagggaggagcttaggcagcccccagtgaagaggcttagactgcggggagattggtcagacacaggacctagagcacggccagagtctgagcgcgagagagacggagagcaaagccccaacgtgagtctgatgcagcgcatgtcagacatgctgtctaggtggtttgaggaggcctctgaggtggctcaaagcaacaggggcaggggtcggtctcgcccaagaggaggaacaagtcagagcgatataagcacccttcctacagtacctagctcacctgacctggaggtgtccgagaccgctatggaagtcgacacccccgcagagcaattcctgcaaccatccacttcaagtaccatgtccgcacaggcccactctacaagttctccaaccgaatcaccccacagcacccccctattgagttctccagactccgaacagcgccagtcagtcgaggctagcggacatcatacccatcatcagtctgacaataataatgagaagctgtctcccaagccgggtacgggagaacctgtgctgagtctgcactactcaacagagggcactaccacgtccaccatcaagcttaacttcacagatgagtggagctctattgcaagctcatcccgaggcattgggagtcactgcaagtcggagggccaggaggagtcattcgtgcctcagtcttctgtccagcctccagagggggattcagaaacaaaagctcccgaagaatcatctgaggatgtaaccaagtatcaggagggagttagcgcggagaaccctgtggagaatcacatcaacattacacagtcagacaaattcacggctaagccgctggacagtaattcaggggagcggaacgatcttaatctggaccggtcatgtggcgtacctgaggaaagcgcatcttccgagaaggcaaaggaaccggaaacatctgaccagaccagtacagagagcgcaaccaacgaaaataatactaaccccgaaccgcagtttcagaccgaggccactggcccaagcgcccatgaggagacaagcactcgggattccgcactgcaagacacggacgatagcgatgatgaccctgttctgattcccggagccagatacagagccggtcccggtgacaggcgaagcgccgtcgctcgcattcaagaattctttcggcgtcggaaggagcgcaaagaaatggaggagttggatacgctgaatatcaggagacctctggtgaaaatggtttataagggccacagaaattccagaactatgattaaggaggctaatttttggggggctaacttcgtgatgtctggctctgactgcggacatatattcatctgggacaggcatacggctgagcacttgatgctcctcgaagcagataatcacgtagtgaattgcttgcaacctcatccctttgatcccattctggcatctagtgggattgactacgacattaagatatggagtccattggaggaatctcggatcttcaataggaaactggccgacgaggtcatcacacgcaacgaactgatgctcgaggagactcgcaataccattaccgtgccagcttcttttatgcttcggatgttagcctctctgaaccacatccgcgctgatcgcttggagggcgatagaagtgaagggtccgggcaggagaatgagaatgaggatgaagagtag

SEQ ID NO: 26708 - DNA, 3186 bp, Artificial Sequence
  derived and/or modified sequence
agagtatgaggcgagctccggcccgggtgcggccgggcttcaggggcccaggcgccgctgctgccaccgccatctaacgctgcgccctggaggcccggcgcgcggatggtgccggtgcggctcgggtgttgaaacgggtgtcccctccccctcctcccctcccccacgcggtggtctcccctcccacccggctcaggcagagccatgtctcggggtggctcctacccacacctgttgtgggacgtgaggaaaaggtccctcgggctggaggacccgtcccggctgcggagtcgatacctgggaagaagagaatttatccaaagattaaaacttgaagcaacccttaatgtgcatgatggttgtgttaatacaatctgttggaatgacactggagaatatattttatctggctcagatgacaccaaattagtaattagtaatccttacagcagaaaggttttgacaacaattcgttcagggcaccgagcaaacatatttagtgcaaagttcttaccttgtacaaatgataaacagattgtatcctgctctggagatggagtaatattttataccaacgttgagcaagatgcagaaaccaacagacaatgccaatttacgtgtcattatggaactacttatgagattatgactgtacccaatgacccttacacttttctctcttgtggtgaagatggaactgttaggtggtttgatacacgcatcaaaactagctgcacaaaagaagattgtaaagatgatattttaattaactgtcgacgtgctgccacgtctgttgctatttgcccaccaataccatattaccttgctgttggttgttctgacagctcagtacgaatatatgatcggcgaatgctgggcacaagagctacagggaattatgcaggtcgagggactactggaatggttgcccgttttattccttcccatcttaataataagtcctgcagagtgacatctctgtgttacagtgaagatggtcaagagattctcgttagttactcttcagattacatatatctttttgacccgaaagatgatacagcacgagaacttaaaactccttctgcggaagagagaagagaagagttgcgacaaccaccagttaagcgtttgagacttcgtggtgattggtcagatactggacccagagcaaggccggagagtgaacgagaacgagatggagagcagagtcccaatgtgtcattgatgcagagaatgtctgatatgttatcaagatggtttgaagaagcaagtgaggttgcacaaagcaatagaggacgaggaagatctcgacccagaggtggaacaagtcaatcagatatttcaactcttcctacggtcccatcaagtcctgatttggaagtgagtgaaactgcaatggaagtagatactccagctgaacaatttcttcagccttctacatcctctacaatgtcagctcaggctcattcgacatcatctcccacagaaagccctcattctactcctttgctatcttctccagacagtgaacaaaggcagtctgttgaggcatctggacaccacacacatcatcagtctgataacaataatgaaaagctgagccccaaaccagggacaggtgaaccagttttaagtttgcactacagcacagaaggaacaactacaagcacaataaaactgaactttacagatgaatggagcagtatagcatcaagttctagaggaattgggagccattgcaaatctgagggtcaggaggaatctttcgtcccacagagctcagtgcaaccaccagaaggagacagtgaaacaaaagctcctgaagaatcatcagaggatgtgacaaaatatcaggaaggagtatctgcagaaaacccagttgagaaccatatcaatataacacaatcagataagttcacagccaagccattggattccaactcaggagaaagaaatgacctcaatcttgatcgctcttgtggggttccagaagaatctgcttcatctgaaaaagccaaggaaccagaaacttcagatcagactagcactgagagtgctaccaatgaaaataacaccaatcctgagcctcagttccaaacagaagccactgggccttcagctcatgaagaaacatccaccagggactctgctcttcaggacacagatgacagtgatgatgacccagtcctgatcccaggtgcaaggtatcgagcaggacctggtgatagacgctctgctgttgcccgtattcaggagttcttcagacggagaaaagaaaggaaagaaatggaagaattggatactttgaacattagaaggccgctagtaaaaatggtttataaaggccatcgcaactccaggacaatgataaaagaagccaatttctggggtgctaactttgtaatgagtggttctgactgtggccacattttcatctgggatcggcacactgctgagcatttgatgcttctggaagctgataatcatgtggtaaactgcctgcagccacatccgtttgacccaattttagcctcatctggcatagattatgacataaagatctggtcaccattagaagagtcaaggatttttaaccgaaaacttgctgatgaagttataactcgaaacgaactcatgctggaagaaactagaaacaccattacagttccagcctctttcatgttgaggatgttggcttcacttaatcatatccgagctgaccggttggagggtgacagatcagaaggctctggtcaagagaatgaaaatgaggatgaggaataataaactctttttggcaagcacttaaatgttctgaaatttgtataagacatttattatatttttttctttacagagctttagtgcaattttaaggttatggtttttggagtttttccctttttttgggataacctaacattggtttggaatgattgtgtgcatgaatttgggagattgtataaaacaaaactagcagaatgtttttaaaactttttgccgtgtatgaggagtgctagaaaatgcaaagtgcaatattttccctaaccttcaaatgtgggagcttggatcaatgttgaagaataattttcatcatagtgaaaatgttggttcaaataaatttctacacttgccatttgcatgtttgttgctttctaattaaagaaactggttgttttaaga

SEQ ID NO: 26709 - DNA, 2583 bp, Artificial Sequence
  derived and/or modified sequence
atgagcagaggcggcagctacccccacctgctgtgggacgtgagaaagagaagcctgggcctggaggaccccagcagactgagaagcagatacctgggcagaagagagttcatccagagactgaagctggaggccaccctgaacgtgcacgacggctgcgtgaacaccatctgctggaacgacaccggcgagtacatcctgagcggcagcgacgacaccaagctggtgatcagcaacccctacagcagaaaggtgctgaccaccatcagaagcggccacagagccaacatcttcagcgccaagttcctgccctgcaccaacgacaagcagatcgtgagctgcagcggcgacggcgtgatcttctacaccaacgtggagcaggacgccgagaccaacagacagtgccagttcacctgccactacggcaccacctacgagatcatgaccgtgcccaacgacccctacaccttcctgagctgcggcgaggacggcaccgtgagatggttcgacaccagaatcaagaccagctgcaccaaggaggactgcaaggacgacatcctgatcaactgcagaagagccgccaccagcgtggccatctgcccccccatcccctactacctggccgtgggctgcagcgacagcagcgtgagaatctacgacagaagaatgctgggcaccagagccaccggcaactacgccggcagaggcaccaccggcatggtggccagattcatccccagccacctgaacaacaagagctgcagagtgaccagcctgtgctacagcgaggacggccaggagatcctggtgagctacagcagcgactacatctacctgttcgaccccaaggacgacaccgccagagagctgaagacccccagcgccgaggagagaagagaggagctgagacagccccccgtgaagagactgagactgagaggcgactggagcgacaccggccccagagccagacccgagagcgagagagagagagacggcgagcagagccccaacgtgagcctgatgcagagaatgagcgacatgctgagcagatggttcgaggaggccagcgaggtggcccagagcaacagaggcagaggcagaagcagacccagaggcggcaccagccagagcgacatcagcaccctgcccaccgtgcccagcagccccgacctggaggtgagcgagaccgccatggaggtggacacccccgccgagcagttcctgcagcccagcaccagcagcaccatgagcgcccaggcccacagcaccagcagccccaccgagagcccccacagcacccccctgctgagcagccccgacagcgagcagagacagagcgtggaggccagcggccaccacacccaccaccagagcgacaacaacaacgagaagctgagccccaagcccggcaccggcgagcccgtgctgagcctgcactacagcaccgagggcaccaccaccagcaccatcaagctgaacttcaccgacgagtggagcagcatcgccagcagcagcagaggcatcggcagccactgcaagagcgagggccaggaggagagcttcgtgccccagagcagcgtgcagccccccgagggcgacagcgagaccaaggcccccgaggagagcagcgaggacgtgaccaagtaccaggagggcgtgagcgccgagaaccccgtggagaaccacatcaacatcacccagagcgacaagttcaccgccaagcccctggacagcaacagcggcgagagaaacgacctgaacctggacagaagctgcggcgtgcccgaggagagcgccagcagcgagaaggccaaggagcccgagaccagcgaccagaccagcaccgagagcgccaccaacgagaacaacaccaaccccgagccccagttccagaccgaggccaccggccccagcgcccacgaggagaccagcaccagagacagcgccctgcaggacaccgacgacagcgacgacgaccccgtgctgatccccggcgccagatacagagccggccccggcgacagaagaagcgccgtggccagaatccaggagttcttcagaagaagaaaggagagaaaggagatggaggagctggacaccctgaacatcagaagacccctggtgaagatggtgtacaagggccacagaaacagcagaaccatgatcaaggaggccaacttctggggcgccaacttcgtgatgagcggcagcgactgcggccacatcttcatctgggacagacacaccgccgagcacctgatgctgctggaggccgacaaccacgtggtgaactgcctgcagccccaccccttcgaccccatcctggccagcagcggcatcgactacgacatcaagatctggagccccctggaggagagcagaatcttcaacagaaagctggccgacgaggtgatcaccagaaacgagctgatgctggaggagaccagaaacaccatcaccgtgcccgccagcttcatgctgagaatgctggccagcctgaaccacatcagagccgacagactggagggcgacagaagcgagggcagcggccaggagaacgagaacgaggacgaggagtag

SEQ ID NO: 26710 - protein, 113 aa, Artificial Sequence
  derived and/or modified sequence
MNFYLLLASSILCALIVFWKYRRFQRNTGEMSSNSTALALVRPSSSGLINSNTDNNLAVYDLSRDILNNFPHSIARQKRILVNLSMVENKLVELEHTLLSKGFRGASPHRKST

SEQ ID NO: 26711 - DNA, 342 bp, Artificial Sequence
  derived and/or modified sequence
atgaacttttacctgctgttagcctcctccatcttgtgcgccttaatcgtcttttggaagtacagacggttccagaggaacaccggggagatgtcttcgaactctactgcgctggccctagtgaggccaagtagttccgggttgataaactccaatactgataacaaccttgccgtatacgacctgagtcgcgatattctaaacaatttccctcacagtattgctcggcaaaaacgcatccttgttaatctctcaatggtggagaacaagcttgtggagctggagcacacactcctgtcaaagggatttcgcggggcatctccccaccggaagagcacttag

SEQ ID NO: 26712 - DNA, 342 bp, Artificial Sequence
  derived and/or modified sequence
atgaacttctacctgctgctggccagcagcatcctgtgtgccctgattgtgttctggaagtaccgccgcttccagaggaacacaggagagatgagcagcaacagcacagccctggccctggtgcggcccagcagcagcggcctcatcaacagcaacacagacaacaacctggccgtgtatgacctgagccgggacatcctgaacaacttcccccacagcatcgcccggcagaagaggatcctggtgaacctgtccatggtggagaacaagctggtggagctggagcacaccctgctgagcaagggcttccggggggccagcccccacaggaagagcacctag

SEQ ID NO: 26713 - DNA, 342 bp, Artificial Sequence
  derived and/or modified sequence
atgaacttctacctgctgctggccagcagcatcctgtgcgccctgatcgtattctggaagtatcggagattccagcggaacacaggagagatgtcctcaaactccaccgccctcgccttagtgaggccatcgtcatctggccttattaactctaataccgataataacctggcagtgtatgacctgagccgcgacattttgaacaatttcccccattcgatcgcccgacaaaagcggatcctagtgaacctgtctatggtggaaaacaaacttgtggagttggagcacaccctgttaagcaagggtttccgaggcgccagcccccacaggaaatccacttag

SEQ ID NO: 26714 - DNA, 342 bp, Artificial Sequence
  derived and/or modified sequence
atgaatttttacctgctcctggcaagtagtattctatgcgccctgatcgtgttttggaaatatagacgcttccaacggaacacgggcgaaatgagttccaattcaacagcattagcattagtgcgaccgtccagctctgggctgattaactccaataccgacaataatctggccgtgtatgatctgagcagggacatcctgaataactttccccacagcatcgcacgccagaaaagaattcttgtaaatctaagtatggttgagaacaagctggttgaactcgagcacacgctactttccaagggattcaggggcgcttctccacacaggaaatctacatag

SEQ ID NO: 26715 - DNA, 548 bp, Artificial Sequence
  derived and/or modified sequence
ataaagcgggacaacacagaacttcccagttacaccaggcatcctggcccaaagtttcccaaatccaggcggctagaggcccactgcttcccaactaccagctgagggggtccgtcccgagaagggagaagaggccgaagaggaaacatgaacttctatttactcctagcgagcagcattctgtgtgccttgattgtcttctggaaatatcgccgctttcagagaaacactggcgaaatgtcatcaaattcaactgctcttgcactagtgagaccctcttcttctgggttaattaacagcaatacagacaacaatcttgcagtctacgacctctctcgggatattttaaataatttcccacactcaatagccaggcagaagcgaatattggtaaacctcagtatggtggaaaacaagctggttgaactggaacatactctacttagcaagggtttcagaggtgcatcacctcaccggaaatccacctaaaagcgtacaggatgtaatgccagtggtggaaatcattaaagacactttgagtagattca

SEQ ID NO: 26716 - DNA, 342 bp, Artificial Sequence
  derived and/or modified sequence
atgaacttctacctgctgctggccagcagcatcctgtgcgccctgatcgtgttctggaagtacagaagattccagagaaacaccggcgagatgagcagcaacagcaccgccctggccctggtgagacccagcagcagcggcctgatcaacagcaacaccgacaacaacctggccgtgtacgacctgagcagagacatcctgaacaacttcccccacagcatcgccagacagaagagaatcctggtgaacctgagcatggtggagaacaagctggtggagctggagcacaccctgctgagcaagggcttcagaggcgccagcccccacagaaagagcacctag

SEQ ID NO: 26717 - protein, 221 aa, Artificial Sequence
  derived and/or modified sequence
MSDSEEESQDRQLKIVVLGDGASGKTSLTTCFAQETFGKQYKQTIGLDFFLRRITLPGNLNVTLQIWDIGGQTIGGKMLDKYIYGAQGVLLVYDITNYQSFENLEDWYTVVKKVSEESETQPLVALVGNKIDLEHMRTIKPEKHLRFCQENGFSSHFVSAKTGDSVFLCFQKVAAEILGIKLNKAEIEQSQRVVKADIVNYNQEPMSRTVNPPRSSMCAVQ

SEQ ID NO: 26718 - protein, 95 aa, Artificial Sequence
  derived and/or modified sequence
MSDSEEESQDRQLKIVVLGDGASGKTSLTTCFAQETFGKQYKQTIGLDFFLRRITLPGNLNVTLQIWDIGGQTIGGKMLDKYIYGAQLIWSICEQ

SEQ ID NO: 26719 - DNA, 666 bp, Artificial Sequence
  derived and/or modified sequence
atgagtgattccgaagaggagtcacaagacagacagctgaagatcgtggtgctgggcgacggagcttcgggcaagacaagtttaactacgtgcttcgcccaggagactttcggcaaacagtacaaacagaccattggcctcgactttttccttcgcagaattacccttcccgggaatcttaatgtgaccctccagatatgggacatcgggggtcagaccatcggggggaagatgctggataaatacatttatggcgcacagggggttttgctcgtttacgacatcaccaactaccagtctttcgaaaacctggaagattggtatactgtggtgaagaaggtttctgaagagagcgagacacaacctctggtggcactggtgggcaacaaaatagacctggagcatatgcggaccatcaagcctgagaaacacttgcggttctgtcaagaaaatggcttcagtagccacttcgtctccgccaagactggggacagcgtttttctctgtttccagaaggtggcagcagagatcctcgggattaagttgaataaggctgagattgaacagtctcagcgtgtggtgaaagctgatatagtgaactacaatcaagagccaatgtcgcgtaccgtgaaccctccacggagtagcatgtgcgcagtgcagtag

SEQ ID NO: 26720 - DNA, 666 bp, Artificial Sequence
  derived and/or modified sequence
atgtctgacagcgaggaggagagccaggaccggcagctgaagatcgtggtgctgggagatggagccagcggcaagaccagcctgaccacctgctttgcccaggagaccttcggcaagcagtacaagcagaccatcggcctggacttcttcctgcggcgcatcaccctgcccggcaacctgaatgtgaccctgcagatctgggacattggaggccagaccatcggcggcaagatgctggacaagtacatctacggggcccagggcgtgctgctggtgtatgacatcaccaactaccagagctttgagaacctggaggactggtacacagtggtgaagaaggtgtctgaggagagcgagacccagcccctggtggccctggtgggcaacaagattgacctggagcacatgaggaccatcaagccagagaagcacctgcgcttctgccaggagaatggcttcagcagccactttgtgtctgccaagacaggagacagcgtcttcctgtgcttccagaaggtggccgctgagatcctgggcatcaagctgaacaaggccgagattgagcagagccagagggtggtgaaggctgacatcgtgaactacaaccaggagcccatgagcaggacagtgaacccccccaggagctccatgtgtgctgtgcagtag

SEQ ID NO: 26721 - DNA, 666 bp, Artificial Sequence
  derived and/or modified sequence
atgagcgacagcgaggaggagagccaggaccggcagctgaagatcgtcgtattaggcgacggagctagcgggaagacttccctcactacttgttttgcccaggagacgttcggaaaacagtataaacagactatcggtctggattttttcttaagacgcatcaccctgcccggtaacctgaacgtgactcttcagatatgggatatcggtggccagactatcgggggcaagatgttggataagtatatttatggggcgcaaggtgttctgctggtctacgatattacaaattaccagagcttcgaaaacctagaagattggtacaccgtggtaaaaaaagtatccgaggagagcgagacccaacctttagtggctcttgtcggtaacaaaatagacctggaacacatgcggaccatcaaacccgagaaacacctacggttttgccaggagaacggtttttcctcccactttgtaagtgccaagaccggcgacagtgtgttcttatgctttcaaaaagtggccgctgaaattctgggcatcaagctgaataaggcggagattgaacagagtcaacgcgtcgtgaaagcagatatcgtcaattataaccaggagccgatgagtaggactgtgaatcctcccagatcttcaatgtgcgctgtccaatag

SEQ ID NO: 26722 - DNA, 666 bp, Artificial Sequence
  derived and/or modified sequence
atgagcgatagcgaagaggagtctcaagacagacaacttaaaatcgtcgtgttgggtgatggcgctagtggaaagacatccctcaccacatgttttgctcaggagacttttgggaagcagtacaagcagacaataggactggacttttttttgagacgaataaccctgcccggaaatctcaacgtaactttacaaatatgggacattggagggcaaaccatcgggggtaagatgcttgacaagtacatctatggcgctcagggcgtgttactcgtatatgacatcacgaactatcagagctttgaaaatcttgaagattggtataccgtcgtgaagaaggtgtccgaggagagcgaaacccagccactggtggccctggtgggaaacaagattgacctggagcacatgagaaccattaagccggaaaaacacctccgcttctgccaggaaaatgggttctcctcacactttgtgtccgccaagaccggtgactccgttttcctttgtttccaaaaggtcgccgcagaaatcctgggcattaaactaaataaggccgagatcgagcagagccagagagttgtgaaggctgacatcgtcaactacaatcaggaacccatgtcccgcacagtcaatccaccacgaagctctatgtgtgccgttcagtag

SEQ ID NO: 26723 - DNA, 1715 bp, Artificial Sequence
  derived and/or modified sequence
gtgcgcgtagggggcggggccgcgcgcagagggcggggaggtgggcaagatggcgcttgccgagtgattctcctcgaatacctcctgccggcgcggagacaccggggcgggggtcctgccgcaactacctcccttcctcctctcccccgcccccggagccttcatccttcccttccccccccacctcgaggggcgggcctggttcccgggacaccatgtcggactctgaggaggagagccaggaccggcaactgaaaatcgtcgtgctgggggacggcgcctccgggaagacctccttaactacgtgttttgctcaagaaacttttgggaaacagtacaaacaaactataggactggatttctttttgagaaggataacattgccaggaaacttgaatgttacccttcaaatttgggatataggagggcagacaataggaggcaaaatgttggataaatatatctatggagcacagggagtcctcttggtatatgatattacaaattatcaaagctttgagaatttagaagattggtatactgtggtgaagaaagtgagcgaggagtcagaaactcagccactggttgccttggtaggcaataaaattgatttggagcatatgcgaacaataaaacctgaaaaacacttacggttttgccaggaaaatggttttagtagccactttgtctcagccaagacaggagactctgtcttcctgtgctttcagaaagttgctgctgaaatccttgggatcaaattaaacaaagcagaaatagaacagtcacagagggtggtgaaggcagatattgtaaactacaaccaggaacctatgtcaaggactgttaaccctcctagaagctctatgtgtgcagttcagtgagcgcatttttcttttgtgttgatagttctggctgcccttcacctctgggtgggcccgaggacttctaggaacttgttttatcagtgaccatctctgtagttcagttaacactttactcccaacttgcttcatcattgctattgcctcacagtggcaggcagctccttggatttgaaagaattcaactttgggaccacacactttgaattcaaaatggaaaacccattccctggaattagactgcttcattgcaaaagaatgatgttgtttctttgtatgtccttgcttcttttttcattgatgtaaatttttttaacttaatatgaaaactctccaagtcttgatcatcagccaggattttgccacagcaatttcattctcttatcggaacttgtatgtgtcaaagtatacttcagagtgcaaacattaagcaagtaatatattttacctacagatacttatgaagacattctttcgctatcgtgagtaaaagtatataaagctgtttctaactgaaaatgcttgaaataagcctgtaatagaaatattttttcattttttaaaaaagggcctaaattgtttatattgtagtttgtaactcacaaagtaatatttgatattgtatttttattactgtatcgttgtcgttatgtattgtgtaatactcaggtttgaaggctttctgaattctgataaatgttcagctgatgctccacgtggaatttctcttgcaaactgcataagagtactcccgagaatgagttatgacattgtggatcagactgtacctgatgttcagatgtttttctttcacaaataaacttatttaaatta

SEQ ID NO: 26724 - DNA, 666 bp, Artificial Sequence
  derived and/or modified sequence
atgagcgacagcgaggaggagagccaggacagacagctgaagatcgtggtgctgggcgacggcgccagcggcaagaccagcctgaccacctgcttcgcccaggagaccttcggcaagcagtacaagcagaccatcggcctggacttcttcctgagaagaatcaccctgcccggcaacctgaacgtgaccctgcagatctgggacatcggcggccagaccatcggcggcaagatgctggacaagtacatctacggcgcccagggcgtgctgctggtgtacgacatcaccaactaccagagcttcgagaacctggaggactggtacaccgtggtgaagaaggtgagcgaggagagcgagacccagcccctggtggccctggtgggcaacaagatcgacctggagcacatgagaaccatcaagcccgagaagcacctgagattctgccaggagaacggcttcagcagccacttcgtgagcgccaagaccggcgacagcgtgttcctgtgcttccagaaggtggccgccgagatcctgggcatcaagctgaacaaggccgagatcgagcagagccagagagtggtgaaggccgacatcgtgaactacaaccaggagcccatgagcagaaccgtgaacccccccagaagcagcatgtgcgccgtgcagtag

SEQ ID NO: 26725 - protein, 101 aa, Artificial Sequence
  derived and/or modified sequence
MERPDKAALNALQPPEFRNESSLASTLKTLLFFTALMITVPIGLYFTTKSYIFEGALGMSNRDSYFYAAIVAVVAVHVVLALFVYVAWNEGSRQWREGKQD

SEQ ID NO: 26726 - DNA, 306 bp, Artificial Sequence
  derived and/or modified sequence
atggagagacccgacaaggccgccctgaacgccctgcagccccccgagttcagaaacgagagcagcctggccagcaccctgaagaccctgctgttcttcaccgccctgatgatcaccgtgcccatcggcctgtacttcaccaccaagagctacatcttcgagggcgccctgggcatgagcaacagagacagctacttctacgccgccatcgtggccgtggtggccgtgcacgtggtgctggccctgttcgtgtacgtggcctggaacgagggcagcagacagtggagagagggcaagcaggactag

SEQ ID NO: 26727 - DNA, 306 bp, Artificial Sequence
  derived and/or modified sequence
atggagcggcctgataaagcagcccttaacgccctgcagcctccagaattcaggaacgagagcagcctggcatccaccctgaaaacattactcttctttaccgcgttgatgatcactgtccccattggactatacttcacaaccaaaagttacatcttcgaaggggccttaggtatgtcaaacagagacagctatttttatgctgccatcgtagcagtggtggccgtgcacgtggtgttggctctttttgtgtacgtggcctggaacgagggttccagacaatggcgcgagggcaagcaggattag

SEQ ID NO: 26728 - DNA, 306 bp, Artificial Sequence
  derived and/or modified sequence
atggagaggccagacaaggccgccctgaatgccctgcagcccccagagttcagaaatgaaagcagcctggccagcaccctgaagaccctgctcttcttcaccgccctgatgatcaccgtgcccatcggcctgtacttcaccaccaagagctacatctttgaaggagccctgggcatgagcaacagagacagctacttctacgccgccatcgtggccgtggtggccgtgcacgtggtgctggccctgtttgtgtatgtggcctggaatgaaggcagccggcagtggagggagggcaagcaggactag

SEQ ID NO: 26729 - DNA, 306 bp, Artificial Sequence
  derived and/or modified sequence
atggagcggcccgacaaggccgccctgaacgccctgcagccccccgagttccggaacgagtcatccctcgcatctaccctcaagacgctgttgttctttactgccctgatgatcaccgttccaatcggcctgtactttactacaaaaagctatatatttgagggcgccttgggtatgagtaaccgcgactcgtatttttatgccgctatcgtcgctgtggtggctgtgcacgtcgtgctcgcattatttgtttatgtggcctggaatgaaggatctcgccagtggcgtgaaggaaaacaagattag

SEQ ID NO: 26730 - DNA, 306 bp, Artificial Sequence
  derived and/or modified sequence
atggaacggcctgataaggcagccttgaatgctctgcaaccaccagagtttaggaacgagtcttcactggcctccactctaaagacactcctgttctttacagccctgatgatcacagtaccaattgggttatacttcaccactaagagttatatctttgagggagccctcgggatgagtaatcgagacagttatttttatgctgcaatcgttgctgtcgttgccgtgcacgtggtgctagccctgttcgtctacgtggcctggaacgaaggctcaagacagtggcgcgaaggtaaacaggattag

SEQ ID NO: 26731 - DNA, 4717 bp, Artificial Sequence
  derived and/or modified sequence
ctacttccggtgcgaaccgcctcggccgttccctcgcggagcttactgagcgcggccgccgagcccagctccgccgccgagcgcctgtgccggcacggctacaccatggagcgcccggataaggcggcgctgaacgcactgcagcctcctgagttcagaaatgaaagctcattagcatctacactgaagacgctcctgttcttcacagctttaatgatcactgttcctattgggttatatttcacaactaaatcttacatatttgaaggcgcccttgggatgtccaatagggacagctatttttacgctgctattgttgcagtggtcgccgtccatgtggtgctggccctctttgtgtatgtggcctggaatgaaggctcacgacagtggcgtgaaggcaaacaggattaaagtgaacatcacctttttatagcattaaattcattttttaaaatgataaatgctggagggggccatctgatttgaataaagttgaaagaacatgttaaagtcagtcttaaggagtcacgtttgagtatgtaaattttgatctttctaatatgttggtttgtatattcagttttaactgtatgaatctgatttgcaaatgagaatttggaaaagttagttacaaagaaatatgttaatttaattagacaatactctggaaggaattttatcttctttcaacaaaacatgttttatagtattctgacttacggttgcttttgagttttactcatttggatatattaagatgcacacagtgaagcaaattaaactccactttacgctggaatgctttctttagcatgaaaataccaggtccttggatttgggattttaatttcctatggaaagttgcttaaattgtggacactggaattaatctgaatgtcactgaggaatttcacatgaagtgtaatccctagtcaataagaattatccattacattattttatgggaaaactaggctaaattacatccattcaggtaaaaggaccttagcttactgaaggatctaaagagcaaagcaaagatctcactactcaaacactcagcctgcttccttcaagtccccttgcaggccagctttgtgctttgcagaccaactttttaatgagatactttgcttcctcattcaacattgaagctaggcttcaattaaaaggttcgaggaagctccatttaaaattgttttttttactattttttaaaattgtagtgtatatgataggaatttgcatttaaatatgttcatttttgcatatgttaggagtggaaacaatctggaaaacatttttttttcatccaaaaagtattctccttgggcatatctgatggaaaaaaaccttgattttattttcgtatctttagtctgtgttctttctagttatttggtactaattatgtgcaatctaaaaacactcccacaagtatttgttttttaattataaaatcatagtatatgttctttgtagaaaactggaaaaatacatattcaaacaggaaaaaaaatcaaaattccccataatgttgccatctaaaaataacctctattttagttgatatcccgtattcatttttgaaagccattccttaatgctagtttgatacacactaaaagtttagcttacaagttcaaattctgccagcttttcctgacagctatttgcatttttttcagatgagtgattattggccattttctttttctttttctttattttatttatttatttttttgagacagagttttgctctgttgcccaggctggagtgcagtggtgcaatctcggctcactgcaacctctgcctcctgggttcaagtgattctccacctcagcctcccaagtagctgggactacggatgcctgccaccacgcctggctaatttttttttgtatttttttgtagagacggggtttcaccatgttgtccaggctaatcttgaacttgtgacctcaggtgatccacccgcctcggcctccgaaagtgctgggattacaggcgtgagctaccacgcccggccttattgaccattttctaaataagcacattctatctttattctcttaaaattcaaattttctgttactgataatcctaatactaggattcttgcttaagtatgtgaaaccattaccgatttgttgttcacatttattttttatgttgtgaaactggactaaaggaatagagggatgattagtcataaaagtcaaatagcatttgtgtttaactgttgagaaaagtgaaagatcagtatgattattatggaactgtttttaattcttgcttaaagactacaattttagtataatgacatttgagtctagggtagtatgtggtagatttctagatggtccctaattaagaagtattgttgtatttagaattgtccacctaatttctttttatataatgccaaggtatttcttgtgcttttgggatcttatgctgtttgtaaaatgttactgtccaatgttggattattgttttggtttcaggcatttgctgaataggtgatgatacatgggtatttttctgcaagtatttaaaccaggggcatatgcaaaggcagttgtaatttcctcttggaaaaagcgccaaatgtttgaaggttaaaatcaaatgctagggttgatatttaggcttataacaaaataggcttgttttcaaagcagttttttcctagagttttaactgttaactcactagtttgctgctgtttttaactatgttaaataacatatggtatttggcaaatagatttatttttcaaaatgtctcactagtttccttttacacaatgtatatacttcaagatgtatagaaaggaaagctacagttgagcccttatacatgttttaaggtagaaatatgttccctattgtttgaaaactgattgtaagaataacctcagttaggagatataacttgaagtgtcagtccaaactactgatttaaccctatttacggtaacacattaccttcctcacctcctgtttggccctggagaatgtagtcctttttctcatttgtgttgagaaatgaaaagtctgctgtagaatgtatctgatgtcattagttcttcaaatggataccattgtacatataacagtagaatttggtttggggttgttagtgaaaaaaaatttaaacctgccattaaaaatccccatgtttcatggaaatctaacagaaatacattgtaataattagaacattttgttttcttttttctttttttttttttcgagacggagttttgcccttcttgcccaggctggagtgcaagggcgcaatctcggctcgctgcaacctccgcctcccgggttcaagcagttctcctgcctcagccccctgagtacctcagatgacaggtgcgtgccaccacacccggctaatttttgtatttttagtagagacggggtttcaccatgttagccaggctagtctcgaactcctgacctcaggtgatccacccgcctccgcctcccaaagtgctgggattacaggtatcagccaccgtgcctggcctaataattggaacattttcatcatgaaaatgtcatcagctttgccaaaagaaacaaccaattgacttgtttggcgtttgttttccattttcatgtcaattttatgtatacagttagaatacccaaggagaccactaaaatcagttaaacaagtagggtatatacaaagaaagatgaaacccgaaagtacataaaaaggatttaaatccgattttagatgtacctagtgtgtatttcttatctctagacaagttcatgtttattgtttaatttatgcccaagtgaagttgtaaacttatggttcaactctgacacagaatttgtcacttgtctgaggtcagtggcaggtttctctgctgtcaagcactctgtgtcacccaccagattagtataactattaattcagactgtactcctatgtttaagataatttttacaagagctggctgaagcagcacattagtaacctgacaagatttctttttcccttttcagggggaaagggtcaccttaaaaataaattattttcagggactttgggaatctaatgataaatattacacataatctatgaatagcttaatcctttatatattccttaaaataggaattcctcgacatcactcctggccacactttccttgcctgtgttgttgctatgtgtatttgaaagtaatatctgcattccttttaagatgttctgtaagtcatatttgtcagttatacagagtagtcttccttttccccacgttcagtgtaatctcactgaacagtaataatagcaatagctaacaacatctgcacagcaccttacagtttgcaaagaacgttcacacattctcatttgagttttgcatagtgaacctgttacgagatgtctcttgacgtcgatgctaaaagtgttagaatctttacatcactagagtcattgaatatgctgtagtattgaatagtgccctgactagggggaggatttggatgtgctgcatttcaagccgtgtataatcatcaaaatggggggcttgagttctttagctacttgaatccgatttacttctgttaagtgatgcttttctaaccgttttctggatggattttgtattcactatattgtagcttgtaatttgtataaatgtaccatctgatgtcattaaaaaaagtgtttgtagtgcta

SEQ ID NO: 26732 - protein, 180 aa, Artificial Sequence
  derived and/or modified sequence
MVVGAFPMAKLLYLGIRQVSKPLANRIKEAARRSEFFKTYICLPPAQLYHWLEMRTKMRIMGFNAAAIKPLNEGAAAELGAELLGEGIIFITACSCLMLEYWRHQLQQRRKEKERRVAREALRGEVGHLGLALEELQAQVQATSTQLALEELRAQLQEVRAHLCLRDPPPAPPVAPASEK

SEQ ID NO: 26733 - DNA, 543 bp, Artificial Sequence
  derived and/or modified sequence
atggttgtgggagcctttccgatggcaaaactgctctaccttggaatccgccaagtctccaagcccctcgccaaccgaataaaggaagcggctcggcggtccgaatttttcaaaacctatatttgcctcccaccagcacagctgtatcactggttagagatgagaaccaaaatgagaataatgggatttaatgctgccgctattaaaccgctgaacgaaggcgctgcagctgaactgggggccgaactcctaggcgaaggaatcatcttcattacagcctgttcctgcctcatgctggagtattggaggcatcagctgcagcaacggcgcaaagaaaaggaacgcagagtggctcgggaggctttacgaggggaagtgggtcaccttggcctggcactagaagaattacaagcacaagtacaggcgaccagtactcagcttgccctcgaggagctccgggcccagctgcaggaggtgagagcccatctctgcttacgggacccaccacccgccccacctgttgcacccgcgagcgaaaagtag

SEQ ID NO: 26734 - DNA, 543 bp, Artificial Sequence
  derived and/or modified sequence
atggtggtgggcgccttccccatggccaagctgctgtacctgggcatccggcaggtgtccaagcccctggccaaccgcatcaaggaggccgcccggcgctctgagttcttcaagacctacatctgcctgcccccagcccagctgtaccactggctggagatgaggaccaagatgaggatcatgggcttcaatgctgctgccatcaagcccctgaatgaaggagctgctgctgagctgggcgctgagctgctgggggagggcatcatcttcatcacagcctgcagctgcctgatgctggagtactggaggcaccagctgcagcagaggaggaaggagaaggagaggagagtggcccgggaggccctgcggggggaggtgggccacctgggcctggccctggaggagctgcaggcccaggtgcaggccaccagcacccagctggccctggaggagctgcgggcccagctgcaggaggtgcgggcccacctgtgcctgcgggaccccccaccagcccctcctgtggccccagccagcgagaagtag

SEQ ID NO: 26735 - DNA, 543 bp, Artificial Sequence
  derived and/or modified sequence
atggtggtgggcgccttccccatggccaagctgctgtacctgggcatcaggcaagtctcaaagcccctggcaaatagaattaaagaagctgctcgtcggtcagaattctttaagacgtacatttgcctcccccctgctcagctataccattggcttgagatgcggaccaaaatgcggatcatgggttttaatgccgctgccattaagccacttaatgagggtgcagccgccgaactgggcgcagaactccttggcgaaggtataattttcatcactgcttgctcctgcctaatgctcgaatactggcggcaccagctgcagcagcggaggaaagagaaagagaggcgagtcgcgcgtgaggctctaagaggcgaggtggggcacctgggtttggcattagaggaactgcaggcacaggtccaggccaccagcacacaactcgctctggaggagctccgggcacagctgcaggaagtgcgagctcatctctgcctgcgagatcctccgccagcacctcccgtggcaccggcgtctgagaagtag

SEQ ID NO: 26736 - DNA, 2250 bp, Artificial Sequence
  derived and/or modified sequence
gagggcgggggaggagtgaagaggttgaggcgccccgcccagtcagcaaggttgcgcgtgccctgtgagaccgccaagatggtggtgggcgcgttccctatggcgaagctgctatacttgggcatccggcaggtcagcaagccgcttgccaaccgtattaaggaggccgcccgccgaagcgagttcttcaagacctatatctgcctcccgccggctcaactgtaccactggctggagatgcggaccaaaatgcgcatcatgggtttcaatgccgctgccatcaagccgctgaacgagggtgcagccgccgagctgggcgcggagctgctgggcgagggcatcatcttcatcaccgcctgcagctgcctgatgctggagtattggcgccaccagttgcagcagcgccgcaaggaaaaggagcgacgtgttgccagggaggcgctgcggggcgaggtgggccacttggggctggcgctcgaggagttgcaggcgcaggtgcaggcgacgtcgacgcagctcgccctggaggagctgcgcgctcagctgcaggaggtgcgagcccacctctgcctccgagacccgccgcctgcacccccagttgcgccggcgtccgagaaataggaggtctcggggccctggtcttggaggtgactgctgtctggactgcgaagtctctgtcttggcctattctccgcactgtcccatcctggaccggcccagctgacaccacccagtccttcgggggcgccggagagatcctgggctggagctgatcgaacctccctactaacctgcccagtggtaccttccactgggactctccgcctcctgcaggtggaacgttccaagaaggaccccgccctatcccaccccgcccctgccagcgcatttgttgagcactttggaaagacagcgtcttttatcagaccccacctccctaccgctaggtaggccagcaggacgtccacctcttttggcaaaacaaaattctgcacccggatttagccacctctcattctgtcacccgcaccctcactcacctgagtggacccttcccctaggacgctcatcctttgcaccgaacaccacctacctcctcctcattggtacagaccattgtaaagatgcacaaagttcctacggacttcccgacccgcccccttccatctacctcagtcttagggggaaaggtgggggtgaatcctggactgcgttagctccaatgagtcaccaccctgcggctcctgaccttaatccatcttagtacctgtcattgacatcctcccctccctgagtggatcgatccaacataacccccctcttcttccacctatggcgcaccccactggcatggctatgctgggtcttccagggaaacgcctcccagcccggcattctgtggtctgttccagcaggacgtggccttttgggaggaaaaaccggtcttgaccagggctagtccattctggctttcaggctcagtcacttggtcaccagtccccagtcctggacctactgctactgtccttttatccggtcctccctcgctgtcctcttcagttgcctttgctagggaccggcctgtccctttactacctaagtcatcgtcagttcgcccaacttccctccaaatctgcccctcacggtacgcagggatcgcccttccttcctgcctttggactggtccaggtcctcctccgccctccttcacgcaaaggcctcctccagggggactacctgtccctcagcccagaggtccccctgtccaagcggggtattccaccaggccatatgacctacccacccgacaactgaagggggcgtggatgagctctgtgactctgaatgctactttataaatcgactgtcagcgttttctaattaaaggagctctggggtaaagatcttaagaacgtgtctgagaaccataatgtgcgtctgcaaaatgtcattgaaattaggaaagaaggccggacacagtggctcacgcctgtaattccagcactttaagaggccaaagcaggaggactgctggaggccaggagttagagaccaacctaggcaacacagcaagaccgcatctctacgaaaaatgaaaatattagctaggcgtcataccaaacgcctgtagttccagctacttgggaggctgaggcaggaggatcccttgagcccaggagttcaaggctgcagtgagctgtgatcctgccactacactccagactgggtgaaagagcaagactccaactc

SEQ ID NO: 26737 - DNA, 543 bp, Artificial Sequence
  derived and/or modified sequence
atggtggtgggggctttcccaatggctaaattgctctatctggggatcaggcaggttagcaaacccctggcaaaccgaataaaagaggcagccaggagatccgagttcttcaagacgtacatatgtctgccccctgctcagctgtatcattggctcgagatgcgcaccaaaatgaggatcatgggttttaacgcagccgcaatcaagccactgaacgaaggagcggcagccgagctaggagcggaactcctgggcgaaggaatcatattcatcacggcttgttcttgtttaatgctggaatattggaggcatcaactccaacagcggcgaaaagagaaagagcgaagagtcgcgagagaagctctgcgcggtgaggtcggtcacctcggactggctctcgaggagttgcaggcccaggtacaggcaacttccacacagttggccctcgaggagctgagggcccaattacaggaagtgagagcccacctgtgtctgagagatccccctcctgcaccacccgtggccccagcttcagaaaaatag

SEQ ID NO: 26738 - DNA, 543 bp, Artificial Sequence
  derived and/or modified sequence
atggtggtgggcgccttccccatggccaagctgctgtacctgggcatcagacaggtgagcaagcccctggccaacagaatcaaggaggccgccagaagaagcgagttcttcaagacctacatctgcctgccccccgcccagctgtaccactggctggagatgagaaccaagatgagaatcatgggcttcaacgccgccgccatcaagcccctgaacgagggcgccgccgccgagctgggcgccgagctgctgggcgagggcatcatcttcatcaccgcctgcagctgcctgatgctggagtactggagacaccagctgcagcagagaagaaaggagaaggagagaagagtggccagagaggccctgagaggcgaggtgggccacctgggcctggccctggaggagctgcaggcccaggtgcaggccaccagcacccagctggccctggaggagctgagagcccagctgcaggaggtgagagcccacctgtgcctgagagaccccccccccgccccccccgtggcccccgccagcgagaagtag

SEQ ID NO: 26739 - protein, 376 aa, Artificial Sequence
  derived and/or modified sequence
MTDNELSALVVDNGSGMCKAGFGGDDAPRAVFPSMIGRPRHQGVMVGMGQKDCYVGDEAQSKRGVLTLKYPIEHGVVTNWDDMEKIWYHTFYNELRVAPDEHPILLTEAPLNPKINREKMTQIMFEAFNTPAMYVAIQAVLSLYASGRTTGIVMDSGDGVTHIVPIYEGYALPHAILRLDLAGRDLTDYLMKILTERGYNFTTTAEREIVRDVKEKLCYVALDFEQEMVRAAASSSPERSYELPDGQVITIGNERFRCPEAIFQPSFLGIESSGIHETTFNSIMKCDVDIRKDLYANTVLSGGSTMYPGIADRMQKEIITLAPSTMKIKIIAPPERKYSVWIGGSILASLSTFQQMWISKQEYDEAGPPIVHRKCF

SEQ ID NO: 26740 - DNA, 1131 bp, Artificial Sequence
  derived and/or modified sequence
atgaccgacaacgagctgagcgccctggtggtggacaacggcagcggcatgtgcaaggccggcttcggcggcgacgacgcccccagagccgtgttccccagcatgatcggcagacccagacaccagggcgtgatggtgggcatgggccagaaggactgctacgtgggcgacgaggcccagagcaagagaggcgtgctgaccctgaagtaccccatcgagcacggcgtggtgaccaactgggacgacatggagaagatctggtaccacaccttctacaacgagctgagagtggcccccgacgagcaccccatcctgctgaccgaggcccccctgaaccccaagatcaacagagagaagatgacccagatcatgttcgaggccttcaacacccccgccatgtacgtggccatccaggccgtgctgagcctgtacgccagcggcagaaccaccggcatcgtgatggacagcggcgacggcgtgacccacatcgtgcccatctacgagggctacgccctgccccacgccatcctgagactggacctggccggcagagacctgaccgactacctgatgaagatcctgaccgagagaggctacaacttcaccaccaccgccgagagagagatcgtgagagacgtgaaggagaagctgtgctacgtggccctggacttcgagcaggagatggtgagagccgccgccagcagcagccccgagagaagctacgagctgcccgacggccaggtgatcaccatcggcaacgagagattcagatgccccgaggccatcttccagcccagcttcctgggcatcgagagcagcggcatccacgagaccaccttcaacagcatcatgaagtgcgacgtggacatcagaaaggacctgtacgccaacaccgtgctgagcggcggcagcaccatgtaccccggcatcgccgacagaatgcagaaggagatcatcaccctggcccccagcaccatgaagatcaagatcatcgccccccccgagagaaagtacagcgtgtggatcggcggcagcatcctggccagcctgagcaccttccagcagatgtggatcagcaagcaggagtacgacgaggccggcccccccatcgtgcacagaaagtgcttctag

SEQ ID NO: 26741 - DNA, 2791 bp, Artificial Sequence
  derived and/or modified sequence
gtctgaaagcatttctggagtgttttaggcctgttcactttctcttactcactgtctattcacttgtcctgttcactcgtctggaagatctcagccagcaccatgactgacaatgagctgtctgccttggtagtggataatgggtcagggatgtgcaaggcaggctttggtggtgacgatgccccccgggctgtgttcccctccatgatagggcgtcctcgacaccagggcgttatggtaggcatgggccagaaggactgctacgtgggagatgaggctcagagcaagagaggcgtcctgaccctgaagtatcctatcgagcatggagtggtcaccaactgggacgatatggaaaagatctggtaccacacattctacaatgagctccgtgtggcaccagatgagcatcccatcctcctcaccgaggcacccctgaaccccaagatcaaccgggaaaagatgactcagatcatgttcgaggctttcaacacaccagccatgtatgtcgccatccaggctgtgctgtccctctatgcctcaggacggaccacaggcatcgtgatggattctggggatggggtcactcacatcgtgcccatctatgaaggttatgccctgcctcatgccattctacgcctggatctggcagggagagacctgactgattacctcatgaagatcctgacagagcgaggctataacttcaccaccactgctgagcgggagattgtgcgagatgtcaaagagaagctgtgctacgtagccctggactttgagcaggagatggtcagggcagccgcatcctcctcaccggaacggagctatgaacttcctgatgggcaggtgatcaccattgggaatgaacgcttccgatgccctgaagccattttccagccttcctttctgggcattgagtccagtgggatccatgagacaaccttcaactctatcatgaagtgcgatgtggatattcgcaaggatctctatgccaacaccgtgttatctggagggagcaccatgtacccaggcattgctgacaggatgcagaaagaaatcataaccctggcacccagcaccatgaaaatcaagatcatagctcccccagagcggaagtattctgtttggattgggggctccatccttgccagcctgtccacattccagcagatgtggatcagtaagcaggaatatgatgaggctggtcctcctatcgttcacagaaaatgtttctgaatgggcttccatattagtgggcttacattttcccttttcctaggtcacagtgatggtactgcttttatccgctttcagtagaatcgaggtaaatacgtcactcttcctagtgtaaaccagcaaacccatctctccatccaagtaacctgggctcttacccagataaccacatccggttctccatcaagtgaaggtgaattctaataccatattcctttttctttgcctatactgttcaaagataggtaggccagcttaaatacatataagtgacaaggagtaaaatcacgagaaatgtcatttcagaatggataactataattatcaagctttaaaacttagttctcgctaaaatatttaacaagaacaggctgtataaacttgtttaaaaaaaaaaggtgcgtatgcatttagcagccgtgtcttactagttaagtatctttgttttgtttacttctttgtatggagataatgaattataaagttcaataatatccatatatacataagcaccagggaaataaaatatattgtgaaatatgctgatgtatctagctatctgaacagctaatgtgaatttctttactcccaaaagtcatcgttgtactaggtacatattttaattgtttcccttactaaataagcataatgagacagccaccattccattaatgtttataaatcatctaaattttcagctcatagtggagttctgctggtcaaattatattttaatatctttcttactgaaccttctcataccaaaactacagacaatgtctaattcttaagagagatagatattataatatcaaattaatgtcattatggtacaatttgacagaggtaattttatttctatttcttagtgtaatagcacatcttaaataatttctgtagaccaggattacagatacttctcttgtgcaaggatttcactgtgggaaaatatagctgcagcatctttattaattatacattttactaccagtatactaacacagttttatccttggaaagcttttagaataattctactttattatgtccagtaactagcaatacttatttatgcaaagtgtctctgagatactaacatctttgaaaatatcaatgtatgttcctataatgtctaaaatattttagttactccagtgatgatttattaaccaattttaagtaccagtatgtttattccaatctatgcagtgatttctgaatatttggatatcagcattatttgtatttttcagggtaatttctgaaaatttaaaatatttatttggattgcttattcaggcattataaggtactctggaggaaggaatcacttctctttttttcttagttgggaaacttgtacttatgttataaatctttaaaatggaatcagtaagaattttttgtttaaggtaatacttttcaaataatttgattattccttattggctttatctgacaacataatctttaaaatgcatgtaaccaaaattaatctccaaaaacactttattttatataacttgctttcagtacattaaaattgcttcatacttgt

SEQ ID NO: 26742 - DNA, 1131 bp, Artificial Sequence
  derived and/or modified sequence
atgacagacaatgagctgtccgcacttgtggtggataatggctccggaatgtgcaaagcggggttcgggggcgatgatgctccgcgagccgtgtttccttcaatgatcgggagaccaagacaccagggggtcatggtgggaatgggacaaaaagactgttatgtgggagatgaggcccagagcaagagaggagtgcttacattgaaatatcctattgagcacggcgtcgtgacaaattgggatgacatggagaaaatttggtaccataccttttacaacgaattacgtgtagcgcctgatgagcatccaatcttgctcactgaagctcctctcaaccctaaaataaaccgggaaaagatgacccaaatcatgttcgaggcttttaacacgcctgctatgtacgtggctatccaggccgtgctctcactctacgccagcggaaggacgaccggaattgtcatggattcgggtgacggggtgacccatattgtgccaatttacgaaggatacgcattgccacacgccattctgagactcgacttagctggccgcgatctcaccgattacctgatgaagattctcacagaacgaggctacaacttcacaaccacagccgagcgagagatcgtgagagacgtgaaggaaaaactgtgctacgtcgccctcgatttcgaacaggagatggtcagagctgccgcttcctccagccctgagcgttcatatgagctgccggacggccaagtgattactatcggaaatgagcgtttccgctgtccggaagcaatctttcaaccctcattcctagggatcgaaagttcgggaatccatgagacgaccttcaatagtatcatgaagtgtgatgtagatatccggaaggatctttatgcgaacactgttctcagtggcggtagcactatgtatccgggaatagctgatagaatgcaaaaggagatcataacactggctcctagtaccatgaaaatcaagatcatcgctccccctgaaagaaaatactctgtatggatcggaggctccatccttgcctccctgtctacctttcagcagatgtggatcagcaaacaggagtatgatgaagctgggccgccgatagtgcacagaaagtgtttttag

SEQ ID NO: 26743 - DNA, 1131 bp, Artificial Sequence
  derived and/or modified sequence
atgacagacaatgagctgagcgccctggtggtggacaatggaagtggcatgtgcaaggccggctttggaggagatgatgcccccagggctgtgttccccagcatgattggccggcccaggcaccagggcgtgatggtgggcatgggccagaaggactgctacgtgggagatgaggcccagagcaagaggggcgtgctgaccctgaagtaccccatcgagcacggcgtggtgaccaactgggatgacatggagaagatctggtaccacaccttctacaatgagctgcgggtggccccagatgagcaccccatcctgctgacagaggcccccctgaaccccaagatcaaccgggagaagatgacccagatcatgtttgaggccttcaacaccccagccatgtatgtggccatccaggccgtgctgagcctgtatgccagcggccgcaccaccggcatcgtgatggacagcggagatggagtgacccacatcgtgcccatctatgagggctacgccctgccccacgccatcctgcggctggacctggccggccgggacctgacagactacctgatgaagatcctgacagagcggggctacaacttcaccaccacagctgagcgggagatcgtgagagatgtgaaggagaagctgtgctacgtggccctggactttgagcaggagatggtgcgggccgccgccagcagcagccctgagaggagctatgagctgcctgatggccaggtgatcaccatcggaaatgaacgcttccgctgcccagaggccatcttccagcccagcttcctgggcatcgagagcagcggcatccacgagaccaccttcaacagcatcatgaagtgtgatgtggacatcaggaaggacctgtatgccaacacagtgctgagcggcggcagcaccatgtacccaggcattgctgacaggatgcagaaggagatcatcaccctggcccccagcaccatgaagatcaagatcatcgcccctcctgagaggaagtacagcgtgtggattggaggcagcatcctggccagcctgagcaccttccagcagatgtggatcagcaagcaggagtatgatgaggccggcccccccatcgtgcacaggaagtgcttctag

SEQ ID NO: 26744 - DNA, 1131 bp, Artificial Sequence
  derived and/or modified sequence
atgaccgacaacgagctgagcgccctggtggtggacaacggcagcggaatgtgtaaagcaggctttggaggggacgacgctccacgggctgtgtttccaagcatgattgggcgtcctagacatcagggcgttatggtggggatgggtcagaaggattgctatgtgggggacgaggcgcagagtaaacggggtgtgctgacacttaaatacccaattgagcatggggtcgtgaccaactgggacgatatggaaaagatctggtatcacaccttctataacgagcttagggtggcaccggacgaacatccaattttactgactgaggctcccctcaacccaaaaatcaacagagaaaaaatgacgcagatcatgtttgaagcctttaacacccccgctatgtacgtggctatccaggctgtgctgtctctatacgccagtggaaggaccaccggtatcgttatggactctggtgacggggtgacacacatagtccccatctatgaagggtacgctctgccacacgccatcctcagactggatcttgctggacgcgacctgacagactatcttatgaaaatcctcaccgaaaggggatacaattttacaactacagcagaacgggagatcgtcagagacgtgaaagagaaactgtgttacgtggctctggatttcgagcaagagatggttcgggctgcggccagctcttctccagagaggtcatacgagctccctgacggtcaagtaattacaataggtaacgaaaggttccgctgtcccgaggccatattccagccttccttcctcgggattgagagtagcggcatccacgagactacattcaacagtatcatgaaatgtgatgttgacatcaggaaggacctgtatgcgaacacggtgctgagtggcggtagcacaatgtatcccggaatcgccgatagaatgcagaaagaaatcataaccctggccccctcaaccatgaagatcaagattattgccccccccgaacgtaagtatagcgtctggataggagggtccatcctggctagcttgtctacatttcagcagatgtggatcagcaaacaagagtatgatgaagcaggtccccccattgtgcataggaaatgcttctag

SEQ ID NO: 26745 - DNA, 1131 bp, Artificial Sequence
  derived and/or modified sequence
atgaccgataacgagctttctgcgttggtggtcgataacgggagtggaatgtgcaaagccggtttcggcggagatgatgcaccccgagctgtgtttccctctatgattggcagaccacgacatcaaggagtgatggttggcatgggtcagaaagattgttatgtgggcgacgaggcacaatctaaaaggggcgtgctgacactgaagtaccccattgagcatggcgtagtaactaactgggatgacatggaaaagatttggtatcacactttttacaacgagctgcgtgtcgccccagacgaacacccaattctactgaccgaggcccctctgaacccaaagattaaccgggaaaaaatgacccaaatcatgtttgaagcctttaatacccctgccatgtatgtggccattcaggccgtgttgtctctgtatgcgagtggccgaacaaccggcatcgtgatggactctggcgatggcgttacccacattgtcccaatctatgagggctatgccctcccccatgctattctgcggctggacttggctggcagggatctgactgactacctgatgaagattctcacagagcggggttataactttacaaccacggctgaaagggagatcgtgagggatgttaaagaaaaactgtgctatgtggcgctggatttcgagcaggagatggtgagggcagccgctagctctagtcctgaacgcagctacgagctcccagacggacaagtgatcaccatcggcaatgagaggtttcggtgcccagaggcaatcttccagcctagctttttaggcatcgagtccagtggaatccacgagacgacttttaattccatcatgaagtgcgatgtggatatccgtaaggacctttatgccaacacggtgttatccggcggatcaacgatgtatccagggatcgctgatagaatgcaaaaggagatcattaccctcgccccatcaacaatgaagattaagattattgccccacccgagcggaaatattccgtttggataggaggtagcattctggcatctctttccactttccagcagatgtggatcagtaaacaagaatacgacgaggccggtcctccaatcgtgcacagaaaatgtttttag

SEQ ID NO: 26746 - protein, 911 aa, Artificial Sequence
  derived and/or modified sequence
MPPRRSIVEVKVLDVQKRRVPNKHYVYIIRVTWSSGSTEAIYRRYSKFFDLQMQMLDKFPMEGGQKDPKQRIIPFLPGKILFRRSHIRDVAVKRLIPIDEYCKALIQLPPYISQCDEVLQFFETRPEDLNPPKEEHIGKKKSGGDQTSVDPMVLEQYVVVANYQKQESSEISLSVGQVVDIIEKNESGWWFVSTAEEQGWVPATCLEGQDGVQDEFSLQPEEEEKYTVIYPYTARDQDEMNLERGAVVEVIQKNLEGWWKIRYQGKEGWAPASYLKKNSGEPLPPKPGPGSPSHPGALDLDGVSRQQNAVGREKELLSSQRDGRFEGRPVPDGDAKQRSPKMRQRPPPRRDMTIPRGLNLPKPPIPPQVEEEYYTIAEFQTTIPDGISFQAGLKVEVIEKNLSGWWYIQIEDKEGWAPATFIDKYKKTSNASRPNFLAPLPHEVTQLRLGEAAALENNTGSEATGPSRPLPDAPHGVMDSGLPWSKDWKGSKDVLRKASSDMSASAGYEEISDPDMEEKPSLPPRKESIIKSEGELLERERERQRTEQLRGPTPKPPGVILPMMPAKHIPPARDSRRPEPKPDKSRLFQLKNDMGLECGHKVLAKEVKKPNLRPISKSKTDLPEEKPDATPQNPFLKSRPQVRPKPAPSPKTEPPQGEDQVDICNLRSKLRPAKSQDKSLLDGEGPQAVGGQDVAFSRSFLPGEGPGRAQDRTGKQDGLSPKEISCRAPPRPAKTTDPVSKSVPVPLQEAPQQRPVVPPRRPPPPKKTSSSSRPLPEVRGPQCEGHESRAAPTPGRALLVPPKAKPFLSNSLGGQDDTRGKGSLGPWGTGKIGENREKAAAASVPNADGLKDSLYVAVADFEGDKDTSSFQEGTVFEVREKNSSGWWFCQVLSGAPSWEGWIPSNYLRKKP

SEQ ID NO: 26747 - DNA, 2736 bp, Artificial Sequence
  derived and/or modified sequence
atgcccccaaggcggagtatcgttgaagtaaaggtgctcgacgtccagaaacgccgcgtccctaacaaacattacgtttacatcataagagttacctggagcagcggttcaaccgaagccatttacagacgctattcaaaattcttcgacctccagatgcagatgcttgataagtttccgatggagggaggccagaaggatcccaagcagagaatcatcccttttctcccaggcaaaatcctgtttcggcggagccacatccgcgatgtagctgtaaaaagactgattcctattgatgaatactgtaaggctctgatacagttgccaccttatatcagccagtgcgatgaggtgttgcagttctttgagacccggcctgaagatctcaatccacctaaagaggaacatatcgggaaaaaaaagagcgggggggaccagacttctgttgaccctatggtactggagcagtacgtggtggtggctaattatcagaaacaagagtctagcgagatatcactgtccgttggccaagtggtggatattattgaaaaaaatgagtccggatggtggtttgtgagcacagcagaggaacagggttgggtgcctgccacttgtttggagggacaggacggcgtccaagacgagtttagcctgcagcccgaggaagaggagaaatataccgtgatttacccttataccgcacgtgatcaggatgagatgaatctggagcgaggcgccgtcgtcgaggtgatccagaagaatctggaaggttggtggaaaattcggtaccagggaaaggaaggctgggcccctgcttcttacctcaaaaagaattccggtgaaccgctccctcccaagcccggaccaggttctccctcccatcctggtgcactggacctcgatggggtgagccggcagcaaaatgccgtggggcgcgaaaaagaacttctatcctcccaaagagatggccgattcgagggccggccggttcctgatggcgacgccaaacaaagaagccctaaaatgaggcagaggccccctcccaggcgggatatgaccatcccacgggggctgaacctacccaaacccccaatcccaccccaagtggaagaagaatattacaccatcgccgaattccagacaaccattccggatggtattagcttccaggctggtctgaaggtggaggtaattgagaaaaacctgtctggctggtggtacatccaaatagaagacaaggagggatgggcccctgccactttcattgacaagtacaagaagacaagtaatgcttctaggcccaattttctcgctcccttgccccacgaagtgacccagttacggctcggagaagcggcagcattagagaataataccggctctgaagcaacaggccccagtagaccgctgccggacgctccccatggggttatggattctggtctgccctggtccaaggattggaaaggatctaaagacgttctgagaaaggcatcctcagatatgagtgcgtcggccgggtacgaagagatttccgatcccgatatggaagagaaaccctcactgcccccgcgcaaggaatccattatcaagagcgagggcgaattactggagcgggagcgagagaggcagaggaccgaacagctgaggggcccgacacctaaacccccaggggtaattttgccaatgatgccggccaagcacatcccacccgctcgagattccagaagaccggagccaaagcctgataagtccagactcttccagctcaagaatgatatggggcttgagtgcggccacaaggtgctagctaaagaggtgaaaaaacctaatctgcggcctatatccaagtctaaaactgatctgcccgaggaaaaaccagatgcgacccctcagaaccctttcctcaaatctaggccccaagtgagaccaaaaccagctccatcacctaagaccgagcctccacagggagaggatcaggtagacatatgcaacctccgtagcaaacttcgtcctgccaagtcccaggacaagagtctgcttgacggagaggggccacaggcagtgggcgggcaggacgtggccttttcgcgcagttttctgcctggcgaaggacctggcagagcccaggatcggactggcaaacaagatggcctttcacctaaagaaatttcctgccgcgcccctcctcgacctgccaaaactactgacccggtgagcaaatctgtcccggtgcctctgcaagaagctcctcaacagcgccctgtagtgccaccgaggcgcccgcctccacccaagaagacgagttcctcttcaagaccgctcccagaggtgcgaggaccccagtgtgaaggacacgagtctagggccgccccaacccctggacgtgccttgctcgtcccaccaaaagccaaaccatttttgagtaattccttgggcggtcaagacgatactcgggggaagggctctttggggccctgggggacaggcaaaattggcgaaaatagggaaaaagcggcagccgcatcggtgcctaacgctgatggcctgaaggatagcctgtatgtggccgtggcagacttcgagggcgacaaagatacatcatccttccaggagggcacggtctttgaagtccgagaaaagaatagcagcggctggtggttttgccaggtgctgtctggcgctcctagctgggaggggtggatcccttctaattacctgcgaaaaaaaccatag

SEQ ID NO: 26748 - DNA, 2736 bp, Artificial Sequence
  derived and/or modified sequence
atgccaccccggcgcagcatcgtggaggtgaaggtgctggatgtgcagaagagaagagtgcccaacaagcactacgtgtacatcatccgggtgacctggagcagcggcagcacagaggccatctaccgccgctacagcaagttctttgacctgcagatgcagatgctggacaagttccccatggagggcggccagaaggaccccaagcagaggatcatccccttcctgcccgggaagatcctcttcagaagaagccacatcagagatgtggccgtgaagaggctcatccccattgatgagtactgcaaggccctgatccagctgcccccctacatcagccagtgtgatgaggtgctgcagttctttgagaccaggcctgaggacctgaacccccccaaggaggagcacatcggcaagaagaagagcggcggggaccagacctctgtggaccccatggtgctggagcagtatgtggtggtggccaactaccagaagcaggagagcagcgagatcagcctgtctgtgggccaggtggtggacatcatcgagaagaatgaaagtggctggtggtttgtgtccacagctgaggagcagggctgggtgcctgccacctgcctggagggccaggatggagtgcaggatgagttcagcctgcagcctgaggaggaggagaagtacaccgtcatctacccctacacagcccgggaccaggatgagatgaacctggagagaggagctgtggtggaggtgatccagaagaacctggagggctggtggaagatccgctaccagggcaaggagggctgggccccagccagctacctgaagaagaacagcggggagcccctgccccccaagccaggccctggcagccccagccaccctggggccctggacctggatggagtgtcccggcagcagaatgctgtgggccgggagaaggagctgctgagcagccagagagatggccgctttgagggccggcctgtgcctgatggagatgccaagcagaggagccccaagatgaggcagaggcctcctccaagaagagacatgaccatcccccggggcctgaacctgcccaagccacccatccccccccaggtggaggaggagtactacaccatcgccgagttccagaccaccatcccagatggcatctccttccaggccggcctgaaggtggaggtgattgagaagaacctgagcggctggtggtacatccagatcgaggacaaggagggctgggccccagccaccttcatcgacaagtacaagaagaccagcaatgccagccggcccaacttcctggcccccctgccccatgaggtgacccagctgcggctgggggaggccgccgccctggagaacaacacaggcagcgaggccaccggccccagccggcccctgcctgatgcccctcatggagtgatggacagcggcctgccctggagcaaggactggaagggcagcaaggatgtgctgaggaaggccagcagtgacatgtctgccagcgctggctatgaggagatcagtgaccctgacatggaggagaagcccagcctgccccccaggaaggagagcatcatcaagtctgagggggagctgctggagcgggagcgggagcggcagaggacagagcagctgcggggccccacccccaagcccccaggagtcatcctgcccatgatgcctgccaagcacatccccccagcccgggacagccggcggcctgagcccaagccagacaagagccgcctcttccagctgaagaatgacatgggcctggagtgtggccacaaggtgctggccaaggaggtgaagaagcccaacctgcggcccatcagcaagagcaagacagacctgcctgaggagaagccagatgccaccccccagaaccccttcctgaagagccggccccaggtgcggcccaagccagcccccagccccaagacagagcccccccagggcgaggaccaggtggacatctgcaacctgcggagcaagctgcggcctgccaagagccaggacaagagcctgctggatggagagggcccccaggccgtgggcggccaggatgtggccttcagccgctccttcctgcccggggagggccctggccgggcccaggacagaacaggcaagcaggacggcctgagccccaaggagatcagctgccgggccccacccaggcctgccaagaccacagatcctgtgtccaagtctgtgcctgtgcccctgcaggaggccccccagcagaggcctgtggtgcccccccggcggcccccaccacccaagaagaccagcagcagcagccggcccctgcctgaggtgcggggcccccagtgtgagggccacgagagccgggccgcccccaccccaggccgggccctgctggtgccccccaaggccaagcccttcctgagcaacagcctgggcggccaggatgacacccggggcaagggcagcctgggcccctggggcaccgggaagatcggggagaaccgggagaaggctgctgctgcctctgtgcccaatgctgatggcctgaaggacagcctgtatgtggccgtggccgactttgaaggagacaaggacaccagcagcttccaggagggcaccgtgtttgaggtgcgggagaagaacagcagcggctggtggttctgccaggtgctgagcggggcccccagctgggagggctggatccccagcaactacctgaggaagaagccctag

SEQ ID NO: 26749 - DNA, 2736 bp, Artificial Sequence
  derived and/or modified sequence
atgcccccccggcggagcatcgtggaggtgaaggtgctggacgtgcaaaaaagacgtgtacctaacaagcattacgtctacatcatccgagtgacgtggagtagcggcagtactgaggctatatatcggaggtattcaaagttctttgacctccagatgcagatgctcgacaagttccccatggaaggcggacagaaggatccaaagcaaagaattatcccattcctgccggggaagattctgtttagacggtcccatattcgggatgtggcggttaagagactcatccctattgacgagtattgcaaggcactcatccagctgccaccgtatatctcacaatgtgacgaggtcctccaattcttcgagacgcgtcccgaggatcttaaccctcccaaagaggagcacataggaaagaagaagagtggcggggaccagactagcgtcgaccctatggttctggaacagtacgtagtcgtcgccaattatcaaaagcaggagagctcagagatctctctgtctgtcggacaagtagtggatatcattgaaaagaatgaatccggttggtggtttgtgtccaccgccgaagagcagggctgggtgccagcaacctgtctggaggggcaggacggggttcaggacgaatttagtctgcaaccagaagaggaggaaaagtacacagtcatttacccgtacacggctagagaccaggacgagatgaacctggagcgcggcgcagtggtggaggtcattcaaaagaatctggagggttggtggaagatcaggtaccaaggcaaagagggctgggccccggccagctacctcaagaagaatagtggcgagcccctacctccgaagcctggtcctgggtcccccagccaccccggcgcacttgacctggacggcgtctcccgtcagcagaacgctgtcggaagagagaaagagctgctcagcagccagcgggacggaaggtttgaggggaggcccgtgcccgacggtgatgccaagcagcgatctcccaagatgagacagcgcccacccccacggagggatatgacaattccacgcggactcaatctgccaaaaccccctatcccaccccaggtggaagaggagtactatacaattgccgaattccaaaccaccattccagatggcatcagctttcaggccggcctcaaagtcgaagttatcgaaaaaaacctgtcgggatggtggtatatacaaatcgaagacaaagagggttgggcccccgctacttttatcgacaaatacaagaagacatctaatgcgtcacgccctaacttcctggcccccttgccccacgaagtcactcagctgcgcttgggggaggccgctgcactggagaataacacaggcagtgaggccactggcccaagtagacctctccccgatgccccccacggtgtcatggatagtgggcttccatggtcgaaggattggaaaggtagcaaggacgtcctgcgcaaggcatctagtgatatgtccgcgagcgccggatacgaggagataagcgacccagacatggaggaaaagccaagcctgcctccaaggaaagaatctattatcaagtcagagggggagttgctggagcgagagagagaaaggcagagaacggaacagctccgcggccctactccgaagccgcccggcgtgatccttccaatgatgcctgccaagcacattccccctgctagggactcgaggcgccctgagcccaaacccgataagtctcgcttgttccagctgaaaaacgatatggggctggagtgtgggcataaagtactcgcaaaggaagtaaaaaaacccaatttaaggcctattagcaagagcaagactgatctgcctgaggagaagccagacgcgacaccccaaaacccttttctcaagtcgcggccccaagtgaggcctaaacccgccccttcacctaaaaccgagcccccgcagggagaggatcaggtggacatctgcaaccttcgtagcaaactcagacccgccaagtctcaggacaagtccctgctcgacggggagggcccacaggcagtgggaggccaggacgtcgctttcagccgctcatttctacccggggagggcccaggcagggcccaggatcgtaccggcaagcaagatggactttctcctaaggagatcagctgtcgcgcccccccaagacccgcaaagactaccgacccagtttccaagtcagtaccagtgcctctccaggaagcacctcagcagcgcccagttgttccaccccggcgcccccctcctccaaaaaagacttcttcctctagcagacccttgccagaggtcagaggaccccagtgcgaagggcacgagtctagggctgcacccacaccgggacgggcgctacttgtacctcccaaggctaagccattcctttctaatagtctggggggccaggatgacacaaggggcaaaggcagcctcggtccatggggtacgggaaaaattggcgagaatagagagaaagccgccgcggccagcgtgccaaacgccgatggactgaaggattcactttatgtagccgtggctgacttcgagggggacaaagatacaagttcctttcaggagggtaccgtcttcgaagttcgggagaaaaattcaagcgggtggtggttttgtcaggtgctctcaggcgcaccaagctgggaagggtggattccctccaactacctccgaaaaaagccatag

SEQ ID NO: 26750 - DNA, 2736 bp, Artificial Sequence
  derived and/or modified sequence
atgcctcccaggcggtctatcgtggaagttaaagtgctcgatgtgcaaaaacggcgtgttcccaataagcactacgtgtatatcattagagtaacctggtcctctggctccaccgaggctatctacaggcggtatagtaagtttttcgatctgcaaatgcagatgttggacaagtttcctatggaagggggacagaaggatcccaagcaaaggatcattccttttctccctggtaagatcctgttcaggcggtctcacatcagggatgtggctgtaaaaaggctgatcccgattgacgagtactgtaaggcgcttattcaattgcctccttatatcagccaatgcgatgaggtgctacagttcttcgagaccaggccagaggacttaaacccgcctaaagaagaacacattgggaaaaagaagtccggtggggatcagacctctgtggaccctatggttttagaacagtacgtagtcgtcgccaattaccagaaacaagagagtagcgagatttcactgagtgtggggcaggttgtggatattatcgagaagaacgagtccggctggtggtttgtgagtactgcagaagagcaaggttgggtgcctgccacgtgtttggagggccaagacggagtacaggatgagttctctttacagcctgaggaagaggaaaaatacactgtgatctacccatacactgcaagagaccaggatgaaatgaatctcgaaaggggcgcagtggttgaggtcattcaaaaaaacctagagggatggtggaaaatccgttaccagggaaaagaaggttgggctcctgcatcatatctgaagaaaaactctggagagcctctgcctccaaagccaggccctggtagcccctcccatccgggagcacttgatctcgatggagtttccaggcaacagaatgctgtgggtagggaaaaggaactgttgtccagtcaaagggacggaagatttgaggggcgaccagtccccgatggggacgcaaaacagcgaagtcctaaaatgagacagcgtccgccacctcgcagagatatgactatccctagagggctgaaccttccaaagccccctatacctccccaggtggaagaggaatattacactatagccgagtttcagaccactattcctgacggcatctctttccaggcgggacttaaggtcgaagtcatagaaaagaacctcagcggttggtggtatatccagatagaagataaggaaggctgggccccagccacctttattgataagtacaaaaagacttcaaacgcctcacgccctaactttctggccccactaccccatgaggtgactcagctccgtttaggtgaagcggcagcgctggagaacaacactgggagtgaggccaccggacccagcaggcccctcccggacgccccacatggagtgatggacagcgggctgccctggtccaaggactggaaaggcagcaaagacgtgctgaggaaggcctccagtgacatgagcgccagtgccggttatgaggagatcagcgaccccgatatggaagaaaagccttctcttcctcctcggaaagagagtattatcaagagtgagggcgaactgctcgagagggagcgagaacgacagcggaccgagcaactgaggggcccaaccccgaagccgccaggtgtcatactgcctatgatgcccgcaaagcatatccctcctgctagagactcccgtaggcccgaaccaaaaccagacaagtcacgcctcttccaacttaaaaacgacatgggactggaatgtgggcataaagtgctggcaaaggaagtgaaaaaacctaacctgaggccaatatcaaaatctaaaaccgatctgcccgaggagaagccggacgcgaccccccagaacccctttttgaagagccggccacaagtcaggcccaagccagctcccagtccaaagacagaaccacctcagggagaggaccaggtggatatctgcaatctgcgctccaagttgagaccggctaaatcacaggacaaaagcctcctggacggtgagggccctcaggctgttggaggacaagacgtggcattttcacgcagtttcttgcccggtgaagggccagggcgtgcgcaggatcgcactggcaaacaggacggcctgagccccaaggagataagttgcagagccccacccaggcctgccaagacaacagatcccgtgagtaaatcggtccccgtcccactccaggaagcccctcagcagcgacctgtggtgcctccaaggagaccgccaccaccaaagaaaacttccagcagtagtcgcccactcccagaagtgagaggaccacaatgcgagggtcatgagagtagggcggcaccgacgccgggaagggcactcctcgttcccccaaaggccaagccctttctgtcaaattccttgggtggccaggatgatactagggggaaggggagcctcggaccctggggtaccggaaaaattggggagaatagagaaaaagcggctgcagctagtgttcccaatgcggatggcttgaaggattctctatatgttgccgtcgcagacttcgagggcgacaaagatacctcgtcctttcaggaaggaaccgtattcgaggttcgagagaagaactccagtggctggtggttctgccaggtgctttctggtgcacctagctgggagggctggattccttctaattacctcagaaagaaaccatag

SEQ ID NO: 26751 - DNA, 7777 bp, Artificial Sequence
  derived and/or modified sequence
agtgcgcgccgagcgaagggcggcggcggtggcggcggcggctcgtgctcggccccggctgcgattgcgctcagctccaggttccctgcccgcggcggcgcgcccccagcgctccctgcaccccgcgccacccgcacccgcgctcggcccgctgcgggcggaggagcggccatgccgccgcggcgcagcatcgtggaggtgaaggtgctagacgtgcagaagcggcgggtgcccaacaagcattatgtctacatcatccgggtcacgtggtccagcggctccaccgaggccatttaccggcgctacagcaagttttttgacctccagatgcagatgttggacaaatttcccatggaaggaggacagaaggaccccaagcagcggatcatcccctttctgccaggtaagattctcttcagacgaagccacatccgggacgtggctgtcaaacgcctgataccaattgatgaatactgtaaggccctcatccagctgcccccctacatctctcagtgtgatgaggtgctgcagttctttgagacaagacctgaggacctgaatccccccaaagaggagcacattgggaaaaagaaatctgggggtgaccaaacctcagtggaccccatggtcctggagcagtatgtggtggtagccaactaccagaagcaggagagttcggagatcagcctcagcgtggggcaggtggtggacatcatcgagaagaatgagtcaggttggtggttcgtcagcactgccgaggagcaaggctgggtccctgcaacgtgcctcgaaggccaggatggggtgcaggatgagttttctctgcagcctgaagaagaggagaagtacacagtcatctacccgtacacagctcgggaccaggatgaaatgaacctggagagaggggctgtggtggaggtcatccagaaaaacctggaaggctggtggaagatcaggtaccagggcaaagaaggctgggcccccgcctcctacctaaagaagaacagtggggagcccttgcccccgaagccaggccctggctcaccctcccacccgggtgcccttgacttggatggtgtttcccggcagcagaacgcggtgggcagggagaaggagctgctcagcagccagagggacgggcggtttgaaggccgcccggtgcccgacggtgacgccaagcagagatcaccaaagatgaggcagagaccccctcctcgccgggacatgaccattcctcgaggcctcaacctgccgaagccgcccatcccgccccaagtggaggaagagtattacaccatcgccgaattccagacaaccatcccagacggcatcagcttccaggcaggcctgaaggtcgaggtgatcgagaaaaacttgagtggctggtggtacattcagattgaagataaggaagggtgggccccggccaccttcattgacaagtacaagaagacgagcaacgcgtcgagacccaactttctggctcccctgccccacgaggtgacccagctccggctgggggaagcagcagcgctggagaacaacacgggcagcgaagccacgggcccctcccggcccctgcctgacgcaccgcatggtgtcatggactcggggttgccatggtctaaagactggaagggcagtaaggatgtcctgaggaaggcatcttcagacatgtctgcgtcagcaggctacgaggagatctcagaccccgacatggaggagaagcccagcctccctccgcggaaagaatccatcatcaagtcggagggggagctgctggagcgggagcgggagcggcagaggacggagcagctccggggccccactcccaagcctccgggcgtgattttgccgatgatgccagccaaacacatccctccagcccgggacagcaggaggccagagcccaaacctgacaaaagcagactgttccagctgaaaaatgacatggggctggagtgtggccacaaggtcttggccaaggaagtgaagaagcccaacctccggcccatctccaaatccaaaactgacctgccagaggagaagccagatgccactccccagaatcccttcttgaagtccagacctcaggttaggccaaaaccagctccttcccccaaaacggagccacctcagggcgaagaccaagtcgacatctgcaacctcaggagtaagctcaggcctgccaagtcccaagacaagtccttgttggatggggagggcccccaggcagtagggggccaagacgtggccttcagccgaagcttcctcccaggagaggggcctggccgcgcccaggacaggacgggcaaacaggatggtctcagcccaaaagagatttcctgcagagcccctccgaggccagccaagaccacagatcctgtgtctaagagcgtgcctgttcctctccaagaggctccccagcagagacctgtggtcccaccccgcagaccacctcccccaaagaaaacctcttcgtcatccaggccgctcccagaggtcagaggtccacagtgtgaaggccacgaaagcagggcagctcccaccccaggccgtgctctcctcgtccctccaaaagccaaaccttttctctccaactctttggggggccaggatgacacgcgaggcaaaggcagcctggggccatgggggaccggcaagattggagaaaacagggagaaagcagctgcagcctctgtccccaatgccgacggcctgaaggactctttgtatgtggccgtggccgactttgaaggagacaaagacaccagcagcttccaggaagggacagtgtttgaagtccgggagaagaacagcagtggctggtggttctgccaggtcctgagcggagccccttcctgggaagggtggattccttccaactatctcagaaagaagccgtagccgactccctttctgcctagagggcccgctggtccttgctggctttacccacgtatttaatacgcctcttaatttatcattctccacgcagcttccaaggcagacagactctggggtactgtgacttcttgcctcccatgggtggagagtgagtttcggacacctcgggcgcccctgggcctgatccctcctatcacagcatcactggaggctcagaacccacagcctttgctttctgtccatgtcagcatccctgccttaagagaactcctcctggccaatggcattgccacccagcagtgggaccaagactctccaagacctccaggactggatcccattgcctggagaaactccagcaagggtctctcatggcttggacatggcacagtaaggggcagccaacccagtccatgatgacttttgctccaacttcttcatgtttctaaaagcccagtggctttattcactcctcctaaattgcctgctaccagaaggaacttcatcctgaagaaatgcattccattaccagttccagggaaagtgtccccttccccaaagcctcaggcccgtgggcctctgaggttccactggatgcggctcccccaggagtgggcctggagatccgctcagccgccctgcctcccaccttctatcttgggaccgtggtcagccctgaagggtggttccagccccgcgtatgctgcgctttgctgctgcaggctccggtccctccagggcttttcaatgagagttcccaccccaacttggagcatttcatttttgcctacctaaagcaagaatctcaaagtttgtttgaataagaggcccattcacaagtcgtgcccttgtgagcacccctttgctgagtgcctcgtgggtgccaaacactgtacttggcgctttgcattcatgctttgaccctcacaacctccctttatagatgaggaaattcacgctccatgtgcccaaggacacaccagccaggaggaagagggaagaggatttgagtccaggcctgcctgacttcagtgcctgtgccctcccctctgtaaaagacaaaccaggcagggaagagatagaagctggctaagtggtggccaagtggcttcattgtgaggggggtgagggggcattcgtggctgctcccacacccaccatccctccagcccacagcagcctataccaaaggctgccctggactcaacagctgcatctccatgacaggagaatgccagggtcctggtggttgacacagagccctgttccctcttctaagctgttgccccctggggaatagagcttatggagcaacgggagctgaggtggcctcgagggccagcctggagggctctgagcatagcatgcagcggtcccatagggaggcaggtaaccaagggccaggcagagctgcttcctgtgcctctccggcatttgtaatgtttttttcttttttcacgcactgccaaatctgttttctcccttgaagaaacccagggcagatgtggtcatctgtcaaactgaggtctggagaggcatgactaaatcactgcagaagcaaaatcaggacccagcatttctagctcccagcccagagtaagagagcagagcagaaccccttcccattctacccgaccgaggcagccctgccctgccctgccccgcccctccccaccctgccctgccccagagatctccagttcacagtgttcatcaggcgagatacttttggacccacaaagccagttttttggggggatgctcagtgtctacctgcagtgccaaagttttgcttgaacagccctcttctgccgcgcctcccagctccaccccctatcacgtgggtgctggctgcttctgcgtgaggagcttcctctgatcacctgtagcatctttagtgccttcgtccagtcggcctgcaaatcccatttcccagagaggcttgggcagggcccacttgccacttggccctgtgcccagagcgttgggggcagatggcagccaggggaagaagggaggtggggaagggccgccaccgcttgagggtcccctcccttgagaggaggccccatggcagttttcctgagttcttgatccactttggtttaaacaacttttgtgaagctatgtgagatttgactgcatttcaaaagacaaaacacatgtttttttctgatttgctctttgcctttcagcgacgctttcagatactttgtgagtgtctactctgtgctaggtgctgagtagactgggatgtgtgtggctccatccctggctggaagagctttgagtcctgtctgctgacttcactgaaggagtttctctcttgcttcattccttcctcccgggggtcagctgggtaggagcagacttgccctgccttcctctaggcagaaagttttcctgcaaatgaaagaatctgccattctcttttgctatgatgatgatgattattctgacatgacccgcgggtactgaagccacagtcctctctgttcactgttctctccttgagtcatatctatggcctgaggacgtctgtatccagctccttttcctacaatggtagacacttccccaggcagtgggtgggtcagggtggccagtcactctcctagctgtccttgcctggggacttagatttaccccatccaggactgtggtcgctattctgtgagcgattgatggcgcatatgcagaactcccctggagtcatggctctagaaagtgtccaggcccatcgtgacaatggtgccaagcaccgggctggtgaccagtgcctaaacacacacgctcctttaatccttacggcaagcctgtgaggcggataggaccagccctgatctatagtgagaaaattaaggttcagagggagaaggtccaaatagtggccaagctgggactgagatctcgagtttgggtttgtttggttttgttgttgttgttctttccctcgtgtccatgacttttctctgccattagcagggaagtgtgcggagggcttccagggaatcaagtgaccctccctctgaatttcggtgcctcttccccccgccccttgctcacacatttcagtaggtcacaggccaaatggcagcccaaaaggtgggcagagatttttttttcttcccctcacccctgcttattaacacaattgtgacaactactttaccttacatcccagggcaaacggacagcttgcggtacctccaaaaatttggaaaaccctgagtctaagaccacctcttgataaaagaggcctttgctcacatgttctgctcggaatctttctttgccattggtgggtgtatgtcgtcccagctgagactgcgggagagctgagctccagcttaaaccgcttttaatggcccttccctactgggggatcgctggagcccatgccaggttacggtagtcattttaaacctctgccacaaggccacgccatagaatcaatttccaagtcaatgttcttggccctaaaatgtttgcgcccactgaggatttcattaccaggtggaagatgggggaacatatgccacgttaaagagcaagtgctgagtgtgccaggacttgagaaggaccttaggctgaggagtggacagtctggtatttatttcgcctctcccaagtacccagcacagagtgggaaaaagaagaaactgctcctgccttccagtagctggcaacttgacatcaagaacaaaaacattcgtagctggacccccgtcctttcatcgtgcccaagtcttacatgttggcttaagctgcccccttggaggccgtacctttctctttggactgtgacagtggacacctaacagcctgagccatgtgtggctgtcttatcccccaagggttgtccaggcccgttctgcagggctgttgtgtagactgcagacatccatacctcaccacagaccaaagatgacctcgtgtcagactgtgggctgatgagaggtagagcagcatgcatcgaggcctgagggtgcagggcgccctctcttggcctggaggaattgctcctaactagagtaagtttccacgagggtcccaggcagagctgcagagctggaaccggaggctccacagtccttgcctgctcatggacctccttcagagcacctttctacagactggactgcccagctccgtggggtggcatctggtttctggtgctattctgccaagttatcgagctcctcctcatgtttcaacattccatcttcccgtttctatcctcgactccaaagtaagccttcttagctccaatcagggatgaggggctcaacctcttctgtcctcaaagaggccaaacgcagtgccacagtcggtagccttcacttttagatgtcctattcatgtaaaaaagaaggtgcccccaccaggcttacatcagcaataagcaattctaatgcaacgatggtgtccacattttaccccagtgtgtgcccatgtatgcctttgtgcccgtgtaattattgttagcgcccctttcacttagaggggtgatgataaactgtggccaccttgattacaacccacatttcctgctttggggagcttccaagtaacaggccatttcttacctccctccaggaacagtgggcactgcccaccacctcgtgtctgctcataggatgacgctggagatccccacacttactctaccctcttggcaaattggcattccggtggtggtttttgtttcctttaacacattaaataaatgagtatataggatgtgaggggaggggtgagaacaactagctgtagcatgtgtaggctatatactttaccatttgacttctttcctttttttttttttaaataaaaaaagtgcttgactggtttcaagcttcatcatgaa

SEQ ID NO: 26752 - DNA, 2736 bp, Artificial Sequence
  derived and/or modified sequence
atgccccccagaagaagcatcgtggaggtgaaggtgctggacgtgcagaagagaagagtgcccaacaagcactacgtgtacatcatcagagtgacctggagcagcggcagcaccgaggccatctacagaagatacagcaagttcttcgacctgcagatgcagatgctggacaagttccccatggagggcggccagaaggaccccaagcagagaatcatccccttcctgcccggcaagatcctgttcagaagaagccacatcagagacgtggccgtgaagagactgatccccatcgacgagtactgcaaggccctgatccagctgcccccctacatcagccagtgcgacgaggtgctgcagttcttcgagaccagacccgaggacctgaacccccccaaggaggagcacatcggcaagaagaagagcggcggcgaccagaccagcgtggaccccatggtgctggagcagtacgtggtggtggccaactaccagaagcaggagagcagcgagatcagcctgagcgtgggccaggtggtggacatcatcgagaagaacgagagcggctggtggttcgtgagcaccgccgaggagcagggctgggtgcccgccacctgcctggagggccaggacggcgtgcaggacgagttcagcctgcagcccgaggaggaggagaagtacaccgtgatctacccctacaccgccagagaccaggacgagatgaacctggagagaggcgccgtggtggaggtgatccagaagaacctggagggctggtggaagatcagataccagggcaaggagggctgggcccccgccagctacctgaagaagaacagcggcgagcccctgccccccaagcccggccccggcagccccagccaccccggcgccctggacctggacggcgtgagcagacagcagaacgccgtgggcagagagaaggagctgctgagcagccagagagacggcagattcgagggcagacccgtgcccgacggcgacgccaagcagagaagccccaagatgagacagagacccccccccagaagagacatgaccatccccagaggcctgaacctgcccaagccccccatccccccccaggtggaggaggagtactacaccatcgccgagttccagaccaccatccccgacggcatcagcttccaggccggcctgaaggtggaggtgatcgagaagaacctgagcggctggtggtacatccagatcgaggacaaggagggctgggcccccgccaccttcatcgacaagtacaagaagaccagcaacgccagcagacccaacttcctggcccccctgccccacgaggtgacccagctgagactgggcgaggccgccgccctggagaacaacaccggcagcgaggccaccggccccagcagacccctgcccgacgccccccacggcgtgatggacagcggcctgccctggagcaaggactggaagggcagcaaggacgtgctgagaaaggccagcagcgacatgagcgccagcgccggctacgaggagatcagcgaccccgacatggaggagaagcccagcctgccccccagaaaggagagcatcatcaagagcgagggcgagctgctggagagagagagagagagacagagaaccgagcagctgagaggccccacccccaagccccccggcgtgatcctgcccatgatgcccgccaagcacatcccccccgccagagacagcagaagacccgagcccaagcccgacaagagcagactgttccagctgaagaacgacatgggcctggagtgcggccacaaggtgctggccaaggaggtgaagaagcccaacctgagacccatcagcaagagcaagaccgacctgcccgaggagaagcccgacgccaccccccagaaccccttcctgaagagcagaccccaggtgagacccaagcccgcccccagccccaagaccgagcccccccagggcgaggaccaggtggacatctgcaacctgagaagcaagctgagacccgccaagagccaggacaagagcctgctggacggcgagggcccccaggccgtgggcggccaggacgtggccttcagcagaagcttcctgcccggcgagggccccggcagagcccaggacagaaccggcaagcaggacggcctgagccccaaggagatcagctgcagagccccccccagacccgccaagaccaccgaccccgtgagcaagagcgtgcccgtgcccctgcaggaggccccccagcagagacccgtggtgccccccagaagaccccccccccccaagaagaccagcagcagcagcagacccctgcccgaggtgagaggcccccagtgcgagggccacgagagcagagccgcccccacccccggcagagccctgctggtgccccccaaggccaagcccttcctgagcaacagcctgggcggccaggacgacaccagaggcaagggcagcctgggcccctggggcaccggcaagatcggcgagaacagagagaaggccgccgccgccagcgtgcccaacgccgacggcctgaaggacagcctgtacgtggccgtggccgacttcgagggcgacaaggacaccagcagcttccaggagggcaccgtgttcgaggtgagagagaagaacagcagcggctggtggttctgccaggtgctgagcggcgcccccagctgggagggctggatccccagcaactacctgagaaagaagccctag

SEQ ID NO: 26753 - protein, 68 aa, Artificial Sequence
  derived and/or modified sequence
MSSGASASALQRLVEQLKLEAGVERIKVSQAAAELQQYCMQNACKDALLVGVPAGSNPFREPRSCALL

SEQ ID NO: 26754 - DNA, 207 bp, Artificial Sequence
  derived and/or modified sequence
atgagcagcggcgccagcgccagcgccctgcagagactggtggagcagctgaagctggaggccggcgtggagagaatcaaggtgagccaggccgccgccgagctgcagcagtactgcatgcagaacgcctgcaaggacgccctgctggtgggcgtgcccgccggcagcaaccccttcagagagcccagaagctgcgccctgctgtag

SEQ ID NO: 26755 - DNA, 207 bp, Artificial Sequence
  derived and/or modified sequence
atgagttccggggcatccgccagcgctcttcagcgactggtggaacagctgaaattggaagccggggtggaaaggatcaaggtgtcccaggccgcagctgaattgcagcagtattgtatgcagaatgcctgcaaggatgccctgcttgtgggtgtacctgccggaagcaatccattcagggaaccgcggagctgcgctctgctttag

SEQ ID NO: 26756 - DNA, 1469 bp, Artificial Sequence
  derived and/or modified sequence
gattcctgctcatcctaggggcgccagcttcgctggaggacgccgcgctctgcgggtccccgcctcggttccaggcccagctgcaggtgccacccaggtttcaggcgctgaggagcggagagcactgccagctcgctggggtccccgctgtctctggcaagcggctccgcgccgggtgggctggggcggcggggcgggcgcagctgcttccccgccccggggcggcacccgcgctcggggctggcggctcctccccgcccggccgggcccagcagcccctaggagcccagcgccgccgccatgtcctccggggctagcgcgagcgccctgcagcgcttggtagagcagctcaagttggaggctggcgtggagaggatcaaggtctctcaggcagctgcagagcttcaacagtactgtatgcagaatgcctgcaaggatgccctgctggtgggtgttccagctggaagtaaccccttccgggagcctagatcctgtgctttactctgaagactctaggagagaagtttgctgaggaatgccttcaagcacaaagtgatgaatgactgccttcaagtctcaagaaaacacttttccctaacttttagagatatttcagccctttcctgtggcctggtcctatagccaaaatcacagatattcatgagtttctacttgagtgagaaaactgggtgaaggaatagaattttaaatagtaataactgcttgttttttttgtgcaagtacttttatacataagataaacaaaaaccttaccaccaaacataccaaaatgcacctctttcataagtgagttactaagatttctatacctggaatatcatgtatgtttcatttactggatgtttacattttaggaaggaaaatagttttgtttatttaaacaactgaatacttataaactgttgttcctggaagttatttattccataaaaaatttgttcttttgtcatgaatttataattcctaaatgaagaccagaaagtacaaattgctgggaggaagaataggctttattaatcaactgatgtcttgatttttctaaatgggaagattgctttatttttaacactaattatgggagcagattcttagcaaacttctttggaaaagttaatgttatgatgtgcattaggctgccccatcgtgtatataaatgaagcagatttgatttttgtattcttacgtttctctgctttgtagttgtggctgtacttaaagaaatacagaatttcatatatttaaaaatgtttaaaatgtgacccacagaacattgtaaatgattaaaaactaacatgaaaatattacaacctaaaagaattcttaacttcacaagtgttttacttcgacgatgtgcctttgatttaatttgggacacttttttagaaggatacattattcgtgtttgcaacggtctttgaagagcttggaaataaaatttctgcttaatt

SEQ ID NO: 26757 - DNA, 207 bp, Artificial Sequence
  derived and/or modified sequence
atgagcagcggggccagcgccagcgccctgcagaggctggtggagcagctgaagctggaggccggcgtggagcgcatcaaggtgtcccaggccgctgctgagctgcagcagtactgcatgcagaatgcctgcaaggatgccctgctggtgggcgtgcctgctggcagcaaccccttccgggagcccaggagctgtgccctgctgtag

SEQ ID NO: 26758 - DNA, 207 bp, Artificial Sequence
  derived and/or modified sequence
atgagcagcggcgccagcgccagcgccctgcagcggctggtggagcagttaaagctggaggcgggagtggagagaattaaagtgagtcaagccgccgcagagctgcagcagtattgcatgcagaacgcatgcaaagatgctttgctagtgggcgtgcctgctggttcaaacccctttcgagagccgaggtcgtgtgctctgctgtag

SEQ ID NO: 26759 - DNA, 207 bp, Artificial Sequence
  derived and/or modified sequence
atgtctagtggagcctctgcgtcagcactgcagcgcctcgttgagcagctgaaactcgaagctggcgtggagaggatcaaggtgtcccaagcagccgcagagctgcagcagtactgcatgcagaacgcctgcaaggacgcgctgttggtgggggtgcctgcgggttcaaaccccttccgagagcctaggagctgtgccttgctttag

SEQ ID NO: 26760 - protein, 284 aa, Artificial Sequence
  derived and/or modified sequence
MDAIKKKMQMLKLDKENALDRAEQAEADKKAAEDRSKQLEDELVSLQKKLKGTEDELDKYSEALKDAQEKLELAEKKATDAEADVASLNRRIQLVEEELDRAQERLATALQKLEEAEKAADESERGMKVIESRAQKDEEKMEIQEIQLKEAKHIAEDADRKYEEVARKLVIIESDLERAEERAELSEGKCAELEEELKTVTNNLKSLEAQAEKYSQKEDRYEEEIKVLSDKLKEAETRAEFAERSVTKLEKSIDDLEEKVAHAKEENLSMHQMLDQTLLELNNM

SEQ ID NO: 26761 - DNA, 855 bp, Artificial Sequence
  derived and/or modified sequence
atggacgccatcaagaagaagatgcagatgctgaagctggacaaggagaacgccctggacagagccgagcaggccgaggccgacaagaaggccgccgaggacagaagcaagcagctggaggacgagctggtgagcctgcagaagaagctgaagggcaccgaggacgagctggacaagtacagcgaggccctgaaggacgcccaggagaagctggagctggccgagaagaaggccaccgacgccgaggccgacgtggccagcctgaacagaagaatccagctggtggaggaggagctggacagagcccaggagagactggccaccgccctgcagaagctggaggaggccgagaaggccgccgacgagagcgagagaggcatgaaggtgatcgagagcagagcccagaaggacgaggagaagatggagatccaggagatccagctgaaggaggccaagcacatcgccgaggacgccgacagaaagtacgaggaggtggccagaaagctggtgatcatcgagagcgacctggagagagccgaggagagagccgagctgagcgagggcaagtgcgccgagctggaggaggagctgaagaccgtgaccaacaacctgaagagcctggaggcccaggccgagaagtacagccagaaggaggacagatacgaggaggagatcaaggtgctgagcgacaagctgaaggaggccgagaccagagccgagttcgccgagagaagcgtgaccaagctggagaagagcatcgacgacctggaggagaaggtggcccacgccaaggaggagaacctgagcatgcaccagatgctggaccagaccctgctggagctgaacaacatgtag

SEQ ID NO: 26762 - DNA, 855 bp, Artificial Sequence
  derived and/or modified sequence
atggatgcgatcaaaaagaagatgcaaatgctcaagttggacaaggaaaatgctctggacagagctgagcaagcagaggcggacaaaaaggctgccgaagatcgatccaaacaattagaggacgaactcgtgtcactccaaaaaaaacttaaaggaaccgaagatgagttggataagtacagcgaggcacttaaagatgcccaggaaaagctggagctggccgaaaaaaaagctacggacgcagaggctgacgtagcaagccttaatcgcagaatccaacttgtcgaggaggaactggacagggctcaggaacggctagccaccgccttgcagaagctcgaagaggccgagaaggcagccgacgaatcggagaggggtatgaaggtgatcgaatcccgtgctcagaaagacgaagagaagatggagatccaggagatccagctgaaagaagcaaagcacatcgccgaagatgcggatcgaaaatatgaggaggtagctcgcaaactggtgattatcgaaagtgatttggagagagctgaggagagagcagagctatcggagggtaaatgtgctgagttagaagaggaactaaagaccgtcaccaataacttgaaaagtctcgaggcacaggctgagaagtactcccagaaggaagaccgatacgaggaggaaatcaaggtgctgtcagacaagcttaaggaggctgagaccagagcagaattcgccgagcggtccgttacgaagctcgaaaagtccattgatgacctggaagagaaggttgctcacgctaaagaggaaaacctgagtatgcatcagatgctggaccagactctgctcgaacttaataacatgtag

SEQ ID NO: 26763 - DNA, 855 bp, Artificial Sequence
  derived and/or modified sequence
atggatgccatcaagaagaagatgcagatgctgaagctggacaaggaaaatgccctggacagagctgagcaggccgaggccgacaagaaggccgcagaagatagaagcaagcagctggaggatgagctggtgtccctgcagaagaagctgaagggcacagaagatgagctggacaagtacagcgaggccctgaaggatgcccaggagaagctggagctggccgagaagaaggccacagatgctgaggctgatgtggccagcctgaacagacgcatccagctggtggaggaggagctggaccgggcccaggagcggctggccacagccctgcagaagctggaggaggccgagaaggccgcagatgaaagtgagcggggcatgaaggtgattgagagccgggcccagaaggatgaggagaagatggagatccaggagatccagctgaaggaggccaagcacatcgccgaggatgctgacagaaaatatgaggaggtggccaggaagctggtgatcatcgagagtgacctggagagagctgaggagagagctgagctgtctgagggcaaatgtgccgagctggaggaggagctgaagacagtgaccaacaacctgaagagcctggaggcccaggccgagaagtacagccagaaggaggacagatatgaggaggagatcaaggtgctgagtgacaagctgaaggaggccgagaccagggctgagtttgctgagaggtctgtgaccaagctggagaagagcattgatgacctggaggagaaggtggcccacgccaaggaggagaacctgtccatgcaccagatgctggaccagaccctgctggagctgaacaacatgtag

SEQ ID NO: 26764 - DNA, 855 bp, Artificial Sequence
  derived and/or modified sequence
atggacgccatcaagaagaagatgcagatgctgaagctggacaaggaaaacgccttagaccgcgccgagcaagccgaggccgataaaaaagctgccgaagatcggtcaaagcagctggaagatgaacttgtcagtttacagaaaaagctaaagggaactgaggatgagctcgacaaatattcggaggccctaaaggatgctcaggaaaaactcgagcttgccgagaagaaagcgaccgacgctgaggccgacgtggcctctctgaacaggaggattcaattggtcgaagaagagctggatcgggctcaggagaggctggcaacggctcttcagaaattggaagaagccgaaaaagctgctgatgagtcggaaagagggatgaaggtcattgagtcaagggcccagaaagatgaagagaagatggagatccaggaaatccagctgaaggaggctaagcatatcgccgaagacgcggaccggaagtatgaagaggtggctcgtaaactggtgatcattgagagcgatctggaaagagctgaggaacgcgcagagctctccgagggcaaatgcgcggaactcgaagaggagctgaaaactgtaaccaacaatctaaagtctctggaagcccaggctgaaaaatatagtcagaaagaagacaggtacgaagaggagattaaggtgctgtcagacaagttgaaggaggcagaaacgagggccgagttcgctgagaggagtgtgacgaaactggagaagagtatcgatgatttggaggaaaaggttgcccacgccaaggaagagaacttaagtatgcatcagatgttggatcagaccctgcttgagcttaataacatgtag

SEQ ID NO: 26765 - DNA, 855 bp, Artificial Sequence
  derived and/or modified sequence
atggacgcaatcaaaaagaaaatgcagatgttaaagttggacaaggagaacgctttagacagggccgaacaagccgaggccgacaaaaaggccgcagaggataggagcaaacagctggaagatgaactcgtgtctctgcagaagaagctcaaaggcacagaagacgagctagataagtatagtgaagcactgaaggacgcccaggagaagcttgagctggccgaaaaaaaagccaccgacgccgaagcagacgtagcatcacttaatcggagaatccagctggttgaagaggagttggacagggcacaggagagattggcaactgccttgcaaaaacttgaggaggccgagaaggccgctgatgagagcgagcgcggaatgaaggtgatagagtccagagcccaaaaggatgaggaaaaaatggaaattcaagagattcagctgaaggaggctaagcatattgcggaggatgctgacaggaaatatgaggaggtggccagaaagctggtcatcatcgaatctgatctggagcgcgctgaggagcgcgcagaactgagcgaggggaaatgcgcggagctcgaggaagagttgaaaaccgtgacaaataacctgaaatctctagaagctcaggctgagaaatactcccagaaggaagacagatatgaggaagagatcaaggtgttgagcgacaagctgaaagaggcagagactagggcagaattcgcagaaaggagtgttacaaaactcgaaaagtcaattgacgaccttgaggaaaaggtggcccacgcaaaggaagagaacctgtctatgcaccaaatgctcgatcagaccctcttagagctgaacaacatgtag

SEQ ID NO: 26766 - DNA, 977 bp, Artificial Sequence
  derived and/or modified sequence
cgctcctccgcccgaccgcgcgctcgccccgccgctcctgctgcagccccagggcccctcgccgccgccaccatggacgccatcaagaagaagatgcagatgctgaagctcgacaaggagaacgccttggatcgagctgagcaggcggaggccgacaagaaggcggcggaagacaggagcaagcagctggaagatgagctggtgtcactgcaaaagaaactcaagggcaccgaagatgaactggacaaatactctgaggctctcaaagatgcccaggagaagctggagctggcagagaaaaaggccaccgatgctgaagccgacgtagcttctctgaacagacgcatccagctggttgaggaagagttggatcgtgcccaggagcgtctggcaacagctttgcagaagctggaggaagctgagaaggcagcagatgagagtgagagaggcatgaaagtcattgagagtcgagcccaaaaagatgaagaaaaaatggaaattcaggagatccaactgaaagaggccaagcacattgctgaagatgccgaccgcaaatatgaagaggtggcccgtaagctggtcatcattgagagcgacctggaacgtgcagaggagcgggctgagctctcagaaggcaaatgtgccgagcttgaagaagaattgaaaactgtgacgaacaacttgaagtcactggaggctcaggctgagaagtactcgcagaaggaagacagatatgaggaagagatcaaggtcctttccgacaagctgaaggaggctgagactcgggctgagtttgcggagaggtcagtaactaaattggagaaaagcattgatgacttagaagagaaagtggctcatgccaaagaagaaaaccttagtatgcatcagatgctggatcagactttactggagttaaacaacatgtgaaaacctccttagctgcgaccacattctttcgttttgttttgttttgtttt

SEQ ID NO: 26767 - protein, 284 aa, Artificial Sequence
  derived and/or modified sequence
MDAIKKKMQMLKLDKENALDRAEQAEADKKAAEDRSKQLEDELVSLQKKLKGTEDELDKYSEALKDAQEKLELAEKKATDAEADVASLNRRIQLVEEELDRAQERLATALQKLEEAEKAADESERGMKVIESRAQKDEEKMEIQEIQLKEAKHIAEDADRKYEEVARKLVIIESDLERAEERAELSEGKCAELEEELKTVTNNLKSLEAQAEKYSQKEDRYEEEIKVLSDKLKEAETRAEFAERSVTKLEKSIDDLEDELYAQKLKYKAISEELDHALNDMTSI

SEQ ID NO: 26768 - protein, 265 aa, Artificial Sequence
  derived and/or modified sequence
  misc_feature (1)..(1): Xaa can be any naturally occurring amino acid
XRAEQAEADKKAAEDRSKQLEDELVSLQKKLKGTEDELDKYSEALKDAQEKLELAEKKATDAEADVASLNRRIQLVEEELDRAQERLATALQKLEEAEKAADESERGMKVIESRAQKDEEKMEIQEIQLKEAKHIAEDADRKYEEVARKLVIIESDLERAEERAELSEGKCAELEEELKTVTNNLKSLEAQAEKYSQKEDRYEEEIKVLSDKLKEAETRAEFAERSVTKLEKSIDDLEDELYAQKLKYKAISEELDHALNDMTSM

SEQ ID NO: 26769 - DNA, 855 bp, Artificial Sequence
  derived and/or modified sequence
atggacgccatcaagaagaagatgcagatgctgaagctggacaaggagaacgccctggacagagccgagcaggccgaggccgacaagaaggccgccgaggacagaagcaagcagctggaggacgagctggtgagcctgcagaagaagctgaagggcaccgaggacgagctggacaagtacagcgaggccctgaaggacgcccaggagaagctggagctggccgagaagaaggccaccgacgccgaggccgacgtggccagcctgaacagaagaatccagctggtggaggaggagctggacagagcccaggagagactggccaccgccctgcagaagctggaggaggccgagaaggccgccgacgagagcgagagaggcatgaaggtgatcgagagcagagcccagaaggacgaggagaagatggagatccaggagatccagctgaaggaggccaagcacatcgccgaggacgccgacagaaagtacgaggaggtggccagaaagctggtgatcatcgagagcgacctggagagagccgaggagagagccgagctgagcgagggcaagtgcgccgagctggaggaggagctgaagaccgtgaccaacaacctgaagagcctggaggcccaggccgagaagtacagccagaaggaggacagatacgaggaggagatcaaggtgctgagcgacaagctgaaggaggccgagaccagagccgagttcgccgagagaagcgtgaccaagctggagaagagcatcgacgacctggaggacgagctgtacgcccagaagctgaagtacaaggccatcagcgaggagctggaccacgccctgaacgacatgaccagcatctag

SEQ ID NO: 26770 - DNA, 798 bp, Artificial Sequence
  derived and/or modified sequence
tgaagagccgagcaggccgaggccgacaagaaggccgccgaggacagaagcaagcagctggaggacgagctggtgagcctgcagaagaagctgaagggcaccgaggacgagctggacaagtacagcgaggccctgaaggacgcccaggagaagctggagctggccgagaagaaggccaccgacgccgaggccgacgtggccagcctgaacagaagaatccagctggtggaggaggagctggacagagcccaggagagactggccaccgccctgcagaagctggaggaggccgagaaggccgccgacgagagcgagagaggcatgaaggtgatcgagagcagagcccagaaggacgaggagaagatggagatccaggagatccagctgaaggaggccaagcacatcgccgaggacgccgacagaaagtacgaggaggtggccagaaagctggtgatcatcgagagcgacctggagagagccgaggagagagccgagctgagcgagggcaagtgcgccgagctggaggaggagctgaagaccgtgaccaacaacctgaagagcctggaggcccaggccgagaagtacagccagaaggaggacagatacgaggaggagatcaaggtgctgagcgacaagctgaaggaggccgagaccagagccgagttcgccgagagaagcgtgaccaagctggagaagagcatcgacgacctggaggacgagctgtacgcccagaagctgaagtacaaggccatcagcgaggagctggaccacgccctgaacgacatgaccagcatgtag

SEQ ID NO: 26771 - DNA, 855 bp, Artificial Sequence
  derived and/or modified sequence
atggatgcaattaagaaaaaaatgcagatgctgaagcttgataaagaaaatgcactagatcgcgcagaacaggccgaagcagataagaaagccgcagaggatcggtccaagcagctggaggacgaacttgtgtccctccaaaagaaactgaagggaacggaagacgagctagacaagtactccgaagctctcaaggacgctcaggaaaagcttgaactcgccgagaaaaaggccaccgatgccgaggcggacgttgcctcattaaaccggagaatacagctggtggaggaagaactagaccgggcccaggaacgactggctaccgctctgcagaagctggaggaagccgaaaaagcagctgacgaaagtgagaggggcatgaaggtaatagagtcaagagcccagaaggacgaggagaaaatggagattcaggagatccagctcaaggaggctaagcatatagctgaagatgccgaccgaaaatatgaggaagtcgcccggaagctggtgattattgaatcggaccttgagagggctgaggagcgggctgagctgtcagaagggaaatgtgctgaactggaagaggaactgaagactgtaacaaataacctgaaaagcttggaagcccaggccgaaaagtactcccagaaggaagatagatacgaagaagagattaaggtgttgtctgacaagcttaaagaggccgagacacgcgctgagtttgctgagaggagtgtcaccaaactagagaaaagcatcgacgatctggaagacgagctgtatgctcagaaactaaaatataaggctattagcgaggagctcgaccatgctttaaacgatatgaccagcatttag

SEQ ID NO: 26772 - DNA, 798 bp, Artificial Sequence
  derived and/or modified sequence
tgacgggctgagcaggcagaagcggacaagaaagcagctgaggatcgaagcaagcaactggaagacgaactggtaagcctgcagaagaagctgaagggtaccgaggacgaactagacaagtatagcgaggccctgaaggacgcccaggagaaactcgagctcgctgagaagaaagctactgatgctgaagctgacgttgcttctctgaacagacgaattcagttagtagaagaagagttggacagagcacaggaaagactcgctactgcactccagaaactggaggaagccgagaaagcagccgatgaaagcgagagaggcatgaaggtcattgagagtcgcgcccagaaagatgaagaaaagatggagatccaggagatccagctgaaagaggccaagcacattgcggaggatgctgacaggaaatacgaggaggtagcacggaagttagtgatcatagaatcagatttggagagagctgaggaacgggcagaactgtctgaaggaaaatgcgctgaactcgaagaggagcttaagactgtgactaacaacctgaagagccttgaagcccaggccgagaagtactcacagaaggaggatcgatatgaagaagagatcaaagttctttcagacaagctgaaagaagcagaaacgagggctgagttcgccgaacgatccgtgactaaactggagaagtctattgacgacctggaagatgagctgtatgcccaaaagctgaagtacaaagcgatatccgaggaactggatcacgccctgaatgacatgacctcaatgtag

SEQ ID NO: 26773 - DNA, 855 bp, Artificial Sequence
  derived and/or modified sequence
atggatgccatcaagaagaagatgcagatgctgaagctggacaaggaaaatgccctggacagagctgagcaggccgaggccgacaagaaggccgcagaagatagaagcaagcagctggaggatgagctggtgtccctgcagaagaagctgaagggcacagaagatgagctggacaagtacagcgaggccctgaaggatgcccaggagaagctggagctggccgagaagaaggccacagatgctgaggctgatgtggccagcctgaacagacgcatccagctggtggaggaggagctggaccgggcccaggagcggctggccacagccctgcagaagctggaggaggccgagaaggccgcagatgaaagtgagcggggcatgaaggtgattgagagccgggcccagaaggatgaggagaagatggagatccaggagatccagctgaaggaggccaagcacatcgccgaggatgctgacagaaaatatgaggaggtggccaggaagctggtgatcatcgagagtgacctggagagagctgaggagagagctgagctgtctgagggcaaatgtgccgagctggaggaggagctgaagacagtgaccaacaacctgaagagcctggaggcccaggccgagaagtacagccagaaggaggacagatatgaggaggagatcaaggtgctgagtgacaagctgaaggaggccgagaccagggctgagtttgctgagaggtctgtgaccaagctggagaagagcattgatgacctggaggatgagctgtatgcccagaagctgaagtacaaggccatcagcgaggagctggaccacgccctgaatgacatgaccagcatctag

SEQ ID NO: 26774 - DNA, 798 bp, Artificial Sequence
  derived and/or modified sequence
tgaagagctgagcaggccgaggccgacaagaaggctgctgaggacaggagcaagcagctggaggatgagctggtgtccctgcagaagaagctgaagggcacagaagatgagctggacaagtacagcgaggccctgaaggatgcccaggagaagctggagctggccgagaagaaggccacagatgctgaggctgatgtggccagcctgaacagacgcatccagctggtggaggaggagctggaccgggcccaggagcggctggccacagccctgcagaagctggaggaggccgagaaggctgctgatgagagcgagcggggcatgaaggtgattgagagccgggcccagaaggatgaggagaagatggagatccaggagatccagctgaaggaggccaagcacatcgcagaagatgctgacagaaaatatgaggaggtggccaggaagctggtgatcattgaaagtgacctggagcgggcagaggagcgggcagagctgtctgagggcaaatgtgccgagctggaggaggagctgaagacagtgaccaacaacctgaagagcctggaggcccaggccgagaagtacagccagaaggaggacagatatgaggaggagatcaaggtgctgagtgacaagctgaaggaggccgagaccagggctgagtttgctgagaggtctgtgaccaagctggagaagagcattgatgacctggaggatgagctgtatgcccagaagctgaagtacaaggccatcagcgaggagctggaccacgccctgaatgacatgacctccatgtag

SEQ ID NO: 26775 - DNA, 855 bp, Artificial Sequence
  derived and/or modified sequence
atggacgccatcaagaagaagatgcagatgctgaagctggacaaggagaacgccctcgatcgggcggagcaggctgaggctgataagaaggcagccgaggatcgaagcaaacagctggaggacgaactggtctcacttcagaagaaactgaagggcacagaggatgagcttgacaagtacagtgaggcgctgaaggacgctcaggagaagcttgaactcgccgaaaaaaaggcgactgacgctgaggccgatgttgctagcctgaatcggaggattcagcttgtcgaagaagaactcgaccgcgcccaggagcgtttagctacagcacttcaaaagttggaagaagccgaaaaagctgcggatgaatccgaacgcggtatgaaggtgatcgagagccgggcgcaaaaggacgaggaaaaaatggagatccaggagatccaactcaaggaggctaaacacattgctgaagatgccgatcggaagtacgaagaagtggctcgcaaactcgtgatcatcgagtctgacctggagcgcgcggaagagcgggccgagctcagcgaaggaaaatgcgccgaactggaggaagagttgaagaccgtcaccaataacctgaagtccctcgaggctcaggcggaaaagtatagtcagaaagaagacaggtacgaggaggagattaaggtccttagcgataagttgaaggaggccgagacacgcgcggaattcgccgagcggagcgtaactaaattggagaaatctatcgacgacttagaagacgaactgtatgcccagaaacttaagtataaggcgatcagcgaggaactcgaccatgcgctgaatgacatgacctctatttag

SEQ ID NO: 26776 - DNA, 798 bp, Artificial Sequence
  derived and/or modified sequence
tgacgggccgagcaggccgaggccgacaagaaggccgccgaggaccggagcaagcagctggaggatgagctggtttccctgcagaaaaagctcaaagggactgaggatgagctggacaagtattctgaggccctcaaagacgcacaggaaaagctcgaactggcagaaaagaaagctacagacgctgaggcggatgtggcgagtctgaaccggcgtatccagctcgtggaagaagagttagatagggcccaggagcgcctggcaacagcactgcaaaaactcgaagaagcagaaaaggccgcggacgaaagcgagaggggaatgaaggtgatcgaatcacgagcccagaaagacgaggaaaagatggaaatccaggagatccaactcaaagaggcaaagcacatagcagaagacgccgacaggaaatatgaagaggttgctagaaagcttgtcattatcgagtcggaccttgagcgtgccgaagagcgagcagagctgtccgaaggtaagtgtgctgaactggaggaagagctcaagaccgttacaaacaatcttaagtcattggaagcacaggccgaaaaatattctcagaaggaagacaggtatgaggaagagataaaggtgttatcggataaattgaaggaggctgagacgcgggcagagtttgctgagagatctgtgaccaaactagagaagagtatagatgatctggaagatgagctgtacgcacaaaaactgaagtacaaggcgataagcgaagaactagaccatgctttaaatgacatgacgtccatgtag

SEQ ID NO: 26777 - DNA, 855 bp, Artificial Sequence
  derived and/or modified sequence
atggacgccataaaaaaaaaaatgcagatgcttaagttggataaggaaaacgcactggatagagctgaacaagccgaggccgacaaaaaagcggctgaagatagaagcaaacagctggaggacgaactggtctccctgcagaagaaactcaagggaacggaagacgagctggacaaatattcagaggctctgaaggatgcccaggaaaagctggaattggccgagaagaaagccacggatgcagaggccgacgtggcatcactgaaccggcgtattcagctagtggaagaagaactggacagggcccaagaacgactagccaccgccttgcagaaattggaggaggctgaaaaggccgcagacgagtccgagagaggaatgaaggtgattgaatctcgggctcagaaggatgaagaaaagatggagatacaggaaatccagctcaaggaggccaagcatatcgcagaagacgctgaccggaagtacgaagaggtggcgcgaaagctagttataatagagtctgacctggagcgggctgaggagcgcgctgagttatccgagggaaagtgcgccgagttggaggaagaactaaagacagtaacaaataaccttaagtcactggaggcccaggccgaaaaatacagccagaaagaggatcgatacgaagaagagataaaggtgctgtccgataaactcaaagaggcggagacacgtgcagaatttgcagaaaggagcgttacgaagttagaaaaatctatagacgaccttgaagatgaactctatgcgcagaaactcaaatataaagctatttcagaagaactcgatcacgccctaaacgatatgacatccatttag

SEQ ID NO: 26778 - DNA, 798 bp, Artificial Sequence
  derived and/or modified sequence
tgacgtgcagagcaagctgaggccgataagaaggcagctgaggacaggagcaagcagctagaggacgagcttgtctcacttcagaagaaactgaagggcaccgaagacgaattggacaaatacagtgaggcactcaaggacgctcaggagaagctcgagttggccgaaaaaaaggcaaccgatgccgaggcagatgtcgccagcctgaatagacgtatccagctggtggaggaagaactcgaccgggcacaggaacggttggcaactgcccttcagaagctggaagaagccgaaaaagccgctgacgaaagcgaacgaggaatgaaggtaatcgaatccagagcccagaaagacgaagagaagatggaaattcaagaaattcagttaaaggaagccaagcatatcgcagaggatgccgaccggaaatatgaggaagtggcacgcaaactggtgatcatagaatctgacctggaaagggctgaagagcgcgctgagctgtccgaaggcaagtgcgctgaactggaagaagagctcaaaactgtgaccaacaatttgaagagtctggaggcgcaggctgaaaaatacagtcagaaagaggaccggtacgaagaggaaatcaaagtactcagcgataagttgaaggaggctgaaacgcgtgcagagttcgctgaacgcagcgtgactaagctggaaaagagtatcgacgatttggaggacgagctgtatgctcagaaactcaaatacaaggccatctctgaagagctggatcacgccctgaatgacatgaccagcatgtag

SEQ ID NO: 26779 - DNA, 1049 bp, Artificial Sequence
  derived and/or modified sequence
cgcactcccgctcctccgcccgaccgcgcgctcgccccgccgctcctgctgcagccccagggcccctcgccgccgccaccatggacgccatcaagaagaagatgcagatgctgaagctcgacaaggagaacgccttggatcgagctgagcaggcggaggccgacaagaaggcggcggaagacaggagcaagcagctggaagatgagctggtgtcactgcaaaagaaactcaagggcaccgaagatgaactggacaaatactctgaggctctcaaagatgcccaggagaagctggagctggcagagaaaaaggccaccgatgctgaagccgacgtagcttctctgaacagacgcatccagctggttgaggaagagttggatcgtgcccaggagcgtctggcaacagctttgcagaagctggaggaagctgagaaggcagcagatgagagtgagagaggcatgaaagtcattgagagtcgagcccaaaaagatgaagaaaaaatggaaattcaggagatccaactgaaagaggccaagcacattgctgaagatgccgaccgcaaatatgaagaggtggcccgtaagctggtcatcattgagagcgacctggaacgtgcagaggagcgggctgagctctcagaaggcaaatgtgccgagcttgaagaagaattgaaaactgtgacgaacaacttgaagtcactggaggctcaggctgagaagtactcgcagaaggaagacagatatgaggaagagatcaaggtcctttccgacaagctgaaggaggctgagactcgggctgagtttgcggagaggtcagtaactaaattggagaaaagcattgatgacttagaagacgagctgtacgctcagaaactgaagtacaaagccatcagcgaggagctggaccacgctctcaacgatatgacttccatataagtttctttgcttcacttctcccaagactccctcgtcgagctggatgtcccacctctctgagctctgcatttgtctattctccagctgaccctggttctctctcttagcatcctg

SEQ ID NO: 26780 - DNA, 1039 bp, Artificial Sequence
  derived and/or modified sequence
atcgagctgagcaggcggaggccgacaagaaggcggcggaagacaggagcaagcagctggaagatgagctggtgtcactgcaaaagaaactcaagggcaccgaagatgaactggacaaatactctgaggctctcaaagatgcccaggagaagctggagctggcagagaaaaaggccaccgatgctgaagccgacgtagcttctctgaacagacgcatccagctggttgaggaagagttggatcgtgcccaggagcgtctggcaacagctttgcagaagctggaggaagctgagaaggcagcagatgagagtgagagaggcatgaaagtcattgagagtcgagcccaaaaagatgaagaaaaaatggaaattcaggagatccaactgaaagaggccaagcacattgctgaagatgccgaccgcaaatatgaagaggtggcccgtaagctggtcatcattgagagcgacctggaacgtgcagaggagcgggctgagctctcagaaggcaaatgtgccgagcttgaagaagaattgaaaactgtgacgaacaacttgaagtcactggaggctcaggctgagaagtactcgcagaaggaagacagatatgaggaagagatcaaggtcctttccgacaagctgaaggaggctgagactcgggctgagtttgcggagaggtcagtaactaaattggagaaaagcattgatgacttagaagacgagctgtacgctcagaaactgaagtacaaagccatcagcgaggagctggaccacgctctcaacgatatgacttccatgtaaacgttcatccactctgcctgcttacaccctgccctcatgctaatataagtttctttgcttcacttctcccaagactccctcgtcgagctggatgtcccacctctctgagctctgcatttgtctattctccagctgaccctggttctctctcttagcatcctgccttagagccaggcacacactgtgctttctattgtacagaagctcttcgtttcagtgtcaaataaacactgtgtaagcta

SEQ ID NO: 26781 - protein, 284 aa, Artificial Sequence
  derived and/or modified sequence
MDAIKKKMQMLKLDKENALDRAEQAEADKKAAEDRSKQLEDELVSLQKKLKGTEDELDKYSEALKDAQEKLELAEKKATDAEADVASLNRRIQLVEEELDRAQERLATALQKLEEAEKAADESERGMKVIESRAQKDEEKMEIQEIQLKEAKHIAEDADRKYEEVARKLVIIESDLERAEERAELSEGQVRQLEEQLRIMDQTLKALMAAEDKYSQKEDRYEEEIKVLSDKLKEAETRAEFAERSVTKLEKSIDDLEEKVAHAKEENLSMHQMLDQTLLELNNM

SEQ ID NO: 26782 - DNA, 855 bp, Artificial Sequence
  derived and/or modified sequence
atggacgccatcaagaagaagatgcagatgctgaagctggacaaggagaacgccctggacagagccgagcaggccgaggccgacaagaaggccgccgaggacagaagcaagcagctggaggacgagctggtgagcctgcagaagaagctgaagggcaccgaggacgagctggacaagtacagcgaggccctgaaggacgcccaggagaagctggagctggccgagaagaaggccaccgacgccgaggccgacgtggccagcctgaacagaagaatccagctggtggaggaggagctggacagagcccaggagagactggccaccgccctgcagaagctggaggaggccgagaaggccgccgacgagagcgagagaggcatgaaggtgatcgagagcagagcccagaaggacgaggagaagatggagatccaggagatccagctgaaggaggccaagcacatcgccgaggacgccgacagaaagtacgaggaggtggccagaaagctggtgatcatcgagagcgacctggagagagccgaggagagagccgagctgagcgagggccaggtgagacagctggaggagcagctgagaatcatggaccagaccctgaaggccctgatggccgccgaggacaagtacagccagaaggaggacagatacgaggaggagatcaaggtgctgagcgacaagctgaaggaggccgagaccagagccgagttcgccgagagaagcgtgaccaagctggagaagagcatcgacgacctggaggagaaggtggcccacgccaaggaggagaacctgagcatgcaccagatgctggaccagaccctgctggagctgaacaacatgtag

SEQ ID NO: 26783 - DNA, 855 bp, Artificial Sequence
  derived and/or modified sequence
atggacgctattaagaaaaaaatgcaaatgctgaagctggataaggaaaatgccctggaccgagctgagcaagccgaggcagacaagaaggccgccgaggatcggtcaaagcaactggaagacgaactggtgagtctgcagaagaaactcaaggggactgaggatgaacttgacaaatattccgaggctctcaaagatgctcaggaaaaactcgaacttgccgaaaaaaaagccaccgatgccgaggctgacgttgcgagcctgaaccgtcgaatccagctggtggaggaagagctggaccgggctcaagagaggctcgcaactgctctgcaaaaactcgaggaagccgagaaagctgctgacgagtccgaaagaggaatgaaagtgatcgaatctagggcgcagaaggatgaggagaaaatggagatccaggagatccagctgaaggaggcaaagcatatagccgaagacgccgatcgcaaatatgaggaagtggcccgcaaactagtgataatcgaaagtgatttggaacgcgccgaagaacgggctgaactctctgagggacaggtgaggcagctggaggaacagctgcgaattatggaccagaccttgaaagctttgatggccgctgaagacaaatatagccaaaaggaggaccgctacgaagaggaaatcaaagtgctgtctgacaaactcaaggaggcagaaactcgcgcggaattcgcagagcggtccgttaccaaactggaaaaaagcatcgatgacctcgaagagaaggtcgcacatgccaaggaagaaaatttatccatgcaccaaatgctggatcagaccttgctcgagcttaacaatatgtag

SEQ ID NO: 26784 - DNA, 855 bp, Artificial Sequence
  derived and/or modified sequence
atggatgccatcaagaagaagatgcagatgctgaagctggacaaggaaaatgccctggacagagctgagcaggccgaggccgacaagaaggccgcagaagatagaagcaagcagctggaggatgagctggtgtccctgcagaagaagctgaagggcacagaagatgagctggacaagtacagcgaggccctgaaggatgcccaggagaagctggagctggccgagaagaaggccacagatgctgaggctgatgtggccagcctgaacagacgcatccagctggtggaggaggagctggaccgggcccaggagcggctggccacagccctgcagaagctggaggaggccgagaaggccgcagatgaaagtgagcggggcatgaaggtgattgagagccgggcccagaaggatgaggagaagatggagatccaggagatccagctgaaggaggccaagcacatcgccgaggatgctgacagaaaatatgaggaggtggccaggaagctggtgatcatcgagagtgacctggagagagctgaggagagagctgagctgtctgagggccaggtgcggcagctggaggagcagctgcgcatcatggaccagaccctgaaggccctgatggctgctgaggacaagtacagccagaaggaggacagatatgaggaggagatcaaggtgctgagtgacaagctgaaggaggccgagaccagggctgagtttgctgagaggtctgtgaccaagctggagaagagcattgatgacctggaggagaaggtggcccacgccaaggaggagaacctgtccatgcaccagatgctggaccagaccctgctggagctgaacaacatgtag

SEQ ID NO: 26785 - DNA, 855 bp, Artificial Sequence
  derived and/or modified sequence
atggacgccatcaagaagaagatgcagatgctgaagctggacaaggagaatgctctcgatcgagcagagcaggccgaggccgataagaaggccgcagaggatagatctaagcagctggaggatgagcttgtgagtctccagaagaaattaaagggaaccgaggatgaactcgataagtactcagaagcgcttaaagatgcccaggaaaagttagagctggcagaaaagaaagcaacggatgccgaagcagatgtggcatccctcaaccgaagaatacagctcgttgaggaggaactggatcgtgcacaagagagactggccacagcgctgcaaaagctcgaagaggccgagaaagccgccgacgagagtgaacgaggcatgaaagtgattgagtctcgggctcagaaagacgaagagaagatggagatccaggaaatccaactcaaagaggctaaacacatcgcagaggacgccgatcgtaaatatgaggaggtcgctaggaaactggtcatcatcgaatcagacctggaacgcgcagaggagagagcggaactttccgaaggtcaagttcggcagttagaagagcagctcaggatcatggaccagaccctcaaggcgctgatggcggcagaggacaaatactcccagaaggaggatagatacgaagaggaaatcaaggtcctttccgacaagttaaaggaggccgagacccgcgccgaatttgctgaaaggtccgttacaaagttggagaagtccattgacgacctggaggagaaggtcgcccatgcaaaggaggaaaacttgagtatgcaccaaatgctggatcagaccttactggaattaaacaacatgtag

SEQ ID NO: 26786 - DNA, 855 bp, Artificial Sequence
  derived and/or modified sequence
atggatgccattaaaaagaagatgcagatgctgaagctcgacaaggaaaacgccctggacagggcagaacaggctgaagcagacaaaaaggccgcagaagataggtccaagcagctcgaggatgaactcgtgagtctacagaagaagttgaagggtaccgaagacgaactcgacaaatattccgaggccttgaaagacgctcaggaaaagctggagcttgcagagaagaaggcgacagacgcggaggctgacgtggcatctcttaacagacgaattcagctagttgaggaggagcttgaccgggcacaggagcgactggccaccgccctgcagaagctggaggaggctgaaaaggccgctgacgagtcagaaagggggatgaaagtgattgaaagtcgggctcagaaggacgaggaaaaaatggaaatacaggagatccagctcaaggaagcaaaacatattgccgaggacgctgaccgcaaatacgaggaagttgcccgaaaacttgttatcattgagtctgacttagaaagagcagaggaaagggcagagctttctgaaggccaggtgagacagctggaagagcagctgcgtataatggaccagaccctgaaagcactgatggccgcagaagacaaatacagccaaaaagaggaccgatacgaggaggaaatcaaggtactctccgacaagctgaaagaggcggagactagggcggaattcgccgagagaagtgtgaccaaactagagaagtccatagatgatctggaagagaaagtggctcatgccaaagaagaaaatttatctatgcaccagatgcttgaccagacactgcttgaactcaacaatatgtag

SEQ ID NO: 26787 - DNA, 1717 bp, Artificial Sequence
  derived and/or modified sequence
tcttgaggaatgcggtcgcccccttgggaaagtacatatctgggagaagcaggcggctccgcgctcgcactcccgctcctccgcccgaccgcgcgctcgccccgccgctcctgctgcagccccagggcccctcgccgccgccaccatggacgccatcaagaagaagatgcagatgctgaagctcgacaaggagaacgccttggatcgagctgagcaggcggaggccgacaagaaggcggcggaagacaggagcaagcagctggaagatgagctggtgtcactgcaaaagaaactcaagggcaccgaagatgaactggacaaatactctgaggctctcaaagatgcccaggagaagctggagctggcagagaaaaaggccaccgatgctgaagccgacgtagcttctctgaacagacgcatccagctggttgaggaagagttggatcgtgcccaggagcgtctggcaacagctttgcagaagctggaggaagctgagaaggcagcagatgagagtgagagaggcatgaaagtcattgagagtcgagcccaaaaagatgaagaaaaaatggaaattcaggagatccaactgaaagaggccaagcacattgctgaagatgccgaccgcaaatatgaagaggtggcccgtaagctggtcatcattgagagcgacctggaacgtgcagaggagcgggctgagctctcagaaggccaagtccgacagctggaagaacaattaagaataatggatcagaccttgaaagcattaatggctgcagaggataagtactcgcagaaggaagacagatatgaggaagagatcaaggtcctttccgacaagctgaaggaggctgagactcgggctgagtttgcggagaggtcagtaactaaattggagaaaagcattgatgacttagaagagaaagtggctcatgccaaagaagaaaaccttagtatgcatcagatgctggatcagactttactggagttaaacaacatgtgaaaacctccttagctgcgaccacattctttcgttttgttttgttttgtttttaaacacctgcttaccccttaaatgcaatttatttacttttaccactgtcacagaaacatccacaagataccagctaggtcagggggtggggaaaacacatacaaaaaggcaagcccatgtcagggcgatcctggttcaaatgtgccatttcccgggttgatgctgccacactttgtagagagtttagcaacacagtgtgcttagtcagcgtaggaatcctcactaaagcagaagaagttccattcaaagtgccaatgatagagtcaacaggaaggttaatgttggaaacacaatcaggtgtggattggtgctactttgaacaaaaggtccccctgtggtcttttgttcaacattgtacaatgtagaactctgtccaacactaatttattttgtcttgagttttactacaagatgagactatggatcccgcatgcctgaattcactaaagccaagggtctgtaagccacgctgctcttccgagacttccattcctttctgattggcacacgtgcagctcatgacaatctgtaggataacaatcagtgtggatttccactcttttcagtccttcatgttaaagatttagacaccacatacaactggtaaaggacgttttcttgagagttttaactatatgtaaacattgtataatgatatggaataaa

SEQ ID NO: 26788 - protein, 284 aa, Artificial Sequence
  derived and/or modified sequence
MDAIKKKMQMLKLDKENALDRAEQAEADKKAAEDRSKQLEEDIAAKEKLLRVSEDERDRVLEELHKAEDSLLAAEEAAAKAEADVASLNRRIQLVEEELDRAQERLATALQKLEEAEKAADESERGMKVIESRAQKDEEKMEIQEIQLKEAKHIAEDADRKYEEVARKLVIIESDLERAEERAELSEGKCAELEEELKTVTNNLKSLEAQAEKYSQKEDRYEEEIKVLSDKLKEAETRAEFAERSVTKLEKSIDDLEEKVAHAKEENLSMHQMLDQTLLELNNM

SEQ ID NO: 26789 - DNA, 855 bp, Artificial Sequence
  derived and/or modified sequence
atggacgccatcaagaagaagatgcagatgctgaagctggacaaggagaacgccctggacagagccgagcaggccgaggccgacaagaaggccgccgaggacagaagcaagcagctggaggaggacatcgccgccaaggagaagctgctgagagtgagcgaggacgagagagacagagtgctggaggagctgcacaaggccgaggacagcctgctggccgccgaggaggccgccgccaaggccgaggccgacgtggccagcctgaacagaagaatccagctggtggaggaggagctggacagagcccaggagagactggccaccgccctgcagaagctggaggaggccgagaaggccgccgacgagagcgagagaggcatgaaggtgatcgagagcagagcccagaaggacgaggagaagatggagatccaggagatccagctgaaggaggccaagcacatcgccgaggacgccgacagaaagtacgaggaggtggccagaaagctggtgatcatcgagagcgacctggagagagccgaggagagagccgagctgagcgagggcaagtgcgccgagctggaggaggagctgaagaccgtgaccaacaacctgaagagcctggaggcccaggccgagaagtacagccagaaggaggacagatacgaggaggagatcaaggtgctgagcgacaagctgaaggaggccgagaccagagccgagttcgccgagagaagcgtgaccaagctggagaagagcatcgacgacctggaggagaaggtggcccacgccaaggaggagaacctgagcatgcaccagatgctggaccagaccctgctggagctgaacaacatgtag

SEQ ID NO: 26790 - DNA, 855 bp, Artificial Sequence
  derived and/or modified sequence
atggatgctatcaagaagaagatgcagatgttgaagctggacaaagaaaacgcactcgaccgcgccgaacaggccgaggcagataagaaggccgcagaagacagatccaagcagctcgaagaagatatcgccgccaaagagaaactgctgcgcgtgagcgaggatgaacgcgatcgcgtgcttgaagaacttcacaaggctgaggacagcttgttagctgcggaagaggcagccgctaaggcggaagctgacgtggcttctctgaatagacgcatacagttggtggaagaggagctggatagggctcaggaacggctcgccacggctctgcagaagctggaagaggcagagaaggcggccgacgagagcgaacgtggcatgaaggtgatcgaaagtagggcccagaaagacgaggagaagatggagatacaggagattcagctaaaggaggccaagcacatagcagaagacgccgatcgcaagtatgaggaagtggcgaggaaacttgttatcattgagtccgacctggagagagccgaagaacgcgccgagctgagcgagggcaaatgtgcagagctggaggaggaacttaagaccgtgaccaacaatctgaagtccttggaagctcaggctgagaagtattctcaaaaggaggataggtacgaggaagaaatcaaagtgctgtcagacaaacttaaagaggctgaaacccgggccgaattcgccgaacggtctgtcaccaaactggaaaaatccatcgatgacctcgaagaaaaagtcgctcatgcaaaggaggagaacctgtcaatgcatcagatgctggaccagacactactggagctcaacaatatgtag

SEQ ID NO: 26791 - DNA, 855 bp, Artificial Sequence
  derived and/or modified sequence
atggatgccatcaagaagaagatgcagatgctgaagctggacaaggaaaatgccctggacagagctgagcaggccgaggccgacaagaaggccgcagaagatagaagcaagcagctggaggaggacattgctgccaaggagaagctgctgcgggtgtctgaagatgagcgggacagagtgctggaggagctgcacaaggccgaggacagcctgctggccgctgaggaggccgccgccaaggccgaggctgatgtggccagcctgaacagacgcatccagctggtggaggaggagctggaccgggcccaggagcggctggccacagccctgcagaagctggaggaggccgagaaggccgcagatgaaagtgagcggggcatgaaggtgattgagagccgggcccagaaggatgaggagaagatggagatccaggagatccagctgaaggaggccaagcacatcgccgaggatgctgacagaaaatatgaggaggtggccaggaagctggtgatcatcgagagtgacctggagagagctgaggagagagctgagctgtctgagggcaaatgtgccgagctggaggaggagctgaagacagtgaccaacaacctgaagagcctggaggcccaggccgagaagtacagccagaaggaggacagatatgaggaggagatcaaggtgctgagtgacaagctgaaggaggccgagaccagggctgagtttgctgagaggtctgtgaccaagctggagaagagcattgatgacctggaggagaaggtggcccacgccaaggaggagaacctgtccatgcaccagatgctggaccagaccctgctggagctgaacaacatgtag

SEQ ID NO: 26792 - DNA, 855 bp, Artificial Sequence
  derived and/or modified sequence
atggacgccatcaagaagaagatgcagatgctgaagctggacaaggaaaacgcccttgatagggctgagcaggcagaagccgataagaaagctgcggaggacagaagtaagcagctcgaggaggacattgctgctaaggagaagctgctccgcgtgagtgaagacgagcgggacagggtgctcgaggaactgcacaaggccgaagattcactgttagctgctgaagaggcagctgccaaggccgaagctgacgtcgcatccttgaatagaagaatccagctggttgaggaagagctggaccgcgcccaggaacggctggcaacggcacttcagaaactagaggaggccgagaaagcagcggacgaatccgagcgcggaatgaaggttatcgagtcccgagcgcaaaaggacgaagagaaaatggagatccaagagatccagctaaaggaagcgaaacacattgccgaggacgccgatcgaaagtacgaggaggtcgctcgaaagctcgtaatcattgaatctgatcttgagcgcgcagaggaaagagctgagctgagcgaaggcaagtgcgctgagttagaggaggagctgaagacagttacaaacaatctgaagtccctggaggcccaggccgaaaagtactcacagaaggaagatcgctatgaagaggaaatcaaagttttgtctgataagctcaaggaggccgagaccagggcagaatttgcagagcggagtgtgacgaagctcgagaagtccatagacgaccttgaagaaaaggtggcgcatgcgaaagaagagaacctctccatgcatcaaatgctggaccagactctgctcgaactcaacaacatgtag

SEQ ID NO: 26793 - DNA, 855 bp, Artificial Sequence
  derived and/or modified sequence
atggacgctattaagaaaaagatgcaaatgctcaaattagataaggagaacgcactggatagagctgaacaagctgaggctgacaagaaggccgctgaggatcggagtaaacagctggaggaggacatcgccgctaaggagaaactgctgagggtgagcgaagatgaacgagaccgagtcttggaggagctccataaggctgaggactctctcctcgcagctgaggaggccgctgccaaggccgaggctgacgtcgcttctttaaatcgtcggatccagttggtcgaagaggagcttgacagagcgcaggagcgcttagcgacagcactccagaagttagaggaagccgagaaggcagctgacgagagtgaacgcggtatgaaagtgatcgagtcacgggctcaaaaggacgaagaaaaaatggagatacaggaaatccagttgaaggaagcaaagcatattgccgaggatgccgatcgtaaatacgaggaagtggcaaggaagctagtgattatagagtcagaccttgagcgggctgaagagagagcagaattatcagaggggaaatgtgctgaactcgaggaggagcttaagaccgtgaccaataatttgaagtccctcgaggctcaggctgaaaagtactctcagaaagaggacaggtatgaggaagagatcaaggtactgtccgacaagttgaaggaagctgaaactcgagccgaattcgctgagcggtcagtgacgaagctcgaaaagagtatagatgacctggaagagaaagtcgcgcacgctaaagaggagaatctgtcaatgcaccagatgctagatcagaccctcttagaactgaataacatgtag

SEQ ID NO: 26794 - DNA, 1670 bp, Artificial Sequence
  derived and/or modified sequence
cgctcctccgcccgaccgcgcgctcgccccgccgctcctgctgcagccccagggcccctcgccgccgccaccatggacgccatcaagaagaagatgcagatgctgaagctcgacaaggagaacgccttggatcgagctgagcaggcggaggccgacaagaaggcggcggaagacaggagcaagcagctcgaggaggacatcgcggccaaggagaagttgctgcgggtgtcggaggacgagcgggaccgggtgctggaggagctgcacaaggcggaggacagcctcctggccgccgaagaggccgccgccaaggctgaagccgacgtagcttctctgaacagacgcatccagctggttgaggaagagttggatcgtgcccaggagcgtctggcaacagctttgcagaagctggaggaagctgagaaggcagcagatgagagtgagagaggcatgaaagtcattgagagtcgagcccaaaaagatgaagaaaaaatggaaattcaggagatccaactgaaagaggccaagcacattgctgaagatgccgaccgcaaatatgaagaggtggcccgtaagctggtcatcattgagagcgacctggaacgtgcagaggagcgggctgagctctcagaaggcaaatgtgccgagcttgaagaagaattgaaaactgtgacgaacaacttgaagtcactggaggctcaggctgagaagtactcgcagaaggaagacagatatgaggaagagatcaaggtcctttccgacaagctgaaggaggctgagactcgggctgagtttgcggagaggtcagtaactaaattggagaaaagcattgatgacttagaagagaaagtggctcatgccaaagaagaaaaccttagtatgcatcagatgctggatcagactttactggagttaaacaacatgtgaaaacctccttagctgcgaccacattctttcgttttgttttgttttgtttttaaacacctgcttaccccttaaatgcaatttatttacttttaccactgtcacagaaacatccacaagataccagctaggtcagggggtggggaaaacacatacaaaaaggcaagcccatgtcagggcgatcctggttcaaatgtgccatttcccgggttgatgctgccacactttgtagagagtttagcaacacagtgtgcttagtcagcgtaggaatcctcactaaagcagaagaagttccattcaaagtgccaatgatagagtcaacaggaaggttaatgttggaaacacaatcaggtgtggattggtgctactttgaacaaaaggtccccctgtggtcttttgttcaacattgtacaatgtagaactctgtccaacactaatttattttgtcttgagttttactacaagatgagactatggatcccgcatgcctgaattcactaaagccaagggtctgtaagccacgctgctcttccgagacttccattcctttctgattggcacacgtgcagctcatgacaatctgtaggataacaatcagtgtggatttccactcttttcagtccttcatgttaaagatttagacaccacatacaactggtaaaggacgttttcttgagagttttaactatatgtaaacattgtataatgatatggaataaaatgcacattgtaggacattttctaaa

SEQ ID NO: 26795 - protein, 245 aa, Artificial Sequence
  derived and/or modified sequence
MAGSSSLEAVRRKIRSLQEQADAAEERAGTLQRELDHERKLRETAEADVASLNRRIQLVEEELDRAQERLATALQKLEEAEKAADESERGMKVIESRAQKDEEKMEIQEIQLKEAKHIAEDADRKYEEVARKLVIIESDLERAEERAELSEGKCAELEEELKTVTNNLKSLEAQAEKYSQKEDRYEEEIKVLSDKLKEAETRAEFAERSVTKLEKSIDDLEDQLYQQLEQNRRLTNELKLALNED

SEQ ID NO: 26796 - DNA, 738 bp, Artificial Sequence
  derived and/or modified sequence
atggccggcagcagcagcctggaggccgtgagaagaaagatcagaagcctgcaggagcaggccgacgccgccgaggagagagccggcaccctgcagagagagctggaccacgagagaaagctgagagagaccgccgaggccgacgtggccagcctgaacagaagaatccagctggtggaggaggagctggacagagcccaggagagactggccaccgccctgcagaagctggaggaggccgagaaggccgccgacgagagcgagagaggcatgaaggtgatcgagagcagagcccagaaggacgaggagaagatggagatccaggagatccagctgaaggaggccaagcacatcgccgaggacgccgacagaaagtacgaggaggtggccagaaagctggtgatcatcgagagcgacctggagagagccgaggagagagccgagctgagcgagggcaagtgcgccgagctggaggaggagctgaagaccgtgaccaacaacctgaagagcctggaggcccaggccgagaagtacagccagaaggaggacagatacgaggaggagatcaaggtgctgagcgacaagctgaaggaggccgagaccagagccgagttcgccgagagaagcgtgaccaagctggagaagagcatcgacgacctggaggaccagctgtaccagcagctggagcagaacagaagactgaccaacgagctgaagctggccctgaacgaggactag

SEQ ID NO: 26797 - DNA, 738 bp, Artificial Sequence
  derived and/or modified sequence
atggctggaagttcttctctcgaggccgtccgcagaaaaattagatccttacaggagcaggctgatgccgctgaggagagagccggaactcttcaaagagaattggatcatgaaaggaagcttcgggagacagctgaggcagacgtggcttcccttaaccgacgcatccagctggtagaggaggagctggacagagctcaggaacgcttggcgactgccctccagaagctcgaggaggcagagaaggcagcagacgaatcggagcgaggaatgaaagtgatcgagtctagggcccagaaggacgaagaaaagatggagattcaggagatccagctgaaggaagccaagcatatcgccgaagatgctgacagaaaatacgaagaagttgcccgtaaactggtcatcatcgaaagtgacctggagcgcgcggaggagcgagccgaactgtccgagggaaagtgcgccgagctggaagaggaactgaagactgtcacgaacaacctaaaatcactggaggcacaggcagaaaagtattcccaaaaggaggatagatatgaggaagaaataaaagtgttgtccgataaactgaaagaggcggagacacgcgccgagttcgccgagaggtcagtgaccaaactggagaagagcatagacgacctggaagaccagctctatcagcagctcgagcagaacagacgcctgaccaacgagctgaagctagcactgaatgaggactag

SEQ ID NO: 26798 - DNA, 738 bp, Artificial Sequence
  derived and/or modified sequence
atggccggcagcagcagcctggaggccgtgcggaggaagatccgcagcctgcaggagcaggctgatgctgctgaggagcgggccggcaccctgcagcgggagctggaccacgagaggaagctgcgggagacagctgaggctgatgtggccagcctgaacagacgcatccagctggtggaggaggagctggaccgggcccaggagcggctggccacagccctgcagaagctggaggaggccgagaaggccgcagatgaaagtgagcggggcatgaaggtgattgagagccgggcccagaaggatgaggagaagatggagatccaggagatccagctgaaggaggccaagcacatcgccgaggatgctgacagaaaatatgaggaggtggccaggaagctggtgatcatcgagagtgacctggagagagctgaggagagagctgagctgtctgagggcaaatgtgccgagctggaggaggagctgaagacagtgaccaacaacctgaagagcctggaggcccaggccgagaagtacagccagaaggaggacagatatgaggaggagatcaaggtgctgagtgacaagctgaaggaggccgagaccagggctgagtttgctgagaggtctgtgaccaagctggagaagagcattgatgacctggaggaccagctgtaccagcagctggagcagaacagaaggctgaccaatgagctgaagctggccctgaatgaagattag

SEQ ID NO: 26799 - DNA, 738 bp, Artificial Sequence
  derived and/or modified sequence
atggccggcagcagcagcctggaggccgtgcggcggaagatccggagtctgcaggaacaggcagatgctgctgaggagcgtgccggcactcttcagagagagttggaccacgagaggaaactccgcgagacagctgaggctgacgtcgctagcctgaatcgacgaattcagctcgttgaggaggagttggatagagcacaggagcgactcgcgactgcattacaaaaactggaagaggccgagaaggctgctgatgagagcgaacgcggcatgaaagtgattgagagccgcgctcagaaagacgaggagaagatggagatccaagagatacagctgaaagaagccaagcacatcgcagaggatgcggaccgaaaatatgaggaggtggccagaaagctggtgattatcgaatctgatctggagcgcgccgaggaacgcgctgaactaagcgagggtaaatgcgctgaacttgaagaagaactaaaaaccgtaaccaacaacctgaaatctctggaagcgcaagccgagaaatacagccaaaaagaagatcgatatgaggaggagattaaagtgctctctgacaaactgaaggaggccgagaccagggcggagttcgcagaacggtctgtaacgaaactagaaaaatctattgacgacctggaagatcagctgtaccagcaactcgagcaaaaccggcgactcacgaatgaactgaaactggctctgaatgaggattag

SEQ ID NO: 26800 - DNA, 738 bp, Artificial Sequence
  derived and/or modified sequence
atggctgggtcttcaagcctcgaagccgtcagacgcaaaatcaggtccctgcaggagcaggccgatgcagctgaggaacgggctggcacacttcagagggagttggatcacgagcggaagctccgtgagactgccgaggccgacgtagcgagcctgaaccggagaatccagcttgtcgaggaagagctcgacagggcgcaagaacgcctggccacggcattgcaaaaactcgaggaggcggaaaaagccgctgatgaatctgagcgaggtatgaaagtaatcgagagtcgggctcaaaaagatgaagaaaaaatggagatccaggagattcaattgaaggaggccaagcacatagcagaagacgccgatcgaaagtatgaggaagttgcacgcaagctggtgatcatagagtctgacttggagcgcgctgaagagcgagccgaactgagcgaagggaaatgcgccgaacttgaggaagagctaaagaccgtcacaaacaaccttaaatctctggaagcccaagcagagaagtattctcagaaggaggacaggtacgaagaggagatcaaagtgctgagcgacaaacttaaagaagctgagactcgggctgaatttgcggaacggtctgtgaccaagcttgaaaagtcgatcgacgatcttgaagatcagctgtaccagcagctggagcagaacaggaggcttacaaacgaactaaaacttgccctcaatgaggactag

SEQ ID NO: 26801 - DNA, 1606 bp, Artificial Sequence
  derived and/or modified sequence
cgcgcgcgcccgcctgcggtttgtctgcgcagccctggaggctgcgacttccggactgctcctggccgcagggggcgccgccatcgcacagagaggcctgggcggggcggaccggcgctgggcagccaggacagccgcggcagccgggtccgcagggcagcagccggcctctcccactgcagccctcccgcccgcctaccgtccggcgcgatggcggggagtagctcgctggaggcggtgcgcaggaagatccggagcctgcaggagcaggcggacgccgctgaggagcgcgcgggcaccctgcagcgcgagctggaccacgagaggaagctgagggagaccgctgaagccgacgtagcttctctgaacagacgcatccagctggttgaggaagagttggatcgtgcccaggagcgtctggcaacagctttgcagaagctggaggaagctgagaaggcagcagatgagagtgagagaggcatgaaagtcattgagagtcgagcccaaaaagatgaagaaaaaatggaaattcaggagatccaactgaaagaggccaagcacattgctgaagatgccgaccgcaaatatgaagaggtggcccgtaagctggtcatcattgagagcgacctggaacgtgcagaggagcgggctgagctctcagaaggcaaatgtgccgagcttgaagaagaattgaaaactgtgacgaacaacttgaagtcactggaggctcaggctgagaagtactcgcagaaggaagacagatatgaggaagagatcaaggtcctttccgacaagctgaaggaggctgagactcgggctgagtttgcggagaggtcagtaactaaattggagaaaagcattgatgacttagaagatcaactctaccagcaacttgagcaaaatcgccgcctcactaatgaactaaagctggccctgaatgaggattaaacttaagagtgaaaaaacttgggctgaattctaggcgtggagcccatgtgcagaaaatctaagactgtcctaccttcaactaatagagttgaaaacagttgctttctgcagaaatgcaaatgcaaggaattggctgaaaggctggccttgcctgcttgtttctctatatggctggaataattacgttctctttaatcacaaaacagcttttatggtagaatacttatatcaattcagcactgctccttgaaatagcaggtcctcttgtttgaactgataaataatgaggagcccccccaaaaaatgttttctatttcctgacagccatgagtcctactttaagtatgtatatatatatatatatgtgtgtgtgtgtgtgtgtgtatatattcctatcagatactcatattcctaacttctaaatatctggtatagtgtttgaaatatgattaaatgtacctatgcttgggcaaaatagcttttgaaaacaggaactcatgccagaagcccctggttgtctgaaaggtatgctttactcagtctaatggtgctgttggagtctggggagaatgtcatgctaataaatagaacactataaaaatattaagagaatgtcctaatgaagtgtgcatgaaacatgttgacaattttttatgag

SEQ ID NO: 26802 - protein, 298 aa, Artificial Sequence
  derived and/or modified sequence
MLNHATQRVMEAEQTKTRSELVHKETAARYNAAMGRMRQLEKKLKRAINKSKPYFELKAKYYVQLEQLKKTVDDLQAKLTLAKGEYKMALKNLEMISDEIHERRRSSAMGPRGCGVGAEGSSTSVEDLPGSKPEPDAISVASEAFEDDSCSNFVSEDDSETQSVSSFSSGPTSPSEMPDQFPAVVRPGSLDLPSPVSLSEFGMMFPVLGPRSECSGASSPECEVERGDRAEGAENKTSDKANNNRGLSSSSGSGGSSKSQSSTSPEGQALENRMKQLSLQCSKGRDGIIADIKMVQIG

SEQ ID NO: 26803 - protein, 128 aa, Artificial Sequence
  derived and/or modified sequence
MLNHATQRVMEAEQTKTRSELVHKETAARYNAAMGRMRQLEKKLKRAINKSKPYFELKAKYYVQLEQLKKTVDDLQAKLTLAKGEYKMALKNLEMISDEIHERRRSSAMGPRGCGVGAEGSSTSVEDL

SEQ ID NO: 26804 - protein, 51 aa, Artificial Sequence
  derived and/or modified sequence
MLNHATQRVMEAEQTKTRSELVHKETAARYNAAMGRMRQLEKKLKRAINKS

SEQ ID NO: 26805 - DNA, 897 bp, Artificial Sequence
  derived and/or modified sequence
atgctgaatcacgccacccaacgcgttatggaagctgaacagaccaaaactcggagtgagctcgtacacaaagagacagccgcacgctataatgctgccatgggccgtatgcgccaactagaaaagaagctgaaacgcgccattaataagagcaagccatatttcgagctcaaagctaaatactacgttcagctggagcaattgaagaaaacggtcgacgatctccaggccaaacttaccctcgccaaaggagaatataaaatggcccttaagaatttagaaatgatctcagatgagatccacgagcggaggagatcctccgccatgggcccccgaggttgtggggtgggcgcagaagggagttctacttcagttgaagatctacccgggagtaaaccagagccagacgctataagcgtagcctcggaggctttcgaggatgattcttgctccaacttcgttagtgaagatgactccgagacccagagcgtgtcttctttttcatcaggacccacttcgccttcagagatgccagatcaattcccagctgtggtgcggccaggctccctcgatttgccctctcctgtgtcactgagcgaatttgggatgatgtttccagtgctaggcccccgtagtgaatgctcaggtgcgtcatccccggagtgcgaggtggagcggggtgaccgtgcggaaggtgcagagaataagacctccgacaaagccaacaacaacaggggcctcagttcctctagcggtagtggaggctccagcaaatcccagtcctccacctcacctgaaggccaggccttagagaatagaatgaagcagttgtctttacagtgttctaagggccgggacggaatcattgctgacatcaagatggtccagataggatag

SEQ ID NO: 26806 - DNA, 387 bp, Artificial Sequence
  derived and/or modified sequence
atgcttaatcacgctacccagcgcgttatggaagccgagcagactaaaaccagatccgagctagtccataaggaaacagctgcacgctacaacgccgctatggggcgaatgaggcagcttgaaaaaaagctgaaacgcgcgatcaacaaaagtaaaccctacttcgaactaaaagctaagtattacgtgcaactcgagcagttgaagaagaccgtcgatgaccttcaggccaagctgactttggcgaaaggagaatataagatggccctgaaaaatctcgagatgatatctgatgaaatacacgaacgtcggcggtcttccgctatgggtccccggggatgcggggtgggggcagaggggagctccactagcgtggaagacctatag

SEQ ID NO: 26807 - DNA, 897 bp, Artificial Sequence
  derived and/or modified sequence
atgctcaatcacgcaactcaacgggtgatggaggccgaacagacgaagactaggtcggagctggtccataaagaaaccgcggcccgatacaatgccgcaatggggagaatgcgtcagttggagaagaagctgaaaagagccatcaataaaagtaagccatatttcgaacttaaggccaagtactatgtgcagttggaacagcttaaaaagaccgttgatgacctgcaggccaagctcacactcgccaagggggaatacaaaatggctttgaaaaatctggaaatgatctctgatgagatccacgagcgacgcaggtcttctgccatggggccacgggggtgtggcgtgggtgcagaagggtccagcactagtgtggaggatctccctggcagcaagcctgagcctgatgccatttctgtcgcatcagaagcatttgaggacgatagctgctccaacttcgtgagcgaggatgacagcgaaacacagtcggtctccagtttctcctcagggcccacctcccctagcgagatgcccgaccaattccccgccgtagttcgacccggttctttagaccttccgtctccagtcagcttatcggaattcggtatgatgtttcccgtgttgggtccgcgatccgaatgtagcggagcgagcagccctgaatgcgaggtggagcgaggagaccgggccgagggggcggagaacaaaacatcagacaaggctaataacaatagaggtctttcctcctcgtccggttccggtggctcttcaaagagccagtcgtcgacgagccccgagggacaggctctcgagaatcgaatgaagcagttatctctacagtgtagcaagggaagagatggcattattgcagatatcaaaatggtgcagattgggtag

SEQ ID NO: 26808 - DNA, 156 bp, Artificial Sequence
  derived and/or modified sequence
atgctgaaccacgctacccagcgggtgatggaagctgaacaaacaaaaaccagaagcgagctagtccataaggaaacggcagccaggtataatgcggccatgggcaggatgaggcaacttgaaaagaaactgaaacgggccattaacaagtcctag

SEQ ID NO: 26809 - DNA, 897 bp, Artificial Sequence
  derived and/or modified sequence
atgctgaatcacgcgacccaacgcgttatggaagcggaacagacgaaaaccagaagtgagctcgtgcataaagaaaccgccgccagatataatgcagccatgggtaggatgagacagttagaaaagaaactgaaaagggcaatcaacaaatccaagccctacttcgagctcaaggccaagtattacgtccagctggaacagcttaaaaaaacagtggacgacctgcaggccaagttgactctggctaaaggggaatacaaaatggccttaaagaatttggaaatgattagcgatgagatccacgaacgccggcgcagtagtgccatggggcctcgtgggtgtggggtaggagcggagggctccagcacaagcgtggaagatctgcctggaagcaagccggagcccgacgctatcagcgtggcgtccgaagccttcgaggatgactcctgctcgaatttcgtgagtgaagacgattccgagactcagagtgtgtctagctttagcagcggccccacctctccaagcgaaatgcctgatcaattccctgccgtggtgagacctggttcactggacctaccttctcccgtgtccttatctgaattcggaatgatgttcccagttctgggccctcggagtgaatgcagcggagctagtagccccgagtgcgaggttgaacgtggagatagagccgaaggcgccgagaataaaacatcagataaagctaataacaacagaggactgagtagtagttctggctccggagggtcatctaagagtcagtcctccaccagtcccgaggggcaggccctggagaaccgcatgaagcagctgagtctgcagtgcagcaaaggccgtgatggtataatcgctgatatcaaaatggtgcagataggttag

SEQ ID NO: 26810 - DNA, 897 bp, Artificial Sequence
  derived and/or modified sequence
atgctgaaccacgccacccagagggtgatggaggccgagcagaccaagaccaggtctgagctggtgcacaaggagacagctgcccgctacaatgctgccatgggccgcatgaggcagctggagaagaagctgaagagggccatcaacaagagcaagccctactttgagctgaaggccaagtactacgtgcagctggagcagctgaagaagacagtggatgacctgcaggccaagctgaccctggccaagggggagtacaagatggccctgaagaacctggagatgatcagtgatgagatccatgaaagaagaagaagcagcgccatgggcccccggggctgcggcgtgggcgctgagggcagcagcacctctgtggaggacctgcccggcagcaagccagagccagatgccatctctgtggccagcgaggcctttgaagatgacagctgcagcaactttgtgtctgaagatgattctgagacccagagcgtgagcagcttcagcagcggccccaccagccccagcgagatgccagaccagtttcctgctgtggtgcggcccggcagcctggacctgcccagccctgtgtccctgtctgaatttggcatgatgtttcctgtgctgggccccaggagtgaatgttctggggccagcagcccagaatgtgaggtggagcggggggacagagctgagggcgctgagaacaagaccagtgacaaggccaacaacaacagaggcctgagcagcagcagcggcagcggcggcagcagcaagagccagagcagcaccagccctgagggccaggccctggagaacaggatgaagcagctgagcctgcagtgcagcaagggcagagatggcatcatcgctgacatcaagatggtgcagattggatag

SEQ ID NO: 26811 - DNA, 387 bp, Artificial Sequence
  derived and/or modified sequence
atgctgaaccacgccacccagagggtgatggaggccgagcagaccaagaccaggtctgagctggtgcacaaggagacagctgcccgctacaatgctgccatgggccgcatgaggcagctggagaagaagctgaagagggccatcaacaagagcaagccctactttgagctgaaggccaagtactacgtgcagctggagcagctgaagaagacagtggatgacctgcaggccaagctgaccctggccaagggggagtacaagatggccctgaagaacctggagatgatcagtgatgagatccatgaaagaagaagaagcagcgccatgggcccccggggctgcggcgtgggcgctgagggcagcagcacctctgtggaggacctgtag

SEQ ID NO: 26812 - DNA, 156 bp, Artificial Sequence
  derived and/or modified sequence
atgctgaaccacgccacccagagggtgatggaggccgagcagaccaagaccaggtctgagctggtgcacaaggagacagctgcccgctacaatgctgccatgggccgcatgaggcagctggagaagaagctgaagagggccatcaacaagagctag

SEQ ID NO: 26813 - DNA, 897 bp, Artificial Sequence
  derived and/or modified sequence
atgctgaaccacgccacccagcgggtgatggaggccgagcagaccaagactcgaagcgagctggttcacaaggaaacagccgctcgatacaatgccgcaatgggcaggatgaggcagctggagaagaagcttaagcgggcaattaacaaaagcaagccatactttgagctgaaggcgaagtactatgtgcagttggagcagttgaaaaaaacagtcgatgatctgcaagcaaaacttaccctggccaaaggcgaatacaagatggccctgaagaacttagagatgattagcgacgaaattcatgaaaggcgccgcagctccgccatggggcccagagggtgcggcgtgggcgccgaaggctcctcgactagtgtggaggatctccccggctccaaaccagagcctgatgctatctccgtcgctagtgaggcatttgaggacgatagctgctctaatttcgtaagtgaagacgattccgagactcagagcgtgagtagcttctcatccggacctacttctccttctgaaatgccagatcagttcccagccgttgtgcgtcctgggtccctggacctacccagtccagtgagtctttctgagtttggtatgatgttcccggtattgggacccaggtccgaatgcagcggggccagttcaccagaatgtgaggtggagcggggtgatagagccgaaggcgccgagaacaagacttctgataaggctaacaataatcgcgggttgagcagcagctctggatctggaggtagttctaagtctcaaagctctacatcaccggagggtcaggccctggagaatagaatgaagcaactctctttacagtgttcaaaaggtagagatggcatcatcgccgacatcaagatggtgcagattggatag

SEQ ID NO: 26814 - DNA, 387 bp, Artificial Sequence
  derived and/or modified sequence
atgctgaaccacgccacccagcgggtgatggaggccgagcagaccaaaacccgatcggagctggtccataaagagactgcagcccgttataatgctgctatgggcagaatgaggcaacttgaaaaaaagcttaaaagagctattaacaaatcgaagccttattttgagctcaaggctaagtattatgttcaactggagcagctgaagaaaactgtcgatgacttacaggctaagctgacgctcgccaagggcgagtataagatggctctgaagaacctggagatgattagtgacgagattcacgaacggagaagaagcagcgctatgggaccacgcgggtgtggtgtgggtgccgagggcagttccacctcagtggaagatctttag

SEQ ID NO: 26815 - DNA, 897 bp, Artificial Sequence
  derived and/or modified sequence
atgctgaaccacgccacccagcgggtgatggaggccgagcagaccaagactaggtcagagctcgtgcacaaagagaccgccgctcgctacaacgccgcaatgggccgtatgcggcaattggagaagaagttaaagcgagcgattaataaatcaaagccttactttgaactgaaggctaaatattacgtgcaactggaacagctgaaaaaaactgtagacgacctgcaggctaaacttacactggccaagggggagtacaagatggcgttgaagaacctggaaatgattagtgacgaaatccatgagcggaggaggtcgagcgcaatgggccccagaggctgtggcgtgggagccgagggtagctccactagcgttgaagatctgcctggttccaaacccgagcccgatgccatttctgtcgcatcagaagcatttgaggacgattcttgtagcaacttcgtgagtgaggatgactctgagacccagtccgtcagctcattcagctccggtcctactagccccagcgagatgcccgaccagttccccgcagtggtaagacccgggagcctggacttgccctctcccgtgtccttgagcgaattcgggatgatgtttcctgtgctcggacctagatccgaatgctcaggtgcgtcaagtccagaatgtgaagtcgaaagaggggacagagcggagggagcagaaaataagacctctgacaaggccaataacaaccgcggtttatcatcctccagcgggtccggaggttcttcaaagtcccaatcttctacctccccagaaggccaggcattagaaaatagaatgaagcagttaagcctgcagtgctcaaagggcagggatggaattattgctgatattaaaatggtacagatcggatag

SEQ ID NO: 26816 - DNA, 156 bp, Artificial Sequence
  derived and/or modified sequence
atgctgaaccacgccacccagcgggtgatggaggccgagcagaccaaaacacgcagcgagctggtgcacaaagaaaccgcggctcgctataatgctgccatgggcaggatgcgccagctggaaaagaaactgaaaagggcgattaacaaaagttag

SEQ ID NO: 26817 - DNA, 897 bp, Artificial Sequence
  derived and/or modified sequence
atgctgaaccacgccacccagcgggtgatggaggccgagcagaccaagactagatctgaacttgtccacaaggaaaccgccgcccgatataatgcggctatgggccgcatgagacagctagaaaagaagctgaagcgggcaatcaataagtccaagccatattttgagctcaaggccaagtattacgtacagttggaacagctcaagaaaacagtggacgacctgcaggcaaaactcactctcgcaaaaggcgaatacaagatggctcttaaaaatttggagatgatctcagatgagattcatgaaaggcgtcggtccagtgctatgggccctagagggtgcggagtgggcgccgaagggtcctccacttccgtggaggatctgcccggcagcaagcctgagcctgacgcgattagcgtggcaagcgaagcctttgaggatgatagttgttccaatttcgtgtcggaggatgattcagaaacccagagcgttagctctttctcgagcggccccacgagcccttccgagatgcctgaccaattccccgccgtggtacgtccaggctcgctggatctgcctagtccagtctccctctctgaattcgggatgatgtttcctgtcctaggaccaagaagcgaatgttcaggcgcaagtagtccagaatgtgaagtagagaggggggatcgcgccgagggcgcggaaaacaaaacatctgataaagccaataataatcgaggcctgtcatcttccagtgggtcgggcggcagctccaaaagccagtctagcacttcgccagagggacaggcactggagaatcgaatgaagcaactcagcctgcagtgctccaaggggcgggatggtatcatagcggacatcaagatggtccagattgggtag

SEQ ID NO: 26818 - DNA, 897 bp, Artificial Sequence
  derived and/or modified sequence
atgctgaaccacgccactcagcgcgtgatggaggccgaacaaactaagacccgcagcgaactggtgcataaggagaccgcagccagatataacgccgcaatgggacggatgagacaactcgagaagaagttgaagagagcaataaataagtccaagccatacttcgaattaaaagcaaagtactacgtgcagctcgagcagctgaaaaagactgtggatgatctgcaggcgaaactcactttggctaagggagagtacaagatggctcttaagaacctcgagatgatctcagatgaaattcacgaacgtaggcggtcctctgctatgggccctagaggctgcggtgttggggcagaaggatctagtacctccgtggaggacctacccggttccaagcctgaaccagatgcaatcagcgtcgcgagcgaggctttcgaagatgactcatgcagcaatttcgtatccgaagacgatagtgagacccaaagcgtgtccagtttctccagcggacccacaagcccgtctgaaatgccggaccagtttccagctgtggtccgcccaggcagcctcgatcttcccagtccggtttctctctccgagtttggtatgatgttccccgtgctcggcccacgcagcgaatgctcgggagcaagctctcccgagtgtgaggtagaaagaggggaccgggcagagggagctgagaacaaaacgtcagacaaagctaataataatagaggcctgagttccagcagtggttccggcggttcctcgaagtcacaatccagcacgtctcctgaggggcaggcgctggagaacagaatgaagcagcttagtctgcagtgcagtaaaggcagagacggcatcatcgccgatattaaaatggtgcaaatcggctag

SEQ ID NO: 26819 - DNA, 387 bp, Artificial Sequence
  derived and/or modified sequence
atgctgaaccatgcgactcagcgcgtgatggaagccgagcagacaaagacaagatcggagctggtgcacaaggaaactgctgctcggtacaacgccgcaatgggacggatgagacagctcgagaaaaaacttaaacgggcaatcaataaatctaagccttactttgagctgaaggctaaatactacgtccagctggagcagctcaagaaaacggtagacgatctccaagctaaattgactcttgccaagggagaatataagatggcactaaaaaaccttgagatgatcagcgacgagattcatgagaggcgccgatcaagtgctatggggccacggggatgcggtgtgggtgcagagggtagcagtacttccgtcgaggatctgtag

SEQ ID NO: 26820 - DNA, 897 bp, Artificial Sequence
  derived and/or modified sequence
atgcttaaccacgccacccagcgtgttatggaggcagaacaaactaaaacacgcagtgagttagttcacaaggaaactgctgcgagatacaatgccgctatggggaggatgcgtcagcttgaaaaaaaactaaaaagggccatcaacaaatcaaaaccctacttcgagctcaaggccaaatactacgtgcaattagagcagctcaaaaagacggtggacgatctacaggccaaacttacactggccaagggagagtacaagatggctctgaagaatctagagatgataagtgacgagatccatgagaggcgtcggtccagcgctatgggcccacgcggatgtggtgtcggggctgagggctcatctacctctgtcgaggacctgcccggatccaagcctgaacccgacgccatctcggtggccagcgaggcatttgaggatgattcttgttcgaatttcgtgagtgaggacgatagcgaaacacagtctgtgagctctttttcctctggaccaacgagcccgtcggagatgcccgaccagttcccagctgtcgtacggccaggcagcctggatctaccaagtcctgttagcctcagtgaatttggaatgatgtttccagtgttgggtccaagatccgaatgttccggagcgtcctcgcccgagtgtgaggtcgaacgcggagacagagctgaaggagccgaaaataagacttcagacaaagccaataacaacaggggactgagctcatcgtccggttccggtgggtcttctaaatcacagagcagtacatctcctgaggggcaggccctagagaatcgaatgaagcagttgtctctccagtgtagcaagggccgagacgggattatcgctgatattaaaatggtacagatcggatag

SEQ ID NO: 26821 - DNA, 156 bp, Artificial Sequence
  derived and/or modified sequence
atgctaaatcatgcgacgcagagagtcatggaggctgagcagaccaagacacggtcggagctggtgcataaagaaacagcagctcggtacaacgctgcaatgggaagaatgcgacagcttgaaaagaaactgaaaagggccatcaataaatcttag

SEQ ID NO: 26822 - DNA, 897 bp, Artificial Sequence
  derived and/or modified sequence
atgctcaatcatgctacacaacgggtcatggaggccgaacagaccaaaacacgttcagaactggtgcacaaggagaccgccgcaaggtataatgctgcaatgggcaggatgagacaattggagaagaagctgaaaagggctattaacaaatctaagccatacttcgaactcaaagcgaaatactatgtccagttagaacaattgaagaaaacagtcgacgacctccaggccaaactgacccttgctaagggagaatacaagatggcactgaaaaacctagagatgatttctgacgagattcacgagaggcgacggagcagcgccatgggtccacgagggtgcggagtgggtgcagagggatccagtacatcagtggaggatctgccaggatccaaacccgagccagatgcgatctctgtggcctccgaggcatttgaggacgactcatgcagtaactttgtctccgaagatgactcagagacacagagtgtcagcagtttttcatctggccctacatctccctccgaaatgcctgaccagtttccagctgtggttagacctggctcactggacctcccgtcacccgtgtctctgagtgaatttggcatgatgtttcctgtgctgggccctcggtctgagtgtagcggagcgagctccccagaatgcgaggttgaacggggtgaccgggcagaaggagcagaaaacaagacctccgataaggcaaataacaaccggggacttagcagttcatccggcagcggtggcagttctaagtctcagagctcaacgtcccctgaggggcaggccctggaaaatcggatgaagcaactgtcactccagtgctcgaaaggacgggatggcattatcgcagatattaaaatggtccagatagggtag

SEQ ID NO: 26823 - DNA, 897 bp, Artificial Sequence
  derived and/or modified sequence
atgctgaaccacgccacccagagagtgatggaggccgagcagaccaagaccagaagcgagctggtgcacaaggagaccgccgccagatacaacgccgccatgggcagaatgagacagctggagaagaagctgaagagagccatcaacaagagcaagccctacttcgagctgaaggccaagtactacgtgcagctggagcagctgaagaagaccgtggacgacctgcaggccaagctgaccctggccaagggcgagtacaagatggccctgaagaacctggagatgatcagcgacgagatccacgagagaagaagaagcagcgccatgggccccagaggctgcggcgtgggcgccgagggcagcagcaccagcgtggaggacctgcccggcagcaagcccgagcccgacgccatcagcgtggccagcgaggccttcgaggacgacagctgcagcaacttcgtgagcgaggacgacagcgagacccagagcgtgagcagcttcagcagcggccccaccagccccagcgagatgcccgaccagttccccgccgtggtgagacccggcagcctggacctgcccagccccgtgagcctgagcgagttcggcatgatgttccccgtgctgggccccagaagcgagtgcagcggcgccagcagccccgagtgcgaggtggagagaggcgacagagccgagggcgccgagaacaagaccagcgacaaggccaacaacaacagaggcctgagcagcagcagcggcagcggcggcagcagcaagagccagagcagcaccagccccgagggccaggccctggagaacagaatgaagcagctgagcctgcagtgcagcaagggcagagacggcatcatcgccgacatcaagatggtgcagatcggctag

SEQ ID NO: 26824 - DNA, 387 bp, Artificial Sequence
  derived and/or modified sequence
atgctgaaccacgccacccagagagtgatggaggccgagcagaccaagaccagaagcgagctggtgcacaaggagaccgccgccagatacaacgccgccatgggcagaatgagacagctggagaagaagctgaagagagccatcaacaagagcaagccctacttcgagctgaaggccaagtactacgtgcagctggagcagctgaagaagaccgtggacgacctgcaggccaagctgaccctggccaagggcgagtacaagatggccctgaagaacctggagatgatcagcgacgagatccacgagagaagaagaagcagcgccatgggccccagaggctgcggcgtgggcgccgagggcagcagcaccagcgtggaggacctgtag

SEQ ID NO: 26825 - DNA, 156 bp, Artificial Sequence
  derived and/or modified sequence
atgctgaaccacgccacccagagagtgatggaggccgagcagaccaagaccagaagcgagctggtgcacaaggagaccgccgccagatacaacgccgccatgggcagaatgagacagctggagaagaagctgaagagagccatcaacaagagctag

SEQ ID NO: 26826 - protein, 550 aa, Artificial Sequence
  derived and/or modified sequence
MDLTKMGMIQLQNPSHPTGLLCKANQMRLAGTLCDVVIMVDSQEFHAHRTVLACTSKMFEILFHRNSQHYTLDFLSPKTFQQILEYAYTATLQAKAEDLDDLLYAAEILEIEYLEEQCLKMLETIQASDDNDTEATMADGGAEEEEDRKARYLKNIFISKHSSEESGYASVAGQSLPGPMVDQSPSVSTSFGLSAMSPTKAAVDSLMTIGQSLLQGTLQPPAGPEEPTLAGGGRHPGVAEVKTEMMQVDEVPSQGFIQRELFSKLGELAVGMKSESRTIGEQCSVCGVELPDNEAVEQHRKLHSGMKTYGCELCGKRFLDSLRLRMHLLAHSAGAKAFVCDQCGAQFSKEDALETHRQTHTGTDMAVFCLLCGKRFQAQSALQQHMEVHAGVRSYICSECNRTFPSHTALKRHLRSHTGDHPYECEFCGSCFRDESTLKSHKRIHTGEKPYECNGCGKKFSLKHQLETHYRVHTGEKPFECKLCHQRSRDYSAMIKHLRTHNGASPYQCTICTEYCPSLSSMQKHMKGHKPEEIPPDWRIEKTYLYLCYV

SEQ ID NO: 26827 - protein, 673 aa, Artificial Sequence
  derived and/or modified sequence
MDLTKMGMIQLQNPSHPTGLLCKANQMRLAGTLCDVVIMVDSQEFHAHRTVLACTSKMFEILFHRNSQHYTLDFLSPKTFQQILEYAYTATLQAKAEDLDDLLYAAEILEIEYLEEQCLKMLETIQASDDNDTEATMADGGAEEEEDRKARYLKNIFISKHSSEESGYASVAGQSLPGPMVDQSPSVSTSFGLSAMSPTKAAVDSLMTIGQSLLQGTLQPPAGPEEPTLAGGGRHPGVAEVKTEMMQVDEVPSQDSPGAAESSISGGMGDKVEERGKEGPGTPTRSSVITSARELHYGREESAEQVPPPAEAGQAPTGRPEHPAPPPEKHLGIYSVLPNHKADAVLSMPSSVTSGLHVQPALAVSMDFSTYGGLLPQGFIQRELFSKLGELAVGMKSESRTIGEQCSVCGVELPDNEAVEQHRKLHSGMKTYGCELCGKRFLDSLRLRMHLLAHSAGAKAFVCDQCGAQFSKEDALETHRQTHTGTDMAVFCLLCGKRFQAQSALQQHMEVHAGVRSYICSECNRTFPSHTALKRHLRSHTGDHPYECEFCGSCFRDESTLKSHKRIHTGEKPYECNGCGKKFSLKHQLETHYRVHTGEKPFECKLCHQRSRDYSAMIKHLRTHNGASPYQCTICTEYCPSLSSMQKHMKGHKPEEIPPDWRIEKTYLYLCYV

SEQ ID NO: 26828 - DNA, 2417 bp, Artificial Sequence
  derived and/or modified sequence
gcagcagagaggagttgagggcgatgagagcgggtactgcgaactgccgggcgatgctgtcgctgccgccgtgatacggagagcaacagttccccagcaacacccctccccgacacaggcacacaccccccgacaggcacgcacacccaccccacagtgcccggctcggctgcgcctcctctattggcccaggaagcccacccagccccgccacgcagagcccagaaggaaagaaagcctcatgcctgagccgaggggagcaccatggatctgacaaaaatgggcatgatccagctgcagaaccctagccaccccacggggctactgtgcaaggccaaccagatgcggctggccgggactttgtgcgatgtggtcatcatggtggacagccaggagttccacgcccaccggacggtgctggcctgcaccagcaagatgtttgagatcctcttccaccgcaatagtcaacactatactttggacttcctctcgccaaagaccttccagcagattctggagtatgcatatacagccacgctgcaagccaaggcggaggacctggatgacctgctgtatgcggccgagatcctggagatcgagtacctggaggaacagtgcctgaagatgctggagaccatccaggcctcagacgacaatgacacggaggccaccatggccgatggcggggccgaggaagaagaggaccgcaaggctcggtacctcaagaacatcttcatctcgaagcattccagcgaggagagtgggtatgccagtgtggctggacagagcctccctgggcccatggtggaccagagcccttcagtctccacttcatttggtctttcagccatgagtcccaccaaggctgcagtggacagtttgatgaccataggacagtctctcctgcagggaactcttcagccacctgcagggcccgaggagccaactctggctgggggtgggcggcaccctggggtggctgaggtgaagacggagatgatgcaggtggatgaggtgcccagccaggacagccctggggcagccgagtccagcatctcaggagggatgggggacaaggttgaggaaagaggcaaagaggggcctgggaccccgactcgaagcagcgtcatcaccagtgctagggagctacactatgggcgagaggagagtgccgagcaggtgccacccccagctgaggctggccaggcccccactggccgacctgagcacccagcacccccgcctgagaagcatctgggcatctactccgtgttgcccaaccacaaggctgacgctgtattgagcatgccgtcttccgtgacctctggcctccacgtgcagcctgccctggctgtctccatggacttcagcacctatggggggctgctgccccagggcttcatccagagggagctgttcagcaagctgggggagctggctgtgggcatgaagtcagagagccggaccatcggagagcagtgcagcgtgtgtggggtcgagcttcctgataacgaggctgtggagcagcacaggaagctgcacagtgggatgaagacgtacgggtgcgagctctgcgggaagcggttcctggatagtttgcggctgagaatgcacttactggctcattcagcgggtgccaaagcctttgtctgtgatcagtgcggtgcacagttttcgaaggaggatgccctggagacacacaggcagacccatactggcactgacatggccgtcttctgtctgctgtgtgggaagcgcttccaggcgcagagcgcactgcagcagcacatggaggtccacgcgggcgtgcgcagctacatctgcagtgagtgcaaccgcaccttccccagccacacggctctcaaacgccacctgcgctcacatacaggcgaccacccctacgagtgtgagttctgtggcagctgcttccgggatgagagcacactcaagagccacaaacgcatccacacgggtgagaaaccctacgagtgcaatggctgtggcaagaagttcagcctcaagcatcagctggagacgcactatagggtgcacacaggtgagaagccctttgagtgtaagctctgccaccagcgctcccgggactactcggccatgatcaagcacctgagaacgcacaacggcgcctcgccctaccagtgcaccatctgcacagagtactgccccagcctctcctccatgcagaagcacatgaagggccacaagcccgaggagatcccgcccgactggaggatagagaagacgtacctctacctgtgctatgtgtgaagggaggcccgcggcggtggagccgagcggggagccaggaaagaagagttggagtgagatgaaggaaggactatgacaaataaaaaaggaaaagaaaaaaaaaaacagaaggaaaaggaaaaaaaaaaaaa

SEQ ID NO: 26829 - DNA, 1653 bp, Artificial Sequence
  derived and/or modified sequence
atggacctgaccaagatgggcatgatccagctgcagaaccccagccaccccaccggcctgctgtgcaaggccaaccagatgagactggccggcaccctgtgcgacgtggtgatcatggtggacagccaggagttccacgcccacagaaccgtgctggcctgcaccagcaagatgttcgagatcctgttccacagaaacagccagcactacaccctggacttcctgagccccaagaccttccagcagatcctggagtacgcctacaccgccaccctgcaggccaaggccgaggacctggacgacctgctgtacgccgccgagatcctggagatcgagtacctggaggagcagtgcctgaagatgctggagaccatccaggccagcgacgacaacgacaccgaggccaccatggccgacggcggcgccgaggaggaggaggacagaaaggccagatacctgaagaacatcttcatcagcaagcacagcagcgaggagagcggctacgccagcgtggccggccagagcctgcccggccccatggtggaccagagccccagcgtgagcaccagcttcggcctgagcgccatgagccccaccaaggccgccgtggacagcctgatgaccatcggccagagcctgctgcagggcaccctgcagccccccgccggccccgaggagcccaccctggccggcggcggcagacaccccggcgtggccgaggtgaagaccgagatgatgcaggtggacgaggtgcccagccagggcttcatccagagagagctgttcagcaagctgggcgagctggccgtgggcatgaagagcgagagcagaaccatcggcgagcagtgcagcgtgtgcggcgtggagctgcccgacaacgaggccgtggagcagcacagaaagctgcacagcggcatgaagacctacggctgcgagctgtgcggcaagagattcctggacagcctgagactgagaatgcacctgctggcccacagcgccggcgccaaggccttcgtgtgcgaccagtgcggcgcccagttcagcaaggaggacgccctggagacccacagacagacccacaccggcaccgacatggccgtgttctgcctgctgtgcggcaagagattccaggcccagagcgccctgcagcagcacatggaggtgcacgccggcgtgagaagctacatctgcagcgagtgcaacagaaccttccccagccacaccgccctgaagagacacctgagaagccacaccggcgaccacccctacgagtgcgagttctgcggcagctgcttcagagacgagagcaccctgaagagccacaagagaatccacaccggcgagaagccctacgagtgcaacggctgcggcaagaagttcagcctgaagcaccagctggagacccactacagagtgcacaccggcgagaagcccttcgagtgcaagctgtgccaccagagaagcagagactacagcgccatgatcaagcacctgagaacccacaacggcgccagcccctaccagtgcaccatctgcaccgagtactgccccagcctgagcagcatgcagaagcacatgaagggccacaagcccgaggagatcccccccgactggagaatcgagaagacctacctgtacctgtgctacgtgtag

SEQ ID NO: 26830 - DNA, 2022 bp, Artificial Sequence
  derived and/or modified sequence
atggacctgaccaagatgggcatgatccagctgcagaaccccagccaccccaccggcctgctgtgcaaggccaaccagatgagactggccggcaccctgtgcgacgtggtgatcatggtggacagccaggagttccacgcccacagaaccgtgctggcctgcaccagcaagatgttcgagatcctgttccacagaaacagccagcactacaccctggacttcctgagccccaagaccttccagcagatcctggagtacgcctacaccgccaccctgcaggccaaggccgaggacctggacgacctgctgtacgccgccgagatcctggagatcgagtacctggaggagcagtgcctgaagatgctggagaccatccaggccagcgacgacaacgacaccgaggccaccatggccgacggcggcgccgaggaggaggaggacagaaaggccagatacctgaagaacatcttcatcagcaagcacagcagcgaggagagcggctacgccagcgtggccggccagagcctgcccggccccatggtggaccagagccccagcgtgagcaccagcttcggcctgagcgccatgagccccaccaaggccgccgtggacagcctgatgaccatcggccagagcctgctgcagggcaccctgcagccccccgccggccccgaggagcccaccctggccggcggcggcagacaccccggcgtggccgaggtgaagaccgagatgatgcaggtggacgaggtgcccagccaggacagccccggcgccgccgagagcagcatcagcggcggcatgggcgacaaggtggaggagagaggcaaggagggccccggcacccccaccagaagcagcgtgatcaccagcgccagagagctgcactacggcagagaggagagcgccgagcaggtgcccccccccgccgaggccggccaggcccccaccggcagacccgagcaccccgcccccccccccgagaagcacctgggcatctacagcgtgctgcccaaccacaaggccgacgccgtgctgagcatgcccagcagcgtgaccagcggcctgcacgtgcagcccgccctggccgtgagcatggacttcagcacctacggcggcctgctgccccagggcttcatccagagagagctgttcagcaagctgggcgagctggccgtgggcatgaagagcgagagcagaaccatcggcgagcagtgcagcgtgtgcggcgtggagctgcccgacaacgaggccgtggagcagcacagaaagctgcacagcggcatgaagacctacggctgcgagctgtgcggcaagagattcctggacagcctgagactgagaatgcacctgctggcccacagcgccggcgccaaggccttcgtgtgcgaccagtgcggcgcccagttcagcaaggaggacgccctggagacccacagacagacccacaccggcaccgacatggccgtgttctgcctgctgtgcggcaagagattccaggcccagagcgccctgcagcagcacatggaggtgcacgccggcgtgagaagctacatctgcagcgagtgcaacagaaccttccccagccacaccgccctgaagagacacctgagaagccacaccggcgaccacccctacgagtgcgagttctgcggcagctgcttcagagacgagagcaccctgaagagccacaagagaatccacaccggcgagaagccctacgagtgcaacggctgcggcaagaagttcagcctgaagcaccagctggagacccactacagagtgcacaccggcgagaagcccttcgagtgcaagctgtgccaccagagaagcagagactacagcgccatgatcaagcacctgagaacccacaacggcgccagcccctaccagtgcaccatctgcaccgagtactgccccagcctgagcagcatgcagaagcacatgaagggccacaagcccgaggagatcccccccgactggagaatcgagaagacctacctgtacctgtgctacgtgtag

SEQ ID NO: 26831 - DNA, 1653 bp, Artificial Sequence
  derived and/or modified sequence
atggaccttaccaagatggggatgatccagctgcagaatcccagtcaccccaccggcctattgtgcaaggccaatcagatgcggctggccggaacactttgtgacgtggttattatggttgacagccaggagttccatgcccaccgcaccgtattggcttgtacgtccaagatgttcgagatacttttccatcggaatagccagcattacaccctggatttccttagtcctaagacttttcagcaaattctggaatacgcatacacagccacactgcaggccaaggctgaggacctggatgatctgttatacgcagcagagatcctggagatcgagtatctggaggagcagtgcctcaagatgttggaaacaattcaggcaagtgacgacaacgatactgaagctaccatggctgatggcggcgccgaggaggaggaggacagaaaggctcgatatttaaaaaatatcttcatctctaaacacagtagtgaggagtctggttatgcttcagtggcaggacagagcctcccaggccccatggttgatcaatcgcctagtgtgagtacatcattcggactatcagcaatgtcccccactaaagcggctgtcgattctctgatgactataggacaatcgctcctccagggcaccctgcagcctccggcaggccccgaagaacccactctcgctggtggtgggcggcatccaggggtggcagaggtgaagacagagatgatgcaggtcgacgaagttccttcccagggatttattcagcgggaactgttttcgaaactcggcgagctcgcagtgggaatgaagagcgagtctcggaccatcggggagcaatgtagcgtgtgtggggtggagttgcctgacaacgaggctgtcgaacaacatcggaagctgcatagcggaatgaagacctacggatgcgaactctgtggcaaaaggttcctggatagtctgcgccttcggatgcatcttctggcccactctgcaggtgcaaaggcttttgtctgtgaccagtgcggagcccaattctcaaaggaggacgcgcttgagacgcaccgccagacccacaccgggacggatatggcggttttttgtctactatgtggcaagcggtttcaagctcagtccgcactacagcagcatatggaagtacatgccggcgtcaggtcctacatttgttccgagtgtaatagaacgttccctagtcacactgccctcaagcgacacctcagatcccacacaggggaccatccctatgagtgcgagttctgcggaagttgcttccgggatgagtctacgcttaagagccacaaacgaatacatacaggagagaagccgtacgagtgtaatggctgcggaaaaaagttctcccttaagcaccagctggaaactcactatcgggtgcacacaggggagaagcccttcgagtgcaagctgtgtcatcagcgtagccgagactacagtgctatgatcaaacatctacggacacacaacggggctagcccttaccagtgcacaatttgcacggaatactgcccgtccctgtcctctatgcagaagcacatgaaaggccacaagcccgaggagatacctcccgattggcgcatcgagaagacgtacctttacctctgctatgtgtag

SEQ ID NO: 26832 - DNA, 2022 bp, Artificial Sequence
  derived and/or modified sequence
atggacctcacgaagatgggaatgatccagctgcagaacccctcccatccgacaggcctcctctgcaaagctaaccagatgagactagccggtaccctctgtgatgtggtcataatggtggatagccaggaattccacgcacacaggactgttcttgcttgtacatccaagatgtttgagatattgttccatcgaaactctcagcactatactctcgactttcttagtccaaaaacgttccagcagatactcgaatacgcatacaccgctacacttcaagcaaaggccgaggatctcgatgacctgctgtacgccgcggaaatactggaaattgagtatcttgaggagcagtgtctgaaaatgctggaaaccattcaggctagcgatgataatgataccgaggccacaatggcggatggtggggcagaggaagaggaggatcgcaaggcaagatatctcaaaaacatcttcatatcgaagcacagctctgaagagtcagggtatgcctctgtggctggtcaatctctgcccggtcctatggttgaccagtcccctagcgtgagtacctctttcggactgagcgccatgtcacctactaaggcagctgtggacagcctaatgactataggccagagcctcctccagggaaccctgcagcctcctgcggggcctgaagagccgaccttagcaggcggcggcaggcatccaggagtggctgaggtgaaaacggagatgatgcaggtggatgaagtgccatcccaggactccccaggagcagccgagagctccattagcggcggaatgggagataaagtggaggaacgcggcaaggagggaccaggtacccccacccgttcttcagttatcactagcgcacgcgaacttcattacgggcgggaagaaagtgcagaacaggtgcctccccccgccgaagccggccaggcgcctacaggtcggcctgaacacccggctcctcctccagagaagcatctcggaatatactccgtcctccctaaccataaagctgatgctgtgcttagcatgccgagctccgttactagtgggctacatgttcaacctgccctggccgtgagcatggacttttcaacgtatgggggcttactgccccagggttttatccagcgcgaactgtttagcaaattaggcgagcttgccgtgggcatgaaaagtgaatcaaggactattggcgagcagtgctctgtctgtggagtcgagctacctgacaacgaggctgtggagcagcatcgtaagcttcacagtggtatgaaaacatacggctgtgaactctgtggaaagcgattcctcgattccctccgtctgcggatgcatctgctggcccattcggcaggtgcaaaagctttcgtctgcgaccaatgtggggctcagttctccaaagaggatgccctggagactcatcggcagacccatacaggaaccgacatggccgttttttgtctgctgtgcggaaaaagattccaggcccaaagcgcactccagcagcacatggaggtccacgctggcgttcgttcatacatctgttcagagtgtaataggactttcccaagccacacagccttgaaaagacacctccggtcacataccggagaccacccttacgagtgtgagttttgcggcagctgctttagggatgaaagtaccctgaagtcacataagcgaatccacaccggggagaaaccctacgagtgtaatgggtgcgggaagaagttctctctgaagcaccaactggagactcactacagggtccacactggcgaaaaaccttttgagtgcaagctctgtcatcagaggtcacgtgattactcagcgatgatcaagcaccttcgcacccataatggagccagcccttatcagtgcacaatctgcacggagtattgcccctccctgtcttcgatgcaaaagcatatgaagggtcacaaacctgaggagatccctcccgactggaggatagagaaaacctacttgtacctgtgctacgtttag

SEQ ID NO: 26833 - DNA, 2022 bp, Artificial Sequence
  derived and/or modified sequence
atggatttgacaaagatgggtatgatccagctccaaaacccatcccaccctactgggctgttatgcaaagccaatcagatgagactggctggaactttgtgtgatgtggtgattatggtggactcccaggaatttcacgctcatcggacagttcttgcatgtaccagcaaaatgttcgaaatcctgttccacaggaacagccagcattacactcttgattttttgtcaccgaaaacctttcaacagattctcgagtatgcctatacagcaacactgcaggctaaagctgaagatttggatgaccttttgtacgcagcggagatactggagattgagtatctggaggagcagtgcctcaaaatgctcgagacaatacaggccagcgacgataacgacactgaagcaaccatggctgatggcggcgccgaggaagaagaagaccgtaaagctcggtatctgaagaacatcttcattagcaagcattcctccgaagagtccggttacgcttctgtggctggacaatctctgccaggacctatggttgaccagtcaccatccgtatctacaagtttcggcctgtcagccatgtcacccaccaaggctgctgtggattcgcttatgacaataggccagtctttactccagggcacattgcagccccccgcaggcccagaagagccgacactggcaggaggtggccgccacccgggggttgccgaggtgaaaaccgagatgatgcaagtggatgaggtgcccagtcaagattcccccggcgcagctgagtcatctatcagcggcgggatgggcgacaaagtggaagagcgcggaaaggagggtccagggacgcccactcgatcctcagtcataacatcagctagggaactgcactacgggcgcgaggagtctgccgagcaggttccacctcctgccgaggccggccaagccccaacaggccggccagagcacccggctcctcctcctgagaaacatctaggtatctactcggtgctccccaaccacaaggctgacgccgtattatcgatgccgagcagcgtaacgtcaggattgcacgtccaaccagccttagctgtgagcatggacttctctacgtacggcggcctactgccacagggctttatccagcgtgagctgttctccaaactgggagagctggcagtgggtatgaaaagcgaaagccgcacgatcggtgaacaatgcagcgtttgcggcgttgaattgccagataacgaagcagttgaacagcatagaaaactgcattcagggatgaaaacttatgggtgcgaactgtgcgggaagaggtttctggatagtttacgcctcaggatgcatctcctcgcccatagcgctggagccaaggcgttcgtctgcgatcagtgcggagcacagttcagtaaggaagatgcgctcgagactcaccgacagacccacaccggtacagatatggccgtgttctgcctgctctgcggtaagagattccaagcacagtcggctttgcagcaacatatggaagtgcatgccggagtgaggtcctatatttgttcagagtgtaaccgaacgttcccaagccacaccgcgctgaagcggcacctgcgatctcacaccggcgatcatccatacgagtgtgagttctgtggcagttgttttcgagatgagagcacattgaaatctcacaaacgaattcacacaggagagaagccgtacgaatgtaacgggtgcggtaagaagttcagtctgaagcatcagttggaaactcactatcgtgttcatacgggcgagaagccgttcgaatgcaagctgtgccaccagaggagtcgagactattcagccatgatcaaacacttgaggacccacaatggggcaagcccgtatcagtgtaccatttgcacagaatattgcccttctttgtcttcaatgcaaaaacacatgaaagggcataagcctgaagagattcctcctgattggagaattgagaagacctatctgtatctatgctacgtctag

SEQ ID NO: 26834 - DNA, 1653 bp, Artificial Sequence
  derived and/or modified sequence
atggacctgaccaagatgggcatgatccagctgcagaaccccagccaccccaccggcctgctgtgcaaggccaaccagatgaggctggccggcaccctgtgtgatgtggtgatcatggtggacagccaggagttccacgcccacaggacagtgctggcctgcaccagcaagatgtttgagatcctcttccacaggaacagccagcactacaccctggacttcctgagccccaagaccttccagcagatcctggagtatgcctacacagccaccctgcaggccaaggccgaggacctggatgacctgctgtatgctgctgagatcctggagattgagtacctggaggagcagtgcctgaagatgctggagaccatccaggccagtgatgacaatgacacagaggccaccatggctgatggaggagctgaggaggaggaggacaggaaggcccgctacctgaagaacatcttcatcagcaagcacagcagcgaggagagcggctacgcctctgtggccggccagagcctgcccggccccatggtggaccagagccccagcgtgtccaccagctttggcctgagcgccatgagccccaccaaggctgctgtggacagcctgatgaccatcggccagagcctgctgcagggcaccctgcagcccccagctggccctgaggagcccaccctggccggcggcggccgccaccctggggtggccgaggtgaagacagagatgatgcaggtggatgaggtgcccagccagggcttcatccagcgggagctgttcagcaagctgggggagctggccgtgggcatgaagtctgagagcaggaccatcggggagcagtgcagcgtgtgtggggtggagctgcctgacaatgaagctgtggagcagcacaggaagctgcacagcggcatgaagacctacggctgtgagctgtgtgggaagcgcttcctggacagcctgcggctgaggatgcacctgctggcccacagcgctggggccaaggcctttgtgtgtgaccagtgtggggcccagttcagcaaggaggatgccctggagacccaccggcagacccacactggaacagacatggctgtgttctgcctgctgtgtgggaagcgcttccaggcccagagcgccctgcagcagcacatggaggtgcacgccggcgtgcgcagctacatctgcagcgagtgcaacagaaccttccccagccacacagccctgaagaggcacctgcggagccacactggagaccacccctatgaatgtgagttctgtggcagctgcttcagagatgagagcaccctgaagagccacaagaggatccacactggagagaagccctatgagtgcaatggctgtgggaagaagttcagcctgaagcaccagctggagacccactacagagtgcacactggagagaagccctttgagtgcaagctgtgccaccagaggagccgggactacagcgccatgatcaagcacctgcggacccacaacggggccagcccctaccagtgcaccatctgcacagagtactgccccagcctgagctccatgcagaagcacatgaagggccacaagccagaggagatccccccagactggagaattgagaagacctacctgtacctgtgctacgtgtag

SEQ ID NO: 26835 - DNA, 2022 bp, Artificial Sequence
  derived and/or modified sequence
atggacctgaccaagatgggcatgatccagctgcagaaccccagccaccccaccggcctgctgtgcaaggccaaccagatgaggctggccggcaccctgtgtgatgtggtgatcatggtggacagccaggagttccacgcccacaggacagtgctggcctgcaccagcaagatgtttgagatcctcttccacaggaacagccagcactacaccctggacttcctgagccccaagaccttccagcagatcctggagtatgcctacacagccaccctgcaggccaaggccgaggacctggatgacctgctgtatgctgctgagatcctggagattgagtacctggaggagcagtgcctgaagatgctggagaccatccaggccagtgatgacaatgacacagaggccaccatggctgatggaggagctgaggaggaggaggacaggaaggcccgctacctgaagaacatcttcatcagcaagcacagcagcgaggagagcggctacgcctctgtggccggccagagcctgcccggccccatggtggaccagagccccagcgtgtccaccagctttggcctgagcgccatgagccccaccaaggctgctgtggacagcctgatgaccatcggccagagcctgctgcagggcaccctgcagcccccagctggccctgaggagcccaccctggccggcggcggccgccaccctggggtggccgaggtgaagacagagatgatgcaggtggatgaggtgcccagccaggacagccctggagctgctgagagcagcatcagcggcggcatgggagacaaggtggaggagcggggcaaggagggccctggcacccccaccaggagcagcgtcatcaccagcgcccgggagctgcactacggccgggaggagagcgctgagcaggtgcccccacctgctgaggccggccaggcccccaccggccggcctgagcacccagcccctcctcctgagaagcacctgggcatctacagcgtgctgcccaaccacaaggcagatgctgtgctgtccatgcccagctctgtgaccagcggcctgcacgtgcagcctgccctggccgtgtccatggacttcagcacctatggaggcctgctgccccagggcttcatccagcgggagctgttcagcaagctgggggagctggccgtgggcatgaagtctgagagcaggaccatcggggagcagtgcagcgtgtgtggggtggagctgcctgacaatgaggccgtggagcagcacaggaagctgcacagcggcatgaagacctacggctgtgagctgtgtgggaagcgcttcctggacagcctgcggctgaggatgcacctgctggcccacagcgctggggccaaggcctttgtgtgtgaccagtgtggggcccagttcagcaaagaagatgccctggagacccaccggcagacccacactggaacagacatggctgtgttctgcctgctgtgtgggaagcgcttccaggcccagagcgccctgcagcagcacatggaggtgcatgctggggtgcgcagctacatctgcagcgagtgcaacagaaccttccccagccacacagccctgaagaggcacctgcggagccacactggagaccacccctatgaatgtgagttctgtggcagctgcttcagagatgagagcaccctgaagagccacaagaggatccacactggagagaagccctatgaatgtaatggctgcggcaagaagttcagcctgaagcaccagctggagacccactacagagtgcacactggagagaagccctttgagtgcaagctgtgccaccagaggagccgggactacagcgccatgatcaagcacctgcggacccacaatggagccagcccctaccagtgcaccatctgcacagagtactgccccagcctgagctccatgcagaagcacatgaagggccacaagccagaggagatccccccagactggagaattgagaagacctacctgtacctgtgctacgtgtag

SEQ ID NO: 26836 - DNA, 1653 bp, Artificial Sequence
  derived and/or modified sequence
atggacctgaccaagatgggcatgatccagctgcagaaccccagccaccccaccggcctcctctgcaaggctaaccaaatgagactcgcgggtactctctgtgatgtggtcatcatggtcgactcacaggaatttcatgcacaccgcaccgttttggcctgcactagtaagatgtttgagattctctttcaccgaaactcgcagcactatacgctggatttcctgagcccaaaaactttccaacagattctcgagtacgcatacacggctacgctacaagctaaggctgaggatctggatgatttgctgtatgcagcagaaatcctggagattgaatatctggaagaacagtgcctgaaaatgctggaaacaattcaagcatccgacgataacgacaccgaggcaacaatggccgatggaggcgcagaggaagaggaagatagaaaagcccgctacctgaagaacatttttatcagcaagcattcgtccgaagagtcagggtacgcctccgtggcgggccagtccctgcccggacctatggtcgaccagtcccctagtgtgagcactagttttgggctgtccgccatgagccctactaaagctgctgtggactcattaatgactatcggacagtctctccttcagggcacgctgcaaccacccgctggtcccgaggaacctaccctggcagggggaggccgtcacccgggggtggccgaggtgaagaccgaaatgatgcaggttgacgaagtcccaagtcagggcttcattcagcgcgaattgtttagcaagctgggggagctcgccgtgggaatgaagagtgaatcccgcaccatcggcgaacagtgctccgtttgcggcgtcgagttaccagacaacgaggccgtggagcagcacaggaagctccactcaggcatgaagacatatggctgtgaactgtgtggcaagagattcttggacagtctccgactcagaatgcaccttctcgcccactccgctggagccaaggcctttgtgtgcgaccagtgcggggcccagttcagcaaagaggacgccctggaaactcaccgccaaacccatactggcaccgatatggccgtattctgtctgttatgtgggaagaggtttcaggcccagtccgcgctgcagcagcatatggaggtccacgctggagtgcgatcttatatatgcagcgaatgtaaccgaaccttcccaagccatacagctctgaaacggcatctgcgttcccataccggtgaccacccctatgaatgtgaattttgtggtagctgcttccgtgatgagtcgacgttgaagagtcacaaaaggatccacacaggcgaaaaaccttatgagtgcaacggctgcggtaagaaattttcccttaaacaccagcttgagacccattatagggtccacactggcgaaaaaccatttgagtgtaagctgtgccatcagcgcagcagagattactcggctatgatcaagcatcttagaacccacaatggggcaagtccatatcaatgcacgatttgcaccgagtactgtccaagcctctccagtatgcagaagcacatgaagggtcacaagcctgaggagattcccccagactggcgcattgaaaagacatatctatatctgtgctacgtttag

SEQ ID NO: 26837 - DNA, 2022 bp, Artificial Sequence
  derived and/or modified sequence
atggacctgaccaagatgggcatgatccagctgcagaaccccagccacccaactggtctcctttgcaaggcaaatcagatgagactggctggcactctgtgcgacgtagtgattatggtggacagccaggagttccacgcccacaggaccgttctcgcctgcaccagcaaaatgtttgagatcctttttcaccgaaacagccaacactacaccctcgatttcctgagcccaaagacctttcagcaaattctggagtacgcgtatacagcaaccttacaggcaaaagcggaagatctggatgatctgctgtacgctgccgagattctggaaattgagtacttggaggaacagtgtctgaaaatgcttgaaaccattcaggcgtctgacgacaatgataccgaggcgaccatggcagatgggggcgcggaggaggaagaagaccggaaagctagatacctcaagaacatttttatctccaaacactcttctgaggaaagcggatacgcatctgttgcaggccaatcactgcccggaccgatggtggaccaaagtccctcagtatctacgagctttggcctgtccgcaatgtctcccactaaagctgccgttgattcactcatgacgataggtcagagtctgctgcaaggcacactgcagccacccgctggtcccgaggaacctaccttggcgggaggagggagacacccaggagtagccgaagtcaagaccgagatgatgcaggtggatgaggtgccttctcaggatagtcccggggccgcagagagtagcatcagcggtgggatgggagacaaagtcgaagaaaggggcaaagagggccccggtacgccgacacggtcgtccgtcattacaagcgcacgggagcttcactacgggcgcgaagaatccgccgagcaagtgccccctcctgccgaagctggccaggcccccacgggtagaccagagcatccagccccccctcctgaaaaacacctcggtatttacagtgtgctgccaaatcacaaggccgacgctgtcctcagcatgcccagctccgttacaagtggcctgcatgtccagcctgctctcgccgtttccatggactttagcacatacggtgggctactcccccaggggttcattcagcgggagctgttttcaaagcttggagagctggcagtcggtatgaaatctgaatctcggactatcggggaacaatgttctgtttgcggggtcgaattaccggataatgaagccgtggaacaacatagaaagttgcacagcggtatgaagacatacggctgcgagctgtgcggaaaacgattcctcgactccctgcgcctgagaatgcacctgctggctcactctgccggggccaaggctttcgtctgtgatcagtgcggtgcgcaatttagcaaagaggatgcactcgagactcacagacagacccacacaggaactgacatggctgttttttgtctgctatgcggtaagagatttcaagctcagtcggcactccagcagcacatggaagtacatgccggcgtgaggtcctatatctgcagtgaatgcaaccgcacttttccctctcacacagcattgaaaaggcacttgcgcagccacaccggcgatcacccgtatgaatgtgagttctgcgggtcttgctttagagatgaaagtacattaaagtctcacaaaagaattcataccggcgagaagccttacgaatgtaatgggtgcggcaagaaattttccctgaaacaccagctggaaacccattacagggtccataccggggagaagccctttgaatgtaaactgtgccatcagcgctcgagagactattcggcgatgattaagcacctcaggacccataacggtgcttcaccctaccaatgtaccatttgcactgagtattgtccttcgttaagttctatgcaaaagcatatgaaaggccataagcccgaagaaatccctcctgattggcggatcgaaaaaacctacctctacctttgttacgtttag

SEQ ID NO: 26838 - DNA, 2022 bp, Artificial Sequence
  derived and/or modified sequence
atggacctgaccaagatgggcatgatccagctgcagaaccccagccaccccactgggttgctgtgcaaagctaaccagatgcggctcgctggcaccctgtgcgatgtagtgattatggtggactctcaagaattccatgcacatcggacagtgctggcatgtactagcaaaatgtttgaaatcctgtttcacagaaacagccagcattacactctggacttcttgtcacccaagacatttcagcagatcctcgaatatgcctacacagcaactctccaagctaaggcagaagatctggatgatctgctgtacgcagcagagatcctggaaattgagtatttagaggagcagtgccttaaaatgctggagaccatccaggctagcgacgacaacgatactgaggcgaccatggctgatgggggggcggaggaggaggaagaccggaaggcccgatatctcaagaacatctttattagtaaacattcctcggaagagtccgggtatgccagcgtagccggacaatctctccccggccccatggtcgatcagagtccctccgtgtcaacctccttcgggttaagcgcaatgagccccaccaaggccgccgtcgactctctaatgacgatcggacaaagcctcctgcaaggaacactccagccgcccgctggccccgaagagcccaccctggccggagggggcagacatccaggagtcgctgaggtaaagaccgaaatgatgcaggtggatgaggtcccttcccaagattcaccaggcgccgccgaatcatctatctctggagggatgggcgataaggtggaggaacgaggaaaggaaggaccaggcacaccaacccgctcaagcgtaattacctctgcccgggagctacattatggacgagaagaatcagcagagcaggtgccacctcccgcagaagccgggcaggctcccacaggccgacctgagcatccagccccacctccagaaaaacatctggggatctacagcgtcttgcccaaccataaagctgacgcggtcctgagtatgccctcctctgtgacctcgggcctgcacgtgcagcctgcactggccgtatccatggactttagcacctacggtggcctgttacctcagggctttatccagcgcgagctgtttagcaagctcggggaattggcagtaggaatgaagagcgagagccggactattggcgagcagtgctccgtctgcggagtggagttacccgacaacgaggccgtggagcagcataggaaactccattccggtatgaagacttacggatgcgaactgtgtgggaaaagatttctggactccttgaggctgaggatgcacctgctagcccatagcgcaggagccaaggcgtttgtatgcgaccagtgcggcgcccagttcagtaaggaagacgccttggaaacgcacagacaaactcataccgggactgacatggctgtcttttgtctcctgtgcggcaagaggtttcaagcccaatcagcactgcagcagcatatggaggtgcatgcgggcgtgcggagctacatttgttccgagtgtaatcgcacgtttccgagtcacaccgccctcaagcgtcacctgcgatcacatactggcgatcatccttatgaatgtgaattctgtggcagctgcttccgagacgagtccactctgaagagtcacaagcgtatacatacaggcgaaaagccgtatgagtgcaatggctgtgggaagaagttctctttgaagcaccagctggaaactcattaccgcgtccacacaggcgaaaaaccttttgaatgtaaactttgtcatcagcgctcgagggattactctgcaatgataaaacatctgcgaacgcacaatggggcctccccctatcagtgtaccatatgcaccgagtattgcccatcacttagcagtatgcaaaagcacatgaaaggacataagcctgaggagattccacctgattggcgtatcgaaaagacttacctgtacctttgttacgtatag

SEQ ID NO: 26839 - DNA, 1653 bp, Artificial Sequence
  derived and/or modified sequence
atggatctgaccaagatgggtatgatccagctgcagaacccctctcaccccaccggcctactgtgcaaagccaatcaaatgcgcttagccggtacactgtgtgatgtggtaattatggttgattcccaggagtttcatgcccaccggacagtgctcgcatgcacatccaaaatgtttgagatcctgttccacagaaattctcagcactatactctggatttcctgagcccaaaaaccttccagcagatcctggaatatgcttacacagccaccttgcaggcaaaggccgaagatctggacgacctgttgtacgcagcagagattctggagatcgaatacctggaggagcagtgtttaaaaatgcttgagactatccaagcgtccgacgataatgacacggaagcaactatggccgacggaggcgcagaggaggaagaggaccggaaggctcggtatctgaaaaatattttcattagtaaacactcatcagaagaaagtggctatgcctccgtggccggacagtccctgccaggcccaatggttgaccagtctcctagtgtgtccactagcttcggattgagcgcaatgagccccaccaaggcggctgtggattcattgatgaccatcggacagagcttgctgcagggtacattgcagcccccagcagggccagaggaacccactttggctggtggcggacgacaccctggtgtcgcggaggtgaaaacagaaatgatgcaagttgatgaagtaccctcccaggggtttatccagcgagaactcttcagtaaattgggtgagctggcagtcggaatgaagagcgaatcacgtaccataggggaacagtgttccgtgtgcggcgttgaacttccagataatgaggctgttgagcaacatagaaagctgcattctggaatgaagacctacggctgcgagctctgtggcaagagatttctggactcccttaggctgaggatgcacctgcttgctcactcggccggtgctaaagcattcgtttgtgatcagtgcggagcccaattctctaaagaggatgcgcttgagactcacagacaaacacacactgggacggacatggcagtcttctgcttgctgtgtgggaaacgttttcaagctcaaagcgcactccaacagcatatggaggttcacgcaggggttcggagctacatttgttctgaatgcaacaggacctttccctcccacacggcgttgaaaagacatttgcggtcccacaccggcgaccatccctacgagtgtgagttttgtggtagctgttttcgggatgaatcaactctgaagagccacaaaagaattcacactggcgaaaagccctatgagtgtaacggatgcggcaaaaaattctcactaaaacatcagcttgaaacacattaccgcgtgcacactggggaaaagcccttcgaatgcaaactgtgccatcagcgctccagagattattcagccatgattaagcacctcaggacccataacggagcatccccttatcaatgcactatttgtactgaatactgtccatctctttcgagtatgcagaaacacatgaaaggccacaaaccagaagagattcctcctgactggaggatagagaagacctatctttacctatgttacgtatag

SEQ ID NO: 26840 - DNA, 2022 bp, Artificial Sequence
  derived and/or modified sequence
atggacctcacaaagatggggatgattcagctgcagaacccaagtcaccccaccggcttactatgtaaagcaaaccaaatgagactggccggtacgctctgtgatgttgtgataatggtagattcacaggaattccatgctcaccgtacagtcctggcctgcacctctaagatgtttgagatactcttccaccgtaactctcagcactataccctcgacttcttgtccccaaagacttttcagcaaattctggaatatgcttatacagcaacactgcaggccaaggccgaggatctcgacgaccttctgtatgctgccgaaattctcgaaatcgaatatctcgaggaacagtgcctcaagatgctggagacaattcaagcctccgacgacaacgacacagaagctaccatggctgatggcggtgctgaggaggaggaagatcgtaaggccaggtatctaaagaacatattcattagcaaacactccagtgaggagtcggggtatgcgagtgtagccggacagtccctgccaggacccatggttgatcagagtcccagcgtgagtaccagctttggcttatccgccatgtcccctacaaaagccgctgtcgacagcctcatgaccatcggccagtccctgctgcaggggacgcttcagccacctgccggtccagaagagcccaccctggccggaggtgggcgtcaccccggtgtcgctgaggtgaaaaccgagatgatgcaggtggatgaagttccctcccaggattctcccggtgccgctgaaagcagcatctcgggcggtatgggggataaggtggaggagagggggaaagagggccctggtaccccgacccgaagctctgtcataacttccgcacgggagctgcattatggcagagaagagtccgccgaacaggtcccaccacctgccgaggccggtcaggcacccacgggtcggcctgaacatccagcccctccacctgagaagcatcttgggatctactcagtcctgcctaatcacaaggccgacgccgtgctgtctatgcccagcagcgtgactagtggtcttcacgttcaacccgctctagccgtctcgatggacttttccacatacggtggcctcctgccccaaggattcatccaaagggagctgttttccaaattaggagaactggccgtaggcatgaagtccgaatcgcgcacgattggggaacagtgttccgtgtgcggggttgaattgccagataacgaggcagtagaacagcatcgtaagctacacagcggaatgaaaacttatggatgcgagctgtgcgggaagaggttcctcgattcgctccgattgagaatgcatcttctggctcactcagcgggtgcaaaagccttcgtctgcgaccagtgcggagcccagttcagcaaggaggacgcattggaaacacacagacagacccataccggaacagatatggctgtgttttgcctgttatgtggaaagagatttcaagcccagtccgccctgcaacagcatatggaagtgcacgccggagtccgctcctatatttgtagcgagtgtaaccgcacttttccctcccacactgcgctcaaaagacacttaaggtcccacaccggcgatcacccatatgagtgtgaattttgtggcagttgtttccgcgatgagtcaactctgaaaagccacaaaaggatacatactggcgaaaaaccatatgagtgcaacggctgtggcaagaagttcagtttgaagcatcagctcgagactcattatagagttcatacgggagaaaaaccatttgagtgtaaactttgtcaccaacggtcgagggactactcggctatgattaagcatctccggacgcacaatggggcatcaccttatcagtgtacaatttgcactgaatactgccctagcctctcatcaatgcagaagcatatgaagggacataagcccgaagaaattccgcctgactggcgcattgagaaaacttacctgtacctgtgttatgtgtag

SEQ ID NO: 26841 - DNA, 2022 bp, Artificial Sequence
  derived and/or modified sequence
atggatctgacgaagatgggcatgatccaacttcaaaatcccagtcatccaacaggcctgctatgtaaggctaatcagatgaggcttgctggtacactgtgtgatgtggtgatcatggttgattcgcaggagtttcacgcacaccggaccgtcttagcttgcacgtccaagatgttcgaaattctctttcacaggaactcacaacactacacgcttgattttctctccccgaagacgtttcagcaaattttggaatatgcttacacagctaccctccaagctaaggcagaggatctggatgacctgctgtatgctgccgaaattctggaaattgagtatttagaagagcagtgcctgaagatgttggaaaccatccaggcctcagacgacaatgatactgaggctaccatggccgatggaggcgctgaagaggaagaggatagaaaagctcgatacctcaaaaacatctttataagcaaacattcctccgaggaatctggatatgcaagcgttgcaggtcaatcgctgcctgggccaatggtggatcagagcccgtcagtaagcacctctttcgggctgtctgcaatgagcccgacaaaagccgcagtggatagcctcatgacaattggccagagtctgctgcaggggactctgcagcccccagcagggcctgaagagcccacgcttgccggtgggggtcgacaccctggggtggcagaagtcaaaacagaaatgatgcaggttgacgaagttccttctcaggacagtccaggggctgccgaaagctctatatctggtgggatgggagacaaggtagaggagcgagggaaggaggggccaggaacccccacacgctcatccgtgataacgtcggcaagagagctgcactacggacgtgaagagtcagctgaacaggttccccctcctgctgaagctggacaagcccctacgggccgacctgaacatcctgcacccccaccagagaaacaccttggcatctatagcgtcctgccaaaccataaagctgacgcagtcctgtccatgcctagcagcgtcacctccggattacacgttcaaccagcgttggcagtgtctatggactttagtacgtacggtggtcttctgccccagggctttatccaacgggagctgtttagcaaacttggagaactcgccgtggggatgaagagtgaatctcgtaccatcggggagcagtgcagcgtgtgtggggttgaattgccagacaatgaggcagtggagcagcataggaagttacatagtggtatgaagacctacggctgtgagttatgcggaaagcgtttcctcgacagtctgcgcttacgcatgcatctgctggcccatagcgccggtgccaaagcctttgtgtgcgatcaatgcggagcacagttctccaaagaagatgcccttgagacccataggcagacccacaccgggacagacatggcggtcttctgcctgctttgtggtaagagattccaggcccaatccgccctccaacagcacatggaagtccacgccggagtgcgctcctacatttgcagcgagtgtaacagaaccttcccctctcataccgcgttgaagagacacctgcggtcccacacaggggatcacccatacgaatgcgagttttgtgggtcatgtttccgagatgagtcaacgctcaagtcgcacaagaggattcacacaggggagaagccttatgaatgcaatgggtgcgggaaaaagttttcactgaagcaccaattggagacccattaccgggtccacacaggggagaaacctttcgaatgcaaactgtgtcatcagaggtccagagattatagcgcgatgattaagcacctgagaacacacaatggtgcaagcccctaccagtgcaccatttgtaccgaatactgccccagtctctcctcaatgcagaaacatatgaagggacacaagcccgaggaaatccctcctgactggcggattgagaagacttacctgtatctatgctacgtgtag

SEQ ID NO: 26842 - DNA, 1728 bp, Artificial Sequence
  derived and/or modified sequence
atggatctgacaaaaatgggcatgatccagctgcagaaccctagccaccccacggggctactgtgcaaggccaaccagatgcggctggccgggactttgtgcgatgtggtcatcatggtggacagccaggagttccacgcccaccggacggtgctggcctgcaccagcaagatgtttgagatcctcttccaccgcaatagtcaacactatactttggacttcctctcgccaaagaccttccagcagattctggagtatgcatatacagccacgctgcaagccaaggcggaggacctggatgacctgctgtatgcggccgagatcctggagatcgagtacctggaggaacagtgcctgaagatgctggagaccatccaggcctcagacgacaatgacacggaggccaccatggccgatggcggggccgaggaagaagaggaccgcaaggctcggtacctcaagaacatcttcatctcgaagcattccagcgaggagagtgggtatgccagtgtggctggacagagcctccctgggcccatggtggaccagagcccttcagtctccacttcatttggtctttcagccatgagtcccaccaaggctgcagtggacagtttgatgaccataggacagtctctcctgcagggaactcttcagccacctgcagggcccgaggagccaactctggctgggggtgggcggcaccctggggtggctgaggtgaagacggagatgatgcaggtggatgaggtgcccagccagggcttcatccagagggagctgttcagcaagctgggggagctggctgtgggcatgaagtcagagagccggaccatcggagagcagtgcagcgtgtgtggggtcgagcttcctgataacgaggctgtggagcagcacaggaagctgcacagtgggatgaagacgtacgggtgcgagctctgcgggaagcggttcctggatagtttgcggctgagaatgcacttactggctcattcagcgggtgccaaagcctttgtctgtgatcagtgcggtgcacagttttcgaaggaggatgccctggagacacacaggcagacccatactggcactgacatggccgtcttctgtctgctgtgtgggaagcgcttccaggcgcagagcgcactgcagcagcacatggaggtccacgcgggcgtgcgcagctacatctgcagtgagtgcaaccgcaccttccccagccacacggctctcaaacgccacctgcgctcacatacaggcgaccacccctacgagtgtgagttctgtggcagctgcttccgggatgagagcacactcaagagccacaaacgcatccacacgggtgagaaaccctacgagtgcaatggctgtggcaagaagttcagcctcaagcatcagctggagacgcactatagggtgcacacaggtgagaagccctttgagtgtaagctctgccaccagcgctcccgggactactcggccatgatcaagcacctgagaacgcacaacggcgcctcgccctaccagtgcaccatctgcacagagtactgccccagcctctcctccatgcagaagcacatgaagggccacaagcccgaggagatcccgcccgactggaggatagagaagacgtacctctacctgtgctatgtgtgaagggaggcccgcggcggtggagccgagcggggagccaggaaagaagagttggagtgagatgaaggaaggactatg

SEQ ID NO: 26843 - DNA, 2523 bp, Artificial Sequence
  derived and/or modified sequence
gggctcggccgccagcactaaagatggagaggcgccggggccttgcaggggagggggctcggcgttgacgtgggacgcggcggaggcgcagcagccggtggtgatttgctaacctcgcagcagagaggagttgagggcgatgagagcgggtactgcgaactgccgggcgatgctgtcgctgccgccgtgatacggagagcaacagttccccagcaacacccctccccgacacaggcacacaccccccgacaggcacgcacacccaccccacagtgcccggctcggctgcgcctcctctattggcccaggaagcccacccagccccgccacgcagagcccagaaggaaagaaagcctcatgcctgagccgaggggagcaccatggatctgacaaaaatgggcatgatccagctgcagaaccctagccaccccacggggctactgtgcaaggccaaccagatgcggctggccgggactttgtgcgatgtggtcatcatggtggacagccaggagttccacgcccaccggacggtgctggcctgcaccagcaagatgtttgagatcctcttccaccgcaatagtcaacactatactttggacttcctctcgccaaagaccttccagcagattctggagtatgcatatacagccacgctgcaagccaaggcggaggacctggatgacctgctgtatgcggccgagatcctggagatcgagtacctggaggaacagtgcctgaagatgctggagaccatccaggcctcagacgacaatgacacggaggccaccatggccgatggcggggccgaggaagaagaggaccgcaaggctcggtacctcaagaacatcttcatctcgaagcattccagcgaggagagtgggtatgccagtgtggctggacagagcctccctgggcccatggtggaccagagcccttcagtctccacttcatttggtctttcagccatgagtcccaccaaggctgcagtggacagtttgatgaccataggacagtctctcctgcagggaactcttcagccacctgcagggcccgaggagccaactctggctgggggtgggcggcaccctggggtggctgaggtgaagacggagatgatgcaggtggatgaggtgcccagccaggacagccctggggcagccgagtccagcatctcaggagggatgggggacaaggttgaggaaagaggcaaagaggggcctgggaccccgactcgaagcagcgtcatcaccagtgctagggagctacactatgggcgagaggagagtgccgagcaggtgccacccccagctgaggctggccaggcccccactggccgacctgagcacccagcacccccgcctgagaagcatctgggcatctactccgtgttgcccaaccacaaggctgacgctgtattgagcatgccgtcttccgtgacctctggcctccacgtgcagcctgccctggctgtctccatggacttcagcacctatggggggctgctgccccagggcttcatccagagggagctgttcagcaagctgggggagctggctgtgggcatgaagtcagagagccggaccatcggagagcagtgcagcgtgtgtggggtcgagcttcctgataacgaggctgtggagcagcacaggaagctgcacagtgggatgaagacgtacgggtgcgagctctgcgggaagcggttcctggatagtttgcggctgagaatgcacttactggctcattcagcgggtgccaaagcctttgtctgtgatcagtgcggtgcacagttttcgaaggaggatgccctggagacacacaggcagacccatactggcactgacatggccgtcttctgtctgctgtgtgggaagcgcttccaggcgcagagcgcactgcagcagcacatggaggtccacgcgggcgtgcgcagctacatctgcagtgagtgcaaccgcaccttccccagccacacggctctcaaacgccacctgcgctcacatacaggcgaccacccctacgagtgtgagttctgtggcagctgcttccgggatgagagcacactcaagagccacaaacgcatccacacgggtgagaaaccctacgagtgcaatggctgtggcaagaagttcagcctcaagcatcagctggagacgcactatagggtgcacacaggtgagaagccctttgagtgtaagctctgccaccagcgctcccgggactactcggccatgatcaagcacctgagaacgcacaacggcgcctcgccctaccagtgcaccatctgcacagagtactgccccagcctctcctccatgcagaagcacatgaagggccacaagcccgaggagatcccgcccgactggaggatagagaagacgtacctctacctgtgctatgtgtgaagggaggcccgcggcggtggagccgagcggggagccaggaaagaagagttggagtgagatgaaggaaggactatgacaaataaaaaaggaaaagaaaaaaaaaaacagaaggaaaaggaaa

SEQ ID NO: 26844 - DNA, 2287 bp, Artificial Sequence
  derived and/or modified sequence
agcgctgcgggccctcctcggctctcggcgggaccggcggtgacaccggagctcgccgtgcgctcccggccgctctcgcctcctctattggcccaggaagcccacccagccccgccacgcagagcccagaaggaaagaaagcctcatgcctgagccgaggggagcaccatggatctgacaaaaatgggcatgatccagctgcagaaccctagccaccccacggggctactgtgcaaggccaaccagatgcggctggccgggactttgtgcgatgtggtcatcatggtggacagccaggagttccacgcccaccggacggtgctggcctgcaccagcaagatgtttgagatcctcttccaccgcaatagtcaacactatactttggacttcctctcgccaaagaccttccagcagattctggagtatgcatatacagccacgctgcaagccaaggcggaggacctggatgacctgctgtatgcggccgagatcctggagatcgagtacctggaggaacagtgcctgaagatgctggagaccatccaggcctcagacgacaatgacacggaggccaccatggccgatggcggggccgaggaagaagaggaccgcaaggctcggtacctcaagaacatcttcatctcgaagcattccagcgaggagagtgggtatgccagtgtggctggacagagcctccctgggcccatggtggaccagagcccttcagtctccacttcatttggtctttcagccatgagtcccaccaaggctgcagtggacagtttgatgaccataggacagtctctcctgcagggaactcttcagccacctgcagggcccgaggagccaactctggctgggggtgggcggcaccctggggtggctgaggtgaagacggagatgatgcaggtggatgaggtgcccagccaggacagccctggggcagccgagtccagcatctcaggagggatgggggacaaggttgaggaaagaggcaaagaggggcctgggaccccgactcgaagcagcgtcatcaccagtgctagggagctacactatgggcgagaggagagtgccgagcaggtgccacccccagctgaggctggccaggcccccactggccgacctgagcacccagcacccccgcctgagaagcatctgggcatctactccgtgttgcccaaccacaaggctgacgctgtattgagcatgccgtcttccgtgacctctggcctccacgtgcagcctgccctggctgtctccatggacttcagcacctatggggggctgctgccccagggcttcatccagagggagctgttcagcaagctgggggagctggctgtgggcatgaagtcagagagccggaccatcggagagcagtgcagcgtgtgtggggtcgagcttcctgataacgaggctgtggagcagcacaggaagctgcacagtgggatgaagacgtacgggtgcgagctctgcgggaagcggttcctggatagtttgcggctgagaatgcacttactggctcattcagcgggtgccaaagcctttgtctgtgatcagtgcggtgcacagttttcgaaggaggatgccctggagacacacaggcagacccatactggcactgacatggccgtcttctgtctgctgtgtgggaagcgcttccaggcgcagagcgcactgcagcagcacatggaggtccacgcgggcgtgcgcagctacatctgcagtgagtgcaaccgcaccttccccagccacacggctctcaaacgccacctgcgctcacatacaggcgaccacccctacgagtgtgagttctgtggcagctgcttccgggatgagagcacactcaagagccacaaacgcatccacacgggtgagaaaccctacgagtgcaatggctgtggcaagaagttcagcctcaagcatcagctggagacgcactatagggtgcacacaggtgagaagccctttgagtgtaagctctgccaccagcgctcccgggactactcggccatgatcaagcacctgagaacgcacaacggcgcctcgccctaccagtgcaccatctgcacagagtactgccccagcctctcctccatgcagaagcacatgaagggccacaagcccgaggagatcccgcccgactggaggatagagaagacgtacctctacctgtgctatgtgtgaagggaggcccgcggcggtggagccgagcggggagccaggaaagaagagttggagtgagatgaaggaaggactatgacaaataaaaaaggaaaagaaa

SEQ ID NO: 26845 - protein, 264 aa, Artificial Sequence
  derived and/or modified sequence
MTPGTQSPFFLLLLLTVLTATTAPKPATVVTGSGHASSTPGGEKETSATQRSSVPSSTEKNAFNSSLEDPSTDYYQELQRDISEMFLQIYKQGGFLGLSNIKFRPGSVVVQLTLAFREGTINVHDVETQFNQYKTEAASRYNLTISDVSVSDVPFPFSAQSGAGVPGWGIALLVLVCVLVALAIVYLIALAVCQCRRKNYGQLDIFPARDTYHPMSEYPTYHTHGRYVPPSSTDRSPYEKVSAGNGGSSLSYTNPAVAATSANL

SEQ ID NO: 26846 - protein, 259 aa, Artificial Sequence
  derived and/or modified sequence
MTPGTQSPFFLLLLLTVLTATTAPKPATVVTGSGHASSTPGGEKETSATQRSSVPSSTEKNAFNSSLEDPSTDYYQELQRDISEMFLQIYKQGGFLGLSNIKFRPGSVVVQLTLAFREGTINVHDVETQFNQYKTEAASRYNLTISDVSVSDVPFPFSAQSGAGVPGWGIALLVLVCVLVALAIVYLIALAVCQCRRKNYGQLDIFPARDTYHPMSEYPTYHTHGRYVPPSSTDRSPYEKRQNGWSTMPRGALPEESQG

SEQ ID NO: 26847 - DNA, 795 bp, Artificial Sequence
  derived and/or modified sequence
atgacccccggcacccagagccccttcttcctgctgctgctgctgaccgtgctgaccgccaccaccgcccccaagcccgccaccgtggtgaccggcagcggccacgccagcagcacccccggcggcgagaaggagaccagcgccacccagagaagcagcgtgcccagcagcaccgagaagaacgccttcaacagcagcctggaggaccccagcaccgactactaccaggagctgcagagagacatcagcgagatgttcctgcagatctacaagcagggcggcttcctgggcctgagcaacatcaagttcagacccggcagcgtggtggtgcagctgaccctggccttcagagagggcaccatcaacgtgcacgacgtggagacccagttcaaccagtacaagaccgaggccgccagcagatacaacctgaccatcagcgacgtgagcgtgagcgacgtgcccttccccttcagcgcccagagcggcgccggcgtgcccggctggggcatcgccctgctggtgctggtgtgcgtgctggtggccctggccatcgtgtacctgatcgccctggccgtgtgccagtgcagaagaaagaactacggccagctggacatcttccccgccagagacacctaccaccccatgagcgagtaccccacctaccacacccacggcagatacgtgccccccagcagcaccgacagaagcccctacgagaaggtgagcgccggcaacggcggcagcagcctgagctacaccaaccccgccgtggccgccaccagcgccaacctgtag

SEQ ID NO: 26848 - DNA, 780 bp, Artificial Sequence
  derived and/or modified sequence
atgacccccggcacccagagccccttcttcctgctgctgctgctgaccgtgctgaccgccaccaccgcccccaagcccgccaccgtggtgaccggcagcggccacgccagcagcacccccggcggcgagaaggagaccagcgccacccagagaagcagcgtgcccagcagcaccgagaagaacgccttcaacagcagcctggaggaccccagcaccgactactaccaggagctgcagagagacatcagcgagatgttcctgcagatctacaagcagggcggcttcctgggcctgagcaacatcaagttcagacccggcagcgtggtggtgcagctgaccctggccttcagagagggcaccatcaacgtgcacgacgtggagacccagttcaaccagtacaagaccgaggccgccagcagatacaacctgaccatcagcgacgtgagcgtgagcgacgtgcccttccccttcagcgcccagagcggcgccggcgtgcccggctggggcatcgccctgctggtgctggtgtgcgtgctggtggccctggccatcgtgtacctgatcgccctggccgtgtgccagtgcagaagaaagaactacggccagctggacatcttccccgccagagacacctaccaccccatgagcgagtaccccacctaccacacccacggcagatacgtgccccccagcagcaccgacagaagcccctacgagaagagacagaacggctggagcaccatgcccagaggcgccctgcccgaggagagccagggctag

SEQ ID NO: 26849 - DNA, 795 bp, Artificial Sequence
  derived and/or modified sequence
atgacacccggaacacagagccccttttttctgctgttgctccttaccgtcttgaccgctaccaccgcccctaagcctgcaacagtagtgaccggaagtggccatgcgtcctcaaccccaggcggcgagaaggagacaagcgcgacacagagatcatccgtgccctcttcgactgagaagaacgcttttaatagctctttagaggatcctagcaccgattactaccaagagttgcagcgagacatctcggagatgttcctgcagatatacaaacaaggaggcttcctgggcttgtctaacattaaattccgccctgggtctgttgtggtgcaactgactctagcattcagagaggggaccattaacgtgcatgacgtcgaaacccagtttaaccaatataagacagaagcagcatcccggtataacctgaccataagtgatgtctcggtgtccgacgtgccgtttccctttagtgcccaaagcggagccggagtgcctgggtggggcatagctctgttggtgctggtatgtgttcttgtggcactcgctattgtgtacctcattgccttggcagtttgtcagtgccgccgaaagaactatgggcagcttgacatcttccccgcacgcgatacataccatcccatgagtgagtatccaacttatcacacacatggaaggtatgtccctcctagcagtaccgatcgatcaccctacgagaaggtcagtgccggaaatggcgggtcgagcctctcctacacaaacccagctgtcgctgccactagtgccaatttgtag

SEQ ID NO: 26850 - DNA, 780 bp, Artificial Sequence
  derived and/or modified sequence
atgacgcctggcactcagagtccttttttcctcctgctccttcttacagtcctgaccgccacgactgccccaaaacctgctactgtagtgaccggaagcggccacgcaagcagtacacccgggggtgaaaaggaaacctccgcaacacagaggagttccgtgccaagctcaaccgagaagaatgccttcaatagctccttggaagacccgagcacggattactatcaggaacttcaaagagacattagtgaaatgttcctgcagatatacaaacagggaggcttcttaggcctatctaacattaagtttaggcccggcagcgttgtggtacaactcacactggcgtttcgggaggggacaatcaatgtgcatgacgttgagacacagttcaatcagtataagacagaggcagcctccagatataatttgaccatcagcgacgttagcgtttcagacgtaccctttccttttagcgctcagtccggtgcaggggtacccgggtggggcattgccctgctggtgttagtatgtgtcctggtggccctggcaattgtttatttgattgctctagccgtgtgccaatgtcggcgcaagaactacgggcaattagacatcttcccagcgcgggacacttaccaccccatgagcgaataccctacctaccacacacacggcaggtacgttcccccctcatccactgatcgatccccgtacgagaagagacagaatggatggagtactatgccccggggggcgctccctgaggaatctcagggatag

SEQ ID NO: 26851 - DNA, 795 bp, Artificial Sequence
  derived and/or modified sequence
atgaccccaggcacccagagccccttcttcctgctgctgctgctgactgtgctgacagccaccacagcccccaagccagccaccgtggtgactggaagtggccacgccagcagcaccccaggaggagagaaggagaccagcgccacccagaggagctctgtgcccagcagcacagagaagaatgccttcaacagcagcctggaggaccccagcacagactactaccaggagctgcagagggacatcagcgagatgttcctgcagatctacaagcagggcggcttcctgggcctgagcaacatcaagttccggcccggctctgtggtggtgcagctgaccctggccttccgggagggcaccatcaacgtgcatgatgtggagacccagttcaaccagtacaagacagaagctgccagccgctacaacctgaccatcagtgatgtgtctgtgtctgatgtgcccttccccttcagcgcccagagcggggccggcgtgcccggctggggcatcgccctgctggtgctggtgtgtgtgctggtggccctggccatcgtgtacctgattgccctggccgtgtgccagtgcaggaggaagaactacggccagctggacatcttccctgcccgggacacctaccaccccatgtctgagtaccccacctaccacacccacggccgctacgtgccccccagcagcacagacaggagcccctatgagaaggtgtctgctggaaatggaggcagcagcctgagctacaccaacccagctgtggccgccaccagcgccaacctgtag

SEQ ID NO: 26852 - DNA, 780 bp, Artificial Sequence
  derived and/or modified sequence
atgaccccaggcacccagagccccttcttcctgctgctgctgctgactgtgctgacagccaccacagcccccaagccagccaccgtggtgactggaagtggccacgccagcagcaccccaggaggagagaaggagaccagcgccacccagaggagctctgtgcccagcagcacagagaagaatgccttcaacagcagcctggaggaccccagcacagactactaccaggagctgcagagggacatcagcgagatgttcctgcagatctacaagcagggcggcttcctgggcctgagcaacatcaagttccggcccggctctgtggtggtgcagctgaccctggccttccgggagggcaccatcaacgtgcatgatgtggagacccagttcaaccagtacaagacagaagctgccagccgctacaacctgaccatcagtgatgtgtctgtgtctgatgtgcccttccccttcagcgcccagagcggggccggcgtgcccggctggggcatcgccctgctggtgctggtgtgtgtgctggtggccctggccatcgtgtacctgattgccctggccgtgtgccagtgcaggaggaagaactacggccagctggacatcttccctgcccgggacacctaccaccccatgtctgagtaccccacctaccacacccacggccgctacgtgccccccagcagcacagacaggagcccctatgagaagaggcagaatggctggagcaccatgcccaggggggccctgcctgaggagagccagggctag

SEQ ID NO: 26853 - DNA, 795 bp, Artificial Sequence
  derived and/or modified sequence
atgacccccggcacccagagccccttcttcctgctgctgctgctgaccgtgctgactgcaaccactgcgcctaaacctgcgactgtggtgacaggaagtgggcacgcctccagtactccaggaggggaaaaggaaaccagcgccacccaaagatcctcagttccatcgagtactgagaaaaatgctttcaattccagcctagaagacccttccactgattattaccaggagctgcagagagacatcagcgaaatgttcctccagatttataagcagggcggctttctaggcctctcaaatataaagtttaggcctggtagcgttgtggtgcagttgacgcttgcctttagagagggtactatcaatgtgcatgacgtggagacacagtttaaccaatacaagactgaagccgcctctcgctataacctgactatcagtgatgtgtcggtttccgatgtgcctttccctttcagtgctcagagtggggcgggggtaccaggctggggcatcgccctgctcgttctcgtctgcgttctcgttgcacttgcaatagtgtatctgatagcactggccgtttgccagtgccgaaggaagaattatggacagctggatatattccctgctcgcgacacgtaccacccgatgtccgagtatcccacatatcacacccatggccgatacgtgcccccgagctcaactgatagatccccctacgagaaagtatctgccgggaacggcggctcgtcactgtcctacactaatcccgccgtggcggcgactagtgcgaacctgtag

SEQ ID NO: 26854 - DNA, 780 bp, Artificial Sequence
  derived and/or modified sequence
atgacccccggcacccagagccccttcttcctgctgctgctgctgaccgtcctcactgctaccaccgctcccaaacccgctaccgtcgtcacgggaagtggccacgcttcctctacgcctgggggagagaaagaaacaagcgccacccagagatccagtgtaccaagctctactgagaagaacgcttttaacagctccctcgaggatccgtctacagactactaccaggagctgcagagagacatcagcgagatgtttttacaaatctacaaacagggggggttccttggacttagtaatattaagttcaggcccggctccgtagtcgtacagcttacccttgccttccgcgaaggcacaattaatgtacacgacgttgagacccagtttaatcaatataaaacagaagcagccagtaggtacaatctcacaatcagcgacgtcagtgtgtcggacgtcccattcccgttttcagcgcagagcggcgcaggtgtgcctgggtggggcatcgctctgcttgtccttgtctgtgtgcttgttgctcttgcaattgtgtaccttatcgccctagccgtctgtcagtgtagaaggaagaattacgggcagctggacatttttccagctcgcgatacgtatcaccccatgtcagagtaccccacttaccatactcacggtaggtatgtgcccccgtcctctactgacagatccccctacgaaaagcgccagaatggttggtctactatgcctcggggcgccctccccgaagagagccagggctag

SEQ ID NO: 26855 - DNA, 1032 bp, Artificial Sequence
  derived and/or modified sequence
gcgcctgcctgaatctgttctgccccctccccacccatttcaccaccaccatgacaccgggcacccagtctcctttcttcctgctgctgctcctcacagtgcttacagctaccacagcccctaaacccgcaacagttgttacgggttctggtcatgcaagctctaccccaggtggagaaaaggagacttcggctacccagagaagttcagtgcccagctctactgagaagaatgcttttaattcctctctggaagatcccagcaccgactactaccaagagctgcagagagacatttctgaaatgtttttgcagatttataaacaagggggttttctgggcctctccaatattaagttcaggccaggatctgtggtggtacaattgactctggccttccgagaaggtaccatcaatgtccacgacgtggagacacagttcaatcagtataaaacggaagcagcctctcgatataacctgacgatctcagacgtcagcgtgagtgatgtgccatttcctttctctgcccagtctggggctggggtgccaggctggggcatcgcgctgctggtgctggtctgtgttctggttgcgctggccattgtctatctcattgccttggctgtctgtcagtgccgccgaaagaactacgggcagctggacatctttccagcccgggatacctaccatcctatgagcgagtaccccacctaccacacccatgggcgctatgtgccccctagcagtaccgatcgtagcccctatgagaaggtttctgcaggtaatggtggcagcagcctctcttacacaaacccagcagtggcagccacttctgccaacttgtaggggcacgtcgcccgctgagctgagtggccagccagtgccattccactccactcaggttcttcagggccagagcccctgcaccctgtttgggctggtgagctgggagttcaggtgggctgctcacagcctccttcagaggccccaccaatttctcggacacttctcagtgtgtggaagctcatgtggg

SEQ ID NO: 26856 - DNA, 1194 bp, Artificial Sequence
  derived and/or modified sequence
gcgcctgcctgaatctgttctgccccctccccacccatttcaccaccaccatgacaccgggcacccagtctcctttcttcctgctgctgctcctcacagtgcttacagctaccacagcccctaaacccgcaacagttgttacgggttctggtcatgcaagctctaccccaggtggagaaaaggagacttcggctacccagagaagttcagtgcccagctctactgagaagaatgcttttaattcctctctggaagatcccagcaccgactactaccaagagctgcagagagacatttctgaaatgtttttgcagatttataaacaagggggttttctgggcctctccaatattaagttcaggccaggatctgtggtggtacaattgactctggccttccgagaaggtaccatcaatgtccacgacgtggagacacagttcaatcagtataaaacggaagcagcctctcgatataacctgacgatctcagacgtcagcgtgagtgatgtgccatttcctttctctgcccagtctggggctggggtgccaggctggggcatcgcgctgctggtgctggtctgtgttctggttgcgctggccattgtctatctcattgccttggctgtctgtcagtgccgccgaaagaactacgggcagctggacatctttccagcccgggatacctaccatcctatgagcgagtaccccacctaccacacccatgggcgctatgtgccccctagcagtaccgatcgtagcccctatgagaagaggcaaaatgggtggagcactatgcccaggggagcccttcccgaggagtcccaggggtgagcctctgtgcccctaatcatctcctaggaatggagggtagaccgagaaaggctggcatagggggaggtttcccaggtagaagaagaagtgtcagcagaccaggtttctgcaggtaatggtggcagcagcctctcttacacaaacccagcagtggcagccacttctgccaacttgtaggggcacgtcgcccgctgagctgagtggccagccagtgccattccactccactcaggttcttcagggccagagcccctgcaccctgtttgggctggtgagctgggagttcaggtgggctgctcacagcctccttcagaggccccaccaatttctcggacacttctcagtgtgtggaagctcatgtggg

SEQ ID NO: 26857 - DNA, 795 bp, Artificial Sequence
  derived and/or modified sequence
atgacccctgggacacaatcccctttttttctgctgctgttgctaaccgtgctgacagccacgaccgcgccaaagccagctacagtggtaactggctcaggacatgcctcaagcactcccggaggagagaaggagacttccgccactcaaaggagcagcgtgccttccagcaccgagaagaacgcctttaactcatcacttgaggatccaagtacagactactatcaagaactgcagcgcgacatttccgagatgtttctgcagatctacaagcagggcggattcttggggctctccaatattaaatttaggccaggaagtgtggtagtgcagctgacactggcctttagggagggcacaatcaatgtgcacgatgttgagacccagtttaaccaatacaagaccgaggccgcatctagatataatctcaccattagtgacgtgtctgtgtccgacgtgccattcccttttagcgcgcagtccggtgccggtgttccgggttggggaatcgcattgctcgtgttagtatgtgtgctcgttgcattggcaatcgtgtatctgatcgcccttgccgtgtgccaatgtcgccgaaagaactatggtcagttggatatctttccagctcgagacacttatcatccaatgtccgagtaccctacctaccatacccacggccgttatgtccctccgtcttctactgacagatccccgtacgaaaaagtgtctgccggtaacggtgggtcttctctgagctacaccaatcccgcagttgccgctacctccgctaatctgtag

SEQ ID NO: 26858 - DNA, 780 bp, Artificial Sequence
  derived and/or modified sequence
atgactcccggaacgcagagccccttcttcctgcttctgctgttgacggtcctgaccgcgaccactgcacccaaaccagccacagtggttactggatcaggacatgcttcctccaccccaggtggagaaaaggaaacatctgcaacacagaggagcagtgtcccatcctcgaccgaaaagaatgccttcaactcctcgcttgaggacccaagtaccgattactaccaggagctgcagcgagacatctccgagatgttcttacagatctacaaacagggcggtttcctgggattatcaaacattaaatttagaccaggctccgttgtggtgcaactgacacttgccttcagagaagggactatcaatgtgcatgatgtagagacacagtttaaccagtacaagaccgaggccgcttccagatacaatttgaccattagcgatgtgtctgtgagcgatgtaccgttcccctttagtgcccaatcgggggcaggagtccctggatggggaatcgccctactggttctggtatgtgtgctggtggcccttgctatcgtttatctgatagctctggccgtgtgtcagtgtcgacgcaagaactatggccagctggatatctttcccgcacgcgacacataccaccctatgtccgagtatcctacctaccacactcacgggaggtacgtgcctccaagtagtactgataggagtccttacgagaagcgccaaaacggctggagcacgatgccgagaggagcattaccggaggagagtcaggggtag

SEQ ID NO: 26859 - protein, 255 aa, Artificial Sequence
  derived and/or modified sequence
MTPGTQSPFFLLLLLTVLTVVTGSGHASSTPGGEKETSATQRSSVPSSTEKNAFNSSLEDPSTDYYQELQRDISEMFLQIYKQGGFLGLSNIKFRPGSVVVQLTLAFREGTINVHDVETQFNQYKTEAASRYNLTISDVSVSDVPFPFSAQSGAGVPGWGIALLVLVCVLVALAIVYLIALAVCQCRRKNYGQLDIFPARDTYHPMSEYPTYHTHGRYVPPSSTDRSPYEKVSAGNGGSSLSYTNPAVAATSANL

SEQ ID NO: 26860 - DNA, 768 bp, Artificial Sequence
  derived and/or modified sequence
atgacccccggcacccagagccccttcttcctgctgctgctgctgaccgtgctgaccgtggtgaccggcagcggccacgccagcagcacccccggcggcgagaaggagaccagcgccacccagagaagcagcgtgcccagcagcaccgagaagaacgccttcaacagcagcctggaggaccccagcaccgactactaccaggagctgcagagagacatcagcgagatgttcctgcagatctacaagcagggcggcttcctgggcctgagcaacatcaagttcagacccggcagcgtggtggtgcagctgaccctggccttcagagagggcaccatcaacgtgcacgacgtggagacccagttcaaccagtacaagaccgaggccgccagcagatacaacctgaccatcagcgacgtgagcgtgagcgacgtgcccttccccttcagcgcccagagcggcgccggcgtgcccggctggggcatcgccctgctggtgctggtgtgcgtgctggtggccctggccatcgtgtacctgatcgccctggccgtgtgccagtgcagaagaaagaactacggccagctggacatcttccccgccagagacacctaccaccccatgagcgagtaccccacctaccacacccacggcagatacgtgccccccagcagcaccgacagaagcccctacgagaaggtgagcgccggcaacggcggcagcagcctgagctacaccaaccccgccgtggccgccaccagcgccaacctgtag

SEQ ID NO: 26861 - DNA, 768 bp, Artificial Sequence
  derived and/or modified sequence
atgacgccaggcactcagagccccttttttttgctgcttctcttgactgttctgactgtcgtcactgggtccggtcacgcctcctctacgccaggtggtgagaaggagactagtgccactcagcgcagctctgtgccctcatccacagaaaaaaacgcgttcaattcctccctcgaagaccctagtacggactattaccaagagcttcagcgtgatattagcgaaatgtttctgcagatttacaaacaggggggcttccttggactgtctaatatcaagttccgcccaggatcggtggtggtgcagctcacactcgccttccgagagggaacaatcaacgtgcatgacgtcgaaactcagtttaatcaatataaaacggaagctgcctccagatataatttgacaatctccgacgtgagcgtcagtgacgtgccctttcctttttcggcccagtccggcgctggggtgcccggatggggcatcgctctgttggtgctggtttgcgttctggtggccctggccatcgtctatcttatcgcactggcggtgtgccagtgtcgccgcaaaaattacggtcagctggatatcttcccagccagggatacatatcacccaatgagtgaatatccaacgtatcacacgcatggaagatatgtacctccctctagcacagacaggagtccctatgaaaaagtgtccgctggtaacggcggtagcagcctttcctatacaaatcctgcagtagcggcaacctctgccaatctgtag

SEQ ID NO: 26862 - DNA, 768 bp, Artificial Sequence
  derived and/or modified sequence
atgaccccaggcacccagagccccttcttcctgctgctgctgctgactgtgctgactgtggtgacaggcagcggccacgccagcagcaccccaggaggagagaaggagaccagcgccacccagaggagctctgtgcccagcagcacagagaagaatgccttcaacagcagcctggaggaccccagcacagactactaccaggagctgcagagggacatcagcgagatgttcctgcagatctacaagcagggcggcttcctgggcctgagcaacatcaagttccggcccggctctgtggtggtgcagctgaccctggccttccgggagggcaccatcaacgtgcatgatgtggagacccagttcaaccagtacaagacagaggccgccagccgctacaacctgaccatcagtgatgtgtctgtgtctgatgtgcccttccccttcagcgcccagagcggggccggcgtgcccggctggggcatcgccctgctggtgctggtgtgtgtgctggtggccctggccatcgtgtacctgattgccctggccgtgtgccagtgcaggaggaagaactacggccagctggacatcttccctgcccgggacacctaccaccccatgtctgagtaccccacctaccacacccacggccgctacgtgccccccagcagcacagacaggagcccctatgagaaggtgtctgctggaaatggaggcagcagcctgagctacaccaacccagctgtggccgccaccagcgccaacctgtag

SEQ ID NO: 26863 - DNA, 768 bp, Artificial Sequence
  derived and/or modified sequence
atgacccccggcacccagagccccttcttcctgctgctgctgctgacagtactgaccgtagtgactgggtcggggcatgcatcaagtacccccgggggagaaaaggaaacgagtgccactcagcggtcatccgtgccaagctctaccgagaagaatgcctttaacagcagcctggaggacccatccactgattattatcaagaattacagagggacatctccgagatgtttctccaaatatacaagcagggcggtttcctcggactgtcaaatattaaattccgtcctgggtctgtcgtggtgcagttgactcttgccttccgagaagggacgattaatgtgcacgatgtggaaacccaattcaaccaatataaaactgaggccgcttctagatataatctcactatctccgatgtgtctgtgagtgatgtgcccttccctttctcagcacagtcgggcgctggagtcccaggatgggggattgccctgctcgtgctggtgtgcgtgttggtcgccctggctattgtgtacctcatcgccttagccgtatgccagtgtcgtcggaagaactacggacagctggatatttttccagctagagatacataccacccgatgagtgaatatcctacctaccatacccacggtcggtatgttccacccagctcaactgatcggtctccttacgaaaaggtgtcagcgggaaacgggggaagttctctgagctacaccaatcctgctgtagcggccacaagcgctaacttgtag

SEQ ID NO: 26864 - DNA, 804 bp, Artificial Sequence
  derived and/or modified sequence
ctccccacccatttcaccaccaccatgacaccgggcacccagtctcctttcttcctgctgctgctcctcacagtgcttacagttgttacgggttctggtcatgcaagctctaccccaggtggagaaaaggagacttcggctacccagagaagttcagtgcccagctctactgagaagaatgcttttaattcctctctggaagatcccagcaccgactactaccaagagctgcagagagacatttctgaaatgtttttgcagatttataaacaagggggttttctgggcctctccaatattaagttcaggccaggatctgtggtggtacaattgactctggccttccgagaaggtaccatcaatgtccacgacgtggagacacagttcaatcagtataaaacggaagcagcctctcgatataacctgacgatctcagacgtcagcgtgagtgatgtgccatttcctttctctgcccagtctggggctggggtgccaggctggggcatcgcgctgctggtgctggtctgtgttctggttgcgctggccattgtctatctcattgccttggctgtctgtcagtgccgccgaaagaactacgggcagctggacatctttccagcccgggatacctaccatcctatgagcgagtaccccacctaccacacccatgggcgctatgtgccccctagcagtaccgatcgtagcccctatgagaaggtttctgcaggtaatggtggcagcagcctctcttacacaaacccagcagtggcagccacttctgccaacttgtaggggcacgtcgcc

SEQ ID NO: 26865 - DNA, 768 bp, Artificial Sequence
  derived and/or modified sequence
atgaccccgggtactcagtcaccattctttctccttctcctgctgactgtgctgacagtggtgacgggatcggggcatgcctcttcaacaccgggaggagaaaaagaaacctccgcaacgcagcgtagctccgtcccatcctcaacagagaagaatgcttttaacagttctctggaagacccatctaccgattactaccaggagcttcaaagggatatttcggagatgttcctgcaaatttacaaacagggaggctttctgggtctgagtaatatcaaatttcgtcccggaagtgtagtcgtccagctcactctggcctttcgagagggcaccattaacgtccatgacgtggagacccagttcaaccaatacaaaactgaggccgcatcaaggtataatctcacaatcagtgacgtgtcagtgagcgacgtgccttttccttttagtgctcagagcggcgctggcgttcccggatggggaattgcgctcctagtgttggtgtgtgttctggtggcactggcgattgtgtacctaatcgccctggctgtctgtcagtgccgccgaaaaaactatgggcagctggatatttttccggctcgggatacatatcaccccatgtccgaataccccacctaccatacccatgggcgttacgtgccccctagttcaacagatcgcagtccctacgagaaagtgtctgcaggaaacggtgggagctcactctcttacactaatcctgccgtagccgctacaagcgccaacctatag

SEQ ID NO: 26866 - protein, 284 aa, Artificial Sequence
  derived and/or modified sequence
MDAIKKKMQMLKLDKENALDRAEQAEADKKAAEDRSKQLEEDIAAKEKLLRVSEDERDRVLEELHKAEDSLLAAEEAAAKAEADVASLNRRIQLVEEELDRAQERLATALQKLEEAEKAADESERGMKVIESRAQKDEEKMEIQEIQLKEAKHIAEDADRKYEEVARKLVIIESDLERAEERAELSEGQVRQLEEQLRIMDQTLKALMAAEDKYSQKEDRYEEEIKVLSDKLKEAETRAEFAERSVTKLEKSIDDLEEKVAHAKEENLSMHQMLDQTLLELNNM

SEQ ID NO: 26867 - DNA, 855 bp, Artificial Sequence
  derived and/or modified sequence
atggacgccatcaagaagaagatgcagatgctgaagctggacaaggagaacgccctggacagagccgagcaggccgaggccgacaagaaggccgccgaggacagaagcaagcagctggaggaggacatcgccgccaaggagaagctgctgagagtgagcgaggacgagagagacagagtgctggaggagctgcacaaggccgaggacagcctgctggccgccgaggaggccgccgccaaggccgaggccgacgtggccagcctgaacagaagaatccagctggtggaggaggagctggacagagcccaggagagactggccaccgccctgcagaagctggaggaggccgagaaggccgccgacgagagcgagagaggcatgaaggtgatcgagagcagagcccagaaggacgaggagaagatggagatccaggagatccagctgaaggaggccaagcacatcgccgaggacgccgacagaaagtacgaggaggtggccagaaagctggtgatcatcgagagcgacctggagagagccgaggagagagccgagctgagcgagggccaggtgagacagctggaggagcagctgagaatcatggaccagaccctgaaggccctgatggccgccgaggacaagtacagccagaaggaggacagatacgaggaggagatcaaggtgctgagcgacaagctgaaggaggccgagaccagagccgagttcgccgagagaagcgtgaccaagctggagaagagcatcgacgacctggaggagaaggtggcccacgccaaggaggagaacctgagcatgcaccagatgctggaccagaccctgctggagctgaacaacatgtag

SEQ ID NO: 26868 - DNA, 855 bp, Artificial Sequence
  derived and/or modified sequence
atggatgcgattaagaagaaaatgcagatgctaaagctcgacaaagaaaatgcattggaccgcgcggaacaggctgaggcggataagaaagctgcagaggaccgttctaagcaattggaagaagacattgcagctaaggagaagctcctgcgcgtctctgaagacgagcgcgatcgggttctagaggaacttcacaaggccgaagactccttactggcagccgaggaagccgcagcaaaagccgaagccgacgtcgctagtctaaaccggagaatacagcttgtcgaagaagaactcgatcgggctcaggagagacttgccacagccttgcaaaagctggaggaggcagaaaaggcggccgatgagtctgaacgcggaatgaaagttatcgagtccagggcccaaaaagatgaggagaaaatggaaatacaagagatacagctcaaagaagccaaacacatcgcagaagatgccgaccgaaaatacgaggaggtggctcgaaagctcgttataatcgagtctgacctcgagcgcgccgaggaaagagccgagctgtcggagggacaggtgcgacagctcgaggagcagctacgcatcatggaccagaccttaaaggcgctcatggccgcagaggacaagtactctcagaaggaggatagatacgaggaggagatcaaagttctgtccgacaaactgaaagaagctgagacacgcgcagaattcgccgagcgttcagtaactaaactggagaagagcatcgacgacctggaggagaaagtggcgcacgctaaggaggagaacctgagcatgcaccaaatgctcgatcaaactcttttggagcttaataatatgtag

SEQ ID NO: 26869 - DNA, 855 bp, Artificial Sequence
  derived and/or modified sequence
atggatgccatcaagaagaagatgcagatgctgaagctggacaaggaaaatgccctggacagagctgagcaggccgaggccgacaagaaggccgcagaagatagaagcaagcagctggaggaggacattgctgccaaggagaagctgctgcgggtgtctgaagatgagcgggacagagtgctggaggagctgcacaaggccgaggacagcctgctggccgctgaggaggccgccgccaaggccgaggctgatgtggccagcctgaacagacgcatccagctggtggaggaggagctggaccgggcccaggagcggctggccacagccctgcagaagctggaggaggccgagaaggccgcagatgaaagtgagcggggcatgaaggtgattgagagccgggcccagaaggatgaggagaagatggagatccaggagatccagctgaaggaggccaagcacatcgccgaggatgctgacagaaaatatgaggaggtggccaggaagctggtgatcatcgagagtgacctggagagagctgaggagagagctgagctgtctgagggccaggtgcggcagctggaggagcagctgcgcatcatggaccagaccctgaaggccctgatggctgctgaggacaagtacagccagaaggaggacagatatgaggaggagatcaaggtgctgagtgacaagctgaaggaggccgagaccagggctgagtttgctgagaggtctgtgaccaagctggagaagagcattgatgacctggaggagaaggtggcccacgccaaggaggagaacctgtccatgcaccagatgctggaccagaccctgctggagctgaacaacatgtag

SEQ ID NO: 26870 - DNA, 855 bp, Artificial Sequence
  derived and/or modified sequence
atggacgccatcaagaagaagatgcagatgctgaagctggacaaggagaacgccttagacagggccgaacaggccgaggcggataaaaaagccgccgaggataggagtaagcagcttgaggaagacatcgcagccaaagaaaaactcctccgcgtgtctgaggatgagcgtgacagggtcctggaagagttgcacaaggccgaagacagcctgctggcagcagaagaggcagctgccaaagccgaggccgatgttgcttctcttaaccgcagaattcaactggtagaggaagagctggaccgcgctcaagaaaggttggctaccgctcttcagaaactggaagaagctgaaaaggctgctgacgagagcgaacggggcatgaaagtgatagagagccgggcccagaaggacgaggaaaagatggagatccaagaaatccagcttaaagaggcaaaacacattgctgaagatgcagatcggaaatatgaggaagtagccagaaaattagtgatcatcgaaagtgatctggaaagggcagaagagcgtgccgaactgtctgaaggtcaggtgcgtcagctagaagaacagctgagaatcatggaccagacactcaaggcactgatggcagccgaggataaatactctcagaaggaggacaggtacgaagaggagatcaaggtgctgtctgacaaactgaaagaagccgagactagagcggaattcgccgagaggagtgtcaccaaactggaaaaatcaatagacgacctcgaggaaaaggtcgcacatgccaaagaggagaatttgtcgatgcaccagatgttggaccagactttactggaactgaacaatatgtag

SEQ ID NO: 26871 - DNA, 855 bp, Artificial Sequence
  derived and/or modified sequence
atggacgcaataaagaagaaaatgcaaatgctgaagctggacaaggaaaacgctttggatcgggctgaacaagcagaggcagacaaaaaggccgctgaagaccggtcaaaacagctcgaagaggatatcgccgctaaggagaagctcctacgagtgagtgaagatgagagagacagggtcctcgaagagttacacaaagcagaggactctctgctggccgcagaggaagccgctgccaaggccgaggctgacgtggcctcgcttaatcgaaggatccaattggtggaagaagagctggatcgcgcacaggagcgcttggcaaccgctctgcaaaagttggaagaagcggagaaagccgcagacgaatcagagcgagggatgaaggtcatcgagagtcgcgctcagaaagacgaggaaaagatggagattcaggaaattcagctgaaggaagctaagcatatcgccgaggatgctgacaggaagtacgaggaggtcgcgagaaaactagtcatcatcgaatctgatctggagagagccgaggagagggcggaactgagcgaggggcaggttaggcagttggaggaacagctacgcatcatggatcagacactgaaggctctcatggctgccgaagataaatactcccagaaagaagacaggtatgaggaggaaataaaggtactaagcgataaactaaaggaagcagagacgagggcggagttcgcagagaggagcgttactaagctcgaaaaatccattgacgatctggaagagaaggtggctcacgcaaaggaggaaaatttgtcgatgcatcagatgctggaccagacgctgttggagctgaataatatgtag

SEQ ID NO: 26872 - DNA, 1655 bp, Artificial Sequence
  derived and/or modified sequence
cgctcctccgcccgaccgcgcgctcgccccgccgctcctgctgcagccccagggcccctcgccgccgccaccatggacgccatcaagaagaagatgcagatgctgaagctcgacaaggagaacgccttggatcgagctgagcaggcggaggccgacaagaaggcggcggaagacaggagcaagcagctcgaggaggacatcgcggccaaggagaagttgctgcgggtgtcggaggacgagcgggaccgggtgctggaggagctgcacaaggcggaggacagcctcctggccgccgaagaggccgccgccaaggctgaagccgacgtagcttctctgaacagacgcatccagctggttgaggaagagttggatcgtgcccaggagcgtctggcaacagctttgcagaagctggaggaagctgagaaggcagcagatgagagtgagagaggcatgaaagtcattgagagtcgagcccaaaaagatgaagaaaaaatggaaattcaggagatccaactgaaagaggccaagcacattgctgaagatgccgaccgcaaatatgaagaggtggcccgtaagctggtcatcattgagagcgacctggaacgtgcagaggagcgggctgagctctcagaaggccaagtccgacagctggaagaacaattaagaataatggatcagaccttgaaagcattaatggctgcagaggataagtactcgcagaaggaagacagatatgaggaagagatcaaggtcctttccgacaagctgaaggaggctgagactcgggctgagtttgcggagaggtcagtaactaaattggagaaaagcattgatgacttagaagagaaagtggctcatgccaaagaagaaaaccttagtatgcatcagatgctggatcagactttactggagttaaacaacatgtgaaaacctccttagctgcgaccacattctttcgttttgttttgttttgtttttaaacacctgcttaccccttaaatgcaatttatttacttttaccactgtcacagaaacatccacaagataccagctaggtcagggggtggggaaaacacatacaaaaaggcaagcccatgtcagggcgatcctggttcaaatgtgccatttcccgggttgatgctgccacactttgtagagagtttagcaacacagtgtgcttagtcagcgtaggaatcctcactaaagcagaagaagttccattcaaagtgccaatgatagagtcaacaggaaggttaatgttggaaacacaatcaggtgtggattggtgctactttgaacaaaaggtccccctgtggtcttttgttcaacattgtacaatgtagaactctgtccaacactaatttattttgtcttgagttttactacaagatgagactatggatcccgcatgcctgaattcactaaagccaagggtctgtaagccacgctgctcttccgagacttccattcctttctgattggcacacgtgcagctcatgacaatctgtaggataacaatcagtgtggatttccactcttttcagtccttcatgttaaagatttagacaccacatacaactggtaaaggacgttttcttgagagttttaactatatgtaaacattgtataatgatatggaataaaatgcacattgt

SEQ ID NO: 26873 - protein, 68 aa, Artificial Sequence
  derived and/or modified sequence
MPQKDPCQKQACEIQKCLQANSYMESKCQAVIQELRKCCAQYPKGRSVVCSGFEKEEEENLTRKSASK

SEQ ID NO: 26874 - DNA, 207 bp, Artificial Sequence
  derived and/or modified sequence
atgccccagaaggacccctgccagaagcaggcctgcgagatccagaagtgcctgcaggccaacagctacatggagagcaagtgccaggccgtgatccaggagctgagaaagtgctgcgcccagtaccccaagggcagaagcgtggtgtgcagcggcttcgagaaggaggaggaggagaacctgaccagaaagagcgccagcaagtag

SEQ ID NO: 26875 - DNA, 207 bp, Artificial Sequence
  derived and/or modified sequence
atgcctcaaaaggacccctgtcagaaacaagcctgtgaaatccagaaatgtctgcaagccaacagctatatggagagcaagtgccaagccgttattcaggaactgcggaaatgctgcgctcagtatcccaaagggcgctcagtggtgtgtagcggctttgagaaagaggaggaggagaatctcacaagaaaaagcgcctctaagtag

SEQ ID NO: 26876 - DNA, 207 bp, Artificial Sequence
  derived and/or modified sequence
atgccccaaaaagacccctgtcagaaacaggcatgtgagattcagaaatgcctgcaggccaacagctacatggaaagtaaatgtcaggcagtcatccaggagttgagaaaatgttgtgcccaatatccaaaaggccgttctgtggtatgtagcggtttcgagaaggaggaagaagagaatctcactcggaaatctgcctctaaatag

SEQ ID NO: 26877 - DNA, 207 bp, Artificial Sequence
  derived and/or modified sequence
atgccccagaaggacccctgccagaagcaggcctgtgagatccagaagtgcctgcaggccaacagctacatggagagcaagtgccaggccgtcatccaggagctgaggaagtgctgtgcccagtaccccaagggccgctctgtggtgtgcagcggctttgagaaggaggaggaggagaacctgaccaggaagagcgccagcaagtag

SEQ ID NO: 26878 - DNA, 864 bp, Artificial Sequence
  derived and/or modified sequence
gttctgttcagtatttggcaatcacttcatccactactgcagtgcacccacccttgggcctggggggagggagtgggttgaaaaactgctcaagaaacagaagtttagcaagggtcatgaagaatactgcaagtgaaactgcagagagaggttacgtaggcagaaagcaagtcaacaaaagcacttagtcaggatccgtaacttgaaattgactcctttggaaattgccatagaacccttaatggacatcatcggctggacctgggatctgatgaatcccacaaaagtcagcaccttctacagaacagatgccctgatcaccaaggacttggtactgatttagagagaagagagcagctcctagcagcatcaacatctatttgtcgcttatttgccctgcagcaattcacctgcctttccttctcccatcctttttctggatatgccgcagaaggatccgtgccagaagcaagcctgtgagatacagaaatgtttacaagccaacagctacatggaatcaaagtgtcaggctgtcatccaagaactgcgtaagtgttgtgctcagtatcccaagggaagatctgtcgtctgttcaggatttgaaaaagaagaggaagaaaacctaacacggaagtctgcatcaaagtaaagttcttctgaagtgctgctccatgtttccaccaaatgaattttttttatcctcctgactcttcaggccaggtagcagcaaatagcaaatgaaaaagtcagctacaaaagttaatgaatatgccatctatgcagaacaggcagaaatataaacacattaaaagacaaatatgtagaatgtaatatactgagctgctaaaataaacctgtttaaga

SEQ ID NO: 26879 - DNA, 1107 bp, Artificial Sequence
  derived and/or modified sequence
gggcggggctgtgggggcgaggagggggcagcgggcgcgcggctggcgcgcgggggcgggccttggggcacgggggcggggcccgcccagcagcacctgggaaacgcccgcgcggtttggggcaggcgtggccgtcggggcggagggcggtggccggccgcggtccgggcgtcaggccgggcggcgggggcggcagggaggcggcgctctggggccgcaggcggacgtactctgtgagcggcgcccgggcgcctgggcaggcgcctcccgagtaccggcgcccattttgcccgcccgctaaggagacccgtgcgcggcctacacgcttgggggacagccctttaagacgacatctccgcgaacgccggcctcttgagccagggggacgctcttttgaaagtcagtcccaaaacagttaaggttttattttattttgttttatttccaagtcacagcccccgaatctcgtacaactctccctggaccacttccggttgccggcccgcgcctcataacttcggttcgagtgacctcggcccgggatgcccctcggctcaccccgggctcacgtcgcgatcctggcttgagtggcccagggtgggagacctggaagttttagcctagctgttctcaaggcggattaattagcccaagaaacattatattcatttttctggatatgccgcagaaggatccgtgccagaagcaagcctgtgagatacagaaatgtttacaagccaacagctacatggaatcaaagtgtcaggctgtcatccaagaactgcgtaagtgttgtgctcagtatcccaagggaagatctgtcgtctgttcaggatttgaaaaagaagaggaagaaaacctaacacggaagtctgcatcaaagtaaagttcttctgaagtgctgctccatgtttccaccaaatgaattttttttatcctcctgactcttcaggccaggtagcagcaaatagcaaatgaaaaagtcagctacaaaagttaatgaatatgccatctatgcagaacaggcagaaatataaacacattaaaagacaaatatgtagaatgtaatatactgagctgctaaaataaacctgtttaagagaaaaa

SEQ ID NO: 26880 - DNA, 207 bp, Artificial Sequence
  derived and/or modified sequence
atgccccagaaggacccctgccagaagcaggcctgcgagatccagaagtgcctgcaagcaaacagctatatggaatcaaagtgtcaggctgtcattcaagaattacgcaagtgctgtgcacagtatcccaaaggccggtctgtggtgtgttccgggttcgagaaggaggaggaagaaaatctcacaaggaagtccgcctcaaaatag

SEQ ID NO: 26881 - DNA, 207 bp, Artificial Sequence
  derived and/or modified sequence
atgccccagaaggacccctgccagaagcaggcctgcgagatccagaagtgccttcaggccaactcatacatggagagtaagtgtcaggctgtgatccaggaactcagaaagtgctgtgcgcaatatcccaaggggcgatcagtcgtctgttccggtttcgaaaaagaggaagaggagaatttgacgcgtaagagtgcgtcaaagtag

SEQ ID NO: 26882 - DNA, 207 bp, Artificial Sequence
  derived and/or modified sequence
atgccccagaaagacccttgtcagaaacaggcttgtgagattcagaaatgtctccaggccaactcatacatggaatcaaagtgtcaggcagtcattcaagagctgcgcaaatgttgcgcacagtacccaaaaggacgcagcgtggtttgttcaggatttgagaaagaagaggaggaaaacttaacaagaaaatccgcatccaagtag

SEQ ID NO: 26883 - DNA, 207 bp, Artificial Sequence
  derived and/or modified sequence
atgccgcagaaggacccctgtcaaaagcaggcatgcgagatccagaagtgtctgcaggcgaattcatacatggagagcaagtgccaggccgtgattcaagagctgcgtaaatgctgtgcccagtacccaaaaggccgatcagtcgtctgctcagggttcgagaaagaggaggaagaaaacctgacgcggaaatccgcctccaagtag

SEQ ID NO: 26884 - DNA, 207 bp, Artificial Sequence
  derived and/or modified sequence
atgccccagaaagacccatgtcagaaacaagcctgtgaaatacagaagtgtttgcaggctaactcctacatggaaagtaaatgccaggccgttatacaggaactcaggaagtgctgcgcccaatatcccaaaggacggtcagtagtgtgctccggattcgagaaggaggaagaagaaaatctgacacgcaagagtgcgtcgaaatag

SEQ ID NO: 26885 - DNA, 207 bp, Artificial Sequence
  derived and/or modified sequence
atgccccagaaggacccctgccagaagcaggcctgcgagatccagaaatgtctgcaggctaactcatatatggaaagtaagtgtcaggccgtcatccaggagctgcgcaagtgttgtgcgcagtatcccaagggaaggagtgttgtgtgttcaggctttgagaaggaagaagaggagaacctgacccgcaaatctgcctcaaagtag

SEQ ID NO: 26886 - DNA, 207 bp, Artificial Sequence
  derived and/or modified sequence
atgccacaaaaggatccgtgtcagaagcaggcttgcgagattcagaagtgcctgcaggccaactcctatatggagagcaaatgccaggccgtgatccaagaactgcgtaaatgctgcgcacagtatccgaagggaaggtccgtggtgtgttcaggcttcgagaaggaggaagaggaaaaccttactaggaagtccgcctccaaatag

SEQ ID NO: 26887 - protein, 107 aa, Artificial Sequence
  derived and/or modified sequence
MAGEDVGAPPDHLWVHQEGIYRDEYQRTWVAVVEEETSFLRARVQQIQVPLGDAARPSHLLTSQLPLMWQLYPEERYMDNNSRLWQIQHHLMVRGVQELLLKLLPDD

SEQ ID NO: 26888 - DNA, 324 bp, Artificial Sequence
  derived and/or modified sequence
atggccggcgaggacgtgggcgccccccccgaccacctgtgggtgcaccaggagggcatctacagagacgagtaccagagaacctgggtggccgtggtggaggaggagaccagcttcctgagagccagagtgcagcagatccaggtgcccctgggcgacgccgccagacccagccacctgctgaccagccagctgcccctgatgtggcagctgtaccccgaggagagatacatggacaacaacagcagactgtggcagatccagcaccacctgatggtgagaggcgtgcaggagctgctgctgaagctgctgcccgacgactag

SEQ ID NO: 26889 - DNA, 324 bp, Artificial Sequence
  derived and/or modified sequence
atggctggggaggatgtgggagctccgcccgaccacctctgggtgcaccaggaggggatctatagagatgaataccagagaacatgggttgctgtggtggaagaggaaacaagcttcctccgggctcgagtgcaacagattcaggtgcctctgggggacgccgctcgcccgtctcacctgcttacgtcccagttgccactaatgtggcagctgtaccccgaagagcgctacatggacaataattctagactttggcaaatccagcatcatttaatggttaggggagtccaggagctgcttctgaagctgttaccagatgattag

SEQ ID NO: 26890 - DNA, 324 bp, Artificial Sequence
  derived and/or modified sequence
atggccggcgaggacgtgggagcgcctccggaccacttgtgggtgcaccaggaaggcatttacagagacgagtaccagaggacatgggtcgcggtggtcgaggaggagacttcattcctacgcgccagggtgcagcagatacaggtgcctctgggcgacgctgccagacccagccatttgctgaccagccagttgccacttatgtggcagctatacccggaagaaagatacatggataacaattctaggctgtggcagatccagcatcaccttatggtgaggggggtgcaagagctgttgctcaagctgctgccggacgattag

SEQ ID NO: 26891 - DNA, 324 bp, Artificial Sequence
  derived and/or modified sequence
atggccggggaggatgtgggcgcccccccagaccacctgtgggtgcaccaggagggcatctacagagatgagtaccagaggacctgggtggccgtggtggaggaggagaccagcttcctgcgggcccgggtgcagcagatccaggtgcccctgggagatgctgcccggcccagccacctgctgaccagccagctgcccctgatgtggcagctgtacccagaggagcgctacatggacaacaacagccggctgtggcagatccagcaccacctgatggtgcggggcgtgcaggagctgctgctgaagctgctgcctgatgactag

SEQ ID NO: 26892 - DNA, 570 bp, Artificial Sequence
  derived and/or modified sequence
gatttacaaaggaatgaatctgcatgaaagtttaccaacaagatccctgcctgccttttgcaggctctcctgcaaccatctacttcatttttgatctcaggaagaccagagctgaggcttaggtggagaaaagcagggctagaattggaacccaaagcccagaatggcaggagaggatgtgggggctccacccgatcacctctgggttcaccaagagggtatctaccgcgacgaataccagcgcacgtgggtggccgtcgtggaagaggagacgagtttcctaagggcacgagtccagcaaattcaggttcccttaggtgacgcagctaggccaagtcaccttcttacctcccagctacctctcatgtggcaactctacccggaggagcgctacatggataacaactctcgcttgtggcagatacagcatcatttaatggtcaggggagtacaggagctgttgcttaagcttttgcctgatgactaacctggtgctgggattctacgaagatatgctcctttgttctgttcagtatttggcaatcacttcatccactactgcagtgcacc

SEQ ID NO: 26893 - DNA, 2274 bp, Artificial Sequence
  derived and/or modified sequence
ggggcggagggcggtggccggccgcggtccgggcgtcaggccgggcggcgggggcggcagggaggcggcgctctggggccgcaggcggacgtactctgtgagcggcgcccgggcgcctgggcaggcgcctcccgagtaccggcgcccattttgcccgcccgctaaggagacccgtgcgcggcctacacgcttgggggacagccctttaagacgacatctccgcgaacgccggcctcttgagccagggggacgctcttttgaaagtcagtcccaaaacagttaaggttttattttattttgttttatttccaagtcacagcccccgaatctcgtacaactctccctggaccacttccggttgccggcccgcgcctcataacttcggttcgagtgacctcggcccgggatgcccctcggctcaccccgggctcacgtcgcgatcctggcttgagtggcccagggtgggagacctggaagttttagcctagctgttctcaaggcggattaattagcccaagaaacattatattcatgcttaggtggagaaaagcagggctagaattggaacccaaagcccagaatggcaggagaggatgtgggggctccacccgatcacctctgggttcaccaagagggtatctaccgcgacgaataccagcgcacgtgggtggccgtcgtggaagaggagacgagtttcctaagggcacgagtccagcaaattcaggttcccttaggtgacgcagctaggccaagtcaccttcttacctcccagctacctctcatgtggcaactctacccggaggagcgctacatggataacaactctcgcttgtggcagatacagcatcatttaatggtcaggggagtacaggagctgttgcttaagcttttgcctgatgactaacctggtgctgggattctacgaagatatgctcctttgttctgttcagtatttggcaatcacttcatccactactgcagtgcacccacccttgggcctggggggagggagtgggttgaaaaactgctcaagaaacagaagtttagcaagggtcatgaagaatactgcaagtgaaactgcagagagaggttacgtaggcagaaagcaagtcaacaaaagcacttagtcaggatccgtaacttgaaattgactcctttggaaattgccatagaacccttaatggacatcatcggctggacctgggatctgatgaatcccacaaaagtcagcaccttctacagaacagatgccctgatcaccaaggacttggtactgatttagagagaagagagcagctcctagcagcatcaacatctatttgtcgcttatttgccctgcagcaattcacctgcctttccttctcccatcctgtaaatatcctaggttttgctccagtgtttcccatcccagtactgacctaatttggatctgctgagtatttagagggctctgaaaagagatatgcattgatgaaattagctacaaaggcttgtgggcctttttttctatctgaaatcgtgtcttcaaattactggaagttgctgatcaaaattgtgggctcttgaattcattctctgattacagatattttaaataagctggtttctataagaacttcaagaaaaaccattttagctgcttaactggcacctttctcaggaagtaataacaccaaatattgctgattcctaggaaaacatttactacttgtaaagaatttcctgagttaaagtagttataacagtttatatacattaaaagtaaggttttactttaaaaaaaaaagtcttgggaataatagctaccatgtattggagtcctttccaggcactattgtatgtactttatatactttatcacatttaatcctcctgtcaatgctttgaggtaggtatgattcccattttatatatgagtaataaaaaaagctcaaggagtttaatcatttatcaagggtttcttctgcgaatgatagagccaggctgcgccgtcggctcctctagcctaacgttggtttacagtattcaaaaagagttgattgaattcaaggttttttttccatgtaaagctatttatatcttccaagcctaatgaaatggatattataaaaatacagttgattcatcctatgtttgggaagagtatttttagtgtaattattttccagcaattgtaagggcatatactgcttgtctcagaagaaaattccacgtagaggggctttaaagtctttatggaaaaaagaaaaataaaaatcatttttcttgttttag

SEQ ID NO: 26894 - DNA, 324 bp, Artificial Sequence
  derived and/or modified sequence
atggccggcgaggacgtgggcgccccccccgaccacctgtgggtgcatcaggagggcatctaccgggatgagtaccagagaacatgggtagcagtggtagaagaggaaaccagttttctgcgcgctagggtgcagcagatccaagtgccattaggggacgcagcccgccccagccatttactgacatcacaactgccgttgatgtggcagctctacccagaggagcggtacatggataacaattctcgtttgtggcagattcaacatcacctcatggtgaggggcgtacaggaactgctgctgaaactgttacccgatgactag

SEQ ID NO: 26895 - DNA, 324 bp, Artificial Sequence
  derived and/or modified sequence
atggccggcgaggacgtgggcgccccccccgaccacctgtgggtgcaccaagagggcatctaccgggatgagtaccaacgaacgtgggtggcggtggtcgaagaagaaacttctttcctccgggcccgtgtgcagcagattcaagtgccgctgggagatgcggctcgcccttctcacttgctgacctcacagctcccactgatgtggcagctgtacccagaagagaggtatatggataacaactcaagactttggcagatccaacaccatttgatggtgcgcggagtacaggagttgctacttaagctgctgcccgatgattag

SEQ ID NO: 26896 - DNA, 324 bp, Artificial Sequence
  derived and/or modified sequence
atggccggagaggacgtgggagcccctccggatcatctttgggtgcatcaagaggggatctacagggatgagtaccagaggacatgggtggcagttgtggaagaagagacctcgtttctccgagccagagttcagcaaatccaggtgcctttgggcgacgctgccaggccctcccatctgctcaccagccagcttcctctgatgtggcagctttacccggaagaaagatatatggataacaactcgagactgtggcagatccagcaccatttgatggtacgtggggtccaggaattactcctgaagctgctgcctgatgactag

SEQ ID NO: 26897 - DNA, 324 bp, Artificial Sequence
  derived and/or modified sequence
atggctggcgaagacgtgggcgctcctcctgaccacctgtgggtacaccaagaaggtatttatagggatgagtaccagaggacctgggttgccgttgtcgaggaggagacctctttcctacgggctcgcgtgcaacagattcaggtgcctcttggagatgccgctcggcctagtcaccttctgactagccaattgcctctgatgtggcagctgtatcctgaggagaggtacatggacaacaactctcggttgtggcagatccagcatcacctgatggtacgcggagtgcaggagctattacttaagttactccctgacgattag

SEQ ID NO: 26898 - DNA, 324 bp, Artificial Sequence
  derived and/or modified sequence
atggccggcgaagatgtaggggcccctcctgatcatctgtgggtccaccaggagggcatctacagggacgagtaccaacgcacctgggttgctgtcgtagaagaagaaacctcctttctcagagcgagagtccagcaaattcaggtcccgcttggcgatgctgctcggccttctcatctgctgacgtctcagcttcccctcatgtggcagctgtacccagaggagcggtatatggataataacagcaggctgtggcagattcagcaccacctcatggtgagaggcgtgcaggagttactgctgaaactgttgccagacgattag

SEQ ID NO: 26899 - DNA, 324 bp, Artificial Sequence
  derived and/or modified sequence
atggccggcgaggacgtgggcgccccccccgaccacctgtgggtgcatcaagaaggcatatatagagatgaataccagcggacttgggtggccgtagtggaggaagaaacctccttcctgcgcgctcgagttcagcagatccaagtgccattgggagacgccgcacggccctctcacctcctgacatcacaattgcctctcatgtggcagctgtaccctgaagagcgctacatggataataattccaggctatggcagattcagcatcatctgatggtgcgaggcgtgcaagagctcctactcaaactgctacctgatgattag

SEQ ID NO: 26900 - DNA, 324 bp, Artificial Sequence
  derived and/or modified sequence
atggctggggaggacgtaggggcacctcctgaccacctttgggtccatcaggagggaatctatcgggacgaataccaaagaacatgggtagcagtggtcgaagaggagacctcctttctgcgagcccgtgtccagcagatacaagtccccctgggggatgcagccaggccttctcatctgcttaccagccagctcccattaatgtggcagctgtatcccgaagagaggtacatggataacaactccagattgtggcaaatccagcaccacctcatggtaaggggcgttcaggaattactgctcaaacttctacccgacgactag

SEQ ID NO: 26901 - protein, 3135 aa, Artificial Sequence
  derived and/or modified sequence
MVFESVVVDVLNRFLGDYVVDLDTSQLSLGIWKGAVALKNLQIKENALSQLDVPFKVKVGHIGNLKLIIPWKNLYTQPVEAVLEEIYLLIVPSSRIKYDPLKEEKQLMEAKQQELKRIEEAKQKVVDQEQHLPEKQDTFAEKLVTQIIKNLQVKISSIHIRYEDDITNRDKPLSFGISLQNLSMQTTDQYWVPCLHDETEKLVRKLIRLDNLFAYWNVKSQMFYLSDYDNSLDDLKNGIVNENIVPEGYDFVFRPISANAKLVMNRRSDFDFSAPKINLEIELHNIAIEFNKPQYFSIMELLESVDMMAQNLPYRKFKPDVPLHHHAREWWAYAIHGVLEVNVCPRLWMWSWKHIRKHRQKVKQYKELYKKKLTSKKPPGELLVSLEELEKTLDVFNITIARQTAEVEVKKAGYKIYKEGVKDPEDNKGWFSWLWSWSEQNTNEQQPDVQPETLEEMLTPEEKALLYEAIGYSETAVDPTLLKTFEALKFFVHLKSMSIVLRENHQKPELVDIVIEEFSTLIVQRPGAQAIKFETKIDSFHITGLPDNSEKPRLLSSLDDAMSLFQITFEINPLDETVSQRCIIEAEPLEIIYDARTVNSIVEFFRPPKEVHLAQLTAATLTKLEEFRSKTATGLLYIIETQKVLDLKINLKASYIIVPQDGIFSPTSNLLLLDLGHLKVTSKSRSELPDVKQGEANLKEIMDRAYDSFDIQLTSVQLLYSRVGDNWREARKLSVSTQHILVPMHFNLELSKAMVFMDVRMPKFKIYGKLPLISLRISDKKLQGIMELIESIPKPEPVTEVSAPVKSFQIQTSTSLGTSQISQKIIPLLELPSVSEDDSEEEFFDAPCSPLEEPLQFPTGVKSIRTRKLQKQDCSVNMTTFKIRFEVPKVLIEFYHLVGDCELSVVEILVLGLGAEIEIRTYDLKANAFLKEFCLKCPEYLDENKKPVYLVTTLDNTMEDLLTLEYVKAEKNVPDLKSTYNNVLQLIKVNFSSLDIHLHTEALLNTINYLHNILPQSEEKSAPVSTTETEDKGDVIKKLGLDSEMIMRPSETEINAKLRNIIVLDSDITAIYKKAVYITGKEVFSFKMVSYMDATAGSAYTDMNVVDIQVNLIVGCIEVVFVTKFLYSILAFIDNFQAAKQALAEATVQAAGMAATGVKELAQRSSRMALDINIKAPVVVIPQSPVSENVFVADFGLITMTNTFHMITESQSSPPPVIDLITIKLSEMRLYRSRFINDAYQEVLDLLLPLNLEVVVERNLCWEWYQEVPCFNVNAQLKPMEFILSQEDITTIFKTLHGNIWYEKDGSASPAVTKDQYSATSGVTTNASHHSGGATVVTAAVVEVHSRALLVKTTLNISFKTDDLTMVLYSPGPKQASFTDVRDPSLKLAEFKLENIISTLKMYTDGSTFSSFSLKNCILDDKRPHVKKATPRMIGLTVGFDKKDMMDIKYRKVRDGCVTDAVFQEMYICASVEFLQTVANVFLEAYTTGTAVETSVQTWTAKEEVPTQESVKWEINVIIKNPEIVFVADMTKNDAPALVITTQCEICYKGNLENSTMTAAIKDLQVRACPFLPVKRKGKITTVLQPCDLFYQTTQKGTDPQVIDMSVKSLTLKVSPVIINTMITITSALYTTKETIPEETASSTAHLWEKKDTKTLKMWFLEESNETEKIAPTTELVPKGEMIKMNIDSIFIVLEAGIGHRTVPMLLAKSRFSGEGKNWSSLINLHCQLELEVHYYNEMFGVWEPLLEPLEIDQTEDFRPWNLGIKMKKKAKMAIVESDPEEENYKVPEYKTVISFHSKDQLNITLSKCGLVMLNNLVKAFTEAATGSSADFVKDLAPFMILNSLGLTISVSPSDSFSVLNIPMAKSYVLKNGESLSMDYIRTKDNDHFNAMTSLSSKLFFILLTPVNHSTADKIPLTKVGRRLYTVRHRESGVERSIVCQIDTVEGSKKVTIRSPVQIRNHFSVPLSVYEGDTLLGTASPENEFNIPLGSYRSFIFLKPEDENYQMCEGIDFEEIIKNDGALLKKKCRSKNPSKESFLINIVPEKDNLTSLSVYSEDGWDLPYIMHLWPPILLRNLLPYKIAYYIEGIENSVFTLSEGHSAQICTAQLGKARLHLKLLDYLNHDWKSEYHIKPNQQDISFVSFTCVTEMEKTDLDIAVHMTYNTGQTVVAFHSPYWMVNKTGRMLQYKADGIHRKHPPNYKKPVLFSFQPNHFFNNNKVQLMVTDSELSNQFSIDTVGSHGAVKCKGLKMDYQVGVTIDLSSFNITRIVTFTPFYMIKNKSKYHISVAEEGNDKWLSLDLEQCIPFWPEYASSKLLIQVERSEDPPKRIYFNKQENCILLRLDNELGGIIAEVNLAEHSTVITFLDYHDGAATFLLINHTKNELVQYNQSSLSEIEDSLPPGKAVFYTWADPVGSRRLKWRCRKSHGEVTQKDDMMMPIDLGEKTIYLVSFFEGLQRIILFTEDPRVFKVTYESEKAELAEQEIAVALQDVGISLVNNYTKQEVAYIGITSSDVVWETKPKKKARWKPMSVKHTEKLEREFKEYTESSPSEDKVIQLDTNVPVRLTPTGHNMKILQPHVIALRRNYLPALKVEYNTSAHQSSFRIQIYRIQIQNQIHGAVFPFVFYPVKPPKSVTMDSAPKPFTDVSIVMRSAGHSQISRIKYFKVLIQEMDLRLDLGFIYALTDLMTEAEVTENTEVELFHKDIEAFKEEYKTASLVDQSQVSLYEYFHISPIKLHLSVSLSSGREEAKDSKQNGGLIPVHSLNLLLKSIGATLTDVQDVVFKLAFFELNYQFHTTSDLQSEVIRHYSKQAIKQMYVLILGLDVLGNPFGLIREFSEGVEAFFYEPYQGAIQGPEEFVEGMALGLKALVGGAVGGLAGAASKITGAMAKGVAAMTMDEDYQQKRREAMNKQPAGFREGITRGGKGLVSGFVSGITGIVTKPIKGAQKGGAAGFFKGVGKGLVGAVARPTGGIIDMASSTFQGIKRATETSEVESLRPPRFFNEDGVIRPYRLRDGTGNQMLQVMENGRFAKYKYFTHVMINKTDMLMITRRGVLFVTKGTFGQLTCEWQYSFDEFTKEPFIVHGRRLRIEAKERVKSVFHAREFGKIINFKTPEDARWILTKLQEAREPSPSL

SEQ ID NO: 26902 - DNA, 9408 bp, Artificial Sequence
  derived and/or modified sequence
atggtgttcgagagcgtggtggtggacgtgctgaacagattcctgggcgactacgtggtggacctggacaccagccagctgagcctgggcatctggaagggcgccgtggccctgaagaacctgcagatcaaggagaacgccctgagccagctggacgtgcccttcaaggtgaaggtgggccacatcggcaacctgaagctgatcatcccctggaagaacctgtacacccagcccgtggaggccgtgctggaggagatctacctgctgatcgtgcccagcagcagaatcaagtacgaccccctgaaggaggagaagcagctgatggaggccaagcagcaggagctgaagagaatcgaggaggccaagcagaaggtggtggaccaggagcagcacctgcccgagaagcaggacaccttcgccgagaagctggtgacccagatcatcaagaacctgcaggtgaagatcagcagcatccacatcagatacgaggacgacatcaccaacagagacaagcccctgagcttcggcatcagcctgcagaacctgagcatgcagaccaccgaccagtactgggtgccctgcctgcacgacgagaccgagaagctggtgagaaagctgatcagactggacaacctgttcgcctactggaacgtgaagagccagatgttctacctgagcgactacgacaacagcctggacgacctgaagaacggcatcgtgaacgagaacatcgtgcccgagggctacgacttcgtgttcagacccatcagcgccaacgccaagctggtgatgaacagaagaagcgacttcgacttcagcgcccccaagatcaacctggagatcgagctgcacaacatcgccatcgagttcaacaagccccagtacttcagcatcatggagctgctggagagcgtggacatgatggcccagaacctgccctacagaaagttcaagcccgacgtgcccctgcaccaccacgccagagagtggtgggcctacgccatccacggcgtgctggaggtgaacgtgtgccccagactgtggatgtggagctggaagcacatcagaaagcacagacagaaggtgaagcagtacaaggagctgtacaagaagaagctgaccagcaagaagccccccggcgagctgctggtgagcctggaggagctggagaagaccctggacgtgttcaacatcaccatcgccagacagaccgccgaggtggaggtgaagaaggccggctacaagatctacaaggagggcgtgaaggaccccgaggacaacaagggctggttcagctggctgtggagctggagcgagcagaacaccaacgagcagcagcccgacgtgcagcccgagaccctggaggagatgctgacccccgaggagaaggccctgctgtacgaggccatcggctacagcgagaccgccgtggaccccaccctgctgaagaccttcgaggccctgaagttcttcgtgcacctgaagagcatgagcatcgtgctgagagagaaccaccagaagcccgagctggtggacatcgtgatcgaggagttcagcaccctgatcgtgcagagacccggcgcccaggccatcaagttcgagaccaagatcgacagcttccacatcaccggcctgcccgacaacagcgagaagcccagactgctgagcagcctggacgacgccatgagcctgttccagatcaccttcgagatcaaccccctggacgagaccgtgagccagagatgcatcatcgaggccgagcccctggagatcatctacgacgccagaaccgtgaacagcatcgtggagttcttcagaccccccaaggaggtgcacctggcccagctgaccgccgccaccctgaccaagctggaggagttcagaagcaagaccgccaccggcctgctgtacatcatcgagacccagaaggtgctggacctgaagatcaacctgaaggccagctacatcatcgtgccccaggacggcatcttcagccccaccagcaacctgctgctgctggacctgggccacctgaaggtgaccagcaagagcagaagcgagctgcccgacgtgaagcagggcgaggccaacctgaaggagatcatggacagagcctacgacagcttcgacatccagctgaccagcgtgcagctgctgtacagcagagtgggcgacaactggagagaggccagaaagctgagcgtgagcacccagcacatcctggtgcccatgcacttcaacctggagctgagcaaggccatggtgttcatggacgtgagaatgcccaagttcaagatctacggcaagctgcccctgatcagcctgagaatcagcgacaagaagctgcagggcatcatggagctgatcgagagcatccccaagcccgagcccgtgaccgaggtgagcgcccccgtgaagagcttccagatccagaccagcaccagcctgggcaccagccagatcagccagaagatcatccccctgctggagctgcccagcgtgagcgaggacgacagcgaggaggagttcttcgacgccccctgcagccccctggaggagcccctgcagttccccaccggcgtgaagagcatcagaaccagaaagctgcagaagcaggactgcagcgtgaacatgaccaccttcaagatcagattcgaggtgcccaaggtgctgatcgagttctaccacctggtgggcgactgcgagctgagcgtggtggagatcctggtgctgggcctgggcgccgagatcgagatcagaacctacgacctgaaggccaacgccttcctgaaggagttctgcctgaagtgccccgagtacctggacgagaacaagaagcccgtgtacctggtgaccaccctggacaacaccatggaggacctgctgaccctggagtacgtgaaggccgagaagaacgtgcccgacctgaagagcacctacaacaacgtgctgcagctgatcaaggtgaacttcagcagcctggacatccacctgcacaccgaggccctgctgaacaccatcaactacctgcacaacatcctgccccagagcgaggagaagagcgcccccgtgagcaccaccgagaccgaggacaagggcgacgtgatcaagaagctgggcctggacagcgagatgatcatgagacccagcgagaccgagatcaacgccaagctgagaaacatcatcgtgctggacagcgacatcaccgccatctacaagaaggccgtgtacatcaccggcaaggaggtgttcagcttcaagatggtgagctacatggacgccaccgccggcagcgcctacaccgacatgaacgtggtggacatccaggtgaacctgatcgtgggctgcatcgaggtggtgttcgtgaccaagttcctgtacagcatcctggccttcatcgacaacttccaggccgccaagcaggccctggccgaggccaccgtgcaggccgccggcatggccgccaccggcgtgaaggagctggcccagagaagcagcagaatggccctggacatcaacatcaaggcccccgtggtggtgatcccccagagccccgtgagcgagaacgtgttcgtggccgacttcggcctgatcaccatgaccaacaccttccacatgatcaccgagagccagagcagccccccccccgtgatcgacctgatcaccatcaagctgagcgagatgagactgtacagaagcagattcatcaacgacgcctaccaggaggtgctggacctgctgctgcccctgaacctggaggtggtggtggagagaaacctgtgctgggagtggtaccaggaggtgccctgcttcaacgtgaacgcccagctgaagcccatggagttcatcctgagccaggaggacatcaccaccatcttcaagaccctgcacggcaacatctggtacgagaaggacggcagcgccagccccgccgtgaccaaggaccagtacagcgccaccagcggcgtgaccaccaacgccagccaccacagcggcggcgccaccgtggtgaccgccgccgtggtggaggtgcacagcagagccctgctggtgaagaccaccctgaacatcagcttcaagaccgacgacctgaccatggtgctgtacagccccggccccaagcaggccagcttcaccgacgtgagagaccccagcctgaagctggccgagttcaagctggagaacatcatcagcaccctgaagatgtacaccgacggcagcaccttcagcagcttcagcctgaagaactgcatcctggacgacaagagaccccacgtgaagaaggccacccccagaatgatcggcctgaccgtgggcttcgacaagaaggacatgatggacatcaagtacagaaaggtgagagacggctgcgtgaccgacgccgtgttccaggagatgtacatctgcgccagcgtggagttcctgcagaccgtggccaacgtgttcctggaggcctacaccaccggcaccgccgtggagaccagcgtgcagacctggaccgccaaggaggaggtgcccacccaggagagcgtgaagtgggagatcaacgtgatcatcaagaaccccgagatcgtgttcgtggccgacatgaccaagaacgacgcccccgccctggtgatcaccacccagtgcgagatctgctacaagggcaacctggagaacagcaccatgaccgccgccatcaaggacctgcaggtgagagcctgccccttcctgcccgtgaagagaaagggcaagatcaccaccgtgctgcagccctgcgacctgttctaccagaccacccagaagggcaccgacccccaggtgatcgacatgagcgtgaagagcctgaccctgaaggtgagccccgtgatcatcaacaccatgatcaccatcaccagcgccctgtacaccaccaaggagaccatccccgaggagaccgccagcagcaccgcccacctgtgggagaagaaggacaccaagaccctgaagatgtggttcctggaggagagcaacgagaccgagaagatcgcccccaccaccgagctggtgcccaagggcgagatgatcaagatgaacatcgacagcatcttcatcgtgctggaggccggcatcggccacagaaccgtgcccatgctgctggccaagagcagattcagcggcgagggcaagaactggagcagcctgatcaacctgcactgccagctggagctggaggtgcactactacaacgagatgttcggcgtgtgggagcccctgctggagcccctggagatcgaccagaccgaggacttcagaccctggaacctgggcatcaagatgaagaagaaggccaagatggccatcgtggagagcgaccccgaggaggagaactacaaggtgcccgagtacaagaccgtgatcagcttccacagcaaggaccagctgaacatcaccctgagcaagtgcggcctggtgatgctgaacaacctggtgaaggccttcaccgaggccgccaccggcagcagcgccgacttcgtgaaggacctggcccccttcatgatcctgaacagcctgggcctgaccatcagcgtgagccccagcgacagcttcagcgtgctgaacatccccatggccaagagctacgtgctgaagaacggcgagagcctgagcatggactacatcagaaccaaggacaacgaccacttcaacgccatgaccagcctgagcagcaagctgttcttcatcctgctgacccccgtgaaccacagcaccgccgacaagatccccctgaccaaggtgggcagaagactgtacaccgtgagacacagagagagcggcgtggagagaagcatcgtgtgccagatcgacaccgtggagggcagcaagaaggtgaccatcagaagccccgtgcagatcagaaaccacttcagcgtgcccctgagcgtgtacgagggcgacaccctgctgggcaccgccagccccgagaacgagttcaacatccccctgggcagctacagaagcttcatcttcctgaagcccgaggacgagaactaccagatgtgcgagggcatcgacttcgaggagatcatcaagaacgacggcgccctgctgaagaagaagtgcagaagcaagaaccccagcaaggagagcttcctgatcaacatcgtgcccgagaaggacaacctgaccagcctgagcgtgtacagcgaggacggctgggacctgccctacatcatgcacctgtggccccccatcctgctgagaaacctgctgccctacaagatcgcctactacatcgagggcatcgagaacagcgtgttcaccctgagcgagggccacagcgcccagatctgcaccgcccagctgggcaaggccagactgcacctgaagctgctggactacctgaaccacgactggaagagcgagtaccacatcaagcccaaccagcaggacatcagcttcgtgagcttcacctgcgtgaccgagatggagaagaccgacctggacatcgccgtgcacatgacctacaacaccggccagaccgtggtggccttccacagcccctactggatggtgaacaagaccggcagaatgctgcagtacaaggccgacggcatccacagaaagcacccccccaactacaagaagcccgtgctgttcagcttccagcccaaccacttcttcaacaacaacaaggtgcagctgatggtgaccgacagcgagctgagcaaccagttcagcatcgacaccgtgggcagccacggcgccgtgaagtgcaagggcctgaagatggactaccaggtgggcgtgaccatcgacctgagcagcttcaacatcaccagaatcgtgaccttcacccccttctacatgatcaagaacaagagcaagtaccacatcagcgtggccgaggagggcaacgacaagtggctgagcctggacctggagcagtgcatccccttctggcccgagtacgccagcagcaagctgctgatccaggtggagagaagcgaggacccccccaagagaatctacttcaacaagcaggagaactgcatcctgctgagactggacaacgagctgggcggcatcatcgccgaggtgaacctggccgagcacagcaccgtgatcaccttcctggactaccacgacggcgccgccaccttcctgctgatcaaccacaccaagaacgagctggtgcagtacaaccagagcagcctgagcgagatcgaggacagcctgccccccggcaaggccgtgttctacacctgggccgaccccgtgggcagcagaagactgaagtggagatgcagaaagagccacggcgaggtgacccagaaggacgacatgatgatgcccatcgacctgggcgagaagaccatctacctggtgagcttcttcgagggcctgcagagaatcatcctgttcaccgaggaccccagagtgttcaaggtgacctacgagagcgagaaggccgagctggccgagcaggagatcgccgtggccctgcaggacgtgggcatcagcctggtgaacaactacaccaagcaggaggtggcctacatcggcatcaccagcagcgacgtggtgtgggagaccaagcccaagaagaaggccagatggaagcccatgagcgtgaagcacaccgagaagctggagagagagttcaaggagtacaccgagagcagccccagcgaggacaaggtgatccagctggacaccaacgtgcccgtgagactgacccccaccggccacaacatgaagatcctgcagccccacgtgatcgccctgagaagaaactacctgcccgccctgaaggtggagtacaacaccagcgcccaccagagcagcttcagaatccagatctacagaatccagatccagaaccagatccacggcgccgtgttccccttcgtgttctaccccgtgaagccccccaagagcgtgaccatggacagcgcccccaagcccttcaccgacgtgagcatcgtgatgagaagcgccggccacagccagatcagcagaatcaagtacttcaaggtgctgatccaggagatggacctgagactggacctgggcttcatctacgccctgaccgacctgatgaccgaggccgaggtgaccgagaacaccgaggtggagctgttccacaaggacatcgaggccttcaaggaggagtacaagaccgccagcctggtggaccagagccaggtgagcctgtacgagtacttccacatcagccccatcaagctgcacctgagcgtgagcctgagcagcggcagagaggaggccaaggacagcaagcagaacggcggcctgatccccgtgcacagcctgaacctgctgctgaagagcatcggcgccaccctgaccgacgtgcaggacgtggtgttcaagctggccttcttcgagctgaactaccagttccacaccaccagcgacctgcagagcgaggtgatcagacactacagcaagcaggccatcaagcagatgtacgtgctgatcctgggcctggacgtgctgggcaaccccttcggcctgatcagagagttcagcgagggcgtggaggccttcttctacgagccctaccagggcgccatccagggccccgaggagttcgtggagggcatggccctgggcctgaaggccctggtgggcggcgccgtgggcggcctggccggcgccgccagcaagatcaccggcgccatggccaagggcgtggccgccatgaccatggacgaggactaccagcagaagagaagagaggccatgaacaagcagcccgccggcttcagagagggcatcaccagaggcggcaagggcctggtgagcggcttcgtgagcggcatcaccggcatcgtgaccaagcccatcaagggcgcccagaagggcggcgccgccggcttcttcaagggcgtgggcaagggcctggtgggcgccgtggccagacccaccggcggcatcatcgacatggccagcagcaccttccagggcatcaagagagccaccgagaccagcgaggtggagagcctgagaccccccagattcttcaacgaggacggcgtgatcagaccctacagactgagagacggcaccggcaaccagatgctgcaggtgatggagaacggcagattcgccaagtacaagtacttcacccacgtgatgatcaacaagaccgacatgctgatgatcaccagaagaggcgtgctgttcgtgaccaagggcaccttcggccagctgacctgcgagtggcagtacagcttcgacgagttcaccaaggagcccttcatcgtgcacggcagaagactgagaatcgaggccaaggagagagtgaagagcgtgttccacgccagagagttcggcaagatcatcaacttcaagacccccgaggacgccagatggatcctgaccaagctgcaggaggccagagagcccagccccagcctgtag

SEQ ID NO: 26903 - DNA, 9408 bp, Artificial Sequence
  derived and/or modified sequence
atggtgttcgagagtgtggttgttgacgttctaaacaggtttctgggagactacgtagttgatttggatacttcccagctgtcactgggaatttggaaaggtgccgtggctctgaagaatctgcagatcaaggaaaatgccctcagccagctggacgtgccctttaaagtcaaagtggggcacatcggcaatttgaaactcatcataccctggaaaaacctgtacacccaaccagtcgaggcagtcctggaagagatctatctcttgatcgtgccgtcaagtcgtattaagtacgatcctctgaaggaagaaaaacagctgatggaggctaagcagcaggagctaaagcgaattgaagaagcgaaacagaaggtcgtcgatcaggagcagcacctccccgagaaacaggacacctttgctgagaagcttgttacccagatcatcaagaacctgcaggtaaaaatttcctccatacatatccgctacgaggatgatattaccaatcgtgataaacctctcagcttcggtatcagcttacaaaacctgagtatgcagacgaccgatcaatactgggtgccatgtctacatgacgaaaccgagaagctggtgaggaaactaatccgcttagacaacctgttcgcctattggaacgtcaaatcccagatgttttacctctctgattatgataacagtctggacgatttgaagaacggaatagtgaacgagaatatcgtccccgaagggtacgactttgtgtttaggccgatttctgctaatgcgaagctggttatgaacagaaggtctgattttgacttctcagccccaaagatcaacctggaaatcgaattacataatattgccattgagtttaacaagccccagtacttttcaatcatggagctgttggaaagcgttgatatgatggctcaaaatctgccctatcggaaattcaagccagatgtccccctgcatcaccatgcccgtgagtggtgggcctatgcaatacacggtgtcctggaggtcaatgtatgtcctcgtctgtggatgtggagctggaagcacatccggaagcatcgccagaaggtaaagcagtacaaggagctatataagaaaaagctaacatcgaagaagcctcccggagaactgctcgtctctttagaggagctggagaagactctggacgtgttcaatattacgatcgctcgacagacagccgaggtggaagtgaaaaaagcagggtataaaatttacaaggaaggcgtcaaagacccggaagataacaaagggtggttctcttggttgtggtcatggagtgagcagaacacaaatgagcagcaacccgacgttcagcctgagaccttggaagaaatgctgacacccgaggaaaaggcgctgctgtacgaggctattgggtattctgagactgctgtcgaccctaccctgctgaaaacttttgaagcattgaaattttttgtccacctcaaatctatgagcattgtgctgagagaaaaccaccaaaagcccgagctggtagacatagttattgaggaattttcgaccttaatcgttcagaggcctggcgcccaagccataaaattcgagacaaaaatcgactcatttcatatcacaggtctgccagataattccgaaaagccgcgtttgctgagttctctggacgacgcaatgtcactgttccagataacctttgaaatcaacccccttgatgagaccgtgtctcagcgatgtatcatagaggccgaacccctcgaaatcatctatgatgctagaaccgttaatagcatcgtggagttcttcagacctccaaaagaggtccatcttgcgcagttgaccgctgcaactttaacaaagctcgaagaatttcgatccaagaccgctacaggcctgctttatatcatagaaacccagaaagtccttgacttgaaaattaacctgaaggcttcttacatcatagtgcctcaagatgggattttcagtcctactagcaacctcctgctgttagacctgggccatttgaaggtcacgtctaagagccggtcagagttacctgatgtgaaacagggagaggcgaaccttaaagaaattatggacagggcatatgatagtttcgatattcagctgacctccgtacagttgctctactccagagtgggtgataattggcgagaagcccgaaagctctcggtttccacgcagcacatcctcgtcccaatgcacttcaacctcgagcttagcaaggccatggtcttcatggacgttaggatgccgaaatttaaaatttacggaaagctgccactgattagcttacggatttctgacaagaagctgcagggcattatggagctgatcgaatccatcccgaaaccagagccagttacagaagtgagcgcccctgtaaaatcctttcagatacagacttccacatcattaggtactagccagatatcccagaagataattcccttgctggagctgccttctgtttcagaagatgactctgaagaagaatttttcgatgccccatgttctcccttggaggagcccctgcagttcccaacaggtgttaagtctattcgcacacggaagctgcaaaagcaggattgctcggtcaacatgacaacattcaagatccggtttgaggttccaaaagtgctcatcgaattttatcaccttgtcggcgactgcgagctcagtgtggttgagattctggtgcttggacttggtgctgagatcgaaatcagaacatacgacctgaaagctaacgcttttctgaaagagttctgccttaaatgtcctgagtacctggacgaaaataagaaacctgtttatctggtgaccacattagataataccatggaagatctgctgacactcgagtatgttaaagccgaaaaaaacgtgccggatttgaagtctacatacaataatgtgttacagttaatcaaggtgaatttttcttctctcgacattcacctgcatactgaagccttactgaataccatcaattacctccataacattttaccacagagtgaggaaaagtccgcacccgtatccaccactgagaccgaggataaaggtgacgtgattaaaaagcttggcctggacagcgaaatgattatgcggccatccgagactgaaataaacgccaaactacgaaatattatagtccttgacagcgacattacagccatttataaaaaggccgtctatatcacgggcaaggaagtcttctccttcaagatggtgagttatatggacgctacggccggctcagcatacacggacatgaatgtggtggatatccaggttaatctaattgttggatgtattgaggttgtattcgtgactaagttcttatactctatactggcattcattgataacttccaggccgccaagcaggccctggcagaagccacagtccaggcagcaggaatggctgccaccggcgtcaaggagctggcccagaggtcctcaagaatggctcttgatatcaacatcaaggctccggtagtagtgatacctcagtctccagttagcgagaatgtgtttgtggccgactttggcctgatcacgatgacgaatacttttcacatgattactgagagccagtccagtcctccaccggtgatcgaccttattacaataaaattaagcgaaatgcgactttaccggagtcgatttattaatgatgcctaccaagaagtcttggatttactccttcctttgaatcttgaagtcgtggtggagagaaatctgtgctgggaatggtaccaagaggttccgtgtttcaatgtgaatgcacagttaaaaccgatggagtttatactatctcaggaggacatcactacaattttcaagacattacacggaaacatttggtacgagaaggatggctccgcctctcctgcagtgacaaaagaccagtatagcgccacttcaggggtgacaaccaatgcctctcatcactctggcggagccactgtcgtcaccgcagctgtcgtcgaagtgcattcccgagcactcctggttaagactaccctaaatatctctttcaagactgacgatctgactatggttttgtattcgcctggccccaagcaggctagcttcacagatgtacgggatccttccttaaaattagccgagtttaaactggaaaacatcataagcaccctgaaaatgtacactgacggaagtacattcagttctttttcccttaagaactgtatcctcgacgacaagcgcccccacgttaagaaggctacgcctaggatgattggactgaccgtcggctttgacaagaaggacatgatggatataaagtataggaaagtccgcgatgggtgtgtgacagacgcagtatttcaagaaatgtacatttgcgctagtgtcgaattcctgcagactgtggctaatgtttttctggaagcctacacaaccggtacggccgtggaaacgagcgtacagacttggactgctaaagaggaggtaccaacccaagaatcagtgaaatgggagataaatgttattattaagaacccagagatagtctttgtagctgacatgaccaagaacgacgcgcctgctttagtcatcactactcaatgtgagatttgttataaggggaatcttgagaatagcaccatgacagctgctataaaagacttacaggtcagagcctgtccctttctgcctgttaagcgtaaagggaagatcaccactgtcttgcagccatgtgatcttttttatcaaactacccagaaggggacggatcctcaggttattgatatgagtgttaagtcgctgacattaaaagtttcccctgtgattatcaataccatgataaccataacctcagcattgtataccaccaaagagacaattccagaagaaaccgccagcagtacagctcatctgtgggagaagaaagatactaaaactctgaaaatgtggttcttggaggaaagcaatgaaacggagaagattgccccgaccacggaactagtgcctaagggagaaatgataaagatgaacatagacagtatctttattgtgctcgaggccggaattggtcacaggacagtccctatgcttttggcaaagtccaggttcagtggcgagggaaagaattggagcagcttgattaacctccattgtcagctggagctggaggtgcattattacaatgaaatgtttggcgtgtgggagccccttctggaaccactcgagattgatcagaccgaggactttcgcccatggaacttaggtatcaagatgaaaaagaaggcaaagatggccattgtcgaatccgatcctgaagaagagaactacaaggttcctgagtataagaccgtcatatcattccattcaaaggatcaactgaacattactctgtctaaatgtggcttggttatgctaaataatctggttaaagcttttactgaggcagccacagggagcagcgcagacttcgtgaaggacctcgctccttttatgatcctcaattccttgggccttaccattagcgtctcaccttctgacagcttctccgtgctgaacatcccgatggccaaatcttatgtgctgaaaaacggggagtctttgtccatggattacattaggactaaagacaacgatcacttcaacgcaatgaccagtttaagctcaaaactgttcttcattctattgactccagtgaaccactccacagccgataagattcccctgaccaaagtaggcagacgcctatacaccgtgcggcatcgcgagtccggtgtggagcggtctattgtttgtcaaattgataccgtggaaggatcaaagaaggtgacaatccggagccctgtgcaaataagaaatcacttttcagtgccactctctgtgtatgaaggggacacgcttttggggaccgccagtcccgaaaatgagttcaatataccactgggatcttatcggagctttatctttcttaagccagaagacgaaaactatcagatgtgtgaagggatagactttgaggagattatcaagaacgatggggctctcctcaaaaagaaatgccggtcaaaaaacccatctaaggagtctttcttgataaacattgttccggagaaggacaacctgacctccctttcagtatacagtgaggatgggtgggacctcccctacatcatgcatctttggccgccaatccttctgagaaaccttctgccttacaagattgcctactacatcgaagggatcgagaatagcgtgttcactttgtcagagggtcattccgcccagatctgcaccgctcaactgggtaaagcccgcctccacttgaagctgctagattatctcaatcatgattggaagtccgaataccacatcaaaccaaaccagcaggacatctcatttgtgtcttttacttgtgtgactgagatggaaaagacggacctggatatcgctgtccacatgacctacaacacaggccagaccgtagtcgccttccatagcccttactggatggtaaacaagactggacggatgcttcagtacaaagcggacggaatccaccggaagcatccccctaactataagaaacctgtgctgttctctttccagcctaatcactttttcaacaataataaagtgcaactgatggttacggacagcgaacttagtaatcaattttcgattgacactgtggggtcacatggcgctgtaaaatgtaagggtctgaagatggactaccaggtgggtgtgacgattgatcttagttccttcaacattacgcggatcgtcactttcacacccttctatatgataaagaataagagcaaataccatatttcagtggccgaagaggggaacgacaaatggttgagcctggacctcgaacaatgcattcctttctggcccgaatacgcatcctctaagctgctgatccaagtggagagaagtgaagacccacctaagagaatttacttcaataaacaggaaaactgcatcctcctgcgactggataatgaactggggggcatcatagcagaggttaacctggcagaacattctactgtcattaccttcctggactaccacgatggggccgcgacttttctgctgattaaccatactaagaatgaactcgtccagtacaaccagtcatctttgagcgagatcgaagactcattacctccgggcaaggcagttttttatacttgggccgatccagttgggtctcgcaggctgaagtggcgatgtcgcaagtcccacggcgaggtgactcagaaagacgatatgatgatgcccatcgacctgggcgaaaagaccatttatttagtgagcttctttgaaggcctgcagagaatcatcctgtttactgaggacccacgcgtctttaaggtaacctacgagagcgagaaagccgagttggctgagcaggaaatcgccgtagccttacaggacgttggaatcagccttgtcaacaactataccaaacaagaagtggcttatatcggcattaccagctcggatgttgtatgggagacgaagcctaagaagaaagcgaggtggaagccaatgtcagtcaagcacaccgagaaactggagcgtgagtttaaggagtacactgagtctagcccgtccgaagacaaagttatacagctggatactaatgtacccgtccggcttacccccacaggccacaacatgaaaatcctgcagccacacgtgattgcgttgcggcgcaactatctgcctgccctcaaggtcgaatacaatacaagcgcgcatcagagctcattccgaatccagatttatcggattcagattcagaatcagattcatggggctgtgttcccctttgtgttttacccggtaaaacctccaaaatcagtgacgatggactccgcccccaagccgttcactgatgtttccattgtaatgaggagtgccggacactcacagattagtagaattaagtattttaaagtgttgattcaggagatggatttgagactcgatctcggctttatttacgccctgacagacctcatgacagaggcggaagtgacagaaaacacagaggtagagctctttcacaaggatatcgaggcattcaaagaggagtataagactgcctccttggtggatcaatcccaggtgagtctttacgaatatttccacattagcccaatcaagttgcacctaagcgtgagtttgtcaagtggccgcgaggaagccaaagatagcaagcagaacggcggcttgatccccgtgcatagccttaacctgcttctgaagtccatcggcgcaaccctgaccgacgttcaggatgtggtctttaagttagctttcttcgaacttaactatcaatttcacactacctctgatctccagtctgaagttattcggcactactctaaacaggccatcaagcagatgtacgtgctaatcctggggctggacgtcctggggaaccccttcggattaattcgcgagttcagcgaaggggtggaagcgtttttttacgaaccatatcaaggtgcaatacagggcccagaagaatttgtcgagggcatggcattggggctaaaggcactagtgggcggcgccgtgggcggccttgcaggtgcagcctccaaaatcaccggggccatggctaagggggtcgcggccatgactatggacgaggattaccaacaaaaacgacgggaggcgatgaacaagcagcctgccgggttccgagagggaattacccgggggggcaaagggctggtgagcggcttcgtctcaggaattaccggcatcgtgaccaagccgatcaaaggcgctcaaaaagggggagctgctggattctttaaaggcgtgggtaagggcctcgtgggggctgtcgcacgcccaaccggcggcatcatagacatggctagttccacattccaggggatcaaacgggcaaccgagacaagcgaggtggagtcacttagacccccgcgcttctttaacgaagatggggtcatcagaccttatcgtctgcgagatggtactggcaatcagatgctgcaggtgatggagaacggcagatttgctaaatacaagtacttcactcacgtaatgataaacaagaccgacatgttgatgattaccagacggggtgtgctgttcgttactaaaggcacatttggccagctgacatgtgagtggcagtattccttcgacgaattcacaaaagagccctttatcgttcatggtcgacggctgcggatcgaggcaaaggagcgcgtgaaatctgttttccacgctcgagagttcggaaagattatcaactttaagacaccagaagatgctcgatggattctgaccaagctgcaagaagcccgcgagcccagcccctccctctag

SEQ ID NO: 26904 - DNA, 9408 bp, Artificial Sequence
  derived and/or modified sequence
atggtgtttgaatctgtggtggtggatgtgctgaaccgcttcctgggggactatgtggtggacctggacaccagccagctgagcctgggcatctggaagggagctgtggccctgaagaacctgcagatcaaggaaaatgccctgagccagctggatgtgcccttcaaggtgaaggtgggccacatcggcaacctgaagctgatcatcccctggaagaacctgtacacccagcctgtggaggccgtgctggaggagatctacctgctgattgtgcccagcagccgcatcaagtatgaccccctgaaggaggagaagcagctgatggaggccaagcagcaggagctgaagagaattgaggaggccaagcagaaggtggtggaccaggagcagcacctgcctgagaagcaggacacctttgctgagaagctggtgacccagatcatcaagaacctgcaggtgaagatcagcagcatccacatccgctatgaagatgacatcaccaacagagacaagcccctgagctttggcatcagcctgcagaacctgtccatgcagaccacagaccagtactgggtgccctgcctgcatgatgaaacagagaagctggtgaggaagctgatccggctggacaacctgtttgcctactggaatgtgaagagccagatgttctacctgagtgactatgacaacagcctggatgacctgaagaatggaattgtgaatgaaaacatcgtgcctgagggctatgactttgtgttccggcccatcagcgccaatgccaagctggtgatgaacagaagaagtgactttgacttcagcgcccccaagatcaacctggagattgagctgcacaacatcgccatcgagttcaacaagccccagtacttcagcatcatggagctgctggagagcgtggacatgatggcccagaacctgccctacaggaagttcaagccagatgtgcccctgcaccaccacgcccgggagtggtgggcctatgccatccacggcgtgctggaggtgaatgtgtgcccccggctgtggatgtggagctggaagcacatcaggaagcaccggcagaaggtgaagcagtacaaggagctgtacaagaagaagctgaccagcaagaagcccccaggagagctgctggtgtccctggaggagctggagaagaccctggatgtgttcaacatcaccatcgcccggcagacagctgaggtggaggtgaagaaggccggctacaagatctacaaggagggcgtgaaggaccctgaggacaacaagggctggttctcctggctgtggagctggagcgagcagaacaccaatgagcagcagccagatgtgcagcctgagaccctggaggagatgctgaccccagaggagaaggccctgctgtatgaggccatcggctacagcgagacagctgtggaccccaccctgctgaagacctttgaggccctgaagttctttgtgcacctgaagtccatgagcatcgtgctgcgggagaaccaccagaagccagagctggtggacatcgtgattgaggagttcagcaccctcatcgtgcagaggcctggggcccaggccatcaagtttgagaccaagattgacagcttccacatcaccggcctgcctgacaacagcgagaagccccggctgctgagcagcctggatgatgccatgagcctcttccagatcacctttgagatcaaccccctggatgaaacagtgtcccagcgctgcatcatcgaggccgagcccctggagatcatctatgatgccaggacagtgaacagcatcgtggagttcttccggccccccaaggaggtgcacctggcccagctgacagctgccaccctgaccaagctggaggagttccgcagcaagacagccaccggcctgctgtacatcatcgagacccagaaggtgctggacctgaagatcaacctgaaggccagctacatcatcgtgccccaggacggcatcttcagccccaccagcaacctgctgctgctggacctgggccacctgaaggtgaccagcaagagccgctctgagctgcctgatgtgaagcagggcgaggccaacctgaaggagatcatggaccgggcctatgacagctttgacatccagctgacctctgtgcagctgctgtacagccgggtgggggacaactggagggaggccaggaagctgtctgtgtccacccagcacatcctggtgcccatgcacttcaacctggagctgagcaaggccatggtgttcatggatgtgaggatgcccaagttcaagatctacggcaagctgcccctcatcagcctgcgcatcagtgacaagaagctgcagggcatcatggagctgattgagagcatccccaagccagagcctgtgacagaggtgtctgcccctgtgaagagcttccagatccagaccagcaccagcctgggcaccagccagatcagccagaagatcatccccctgctggagctgcccagcgtgtctgaagatgattctgaggaggagttctttgatgccccctgcagccccctggaggagcccctgcagttccccactggagtgaagagcatccgcaccaggaagctgcagaagcaggactgcagcgtgaacatgaccaccttcaagatccgctttgaggtgcccaaggtgctgattgagttctaccacctggtgggggactgtgagctgtctgtggtggagatcctggtgctgggcctgggcgctgagattgagatccgcacctatgacctgaaggccaatgccttcctgaaggagttctgcctgaagtgcccagagtacctggatgagaacaagaagcctgtgtacctggtgaccaccctggacaacaccatggaggacctgctgaccctggagtatgtgaaggccgagaagaatgtgcctgacctgaagagcacctacaacaacgtgctgcagctgatcaaggtgaacttcagcagcctggacatccacctgcacacagaggccctgctgaacaccatcaactacctgcacaacatcctgccccagagcgaggagaagagcgcccctgtgtccaccacagaaacagaggacaagggagatgtgatcaagaagctgggcctggacagcgagatgatcatgaggcccagcgagacagagatcaatgccaagctgaggaacatcatcgtgctggacagcgacatcacagccatctacaagaaggctgtgtacatcaccgggaaggaggtgttctccttcaagatggtgtcctacatggatgccacagctggcagcgcctacacagacatgaatgtggtggacatccaggtgaacctgattgtgggctgcatcgaggtggtgtttgtgaccaagttcctgtacagcatcctggccttcatcgacaacttccaggccgccaagcaggccctggccgaggccaccgtgcaggccgccggcatggccgccaccggggtgaaggagctggcccagaggagcagcaggatggccctggacatcaacatcaaggcccctgtggtggtgatcccccagagccctgtgtctgaaaatgtgtttgtggccgactttggcctcatcaccatgaccaacaccttccacatgatcacagagagccagagcagccccccacctgtgattgacctgatcaccatcaagctgtctgagatgaggctgtaccgcagccgcttcatcaatgatgcctaccaggaggtgctggacctgctgctgcccctgaacctggaggtggtggtggagaggaacctgtgctgggagtggtaccaggaggtgccctgcttcaacgtgaatgcccagctgaagcccatggagttcatcctgagccaggaggacatcaccaccatcttcaagaccctgcacggcaacatctggtatgagaaggatggcagcgccagccctgctgtgaccaaggaccagtacagcgccaccagcggcgtgaccaccaatgccagccaccacagcggcggggccaccgtggtgacagctgctgtggtggaggtgcacagccgggccctgctggtgaagaccaccctgaacatctccttcaagacagatgacctgaccatggtgctgtacagccctggccccaagcaggccagcttcacagatgtgcgggaccccagcctgaagctggccgagttcaagctggagaacatcatcagcaccctgaagatgtacacagatggcagcaccttcagcagcttcagcctgaagaactgcatcctggatgacaagaggcctcatgtgaagaaggccacccccaggatgattggcctgactgtgggctttgacaagaaggacatgatggacatcaagtacaggaaggtgagagatggctgtgtgacagatgctgtgttccaggagatgtacatctgtgcctctgtggagttcctgcagacagtggccaacgtgttcctggaggcctacaccaccggcacagctgtggagacctctgtgcagacctggacagccaaggaggaggtgcccacccaggagagcgtgaagtgggagatcaacgtcatcatcaagaaccctgagatcgtgtttgtggccgacatgaccaagaatgatgccccagccctggtgatcaccacccagtgtgagatctgctacaagggcaacctggagaacagcaccatgacagctgccatcaaggacctgcaggtgcgggcctgccccttcctgcctgtgaagaggaagggcaagatcaccaccgtgctgcagccctgtgacctcttctaccagaccacccagaagggcacagacccccaggtgattgacatgtctgtgaagagcctgaccctgaaggtgtcccctgtgatcatcaacaccatgatcaccatcaccagcgccctgtacaccaccaaggagaccatccctgaggagacagccagcagcacagcccacctgtgggagaagaaggacaccaagaccctgaagatgtggttcctggaggagagcaatgaaacagagaagatcgcccccaccacagagctggtgcccaagggggagatgatcaagatgaacatcgacagcatcttcatcgtgctggaggccggcatcggccacaggacagtgcccatgctgctggccaagagccgcttctctggagagggcaagaactggagcagcctcatcaacctgcactgccagctggagctggaggtgcactactacaatgagatgtttggagtgtgggagcccctgctggagcccctggagattgaccagacagaggacttccggccctggaacctgggcatcaagatgaagaagaaggccaagatggccatcgtggagagtgaccctgaggaggagaactacaaggtgcctgagtacaagacagtcatctccttccacagcaaggaccagctgaacatcaccctgagcaaatgtggcctggtgatgctgaacaacctggtgaaggccttcacagaggccgccaccggcagcagcgctgactttgtgaaggacctggcccccttcatgatcctgaacagcctgggcctgaccatctctgtgagccccagcgacagcttctctgtgctgaacatccccatggccaagagctatgtgctgaagaatggagagagcctgtccatggactacatccgcaccaaggacaatgaccacttcaatgccatgaccagcctgagcagcaagctgttcttcatcctgctgacccctgtgaaccacagcacagctgacaagatccccctgaccaaggtgggccggcggctgtacacagtgcgccaccgggagagcggcgtggagaggagcatcgtgtgccagattgacacagtggagggcagcaagaaggtgaccatccgcagccctgtgcagatccggaaccacttctctgtgcccctgtctgtgtatgaaggagacaccctgctgggcacagccagcccagaaaatgagttcaacatccccctgggcagctaccgctccttcatcttcctgaagccagaagatgagaactaccagatgtgtgagggcatcgactttgaggagatcatcaagaatgatggagccctgctgaagaagaagtgccgcagcaagaaccccagcaaggagagcttcctgatcaacatcgtgcctgagaaggacaacctgaccagcctgtctgtgtacagtgaagatggctgggacctgccctacatcatgcacctgtggccacccatcctgctgaggaacctgctgccctacaagatcgcctactacatcgagggcatcgagaacagcgtcttcaccctgtctgagggccacagcgcccagatctgcacagcccagctgggcaaggcccggctgcacctgaagctgctggactacctgaaccacgactggaagtctgagtaccacatcaagcccaaccagcaggacatcagctttgtgtccttcacctgtgtgacagagatggagaagacagacctggacattgctgtgcacatgacctacaacacaggccagacagtggtggccttccacagcccctactggatggtgaacaagacaggccgcatgctgcagtacaaggcagatggcatccacaggaagcacccccccaactacaagaagcctgtgctcttctccttccagcccaaccacttcttcaacaacaacaaggtgcagctgatggtgacagattctgagctgagcaaccagttcagcattgacacagtgggcagccatggagctgtgaagtgcaagggcctgaagatggactaccaggtgggcgtgaccatcgacctgagcagcttcaacatcaccagaattgtgaccttcacccccttctacatgatcaagaacaagagcaagtaccacatctctgtggccgaggagggcaatgacaagtggctgagcctggacctggagcagtgcatccccttctggccagaatatgccagcagcaagctgctgatccaggtggagaggtctgaggacccccccaagaggatctacttcaacaagcaggagaactgcatcctgctgcggctggacaatgagctgggcggcatcatcgccgaggtgaacctggccgagcacagcaccgtcatcaccttcctggactaccatgatggagctgccaccttcctgctgatcaaccacaccaagaatgagctggtgcagtacaaccagagcagcctgtctgaaattgaggacagcctgcccccaggcaaggctgtgttctacacctgggccgaccctgtgggcagccggcggctgaagtggcgctgcaggaagagccatggagaggtgacccagaaggatgacatgatgatgcccatcgacctgggggagaagaccatctacctggtgtccttctttgagggcctgcagaggatcatcctcttcacagaggaccccagggtcttcaaggtgacctatgaaagtgagaaggccgagctggccgagcaggagattgctgtggccctgcaggatgtgggcatcagcctggtgaacaactacaccaagcaggaggtggcctacatcggcatcaccagcagtgatgtggtgtgggagaccaagcccaagaagaaggcccgctggaagcccatgtctgtgaagcacacagagaagctggagcgggagttcaaggagtacacagagagcagccccagcgaggacaaggtgatccagctggacaccaacgtgcctgtgcggctgacccccaccggccacaacatgaagatcctgcagccccacgtgattgccctgcggaggaactacctgcctgccctgaaggtggagtacaacaccagcgcccaccagagcagcttccgcatccagatctaccgcatccagatccagaaccagatccacggggctgtgttcccctttgtgttctaccctgtgaagccacccaagtctgtgaccatggattctgcccccaagcccttcacagatgtgtccatcgtgatgaggtctgctggccacagccagatcagccgcatcaagtacttcaaggtgctgatccaggagatggacctgcggctggacctgggcttcatctatgccctgacagacctgatgacagaagctgaggtgacagaaaatacagaggtggagctgttccacaaggacatcgaggccttcaaggaggagtacaagacagccagcctggtggaccagagccaggtgtccctgtatgagtacttccacatcagccccatcaagctgcacctgtctgtgtccctgagcagcggccgggaggaggccaaggacagcaagcagaatggaggcctcatccctgtgcacagcctgaacctgctgctgaagagcatcggggccaccctgacagatgtgcaggatgtggtgttcaagctggccttctttgagctgaactaccagttccacaccaccagtgacctgcagagcgaggtgatccgccactacagcaagcaggccatcaagcagatgtatgtgctgatcctgggcctggatgtgctgggcaaccccttcggcctcatccgggagttcagcgagggcgtggaggccttcttctatgagccctaccagggcgccatccagggccctgaggagtttgtggagggcatggccctgggcctgaaggccctggtgggcggcgctgtgggcggcctggccggggccgccagcaagatcaccggggccatggccaagggcgtggccgccatgaccatggatgaggactaccagcagaagaggcgggaggccatgaacaagcagcctgctggcttccgggagggcatcacccggggcggcaagggcctggtgtctggctttgtgtctggcatcactggaattgtgaccaagcccatcaagggggcccagaagggcggcgctgctggcttcttcaagggcgtgggcaagggcctggtgggcgctgtggcccggcccactggaggcatcatcgacatggccagcagcaccttccagggcatcaagagggccacagagaccagcgaggtggagagcctgcggcccccacgcttcttcaatgaagatggagtcatccggccctaccgcctgagagatggcaccggcaaccagatgctgcaggtgatggagaatggccgctttgccaagtacaagtacttcacccacgtgatgatcaacaagacagacatgctgatgatcacccggcggggcgtgctgtttgtgaccaagggcaccttcggccagctgacctgtgagtggcagtacagctttgatgagttcaccaaggagcccttcatcgtgcatggaagaaggctgagaattgaggccaaggagcgggtgaagtctgtgttccacgcccgggagtttgggaagatcatcaacttcaagaccccagaagatgcccgctggatcctgaccaagctgcaggaggcccgggagcccagccccagcctgtag

SEQ ID NO: 26905 - DNA, 9408 bp, Artificial Sequence
  derived and/or modified sequence
atggtgttcgagagcgtggtggtggacgtgctgaaccggttcctgggagactatgtcgtggatttggatacctcccagctgtctctcgggatctggaagggtgctgttgccttaaaaaatctgcagataaaagaaaatgctctgtcacagctcgacgtgccattcaaggtaaaggtcggccacatcgggaatctgaaattaattatcccctggaaaaatttgtatacacaacctgttgaggccgtgctggaagagatatatcttcttatagtgcccagcagccgcatcaagtacgatccgctgaaagaggaaaagcaactcatggaagctaaacagcaggaactcaagaggatcgaggaagcaaaacaaaaggtcgtcgaccaagagcagcatctgccagaaaagcaggacacattcgctgagaaactagtgacccagattattaaaaatctgcaggtgaaaatctcttctatacatattaggtacgaggatgacattacaaaccgggacaagccactgtctttcggcatatcattgcaaaatctttccatgcagactacagatcaatactgggtgccttgcctgcatgatgagacggagaagttggtacgtaagttgatcagacttgacaacttgttcgcatactggaacgttaagtctcagatgttctatttgtctgattatgataacagcctggatgacctgaaaaacggaatcgtgaacgagaacatcgtgcctgagggatacgatttcgtgttcagaccgatcagtgctaacgccaagctcgtgatgaaccgacgatcagacttcgatttcagcgcaccaaaaattaaccttgagatagaattgcataacattgccatagagttcaacaaaccacaatatttttctatcatggaacttttggagtcagtggatatgatggcacagaatcttccttatcggaaattcaagccagacgttcccttgcaccatcatgcacgtgagtggtgggcatatgctatccatggcgtattggaggtaaatgtgtgcccaaggctctggatgtggtcttggaagcatattcgaaaacatcgtcagaaagtgaaacaatacaaggagctttataaaaagaaattgacgagtaaaaagccgccgggagagctgctggtctctctggaagaacttgagaaaactttggatgtgtttaatataacaattgcccgtcagaccgcagaagtggaggttaagaaggctgggtataagatctacaaagagggtgttaaagacccggaggacaataaagggtggttctcttggctgtggtcttggagtgagcagaatactaacgagcaacaaccagatgttcagcccgagactttggaagaaatgctgacccccgaagaaaaggcactcctctacgaggccatcgggtactcagaaaccgctgtagatccgaccctgctcaagacatttgaagctcttaaattttttgtgcacttaaagagcatgagtatagttttaagagagaatcatcagaagcccgaactggttgacatagtcattgaggaattctcgaccttaattgttcagcgtcccggcgcccaggcaatcaagtttgaaactaaaatcgacagctttcatattaccggattgcctgataactcggaaaagccgcgattgctaagttccctcgacgatgccatgtcactgttccagattacatttgagataaatcctctcgacgagacagtcagccagcggtgcattatcgaggcggaaccccttgagattatatatgatgcacggaccgtcaatagcatcgtggagtttttccggcctcctaaagaggtgcatttagcccagcttacagccgcaacactgaccaaacttgaggagttcaggagtaagacagctactggactgctgtacattatagaaactcagaaggtgctggacttgaagattaacctcaaagccagctacataatcgttcctcaggatggcatcttcagccctacaagcaatctccttctcctagatctgggacacctcaaagtaaccagcaagtcgaggtcagagctgccagatgtaaaacaaggggaggcgaatctgaaggaaatcatggatcgagcttacgattcgttcgatatccagttaacctccgtgcagctgttatactcccgcgtgggggacaactggagggaggcgcggaagttatccgtgtctacacagcacattttagtaccaatgcacttcaatctggaactgagcaaagccatggtgttcatggacgtgagaatgcccaaatttaagatctacgggaaactgcccctgataagcctgcggattagtgataaaaaactgcaaggcattatggagctgatcgaaagcatccccaagcctgaaccagtaaccgaagtatccgcaccagtgaaatcatttcagatccagacctcaacctccctgggcacgtctcagatctcacaaaaaatcatccctctgctggagctccccagcgtgtcagaggatgactcagaagaagagttctttgatgcgccctgctctcccctggaagagccactgcaattccccactggcgtcaaaagcattagaaccagaaaactacaaaagcaggactgttcggtcaacatgaccacgttcaagattagatttgaggtgccaaaagtactgatagagttctaccatctggttggcgattgcgagctctcggttgtcgagatcctggtcctcggactgggcgcagagattgagatccggacttatgacctgaaagcaaatgcttttctaaaagagttttgtcttaagtgtcctgaatacttggacgaaaacaagaaacccgtctatcttgtgacgaccctcgataacaccatggaagacctgctgactttagagtatgttaaggcggagaagaacgtgcccgatctcaaaagtacctacaacaacgttctgcaactcattaaggtcaactttagcagcctcgatatacacttgcacacagaagccttgcttaatactataaattatctgcacaatatccttccacagagcgaggagaagagtgcccccgtaagcacaacggaaactgaggacaagggtgacgttatcaaaaaactgggtctggactctgaaatgataatgcgcccttctgagactgagatcaatgccaaattgcgtaacattatagtgctggacagcgatatcactgcaatctacaaaaaagccgtttacataacaggaaaggaagtcttctctttcaaaatggtgtcgtacatggatgccacagcaggcagcgcctatacagatatgaacgtggtcgatatacaagtgaaccttattgtaggatgtatagaagtggtgtttgtaacgaagttcttgtactcaattttagcttttattgacaatttccaggcggccaagcaggctctcgcggaggccaccgtacaggctgccggaatggcagctacaggagttaaggagctagcccaacgcagttctaggatggccctggatattaacatcaaagcccccgtagtggtcattccacaatcacctgtctccgagaatgtattcgtggcagactttggactgatcacaatgaccaacactttccacatgattaccgaatcgcagtcaagtcctccacctgtcattgatttgatcaccattaagttgtctgaaatgcgcctgtacaggagtagattcattaatgacgcatatcaggaggtgctcgatctgctgctgccactaaatctcgaggttgtggttgagaggaatttatgttgggaatggtaccaggaagtcccctgcttcaacgtaaacgctcaattaaaaccaatggagtttatcctcagccaggaagatattactacgattttcaagactttgcacgggaatatatggtacgagaaagacgggagcgctagtcctgccgtcaccaaggaccagtactccgcgactagtggagtcactactaacgctagtcatcatagcgggggggctaccgtggttacggctgctgtcgttgaggtgcactccagggctctgctggtaaagaccacgctgaatatcagtttcaagaccgatgacctgaccatggttttgtatagtccgggccccaagcaggcgtcttttaccgatgtgcgagatccatcactgaagctcgccgaatttaagttggaaaatattatttcaacattaaagatgtataccgacggctccaccttctcttcattttccttaaagaattgcatcttggacgataagcgtccccacgtgaaaaaagctaccccgaggatgatcggcctgacagtgggctttgacaaaaaggacatgatggatattaagtacaggaaggtccgagacggttgcgtgacagatgcggtattccaggaaatgtacatctgtgccagtgtagagttcttgcagaccgtggccaacgtctttcttgaggcatacaccaccggcactgcagtagaaacctcggtacagacatggacagctaaagaggaggtcccaacccaagagtccgtgaaatgggaaattaatgtaattatcaagaacccggagatagtgttcgtcgccgacatgaccaaaaatgatgctcctgctctggttatcactacacaatgcgagatatgttacaagggaaatctggagaattctacgatgactgcagccataaaagatctgcaggtgcgcgcgtgccccttcctacctgtaaaacgaaagggtaagattacaaccgtgctgcagccctgtgacctgttctaccagactacacagaaggggacggacccccaagtgatcgatatgagcgtcaaatcccttactcttaaagtctcacctgtgatcatcaatacaatgattacaataacttcagctttgtataccactaaagagaccataccagaggagactgcttccagtacggcccacctgtgggaaaagaaagatactaagacgctcaagatgtggttcctcgaagagtctaatgagacagaaaaaatcgcacccaccactgagctggtgccaaagggcgaaatgattaagatgaatatcgactctattttcatcgtgttggaggccggtatcggacatcgcaccgtacctatgctgcttgccaagtcgagattttctggagaagggaagaactggtcttccctgataaacctgcactgtcagttggagctggaagtccattattacaatgagatgttcggagtttgggagccactcctggagcctctggagattgaccagacggaggacttcagaccctggaatctcggcatcaaaatgaagaagaaggccaagatggccattgtggagtcagatcctgaggaggagaactacaaggttcccgaatacaagaccgttatctctttccacagcaaggaccagcttaatattacgctcagcaagtgcggccttgtgatgctcaacaatctcgtgaaagctttcacagaagccgctaccggctcttctgctgactttgtgaaggacctcgcacccttcatgatcttaaacagccttggcctgacgatctctgtgagtccgtctgactctttctctgttttaaatataccaatggctaagtcctatgtgctgaaaaatggagagtcattgtccatggactatattcggacaaaagataacgatcatttcaacgccatgacatcgctcagctcgaaattgttttttatcctgcttacgcccgtcaaccattctacggctgacaagatcccgctgacgaaggtaggaagaagattatataccgttaggcacagagaatcaggagtagagcgatcaattgtgtgtcagatcgataccgttgagggttctaagaaagtgaccatccgcagcccagtgcaaatccgtaaccacttcagtgtgccccttagtgtgtacgagggcgataccttacttggcactgcatcacctgaaaacgaatttaatattccactgggaagctatcgcagcttcattttccttaagcctgaggatgaaaattaccagatgtgtgaaggaatcgatttcgaggaaataattaaaaacgacggcgccctgttaaagaagaagtgccgctccaaaaacccaagtaaagaatctttcctgatcaatatcgtgcctgagaaagataacctgacaagccttagtgtgtacagcgaggacggctgggacttgccttatattatgcacctgtggcctccaattcttctaagaaatctgctgccttataagatcgcctattacattgagggaatagagaactctgtgtttacactgtctgagggccattctgcccaaatctgcactgcacagctgggaaaagcccgcctgcacctcaagctgctggactatctgaatcatgactggaagagcgaataccacatcaaacccaaccagcaagacatcagtttcgtcagctttacttgtgtgactgagatggagaaaacagatcttgatatcgccgtccacatgacatacaatactggacagaccgtcgtggcctttcatagcccctactggatggtgaacaagaccggccggatgttgcagtataaagcagatggcatccacaggaagcaccctccaaactacaagaaaccggtactcttcagtttccaaccaaaccacttttttaacaataacaaagtacaactcatggtgacagattcggagcttagtaaccaattctctattgataccgttggatctcacggagcagtgaagtgcaaaggcttgaagatggattaccaggtgggagtaaccatcgacttaagttcttttaatattactaggattgtgacattcactcctttctacatgatcaaaaacaagtccaagtaccatatctctgtggccgaagaagggaacgataaatggctgtctttggatctagagcagtgtatccctttttggcctgaatatgcatcctccaaactgctcattcaggtcgagaggagcgaagaccctcccaaacgtatatatttcaataaacaggaaaattgtatcttgctcaggctcgacaacgaactcggtggtatcattgctgaggtgaacctggccgaacattctactgttattacgttcttggattatcatgatggcgcagcaaccttcctcctcatcaaccatactaagaatgagctggtacagtataaccaatcctccctgtcagaaattgaggactccctcccaccaggtaaggccgtgttctacacgtgggcagatccagtgggatctaggagactgaagtggagatgcagaaaatcccacggcgaggttacccaaaaggacgacatgatgatgcctattgacctgggcgagaagacaatctacctcgtgagctttttcgaaggactacagaggatcattctgttcaccgaggatcccagggtctttaaggtgacttatgaatccgaaaaagccgagttagcggagcaggagattgccgtcgcgctgcaggacgtggggatcagcttagtaaataactataccaagcaggaggtggcctatattgggatcacatctagtgacgtagtctgggaaactaagcctaagaaaaaagctcgctggaaaccgatgtcggtgaagcataccgagaaattagaaagggagtttaaggagtatacagaatctagcccatccgaagataaggtgatccagctggacacgaatgtgccagtccgattgacaccgaccgggcataacatgaagatccttcagccccatgtaatcgccctccgaagaaattacttacctgcccttaaagtagagtacaacacttccgctcaccaatcaagcttcaggatccagatttaccgaatccaaatacagaaccagatccatggtgcggtcttcccatttgtgttttaccccgtgaagcccccaaaaagcgtgactatggactccgcacctaagccctttacggatgtaagcatcgtgatgcggagcgctggccattcccagatttccagaataaaatatttcaaagtcctgatccaggagatggatctgcgcctcgacttgggcttcatttacgcactgacagaccttatgacggaagcagaggtgacagagaatactgaagtggagctatttcataaggacatcgaggcattcaaagaggaatataaaaccgctagcttggttgaccaatctcaggtcagcctatatgaatacttccatatatctccaattaagctgcatctgagtgtgagcctgagttcaggccgcgaggaggccaaggatagcaagcagaacggcgggctgatacccgtgcactctttgaatctactgctcaaatctataggagctaccctgaccgacgtgcaagacgtcgtctttaagctggctttttttgaactgaactatcagttccacaccacctctgacctgcagtcagaggtcatccgacactatagtaaacaagccattaagcagatgtatgtcctcattctaggtttggacgttctgggtaaccctttcggtcttattcgcgaattcagcgaaggagtggaggcattcttctacgagccttatcagggtgccatccagggacccgaggaattcgtcgaaggcatggccctgggcctgaaggccctggtggggggggcagttggtggattagcaggcgcagcctccaagatcacaggcgccatggcaaagggggtggccgcgatgaccatggacgaggactaccagcagaaaaggcgagaggctatgaataagcaacccgcaggttttagggagggcatcactcgtggagggaagggacttgtgagcggtttcgtgtctggaataaccggcattgtaacaaaaccaataaagggggcccaaaagggcggtgccgcaggcttctttaagggcgttgggaagggcttagtgggtgcagtcgcccgcccaactggaggcatcattgacatggcaagcagcacctttcagggaatcaagagagcaaccgaaacatcagaagtggagtcattaaggccccctaggttctttaatgaggacggtgtgattaggccataccggctacgggacggtaccggcaaccagatgctacaggtgatggaaaacggtcggttcgccaagtataagtacttcacacacgtgatgattaataagaccgatatgttgatgatcacgcggcggggcgtgctgtttgtcaccaaggggacctttggccagctgacatgtgaatggcagtacagcttcgatgaattcaccaaggaacctttcattgtgcatggccggcggctgcggatcgaagcgaaagagcgagttaaaagcgtgtttcatgcacgggaatttggcaagattatcaactttaagaccccagaggacgcaaggtggatcctaacgaagctccaagaagctagggagccctctcctagcttatag

SEQ ID NO: 26906 - DNA, 9407 bp, Artificial Sequence
  derived and/or modified sequence
atggtattcgagtccgtggtggtggatgtcctaaataggttcctgggtgactacgtcgttgacttagacacatcacagctttccctggggatttggaagggggcagtcgccctgaagaatctgcagattaaagagaacgccctgagtcagctcgatgtcccatttaaggtgaaggtggggcacattggaaacctcaaactgataataccatggaagaatctttacacccaacccgttgaggctgttcttgaagaaatatacctgctgatagtgccgtcgtcgaggatcaagtacgatccactgaaagaagagaagcagctgatggaagccaagcagcaggaactgaagcgaatcgaggaggccaaacaaaaggtggtggaccaggagcaacatcttccggaaaagcaagatacttttgccgaaaaactggtgacccagatcatcaagaatctccaggtcaaaatctcaagtatccacatcagatatgaggacgatattacaaaccgcgataaacctctttccttcggaatcagcttacaaaacctttcaatgcagacgacagatcagtactgggtgccatgtctgcacgacgaaacagaaaagttggtccggaagctgatccggctggataacttgtttgcatactggaacgtcaagtctcaaatgttctacctgtccgactatgacaactcactcgacgacctgaagaatgggatcgtaaatgagaacatagtcccagagggatatgactttgtgtttaggccaatatccgctaatgccaagttggttatgaatcggcgtagtgacttcgatttctcggccccaaagattaaccttgagatcgaactgcataacatcgccattgaattcaataagccccagtacttttctatcatggaattgctggaatccgtagatatgatggctcagaatcttccatatagaaagtttaaaccagacgtgccactgcaccatcatgcaagagagtggtgggcctatgctattcacggcgtgctggaagtgaatgtgtgcccgagactgtggatgtggagttggaaacacattagaaagcacaggcaaaaagtaaagcagtataaagagctttacaagaaaaaattaacctccaaaaaacctcctggcgagttactggtttccctggaggagttagagaaaacattggatgtcttcaatatcaccattgccaggcagacagccgaagtcgaggttaaaaaagccggatacaagatatacaaggagggagttaaggaccccgaggacaataagggatggttttcatggctgtggtcttggagcgaacaaaacaccaatgaacagcagccagatgttcagcccgagaccctggaggagatgctaacgccggaggaaaaagccttattgtatgaggccatcggttatagcgaaacggcggttgacccaacactgctgaagacattcgaggctctgaaattttttgttcacttgaagagcatgagcatcgtgttgcgggagaaccatcagaaacccgaactggtcgacatcgtgattgaagagttcagcaccttgatcgttcaaaggcctggggcacaggccattaagtttgaaactaagatcgatagcttccacataacaggcctgccggataactctgaaaagccccgacttttgagctcactggatgacgcgatgtcgcttttccagataaccttcgagattaaccctctggatgagaccgtgtcccagcgctgcattatcgaggccgagccattggagataatttacgatgcacgtaccgtaaacagcattgttgaattcttcagaccacccaaggaggtccacttggcgcagcttacagcggcaacactgacgaaacttgaagagttcaggagcaagaccgcaactggccttctgtatatcatagagacacagaaggtgctggacctgaagatcaatctcaaagcatcttacattatcgtgccacaggatggcattttttcccctacaagcaatctactgctgctcgatctgggccacttaaaagtcacaagcaagagtcgcagcgagctccccgatgtgaagcagggcgaggctaatttgaaggaaattatggatagagcctacgattcattcgacatccagctaacgtccgtgcagctgctttactcccgggtcggggacaattggagggaggcacggaaacttagcgtgtcaacccagcatatactcgttcctatgcattttaacctcgagctgagtaaagctatggtgtttatggatgtccggatgcccaagtttaaaatctacggtaaactaccacttatctctcttaggatctccgacaaaaaacttcagggtattatggaattgatagagagtattccgaaacctgaacctgttactgaagttagtgccccagtgaagagttttcagatccaaactagcacgtctttggggacctctcagatcagccagaagatcataccactgttggaactgccctcggtttctgaagatgacagcgaggaggagttctttgatgctccctgctcccccttggaggaacccctgcagttcccaacaggtgtcaaatcaattaggacccgaaagctgcaaaaacaagactgctctgttaacatgaccacttttaaaatccggttcgaggtgcctaaggtcctcatcgaattttatcacctcgttggcgactgcgaactctcagtggttgaaatcctcgtcctggggctgggggctgagattgaaatacgcacctatgacctcaaggccaatgccttcttgaaggagttttgcctgaagtgtcccgaatatcttgatgaaaataaaaaacccgtatacctcgtgacaacattagataacaccatggaagacctgctgactctggagtatgtgaaggccgaaaaaaatgtacccgacttgaaaagcacttacaataatgtgctgcagttgatcaaagtaaacttttcatctttggacatccaccttcatacagaagcactgctgaacacgataaactacctacataacatccttccccagtctgaagagaagtcggcccctgtaagcaccaccgagaccgaagacaaaggcgatgtgattaaaaagctcggcctagatagcgaaatgattatgagaccttcagaaactgagataaacgccaaattacgcaatattatcgtacttgattccgatatcaccgctatctataaaaaagcagtctacatcactgggaaggaggtgttttcatttaagatggttagctacatggatgctacagctgggtcagcatatacggacatgaacgtagtggacatccaggtcaatctcattgtaggctgcatcgaggtggtcttcgtaacaaaattcctatattcaatactggcgtttattgataatttccaggccgctaagcaggcattagcagaggcaacggtgcaagccgctggcatggccgctaccggggtcaaggaacttgctcagagatcttcccgtatggcccttgacatcaacattaaggcaccagttgtggtgatcccccagagccccgtgtcagaaaacgtattcgtggccgatttcggccttattaccatgaccaatacattccacatgataacagaaagtcagtctagcccccctcctgtgatcgatttgatcacaatcaagctttcagaaatgagactctatcgatccagattcattaacgatgcatatcaagaagtactcgacctgctactccccctaaacctggaagtggttgtcgagcgcaacctgtgctgggagtggtatcaggaagttccttgtttcaatgtgaatgcccagcttaagccgatggaattcattctgtcacaggaagacatcaccaccatatttaagactctccatggaaatatatggtacgaaaaagatggtagcgcatccccagccgtgactaaggaccagtacagcgcgaccagcggcgtaaccaccaacgcgtctcaccactccggaggagctactgtggttaccgcagctgtagtggaggttcactctagggccttattagttaagactacccttaacatcagcttcaaaacggatgacttaaccatggttctgtactccccaggcccaaagcaggcgtcctttacagatgttcgtgatccatctctgaagctggccgaatttaaattggaaaacattatctcaacattgaaaatgtacacggatggatccactttctccagtttttctttaaagaattgcattctggacgacaagcgacctcatgtgaaaaaagccaccccaaggatgataggattgaccgttggctttgataagaaggatatgatggatattaagtatagaaaagtgcgcgacggttgtgtcacggacgcggtattccaggagatgtatatctgcgcttctgtagagttccttcagacagtggccaatgtctttctggaagcctataccacaggaacagcagtcgaaacttccgtccaaacctggacagccaaggaagaagtgccaacccaggagagcgttaagtgggagattaatgtgatcattaagaaccctgagatagtgttcgtggcagatatgaccaaaaacgacgcaccggctttggtgatcacaactcaatgcgaaatatgttataaagggaatttagagaatagtactatgaccgccgctataaaggacctgcaggtgagggcgtgtccctttcttcccgtcaagcggaaaggcaagatcacgaccgttctgcagccatgtgacctgttctatcagaccacgcagaagggaactgatccgcaagtgatcgacatgagcgtcaaaagcctaacactcaaagttagcccagtaattattaacacgatgatcacaattacctcggccttgtacacaaccaaggaaacaatcccagaggaaaccgcaagcagcactgcccacttgtgggagaagaaagacacgaaaaccctgaaaatgtggtttcttgaggaaagtaatgagacagagaaaattgcgccaaccacagaactggttcccaagggcgaaatgatcaaaatgaatatagactccatcttcattgttctggaggccggtattggtcataggaccgtccccatgttgctggccaagagccggttcagcggggagggaaagaactggagtagcctgatcaacctgcattgtcagttagagctggaggtgcactactacaacgaaatgttcggagtctgggaaccgctgctggagccacttgaaatcgatcagactgaggattttagaccttggaacctaggcattaaaatgaaaaaaaaggccaaaatggccatcgtggaaagtgacccagaggaagagaactataaagttcccgagtacaaaacagtcattagtttccactctaaggaccaactcaatatcactctctctaaatgcggactagtgatgctgaataatttggttaaagccttcacagaagccgctaccggctcctctgcagatttcgtgaaggatctagcccctttcatgatcctgaatagtctcgggctaaccatcagcgtgtcgccatcagattcattttcggtcttgaacatccccatggctaagtcatatgtcctgaaaaatggggaaagtctgtccatggactatattaggaccaaggataacgatcactttaacgcgatgacctccctttcgagcaaattattcttcatactccttacccctgttaatcattcaaccgctgataaaatccctttgacaaaggtgggtaggagattatataccgtcaggcatagagaatctggcgtcgagagaagcattgtgtgtcagatagacactgtggagggttcaaaaaaagtgacgattcggagtccagttcagataagaaatcacttctcagtgcctttaagcgtatacgagggggataccctgctgggaacggccagccccgaaaatgaattcaacattccactcggctcgtatcgtagttttatcttcctgaaacctgaggatgaaaattaccagatgtgcgagggtatagactttgaggagattataaagaacgatggggcactgttgaagaaaaaatgccgcagtaaaaatccttctaaagagtcctttctcatcaatatagtcccagaaaaggacaacttgacaagcctatcagtgtactccgaggacggatgggatttaccatatatcatgcatctgtggccaccaatcttgctccgaaacctcctgccctataagatcgcttactacatcgaagggatcgagaattccgtatttactctttctgagggacatagcgcacaaatttgcactgcccagctggggaaggctcgccttcacctgaagcttctggactatctgaatcacgattggaagtctgagtaccacattaagcctaatcagcaggatatcagcttcgttagcttcacctgtgtgacagaaatggagaagaccgacctagatattgcagtgcatatgacctataacaccggccaaaccgtagtggcgtttcatagtccctattggatggttaataaaacaggcaggatgctgcagtacaaggccgacggtattcataggaaacacccccctaattataaaaagcccgtgctcttctccttccaaccgaatcatttttttaacaataacaaagtccagcttatggtgacagactcggagctgtccaatcagttttctatcgatacagtcggcagccatggggctgtgaagtgcaagggcctcaaaatggactaccaggtgggggtgacaatcgatctgagctcgtttaacattacaagaatagtcacattcaccccattttatatgatcaagaataagagtaagtatcatataagtgtggcggaggaggggaacgataagtggttgagtctggatctggagcagtgcatccccttctggcctgagtacgcttccagcaagctgctgatacaggttgaacgctctgaggatccaccaaaacgcatttacttcaacaagcaggagaattgcatcttactgaggctagacaatgagctgggcggtatcatagctgaagttaacctggcagagcattctaccgtgattacatttctggactaccacgacggtgctgccacctttcttctgatcaatcatacaaaaaatgagttggttcagtacaatcagagcagcttatcagaaatcgaagacagcctgcccccaggaaaggccgtcttctatacctgggccgacccagtgggcagtagacggctaaagtggaggtgtcgtaagtcccacggcgaagttacgcagaaggatgacatgatgatgcctattgaccttggcgagaagactatttacctggtcagttttttcgagggattacagcggatcatactgtttacagaggatccgagagtttttaaggtgacttatgaaagcgaaaaggctgagctggctgagcaggaaattgctgtcgctctgcaagacgtcggaatctctctggtgaataattatactaagcaggaggtagcctacatcggtatcacgtcttccgatgtcgtctgggaaaccaaacctaaaaaaaaagcccgatggaaaccgatgtccgttaaacacactgagaagctggagcgcgaattcaaagagtacacagagtcatcccctagtgaggataaggtgattcaactcgacaccaatgtccccgtgagactaacgcccaccgggcacaacatgaaaattctgcagccccacgtgattgcactgcgaagaaactatttacccgcactaaaggtagagtacaacacgagcgcacaccaatcgagttttagaatccagatctataggattcagattcagaaccagatccacggcgctgtctttcccttcgtcttttaccccgtgaagcccccaaaatccgtgaccatggactctgcccctaaaccatttaccgacgtcagtatcgtgatgcgatcggctggacactcacagatttctcgcatcaaatattttaaggtcttgatccaggaaatggacttgagactggatctcggattcatctatgccttaactgatctgatgactgaagcagaggtcacagaaaacactgaagtggaactttttcacaaagatattgaagctttcaaagaagagtacaaaactgcttctcttgtcgatcagagccaagtgtctctttacgagtactttcacatttccccaattaaactgcacctgagcgtgtccttgtcgtctggacgcgaggaggccaaagactctaaacagaatgggggattaatccccgtccacagtcttaacctgcttcttaaatccattggagctaccttgacagacgtgcaggatgtggtctttaaactggccttcttcgaactgaattatcagtttcacaccacaagcgatctgcaaagtgaggtaatccggcattatagtaaacaggcaattaaacaaatgtacgtcctgatcctgggcctagacgtcttaggcaacccattcgggctgattagagagtttagcgaaggggtggaggcttttttttatgagccgtatcagggggctatccagggcccagaagaattcgtggagggtatggcgctgggcctcaaggcactcgtgggaggcgctgtaggcggacttgcaggggctgccagtaaaatcacaggcgcaatggccaagggcgtggccgctatgacaatggacgaggattaccaacaaaagcgaagagaggccatgaataagcaacccgcaggcttcagagagggcattaccaggggaggtaagggactcgtgagcggttttgtctcaggaatcacaggtatcgttactaaaccgataaagggggcacagaaagggggagctgctggctttttcaagggcgtgggaaaagggttggtcggggctgtcgcaagaccgacgggcggtataatagacatggccagcagcaccttccaggggatcaagagagccaccgagaccagcgaagtcgagtccttacgcccacctaggttctttaacgaggacggcgttatacgaccgtacaggctccgcgatggtaccggcaatcaaatgcttcaggtgatggagaacgggaggtttgccaagtataaatacttcacacacgttatgatcaataagactgatatgctcatgatcacgaggaggggcgtgctttttgttaccaaaggaacattcggccagttaacgtgtgaatggcagtactctttcgacgagttcacaaaagagccttttatcgttcacggcagaagactgagaatagaagccaaagagagagttaagtcagtctttcacgccagagagttcgggaaaattattaacttcaagacccccgaagatgccagatggattttgacaaagctgcaggaagcccgagagccatcgccctccctgta

SEQ ID NO: 26907 - DNA, 11145 bp, Artificial Sequence
  derived and/or modified sequence
ttcctccctctcagggctgcgcgcccaggtctgcgccgcgctccgcctccagccgcgcgcagacttgcgcacgcgtcgtgagagcgaccgcctccgtctctcgctgggctcgctagggctgcgcgttgggccagcgggggcgccgcagctgaagccgccccggagccggtgaaccgaattacctcgagggaggggcgtggggaaggcggcgggaggaggagcgcacgggccggctgccgtgcccaccacggctgaggaacatggttttcgagtcggtggtcgtggacgtgttgaaccggttcttgggggactatgtggtggacttggacacgtcccagctctctctgggcatctggaaaggagctgtggccctcaagaatcttcaaattaaagaaaatgccctgagtcaactggatgtaccatttaaagttaaagttggtcacataggtaatcttaaacttataattccatggaaaaacctttatactcaacctgttgaagccgtattggaagaaatttatttacttatagtgccttcttctagaataaaatatgatcctttaaaagaagagaaacaactcatggaagcaaagcaacaggaactgaaaagaatagaagaagcaaaacaaaaagtagttgatcaagaacaacatctgccggaaaaacaggacacttttgcagaaaaattagttacacagatcataaaaaatcttcaggtgaaaatttccagtatccatattcgttatgaagatgatatcacaaatcgggacaaaccgctgtcatttggtatttcccttcaaaatctgagcatgcagacaactgatcaatactgggttccatgtttacatgatgaaactgagaaactggttcgtaagttaatccgattggataacctgtttgcctattggaatgtgaagtctcagatgttttatcttagtgattatgataactccttggacgacttgaagaatggcattgtcaatgaaaatattgttccagaaggttatgattttgtatttcgtcccatatctgctaatgccaaacttgtgatgaatcgccgatctgattttgacttttctgcccccaaaataaacttggaaattgagttacataacatagcaattgaatttaataaaccacagtatttcagtattatggagcttcttgaatcagttgatatgatggcacaaaatctgccatataggaagttcaaacctgatgtgcctcttcaccaccatgccagagaatggtgggcttatgctatacatggcgttcttgaagtaaatgtttgccccaggttatggatgtggtcatggaagcatattagaaaacataggcaaaaagtgaagcaatataaagaactgtataaaaaaaagttaacaagtaagaagccacctggtgaacttctcgtgtctttggaggagttggaaaaaaccttggatgtctttaatataactatagctagacagacggcagaagttgaggtaaagaaagctggatacaaaatttacaaagaaggagtaaaagatccagaggataataaagggtggtttagctggctatggtcttggtcagaacaaaatactaatgaacagcaaccagatgttcaacctgaaactcttgaagaaatgttgacacctgaagaaaaagctttactctatgaagcaattggctatagtgaaacagcagttgatccaactttactaaaaacatttgaagccttgaagttttttgtccacttgaaaagtatgtctattgttctaagagaaaatcatcaaaaacctgagctggtagatattgtaatagaagaatttagcaccttaattgtgcaaagaccaggagcacaagcaataaaatttgaaactaaaatagattcatttcatattactggcttaccagataattcagaaaaaccccgcctcctgtcttcattggatgatgcaatgtcacttttccaaattacatttgagataaatccattagatgaaactgtttctcagaggtgtatcatagaagctgaacctttagaaatcatatatgatgcaaggacagtgaatagtatagtggaattcttcagacctccaaaagaggtacatctagcacagctcactgcagcaactttgacaaaactggaagaatttcgcagtaagacagcaacaggtctactgtatattattgaaacacagaaagttcttgatctcaaaattaatttgaaggcttcatatattattgtcccacaagatggaatttttagtcctacatcaaatctgcttcttttggaccttggtcatctaaaggtgacgagtaaaagtcgttctgaattaccagatgtgaaacaaggtgaggccaatcttaaagagataatggatagagcttatgattcatttgatattcaacttacaagtgtacagctgctttacagtagagttggtgataattggagagaagcacgaaaactcagtgtatctacccagcatattttggtacccatgcacttcaatttggaactgtctaaggccatggttttcatggatgtaaggatgcccaaattcaagatttatggaaagttacctcttatttctttacgaatctcagataaaaaactacaagggattatggaattgattgaaagcattccaaaacctgaaccagtaactgaagtatctgcccctgtcaaatcattccagattcaaacatctacttctttgggaacatcacagatttcacagaaaataattcctctcttggaacttccatctgtttctgaagatgattcagaggaggaattttttgatgcaccatgtagtcccttggaagaacctcttcagtttccaactggagttaaaagtattcgaaccagaaagttacaaaagcaggattgttcagtaaatatgactacatttaaaataagatttgaagtaccaaaggttttgatcgagttttatcaccttgttggagattgtgaactatctgtggtagaaattcttgttttaggattgggtgcagaaattgagattagaacatacgatttgaaagcaaatgcctttttgaaagagttctgcttaaaatgcccagaatacttggatgaaaacaagaaaccagtttatttggttacaaccctggataacacaatggaagacctgttaacgctggaatatgtaaaggctgaaaagaatgtacccgacttgaaaagtacctataacaatgttttacaattgattaaggtaaatttttcctctttggatattcatttacacactgaagcacttctgaatacaataaattatcttcataatatccttccgcaatcagaggaaaaatcagccccagtgtccactacagagactgaagacaaaggagatgtcattaaaaaattagggcttgattctgagatgattatgaggccttcagaaactgaaataaacgcaaagctaaggaatataattgttttagattctgatataacagctatatacaaaaaggctgtttatatcactggaaaagaagttttcagcttcaaaatggtttcttacatggatgcaactgctggttctgcatacacagatatgaatgtggttgacattcaggttaatttaatagttggttgcattgaagtagtttttgtcacgaaatttctatattctatattggcttttatagataattttcaggcagctaaacaagccttggctgaggcaactgttcaggcagctggaatggctgctactggtgtaaaagaactcgcacaaaggagttccagaatggcactggatattaacatcaaagccccagttgtggtcatcccgcagtctccagtttctgaaaatgtttttgttgctgattttggactaattacaatgacaaatacctttcatatgataacagagagccagagctctcccccacctgttattgatttgataacaataaagctgagtgaaatgcgactatacagatctcgatttattaatgatgcataccaggaagtactggatctactcctgccattaaatcttgaggttgtggttgaacgaaatttatgctgggagtggtaccaggaagttccttgttttaatgtaaatgctcagctgaaaccaatggagttcattcttagtcaagaagatataacaactatttttaaaacattgcatggcaatatatggtatgaaaaagatggtagtgcctcacctgctgtaacaaaagaccaatacagtgccactagtggagttactactaatgcttcacaccattcaggaggagcaactgtggtgacagctgctgtggtagaagtacattcacgtgccttactagttaagacaacactaaacataagcttcaaaactgatgatctcaccatggtgctgtatagtccaggtcctaaacaggcttcctttacagatgttcgtgatccttctctgaaacttgctgaatttaaattggagaatattataagtactttaaaaatgtatacagatggctcaacattttcttccttctcattaaaaaactgtattttagatgataaaagacctcatgtcaagaaagcaactcctcgaatgataggactgacagttggttttgacaaaaaagacatgatggatataaagtacaggaaagtcagagatggttgtgtgactgatgcggtctttcaagaaatgtatatttgtgcaagcgtagaatttctgcagactgttgcaaatgtctttcttgaggcctacaccacaggcactgctgtagaaaccagtgtgcaaacatggactgctaaggaagaagtacctacacaggaatcagtgaagtgggaaattaatgttattattaaaaatcctgaaattgtgtttgtagctgacatgacaaaaaatgatgctcctgctttagtcattacaacacaatgtgaaatttgctataaaggtaaccttgaaaatagtacaatgactgctgccattaaagatctccaagtgagagcctgcccgtttcttccagtcaagagaaaaggcaaaatcactactgttttgcagccctgtgacttgttttatcaaactactcagaaaggtacagatccacaagtgatcgatatgtcagtaaaatccctgacactaaaggtttcaccagttattataaatactatgattaccataacttcagcactgtatacaactaaggaaaccatcccagaagaaacggcttcttctactgcacatttatgggaaaagaaggatacaaagactttaaaaatgtggtttcttgaagaatcaaatgaaactgaaaaaatagctcccacaactgaattggtacccaaaggcgagatgataaaaatgaacattgattctatttttatagttcttgaggctggaattggtcatagaacagtacctatgcttctggcaaagtcacgtttttcaggggaaggcaaaaactggagttccctaataaatctgcactgtcagcttgagctagaagtgcattattataatgaaatgtttggtgtatgggagcctttgcttgaacccttagaaattgatcagactgaggattttagaccatggaatcttggtatcaagatgaaaaagaaagcaaaaatggccattgttgagtcagatcctgaagaagaaaactacaaagtgccagaatataaaactgtcatcagtttccattcaaaagaccaattaaacattacattatccaaatgtggtcttgtaatgttaaacaatttagtcaaggcatttacagaagctgccactggatcttcagctgacttcgtaaaggatctagcaccatttatgattttaaattcccttggacttactatttctgtttcgccaagtgattcttttagtgtactcaacattcctatggcaaaatcatatgtattgaaaaatggagaaagtttaagtatggattatatccgaaccaaggacaatgatcatttcaatgcaatgaccagcctaagcagcaaactcttcttcattcttcttacacctgttaaccattctactgctgataagattcctttaacaaaagtgggacgacgtctgtacactgtaagacacagagagtctggcgttgaaagatctattgtttgtcaaattgatacagtagaaggaagtaagaaggtcacaattcgctccccagtgcagataagaaatcatttttcagtcccactgtctgtttacgaaggggataccttattgggaactgcctcacctgaaaatgaattcaacataccattaggatcttaccgatcattcatttttctgaagccagaagatgagaactatcaaatgtgtgaaggaattgactttgaagagattataaaaaatgatggtgctcttctaaagaagaaatgtagatctaaaaacccttctaaggaatcatttctcattaatattgttccagaaaaagataatttaacatctctatcagtgtattcagaagatggttgggatttaccatacataatgcatttgtggccacctatcctgctccgaaatcttcttccttacaaaattgcttattatatagagggaattgaaaattcggtttttactctaagtgaaggacattcagcccagatttgtactgcacagttgggtaaagccaggctacatttaaaattacttgactatctcaatcacgattggaaaagtgaatatcacataaagcctaatcagcaagacattagttttgtcagttttacttgtgttacagaaatggaaaagactgatttagatattgctgtccatatgacttacaatactggtcagacagttgtggcatttcatagtccttattggatggtcaataaaactggccgcatgttacagtacaaagcagacggaattcatcgaaagcatccacctaattataaaaagccagttctcttttcttttcagccaaatcacttttttaataacaataaggttcaacttatggtaactgatagtgagttgtccaatcagttttcaattgatactgttggtagtcatggagctgttaaatgtaaaggcctgaaaatggactatcaagttggtgtcactatagacctgagcagttttaacattactagaattgtgacatttacccctttttatatgattaaaaacaaaagcaaataccatatatcagtggctgaagaaggaaatgataaatggctctctcttgatttggagcagtgtatccccttttggcctgagtatgcttctagtaaacttcttattcaagtcgaaaggagtgaagatcctcccaaaaggatatattttaacaagcaggaaaattgtattctattgcgtctagataacgagcttggaggtattatagcagaagtgaatttggccgagcattctacagttattacatttttagattatcatgatggagcagctacattcctcttaataaatcacacaaagaatgaacttgttcaatacaatcaaagttctctcagtgaaatagaagattccctccctcctggtaaagccgtgttttatacatgggctgatccggtgggctctagaaggctgaagtggagatgtagaaaaagccatggtgaagtaacacagaaggatgatatgatgatgcctatagatttgggggaaaagacaatatatttagtttcattctttgaaggtttacaacgcattattttattcactgaagatccaagggtatttaaagtaacatatgaaagtgagaaagcagagttagcagagcaagaaattgcagtggcattacaagatgttggaatttctcttgtcaacaattacacgaagcaagaagtagcctatataggcattacaagttctgatgtggtttgggaaacaaagcccaagaagaaggcaagatggaagccaatgagtgtaaagcacactgagaagttagagagagaatttaaggaatatactgaatcttctccttcagaagataaggttattcagttggacactaatgttccggttcgcctaacccctactggtcataacatgaaaattctgcagccgcatgtaatagctctacgaagaaattatcttccagcattaaaagtggaatataacacatctgcacatcaatcatcatttagaattcagatttacagaatacagatccaaaatcagatacatggtgctgtatttccctttgtgttttatcctgttaaacctccaaagtcggtcaccatggattcagcaccaaagccctttacagatgtcagtattgtcatgagatctgcaggacattcccagatatcacgtattaagtatttcaaagtattgattcaagaaatggatctcaggttagatcttgggtttatctatgctttaacagaccttatgacagaagctgaggtgactgaaaatacagaggttgagctttttcataaagatatagaagctttcaaagaagaatataaaacagcctcattagtagatcaatcacaagtcagcctctatgaatattttcatatatctcctatcaagttacatttaagtgtttcactgagttccggcagagaagaagctaaagattcaaaacaaaatggaggactgattccagttcattctttaaatcttttgctgaagagtattggtgccacactgacagatgtacaagatgtagtttttaagcttgcattttttgaactcaactatcagttccatacaacatccgatctacagtctgaagtcataagacactattcaaaacaggccattaagcagatgtatgtactcattcttggacttgatgttttgggaaatccatttggcttaattagagaattttctgaaggtgtagaagcatttttttatgaaccttaccagggagccatccagggtcctgaagagtttgtggaaggaatggcactaggacttaaggcactagttggtggagctgttggtggattggctggtgctgcctccaaaatcaccggtgctatggctaagggggtagcagctatgaccatggatgaagactaccaacagaagagaagagaagccatgaataagcaaccagctggttttagagaaggcatcactcgtggaggaaaaggcttagtttctggatttgttagtggcataacaggaattgttacaaaaccaatcaaaggagctcaaaaaggaggagcagctggtttctttaaaggtgttgggaaaggtttagtaggagcggtagcaaggccaactggaggcatcatagacatggctagcagtacatttcagggaataaaaagagctacagagacttctgaagtggagagtctgcgacctcctcggttcttcaatgaagatggagttatcagaccgtacaggttgagggatgggactggaaatcaaatgttacaggtcatggaaaatggaagatttgcaaaatacaaatattttacccatgtcatgatcaataagacagatatgctaatgataaccagacgtggtgtattgtttgtaacaaagggaacatttggacaactcacgtgtgagtggcagtatagttttgatgaatttaccaaagagccattcattgttcatgggagaagattgcgcattgaagcaaaggaacgagtgaagtctgtatttcatgccagagagtttggaaaaataattaacttcaagaccccagaggatgccaggtggatcctcacaaagctacaagaagcaagagaaccttctccgagcctctgacagagaacactgcctgaagacacacagcaataagtgattacagctcctagactaccttccaaaacctgtttgggaagcatattacagaaatgatttcaagtaccctgtattctggatgctaaaaaacaaaaacaaacaaaaaaacaaaaacaaaaaaacaaaaccagaatcaggtaaaacagctatgtgattaaaatattttaattcttcagcaattacccggttttctaaattgaatcatgcatctatttataattctaattattttgtaaaagaagacaaaattatgaatcttaagtatttgctccatctttttctctgtaatggtggagaggctgcccataattcatctccacatggagccaagtttaatgtttctagttcacattttgtacttctgtcatgcttatttcaaactccctgagtgatgggtaagaaatcaaacattgcctcagtggtatcaagagaactttggtggtggtttcttcagaatcatgaagttcttttgccagataaatattttgatattattttcctttttaatataaaggataggtttgaattgtacttaaaatgcatagcattattaaaaacaatcttttaaaatataatttataacatagattgaagcctccccttaagaaaccttaaagaaataagtatcctactcaaaaaaggaagtctgtttcagaactttagggcctttgaaatatttcctcaagcctatttcatgagatctacttggtttacccaagtcatgtttttaatagactgctaatatcaaaggagaatttttaaagccttaacaatgcctactttccattcactgttaacatggaataaacacaattcccaacatcttagatagtgtattatgcttccaacagacagtccctctcatataaagtttatgtaccctaaaatctaacccaataacctgtcccgttgccaatagattgagaatttctggtttgcttactctacagttattcaaatgagagtcacgcttttaaatttacagctcatcacagaaatcatcagctatacattagtaaaaataaggacatgaggttttctttcttggtttttgtccaagatctttgcaccttaatattaatggactgtttcaggtaaaagagaatgaatgtatgattgtgaactgtgaagagaatgatgcaggatcctatttagttactgaataatacagagtattcaatgcatgttgtatgtgccaccaagttactattaactgtttttggaattgaagactctgtatagtcaatagttgtgaaattcttctcaggctccttaaaccctcgctttgttgtaaaagctaaaataaacagcatgctatattgtaattgtatttcttgctgaccaaatctactaaatgctattgatttctctctgattactaaaacacattgtttattctcagtagtttcccccaaaatgcttttttctttgctgaacttaa

SEQ ID NO: 26908 - protein, 3069 aa, Artificial Sequence
  derived and/or modified sequence
MVFESVVVDVLNRFLGDYVVDLDTSQLSLGIWKGAVALKNLQIKENALSQLDVPFKVKVGHIGNLKLIIPWKNLYTQPVEAVLEEIYLLIVPSSRIKYDPLKEEKQLMEAKQQELKRIEEAKQKVVDQEQHLPEKQDTFAEKLVTQIIKNLQVKISSIHIRYEDDITNRDKPLSFGISLQNLSMQTTDQYWVPCLHDETEKLVRKLIRLDNLFAYWNVKSQMFYLSDYDNSLDDLKNGIVNENIVPEGYDFVFRPISANAKLVMNRRSDFDFSAPKINLEIELHNIAIEFNKPQYFSIMELLESVDMMAQNLPYRKFKPDVPLHHHAREWWAYAIHGVLEVNVCPRLWMWSWKHIRKHRQKVKQYKELYKKKLTSKKPPGELLVSLEELEKTLDVFNITIARQTAEVEVKKAGYKIYKEGVKDPEDNKGWFSWLWSWSEQNTNEQQPDVQPETLEEMLTPEEKALLYEAIGYSETAVDPTLLKTFEALKFFVHLKSMSIVLRENHQKPELVDIVIEEFSTLIVQRPGAQAIKFETKIDSFHITGLPDNSEKPRLLSSLDDAMSLFQITFEINPLDETVSQRCIIEAEPLEIIYDARTVNSIVEFFRPPKEVHLAQLTAATLTKLEEFRSKTATGLLYIIETQKVLDLKINLKASYIIVPQDGIFSPTSNLLLLDLGHLKVTSKSRSELPDVKQGEANLKEIMDRAYDSFDIQLTSVQLLYSRVGDNWREARKLSVSTQHILVPMHFNLELSKAMVFMDVRMPKFKIYGKLPLISLRISDKKLQGIMELIESIPKPEPVTEVSAPVKSFQIQTSTSLGTSQISQKIIPLLELPSVSEDDSEEEFFDAPCSPLEEPLQFPTGVKSIRTRKLQKQDCSVNMTTFKIRFEVPKVLIEFYHLVGDCELSVVEILVLGLGAEIEIRTYDLKANAFLKEFCLKCPEYLDENKKPVYLVTTLDNTMEDLLTLEYVKAEKNVPDLKSTYNNVLQLIKVNFSSLDIHLHTEALLNTINYLHNILPQSEEKSAPVSTTETEDKGDVIKKLALKLSTNEDIITLQILAELSCLQIFIQDQKCNISEIKIEGLDSEMIMRPSETEINAKLRNIIVLDSDITAIYKKAVYITGKEVFSFKMVSYMDATAGSAYTDMNVVDIQVNLIVGCIEVVFVTKFLYSILAFIDNFQAAKQALAEATVQAAGMAATGVKELAQRSSRMALDINIKAPVVVIPQSPVSENVFVADFGLITMTNTFHMITESQSSPPPVIDLITIKLSEMRLYRSRFINDAYQEVLDLLLPLNLEVVVERNLCWEWYQEVPCFNVNAQLKPMEFILSQEDITTIFKTLHGNIWYEKDGSASPAVTKDQYSATSGVTTNASHHSGGATVVTAAVVEVHSRALLVKTTLNISFKTDDLTMVLYSPGPKQASFTDVRDPSLKLAEFKLENIISTLKMYTDGSTFSSFSLKNCILDDKRPHVKKATPRMIGLTVGFDKKDMMDIKYRKVRDGCVTDAVFQEMYICASVEFLQTVANVFLEAYTTGTAVETSVQTWTAKEEVPTQESVKWEINVIIKNPEIVFVADMTKNDAPALVITTQCEICYKGNLENSTMTAAIKDLQVRACPFLPVKRKGKITTVLQPCDLFYQTTQKGTDPQVIDMSVKSLTLKVSPVIINTMITITSALYTTKETIPEETASSTAHLWEKKDTKTLKMWFLEESNETEKIAPTTELVPKGEMIKMNIDSIFIVLEAGIGHRTVPMLLAKSRFSGEGKNWSSLINLHCQLELEVHYYNEMFGVWEPLLEPLEIDQTEDFRPWNLGIKMKKKAKMAIVESDPEEENYKVPEYKTVISFHSKDQLNITLSKCGLVMLNNLVKAFTEAATGSSADFVKDLAPFMILNSLGLTISVSPSDSFSVLNIPMAKSYVLKNGESLSMDYIRTKDNDHFNAMTSLSSKLFFILLTPVNHSTADKIPLTKVGRRLYTVRHRESGVERSIVCQIDTVEGSKKVTIRSPVQIRNHFSVPLSVYEGDTLLGTASPENEFNIPLGSYRSFIFLKPEDENYQMCEGIDFEEIIKNDGALLKKKCRSKNPSKESFLINIVPEKDNLTSLSVYSEDGWDLPYIMHLWPPILLRNLLPYKIAYYIEGIENSVFTLSEGHSAQICTAQLGKARLHLKLLDYLNHDWKSEYHIKPNQQDISFVSFTCVTEMEKTDLDIAVHMTYNTGQTVVAFHSPYWMVNKTGRMLQYKADGIHRKHPPNYKKPVLFSFQPNHFFNNNKVQLMVTDSELSNQFSIDTVGSHGAVKCKGLKMDYQVGVTIDLSSFNITRIVTFTPFYMIKNKSKYHISVAEEGNDKWLSLDLEQCIPFWPEYASSKLLIQVERSEDPPKRIYFNKQENCILLRLDNELGGIIAEVNLAEHSTVITFLDYHDGAATFLLINHTKNELVQYNQSSLSEIEDSLPPGKAVFYTWADPVGSRRLKWRCRKSHGEVTQKDDMMMPIDLGEKTIYLVSFFEGLQRIILFTEDPRVFKVTYESEKAELAEQEIAVALQDVGISLVNNYTKQEVAYIGITSSDVVWETKPKKKARWKPMSVKHTEKLEREFKEYTESSPSEDKVIQLDTNVPVRLTPTGHNMKILQPHVIALRRNYLPALKVEYNTSAHQSSFRIQIYRIQIQNQIHGAVFPFVFYPVKPPKSVTMDSAPKPFTDVSIVMRSAGHSQISRIKYFKVLIQEMDLRLDLGFIYALTDLMTEAEVTENTEVELFHKDIEAFKEEYKTASLVDQSQVSLYEYFHISPIKLHLSVSLSSGREEAKDSKQNGGLIPVHSLNLLLKSIGATLTDVQDVVFKLAFFELNYQFHTTSDLQSEVIRHYSKQAIKQMYVLILGLDVLGNPFGLIREFSEGVEAFFYEPYQGAIQGPEEFVEGMALGLKALVGGAVGGLAGAASKITGAMAKGVAAMTMDEDYQQKRREAMNKQPAGFREGITRGGKGLVSGFVSGITGIVTKPIKGAQKGGAAGFFKGVGKGLVGAVARPTGGIIDMASSTFQGIKRATETSEVESLRPPRFFNEDGVIRPYRLRDGTGNQMLQASKSLI

SEQ ID NO: 26909 - DNA, 9210 bp, Artificial Sequence
  derived and/or modified sequence
atggtgttcgagagcgtggtggtggacgtgctgaacagattcctgggcgactacgtggtggacctggacaccagccagctgagcctgggcatctggaagggcgccgtggccctgaagaacctgcagatcaaggagaacgccctgagccagctggacgtgcccttcaaggtgaaggtgggccacatcggcaacctgaagctgatcatcccctggaagaacctgtacacccagcccgtggaggccgtgctggaggagatctacctgctgatcgtgcccagcagcagaatcaagtacgaccccctgaaggaggagaagcagctgatggaggccaagcagcaggagctgaagagaatcgaggaggccaagcagaaggtggtggaccaggagcagcacctgcccgagaagcaggacaccttcgccgagaagctggtgacccagatcatcaagaacctgcaggtgaagatcagcagcatccacatcagatacgaggacgacatcaccaacagagacaagcccctgagcttcggcatcagcctgcagaacctgagcatgcagaccaccgaccagtactgggtgccctgcctgcacgacgagaccgagaagctggtgagaaagctgatcagactggacaacctgttcgcctactggaacgtgaagagccagatgttctacctgagcgactacgacaacagcctggacgacctgaagaacggcatcgtgaacgagaacatcgtgcccgagggctacgacttcgtgttcagacccatcagcgccaacgccaagctggtgatgaacagaagaagcgacttcgacttcagcgcccccaagatcaacctggagatcgagctgcacaacatcgccatcgagttcaacaagccccagtacttcagcatcatggagctgctggagagcgtggacatgatggcccagaacctgccctacagaaagttcaagcccgacgtgcccctgcaccaccacgccagagagtggtgggcctacgccatccacggcgtgctggaggtgaacgtgtgccccagactgtggatgtggagctggaagcacatcagaaagcacagacagaaggtgaagcagtacaaggagctgtacaagaagaagctgaccagcaagaagccccccggcgagctgctggtgagcctggaggagctggagaagaccctggacgtgttcaacatcaccatcgccagacagaccgccgaggtggaggtgaagaaggccggctacaagatctacaaggagggcgtgaaggaccccgaggacaacaagggctggttcagctggctgtggagctggagcgagcagaacaccaacgagcagcagcccgacgtgcagcccgagaccctggaggagatgctgacccccgaggagaaggccctgctgtacgaggccatcggctacagcgagaccgccgtggaccccaccctgctgaagaccttcgaggccctgaagttcttcgtgcacctgaagagcatgagcatcgtgctgagagagaaccaccagaagcccgagctggtggacatcgtgatcgaggagttcagcaccctgatcgtgcagagacccggcgcccaggccatcaagttcgagaccaagatcgacagcttccacatcaccggcctgcccgacaacagcgagaagcccagactgctgagcagcctggacgacgccatgagcctgttccagatcaccttcgagatcaaccccctggacgagaccgtgagccagagatgcatcatcgaggccgagcccctggagatcatctacgacgccagaaccgtgaacagcatcgtggagttcttcagaccccccaaggaggtgcacctggcccagctgaccgccgccaccctgaccaagctggaggagttcagaagcaagaccgccaccggcctgctgtacatcatcgagacccagaaggtgctggacctgaagatcaacctgaaggccagctacatcatcgtgccccaggacggcatcttcagccccaccagcaacctgctgctgctggacctgggccacctgaaggtgaccagcaagagcagaagcgagctgcccgacgtgaagcagggcgaggccaacctgaaggagatcatggacagagcctacgacagcttcgacatccagctgaccagcgtgcagctgctgtacagcagagtgggcgacaactggagagaggccagaaagctgagcgtgagcacccagcacatcctggtgcccatgcacttcaacctggagctgagcaaggccatggtgttcatggacgtgagaatgcccaagttcaagatctacggcaagctgcccctgatcagcctgagaatcagcgacaagaagctgcagggcatcatggagctgatcgagagcatccccaagcccgagcccgtgaccgaggtgagcgcccccgtgaagagcttccagatccagaccagcaccagcctgggcaccagccagatcagccagaagatcatccccctgctggagctgcccagcgtgagcgaggacgacagcgaggaggagttcttcgacgccccctgcagccccctggaggagcccctgcagttccccaccggcgtgaagagcatcagaaccagaaagctgcagaagcaggactgcagcgtgaacatgaccaccttcaagatcagattcgaggtgcccaaggtgctgatcgagttctaccacctggtgggcgactgcgagctgagcgtggtggagatcctggtgctgggcctgggcgccgagatcgagatcagaacctacgacctgaaggccaacgccttcctgaaggagttctgcctgaagtgccccgagtacctggacgagaacaagaagcccgtgtacctggtgaccaccctggacaacaccatggaggacctgctgaccctggagtacgtgaaggccgagaagaacgtgcccgacctgaagagcacctacaacaacgtgctgcagctgatcaaggtgaacttcagcagcctggacatccacctgcacaccgaggccctgctgaacaccatcaactacctgcacaacatcctgccccagagcgaggagaagagcgcccccgtgagcaccaccgagaccgaggacaagggcgacgtgatcaagaagctggccctgaagctgagcaccaacgaggacatcatcaccctgcagatcctggccgagctgagctgcctgcagatcttcatccaggaccagaagtgcaacatcagcgagatcaagatcgagggcctggacagcgagatgatcatgagacccagcgagaccgagatcaacgccaagctgagaaacatcatcgtgctggacagcgacatcaccgccatctacaagaaggccgtgtacatcaccggcaaggaggtgttcagcttcaagatggtgagctacatggacgccaccgccggcagcgcctacaccgacatgaacgtggtggacatccaggtgaacctgatcgtgggctgcatcgaggtggtgttcgtgaccaagttcctgtacagcatcctggccttcatcgacaacttccaggccgccaagcaggccctggccgaggccaccgtgcaggccgccggcatggccgccaccggcgtgaaggagctggcccagagaagcagcagaatggccctggacatcaacatcaaggcccccgtggtggtgatcccccagagccccgtgagcgagaacgtgttcgtggccgacttcggcctgatcaccatgaccaacaccttccacatgatcaccgagagccagagcagccccccccccgtgatcgacctgatcaccatcaagctgagcgagatgagactgtacagaagcagattcatcaacgacgcctaccaggaggtgctggacctgctgctgcccctgaacctggaggtggtggtggagagaaacctgtgctgggagtggtaccaggaggtgccctgcttcaacgtgaacgcccagctgaagcccatggagttcatcctgagccaggaggacatcaccaccatcttcaagaccctgcacggcaacatctggtacgagaaggacggcagcgccagccccgccgtgaccaaggaccagtacagcgccaccagcggcgtgaccaccaacgccagccaccacagcggcggcgccaccgtggtgaccgccgccgtggtggaggtgcacagcagagccctgctggtgaagaccaccctgaacatcagcttcaagaccgacgacctgaccatggtgctgtacagccccggccccaagcaggccagcttcaccgacgtgagagaccccagcctgaagctggccgagttcaagctggagaacatcatcagcaccctgaagatgtacaccgacggcagcaccttcagcagcttcagcctgaagaactgcatcctggacgacaagagaccccacgtgaagaaggccacccccagaatgatcggcctgaccgtgggcttcgacaagaaggacatgatggacatcaagtacagaaaggtgagagacggctgcgtgaccgacgccgtgttccaggagatgtacatctgcgccagcgtggagttcctgcagaccgtggccaacgtgttcctggaggcctacaccaccggcaccgccgtggagaccagcgtgcagacctggaccgccaaggaggaggtgcccacccaggagagcgtgaagtgggagatcaacgtgatcatcaagaaccccgagatcgtgttcgtggccgacatgaccaagaacgacgcccccgccctggtgatcaccacccagtgcgagatctgctacaagggcaacctggagaacagcaccatgaccgccgccatcaaggacctgcaggtgagagcctgccccttcctgcccgtgaagagaaagggcaagatcaccaccgtgctgcagccctgcgacctgttctaccagaccacccagaagggcaccgacccccaggtgatcgacatgagcgtgaagagcctgaccctgaaggtgagccccgtgatcatcaacaccatgatcaccatcaccagcgccctgtacaccaccaaggagaccatccccgaggagaccgccagcagcaccgcccacctgtgggagaagaaggacaccaagaccctgaagatgtggttcctggaggagagcaacgagaccgagaagatcgcccccaccaccgagctggtgcccaagggcgagatgatcaagatgaacatcgacagcatcttcatcgtgctggaggccggcatcggccacagaaccgtgcccatgctgctggccaagagcagattcagcggcgagggcaagaactggagcagcctgatcaacctgcactgccagctggagctggaggtgcactactacaacgagatgttcggcgtgtgggagcccctgctggagcccctggagatcgaccagaccgaggacttcagaccctggaacctgggcatcaagatgaagaagaaggccaagatggccatcgtggagagcgaccccgaggaggagaactacaaggtgcccgagtacaagaccgtgatcagcttccacagcaaggaccagctgaacatcaccctgagcaagtgcggcctggtgatgctgaacaacctggtgaaggccttcaccgaggccgccaccggcagcagcgccgacttcgtgaaggacctggcccccttcatgatcctgaacagcctgggcctgaccatcagcgtgagccccagcgacagcttcagcgtgctgaacatccccatggccaagagctacgtgctgaagaacggcgagagcctgagcatggactacatcagaaccaaggacaacgaccacttcaacgccatgaccagcctgagcagcaagctgttcttcatcctgctgacccccgtgaaccacagcaccgccgacaagatccccctgaccaaggtgggcagaagactgtacaccgtgagacacagagagagcggcgtggagagaagcatcgtgtgccagatcgacaccgtggagggcagcaagaaggtgaccatcagaagccccgtgcagatcagaaaccacttcagcgtgcccctgagcgtgtacgagggcgacaccctgctgggcaccgccagccccgagaacgagttcaacatccccctgggcagctacagaagcttcatcttcctgaagcccgaggacgagaactaccagatgtgcgagggcatcgacttcgaggagatcatcaagaacgacggcgccctgctgaagaagaagtgcagaagcaagaaccccagcaaggagagcttcctgatcaacatcgtgcccgagaaggacaacctgaccagcctgagcgtgtacagcgaggacggctgggacctgccctacatcatgcacctgtggccccccatcctgctgagaaacctgctgccctacaagatcgcctactacatcgagggcatcgagaacagcgtgttcaccctgagcgagggccacagcgcccagatctgcaccgcccagctgggcaaggccagactgcacctgaagctgctggactacctgaaccacgactggaagagcgagtaccacatcaagcccaaccagcaggacatcagcttcgtgagcttcacctgcgtgaccgagatggagaagaccgacctggacatcgccgtgcacatgacctacaacaccggccagaccgtggtggccttccacagcccctactggatggtgaacaagaccggcagaatgctgcagtacaaggccgacggcatccacagaaagcacccccccaactacaagaagcccgtgctgttcagcttccagcccaaccacttcttcaacaacaacaaggtgcagctgatggtgaccgacagcgagctgagcaaccagttcagcatcgacaccgtgggcagccacggcgccgtgaagtgcaagggcctgaagatggactaccaggtgggcgtgaccatcgacctgagcagcttcaacatcaccagaatcgtgaccttcacccccttctacatgatcaagaacaagagcaagtaccacatcagcgtggccgaggagggcaacgacaagtggctgagcctggacctggagcagtgcatccccttctggcccgagtacgccagcagcaagctgctgatccaggtggagagaagcgaggacccccccaagagaatctacttcaacaagcaggagaactgcatcctgctgagactggacaacgagctgggcggcatcatcgccgaggtgaacctggccgagcacagcaccgtgatcaccttcctggactaccacgacggcgccgccaccttcctgctgatcaaccacaccaagaacgagctggtgcagtacaaccagagcagcctgagcgagatcgaggacagcctgccccccggcaaggccgtgttctacacctgggccgaccccgtgggcagcagaagactgaagtggagatgcagaaagagccacggcgaggtgacccagaaggacgacatgatgatgcccatcgacctgggcgagaagaccatctacctggtgagcttcttcgagggcctgcagagaatcatcctgttcaccgaggaccccagagtgttcaaggtgacctacgagagcgagaaggccgagctggccgagcaggagatcgccgtggccctgcaggacgtgggcatcagcctggtgaacaactacaccaagcaggaggtggcctacatcggcatcaccagcagcgacgtggtgtgggagaccaagcccaagaagaaggccagatggaagcccatgagcgtgaagcacaccgagaagctggagagagagttcaaggagtacaccgagagcagccccagcgaggacaaggtgatccagctggacaccaacgtgcccgtgagactgacccccaccggccacaacatgaagatcctgcagccccacgtgatcgccctgagaagaaactacctgcccgccctgaaggtggagtacaacaccagcgcccaccagagcagcttcagaatccagatctacagaatccagatccagaaccagatccacggcgccgtgttccccttcgtgttctaccccgtgaagccccccaagagcgtgaccatggacagcgcccccaagcccttcaccgacgtgagcatcgtgatgagaagcgccggccacagccagatcagcagaatcaagtacttcaaggtgctgatccaggagatggacctgagactggacctgggcttcatctacgccctgaccgacctgatgaccgaggccgaggtgaccgagaacaccgaggtggagctgttccacaaggacatcgaggccttcaaggaggagtacaagaccgccagcctggtggaccagagccaggtgagcctgtacgagtacttccacatcagccccatcaagctgcacctgagcgtgagcctgagcagcggcagagaggaggccaaggacagcaagcagaacggcggcctgatccccgtgcacagcctgaacctgctgctgaagagcatcggcgccaccctgaccgacgtgcaggacgtggtgttcaagctggccttcttcgagctgaactaccagttccacaccaccagcgacctgcagagcgaggtgatcagacactacagcaagcaggccatcaagcagatgtacgtgctgatcctgggcctggacgtgctgggcaaccccttcggcctgatcagagagttcagcgagggcgtggaggccttcttctacgagccctaccagggcgccatccagggccccgaggagttcgtggagggcatggccctgggcctgaaggccctggtgggcggcgccgtgggcggcctggccggcgccgccagcaagatcaccggcgccatggccaagggcgtggccgccatgaccatggacgaggactaccagcagaagagaagagaggccatgaacaagcagcccgccggcttcagagagggcatcaccagaggcggcaagggcctggtgagcggcttcgtgagcggcatcaccggcatcgtgaccaagcccatcaagggcgcccagaagggcggcgccgccggcttcttcaagggcgtgggcaagggcctggtgggcgccgtggccagacccaccggcggcatcatcgacatggccagcagcaccttccagggcatcaagagagccaccgagaccagcgaggtggagagcctgagaccccccagattcttcaacgaggacggcgtgatcagaccctacagactgagagacggcaccggcaaccagatgctgcaggccagcaagagcctgatctag

SEQ ID NO: 26910 - DNA, 9210 bp, Artificial Sequence
  derived and/or modified sequence
atggtgttcgaatcagttgtggtagatgtgctaaacagattccttggggattacgtggtagatttggacacgtctcagctgtctcttggaatctggaaaggggccgtggctctgaaaaatctgcagataaaagagaacgccctgtctcagcttgacgttccctttaaggtgaaagttggacacataggcaatctcaagctcattattccatggaaaaacctgtatacacagccagtggaggcagtactggaagagatatacctactgatcgtcccgtctagccggatcaagtacgatcccctcaaagaggaaaagcagctgatggaagctaagcaacaggagttaaagcggatcgaagaggctaagcagaaggttgttgaccaggagcagcacttgccagagaagcaagacaccttcgcggagaaactcgtgactcaaataatcaaaaacctgcaggttaaaatttctagcatccacatccgctacgaggatgacataaccaatcgtgacaaacccctgagctttggaattagtctgcagaatctatccatgcaaacaaccgatcaatattgggttccgtgcctgcatgacgaaaccgagaaactcgtgaggaaactcattagattggataacctgttcgcctactggaacgtcaaatcccagatgttttacttatcagactatgataacagcttggacgacctaaagaacggaatagttaacgagaatatcgtgcccgagggctacgactttgtgtttcgccctattagcgccaacgcgaagctagtgatgaatcggcgatctgatttcgatttttccgcacccaagataaacttggaaatcgagcttcataatatcgccatcgaatttaacaagccacagtacttttctatcatggagctgttggagagtgtcgatatgatggctcagaatcttccgtataggaaatttaaacccgacgtgcctctgcatcaccacgccagggaatggtgggcatatgccatccacggagttctcgaagtgaatgtatgtccccgtctgtggatgtggtcctggaaacacatccgaaaacaccgccaaaaggtcaagcaatacaaagaactttataaaaagaagctaactagtaagaagccgcctggagagctgctggtcagcctcgaagaattggagaagacactggatgtttttaacatcaccatcgcccgccaaacagccgaagtcgaagtgaaaaaagcggggtacaaaatttacaaggaaggtgtgaaagatcctgaagataacaagggctggttctcatggctgtggtcctggtcagaacagaacacaaacgaacagcagcctgatgtgcagcccgaaactctggaagagatgctgaccccagaggagaaagcgcttctgtacgaggccattggctattcggaaactgcagtggatcctaccttgcttaagacttttgaggccctgaagttcttcgtgcacctcaaatcgatgagtatcgtgctgcgagaaaaccaccagaaacctgagctggtggacatagttattgaagagttttcaacactaattgtgcagcgccccggggctcaggctataaaatttgagacgaaaattgattcctttcacatcaccggccttcccgacaactccgagaaaccccggctgctatccagtctggacgatgccatgagtttatttcagattacctttgaaataaaccctctagatgaaaccgtctcacagcgatgtattattgaagcggaaccgttggaaatcatttatgatgcaagaaccgtgaactccatcgtagagttctttcgccccccaaaagaagtccatctggcacagctcaccgcagcaaccttgacaaagcttgaggagtttcggtcaaagactgctacgggtctgctgtacatcattgagacccagaaggtgttggacttgaaaatcaatctgaaggcctcctacataatcgtaccgcaggacggcatcttctcccccacaagcaatctactactgctcgaccttggccatctgaaggtaactagtaaatcgcggagcgagttgcctgatgtcaaacagggagaagccaatctgaaagaaataatggatcgcgcttatgactcattcgacattcaattgacaagcgtccagctgctgtattcccgggtgggcgataattggcgggaggctagaaagctgtcggtcagcacgcagcatattcttgtccctatgcacttcaaccttgaactgtcaaaagcgatggttttcatggatgtgcggatgcccaagtttaaaatttacggaaaactgcccctcatcagcttgcggatctccgacaaaaagctccaggggatcatggagctgatcgagagtattcccaagcccgaacccgtcacggaggtgagtgctcccgtgaagagtttccagattcagacatccacctctctgggaacaagccagatcagccaaaagattattccgctgctggagctgccctcagttagcgaagatgattcagaggaggaattcttcgatgcaccgtgctctcccttagaagagcccctgcagttcccaaccggtgtgaagtccatacggacgagaaaacttcagaagcaggattgtagcgtcaatatgaccactttcaaaattagattcgaggtgcccaaagtgttgattgagttctaccatctggtaggtgactgtgagcttagtgtcgtcgaaatattggtgctcggccttggagcagagatcgagatacgcacctacgaccttaaggccaatgcctttctcaaagagttttgccttaagtgccctgagtatctcgacgaaaacaagaagcctgtatatctcgtgacaaccttggataatacaatggaagacttactcacactggaatacgtgaaagcggagaaaaatgtgccagacctgaagtcaacctacaataatgttctgcaactgataaaagtgaatttctcttcccttgacatccatcttcacacggaggcactcctgaataccatcaactacctccataatatactgccccaatcagaggagaagagtgcccccgtatccacgaccgaaaccgaagacaaaggagatgtgattaaaaagttggcgttgaagctcagtactaatgaagatatcataaccctacaaattctggccgagctatcctgtctccagatcttcatccaggatcaaaagtgtaacatctctgagataaaaattgaaggtctcgattctgaaatgatcatgaggccaagcgaaacagagattaacgccaagttgagaaatatcattgtgctggatagcgacatcaccgccatatacaaaaaggccgtgtacatcacggggaaagaagtgttctccttcaagatggttagctatatggacgccaccgcaggcagcgcgtacacggatatgaatgtcgtcgatatccaagttaacttgatcgtaggctgtatcgaagtggtgttcgtcacaaagtttttgtatagcattcttgccttcatagataacttccaagcagccaaacaggctctcgctgaagcaaccgtccaagccgctgggatggcagcgactggggtgaaagaactcgcccagagatcaagtcgcatggctctcgatatcaacataaaagctccggtggtggtgatcccccagagccctgtctctgagaatgtctttgtggctgattttggccttatcacaatgaccaacacattccacatgatcacagagtcccagtcttccccgccacccgtgatcgacctcatcacaatcaagctctctgagatgcgcttataccggtctcgtttcatcaatgacgcttatcaagaagttctcgacctacttttgccacttaacctggaagtggttgtggagcgaaatctgtgttgggaatggtaccaagaggttccatgtttcaatgtcaatgctcaactaaagcccatggaatttattctgtctcaggaagacataacaaccatcttcaaaaccctgcatggaaacatctggtacgagaaggatggaagcgccagccctgccgtaaccaaggaccagtacagtgccaccagtggcgtgacaaccaacgcctcacatcattcgggaggcgccactgtggtgacggccgctgttgttgaggtgcacagccgcgccttacttgtcaagaccaccttgaatatctcctttaaaactgacgacctgacaatggtgctctacagcccaggccccaaacaggcctcttttactgatgtgcgcgacccatctctgaagcttgctgaattcaagttggaaaatatcatttctacattaaagatgtatacggatgggtctaccttcagtagcttctccctaaaaaattgcatactggatgacaagaggccacatgtgaagaaggctaccccccgcatgattggcctgacagtagggtttgataagaaggatatgatggatatcaagtaccggaaagtgcgtgatggctgcgtgacagatgccgtgtttcaagaaatgtacatttgcgcttctgtggagtttttgcagaccgtggctaatgtgttcttagaggcgtatacgaccggaaccgcagtggaaacaagcgtccagacttggacagcaaaagaggaggtgcctactcaggaatcagtgaaatgggagatcaacgtgatcattaaaaaccctgaaatcgtattcgttgctgacatgacaaaaaatgacgcaccagctctggtgatcaccacccagtgtgagatctgttataagggtaacctggagaatagtaccatgacagcagccatcaaagacctccaggttcgggcctgtccttttctgcctgtaaaaagaaaaggcaagatcaccacagtcctgcaaccgtgcgacctgttttaccaaaccacacagaaggggaccgatccccaggtcatcgatatgtctgtaaagtctctcactctcaaggtgagtccagtcattatcaacacaatgattaccataacatcagctctctatacaaccaaggagacaatccctgaggagactgcctctagcacggcgcacctttgggagaaaaaggacaccaagaccctcaagatgtggttcctcgaggagtccaatgaaactgagaagatcgcgccaaccaccgaactcgtgcccaagggcgagatgattaaaatgaatatcgactcaatattcatcgtgttagaagccggaatcggacaccggactgttcccatgctcctcgcgaagtctcggttcagtggtgaagggaagaattggtccagcctgatcaacctgcattgtcagcttgagttggaggttcattactacaacgaaatgtttggcgtttgggagccattgctggaacctctggagatagaccagacagaagatttcagaccatggaacctgggcatcaagatgaaaaagaaagccaagatggccatagttgaaagcgacccagaggaagagaactataaagtccctgaatataagacagtgatcagtttccactcgaaagatcaactgaacattaccctttcaaaatgcggtttagttatgcttaacaacctcgtgaaagcgtttacagaggccgctacaggatcatccgccgatttcgtcaaggatttggcgccctttatgattctgaattcacttggccttactatttccgtgtcacctagcgacagtttcagtgtactcaatattcccatggcgaagagttatgtgcttaagaatggcgaatctctgagtatggactacatccggactaaggataacgatcactttaacgcaatgacttctttgagcagcaagctgttcttcattctgttaactccagtgaaccacagtaccgcagataaaatcccactcactaaagttgggagacgtctgtacaccgtgcggcacagagaaagcggcgtcgagagatccatagtatgtcagattgacactgtggaagggtctaaaaaggtcaccatccggtctccagtccagatccgaaaccacttcagcgtacctctgagtgtctacgagggtgacacacttttaggtacggcaagcccagaaaatgagtttaacataccactcggctcatataggtcttttatattccttaaacccgaagacgaaaattatcaaatgtgtgaaggcatcgacttcgaggagatcatcaagaatgatggtgccttgctgaagaagaagtgtagatctaaaaacccaagcaaggagtcctttctcattaacatcgttcctgagaaagataacttaacctcccttagtgtgtacagcgaggacggctgggaccttccatacatcatgcacctttggcccccaatcctgctccgcaatctcctcccctacaaaatcgcatactatattgaagggattgagaattccgtgttcacactttccgaaggccacagcgcccaaatatgtacagcacagctcggcaaggcgcggctacacttaaagttgcttgattatctgaaccacgactggaagtcagaatatcatataaagccgaaccagcaagatatcagcttcgtaagttttacatgcgttactgaaatggagaagaccgacttggatatcgccgtgcatatgacctataatacggggcagaccgtggtggcctttcactctccctattggatggtgaacaagaccggaagaatgctccagtataaggccgacggaatccaccggaaacatccacctaattataaaaagcctgtattattttcatttcaaccaaaccacttttttaataataacaaagtacagctgatggtgacagattcggaactgagcaaccagttctctatcgatactgtgggctcccatggcgcagttaagtgcaaaggcctcaagatggattatcaagttggtgtcactatcgacctttcttcctttaacattacgcgcatcgtgacgttcaccccattctatatgattaagaacaagagcaagtaccacatcagtgtggccgaagagggaaacgataaatggttatctctggatctcgaacagtgcattccattctggcccgagtacgccagcagcaaactgctgatccaggtcgaaagaagtgaagacccgccaaaacgcatatacttcaacaaacaggaaaactgcatccttctcaggctggacaatgagttggggggaataatcgctgaggtaaacctcgcagagcatagtacagtgatcacctttctggattaccatgatggtgcagctacattcctcctcatcaatcacaccaagaacgagctcgtgcaatacaatcagagcagtcttagtgagatcgaggactcactgcccccgggaaaggccgtgttttatacatgggccgatcccgttggtagtagacgtctgaagtggcgatgccgtaagtcccatggggaagttacacagaaagacgacatgatgatgcccatcgacctgggcgaaaagactatctatttggtgtctttctttgaggggctccaaaggattattctttttacagaagatcctcgagtgtttaaggtgacctatgagtctgaaaaagctgaactcgccgaacaggagatcgccgtagcccttcaggacgtgggcattagtctggtcaacaactatacaaagcaggaggtggcctacatcgggatcacctctagcgacgtagtgtgggagacaaaacccaagaaaaaagcacggtggaaacctatgagcgtaaagcataccgagaagttggagagagaatttaaggagtatactgaatccagcccctctgaagacaaggttattcagctggacactaatgtccctgtgcgtcttacccccactggtcacaatatgaagatcttacagccacacgtgatagccttgaggcggaactacctgccggctctgaaggtcgaatacaacacaagcgcacaccagtcctccttcagaatccagatctaccgtatccagatccagaatcagatccatggcgctgttttcccctttgtgttctaccccgtcaaacctcctaagtccgttaccatggatagtgcgcccaagccctttacagacgttagcatcgtcatgaggagtgctgggcattcccaaatcagcaggataaagtattttaaagtgcttattcaggagatggaccttagactggatcttggcttcatctatgccttgaccgacctaatgacagaggccgaagttacggagaatacagaagtggagctttttcataaggatattgaagcttttaaagaggagtacaagaccgcctctctggttgaccagtctcaggtgtctctgtacgagtatttccatatctcacccatcaaactgcacctttcggtctcgctttcttctggaagagaggaggcaaaggactctaagcagaacggcggcctgattcctgtgcattcattaaatcttttactgaaaagcatcggggccacgctcacagatgtccaggacgtggttttcaaattggcttttttcgagctcaattaccagttccacacgacttcagaccttcagagcgaagttattcggcattacagcaagcaggctattaagcagatgtacgttctcatcctcgggctggacgttttgggcaatccatttggacttatccgcgagttttccgagggggtggaggcatttttttacgagccttatcagggtgcaatccagggccctgaggagtttgtggagggtatggctctgggtctgaaggctctggtgggaggggcagtggggggtcttgctggcgctgcatcaaagattaccggcgccatggcaaagggagttgcggcgatgacaatggacgaggattaccagcagaaaaggcgcgaagcaatgaacaagcagccagccggttttagggagggcattactcggggcggcaagggcctcgtaagtggcttcgtctcaggtatcaccggtatcgtgacaaaaccaattaaaggagcccagaaagggggcgcagcaggttttttcaaaggggtaggaaagggtctggtgggagctgttgcaaggcccacggggggaataatcgatatggcctccagtacatttcagggcatcaaacgggccacagagaccagcgaggtggagtcattgaggccaccgcggttcttcaacgaggacggagtgattcgaccttacagactgcgagatgggaccggcaaccagatgctccaggcctctaagtccctcatttag

SEQ ID NO: 26911 - DNA, 9210 bp, Artificial Sequence
  derived and/or modified sequence
atggtgtttgaatctgtggtggtggatgtgctgaaccgcttcctgggggactatgtggtggacctggacaccagccagctgagcctgggcatctggaagggagctgtggccctgaagaacctgcagatcaaggaaaatgccctgagccagctggatgtgcccttcaaggtgaaggtgggccacatcggcaacctgaagctgatcatcccctggaagaacctgtacacccagcctgtggaggccgtgctggaggagatctacctgctgattgtgcccagcagccgcatcaagtatgaccccctgaaggaggagaagcagctgatggaggccaagcagcaggagctgaagagaattgaggaggccaagcagaaggtggtggaccaggagcagcacctgcctgagaagcaggacacctttgctgagaagctggtgacccagatcatcaagaacctgcaggtgaagatcagcagcatccacatccgctatgaagatgacatcaccaacagagacaagcccctgagctttggcatcagcctgcagaacctgtccatgcagaccacagaccagtactgggtgccctgcctgcatgatgaaacagagaagctggtgaggaagctgatccggctggacaacctgtttgcctactggaatgtgaagagccagatgttctacctgagtgactatgacaacagcctggatgacctgaagaatggaattgtgaatgaaaacatcgtgcctgagggctatgactttgtgttccggcccatcagcgccaatgccaagctggtgatgaacagaagaagtgactttgacttcagcgcccccaagatcaacctggagattgagctgcacaacatcgccatcgagttcaacaagccccagtacttcagcatcatggagctgctggagagcgtggacatgatggcccagaacctgccctacaggaagttcaagccagatgtgcccctgcaccaccacgcccgggagtggtgggcctatgccatccacggcgtgctggaggtgaatgtgtgcccccggctgtggatgtggagctggaagcacatcaggaagcaccggcagaaggtgaagcagtacaaggagctgtacaagaagaagctgaccagcaagaagcccccaggagagctgctggtgtccctggaggagctggagaagaccctggatgtgttcaacatcaccatcgcccggcagacagctgaggtggaggtgaagaaggccggctacaagatctacaaggagggcgtgaaggaccctgaggacaacaagggctggttctcctggctgtggagctggagcgagcagaacaccaatgagcagcagccagatgtgcagcctgagaccctggaggagatgctgaccccagaggagaaggccctgctgtatgaggccatcggctacagcgagacagctgtggaccccaccctgctgaagacctttgaggccctgaagttctttgtgcacctgaagtccatgagcatcgtgctgcgggagaaccaccagaagccagagctggtggacatcgtgattgaggagttcagcaccctcatcgtgcagaggcctggggcccaggccatcaagtttgagaccaagattgacagcttccacatcaccggcctgcctgacaacagcgagaagccccggctgctgagcagcctggatgatgccatgagcctcttccagatcacctttgagatcaaccccctggatgaaacagtgtcccagcgctgcatcatcgaggccgagcccctggagatcatctatgatgccaggacagtgaacagcatcgtggagttcttccggccccccaaggaggtgcacctggcccagctgacagctgccaccctgaccaagctggaggagttccgcagcaagacagccaccggcctgctgtacatcatcgagacccagaaggtgctggacctgaagatcaacctgaaggccagctacatcatcgtgccccaggacggcatcttcagccccaccagcaacctgctgctgctggacctgggccacctgaaggtgaccagcaagagccgctctgagctgcctgatgtgaagcagggcgaggccaacctgaaggagatcatggaccgggcctatgacagctttgacatccagctgacctctgtgcagctgctgtacagccgggtgggggacaactggagggaggccaggaagctgtctgtgtccacccagcacatcctggtgcccatgcacttcaacctggagctgagcaaggccatggtgttcatggatgtgaggatgcccaagttcaagatctacggcaagctgcccctcatcagcctgcgcatcagtgacaagaagctgcagggcatcatggagctgattgagagcatccccaagccagagcctgtgacagaggtgtctgcccctgtgaagagcttccagatccagaccagcaccagcctgggcaccagccagatcagccagaagatcatccccctgctggagctgcccagcgtgtctgaagatgattctgaggaggagttctttgatgccccctgcagccccctggaggagcccctgcagttccccactggagtgaagagcatccgcaccaggaagctgcagaagcaggactgcagcgtgaacatgaccaccttcaagatccgctttgaggtgcccaaggtgctgattgagttctaccacctggtgggggactgtgagctgtctgtggtggagatcctggtgctgggcctgggcgctgagattgagatccgcacctatgacctgaaggccaatgccttcctgaaggagttctgcctgaagtgcccagagtacctggatgagaacaagaagcctgtgtacctggtgaccaccctggacaacaccatggaggacctgctgaccctggagtatgtgaaggccgagaagaatgtgcctgacctgaagagcacctacaacaacgtgctgcagctgatcaaggtgaacttcagcagcctggacatccacctgcacacagaggccctgctgaacaccatcaactacctgcacaacatcctgccccagagcgaggagaagagcgcccctgtgtccaccacagaaacagaggacaagggagatgtgatcaagaagctggccctgaagctgagcaccaatgaagacatcatcaccctgcagatcctggccgagctgagctgcctgcagatcttcatccaggaccagaagtgcaacatcagcgagatcaagattgagggcctggacagcgagatgatcatgaggccttctgaaacagagatcaatgccaagctgaggaacatcatcgtgctggacagcgacatcacagccatctacaagaaggctgtgtacatcaccgggaaggaggtgttctccttcaagatggtgtcctacatggatgccacagctggcagcgcctacacagacatgaatgtggtggacatccaggtgaacctgattgtgggctgcatcgaggtggtgtttgtgaccaagttcctgtacagcatcctggccttcatcgacaacttccaggccgccaagcaggccctggccgaggccaccgtgcaggccgccggcatggccgccactggagtgaaggagctggcccagaggagcagcaggatggccctggacatcaacatcaaggcccctgtggtggtgatcccccagagccctgtgtctgaaaatgtgtttgtggccgactttggcctcatcaccatgaccaacaccttccacatgatcacagagagccagagcagccccccacctgtgattgacctgatcaccatcaagctgtctgagatgaggctgtaccgcagccgcttcatcaatgatgcctaccaggaggtgctggacctgctgctgcccctgaacctggaggtggtggtggagaggaacctgtgctgggagtggtaccaggaggtgccctgcttcaacgtgaatgcccagctgaagcccatggagttcatcctgagccaggaggacatcaccaccatcttcaagaccctgcacggcaacatctggtatgagaaggatggcagcgccagccctgctgtgaccaaggaccagtacagcgccaccagcggcgtgaccaccaatgccagccaccacagcggcggggccaccgtggtgacagctgctgtggtggaggtgcacagccgggccctgctggtgaagaccaccctgaacatctccttcaagacagatgacctgaccatggtgctgtacagccctggccccaagcaggccagcttcacagatgtgcgggaccccagcctgaagctggccgagttcaagctggagaacatcatcagcaccctgaagatgtacacagatggcagcaccttcagcagcttcagcctgaagaactgcatcctggatgacaagaggccccacgtgaagaaggccacccccaggatgattggcctgactgtgggctttgacaagaaggacatgatggacatcaagtacaggaaggtgagagatggctgtgtgacagatgctgtgttccaggagatgtacatctgtgcctctgtggagttcctgcagacagtggccaacgtgttcctggaggcctacaccactggaacagctgtggagacctctgtgcagacctggacagccaaggaggaggtgcccacccaggagagcgtgaagtgggagatcaacgtcatcatcaagaaccctgagatcgtgtttgtggccgacatgaccaagaatgatgccccagccctggtgatcaccacccagtgtgagatctgctacaagggcaacctggagaacagcaccatgacagctgccatcaaggacctgcaggtgcgggcctgccccttcctgcctgtgaagaggaagggcaagatcaccaccgtgctgcagccctgtgacctcttctaccagaccacccagaagggcacagacccccaggtgattgacatgtctgtgaagagcctgaccctgaaggtgtcccctgtgatcatcaacaccatgatcaccatcaccagcgccctgtacaccaccaaggagaccatccctgaggagacagccagcagcacagcccacctgtgggagaagaaggacaccaagaccctgaagatgtggttcctggaggagagcaatgaaacagagaagatcgcccccaccacagagctggtgcccaagggggagatgatcaagatgaacatcgacagcatcttcatcgtgctggaggccggcatcggccacaggacagtgcccatgctgctggccaagagccgcttcagcggggagggcaagaactggagcagcctcatcaacctgcactgccagctggagctggaggtgcactactacaatgagatgtttggagtgtgggagcccctgctggagcccctggagattgaccagacagaggacttccggccctggaacctgggcatcaagatgaagaagaaggccaagatggccatcgtggagagtgaccctgaggaggagaactacaaggtgcctgagtacaagacagtcatctccttccacagcaaggaccagctgaacatcaccctgagcaaatgtggcctggtgatgctgaacaacctggtgaaggccttcacagaagctgccaccggcagcagcgctgactttgtgaaggacctggcccccttcatgatcctgaacagcctgggcctgaccatctctgtgagccccagcgacagcttctctgtgctgaacatccccatggccaagagctatgtgctgaagaatggagagagcctgtccatggactacatccgcaccaaggacaatgaccacttcaatgccatgaccagcctgagcagcaagctgttcttcatcctgctgacccctgtgaaccacagcacagctgacaagatccccctgaccaaggtgggcagaagactctacacagtgcgccaccgggagagcggcgtggagaggagcatcgtgtgccagattgacacagtggagggcagcaagaaggtgaccatccgcagccctgtgcagatccggaaccacttctctgtgcccctgtctgtgtatgaaggagacaccctgctgggcacagccagcccagaaaatgagttcaacatccccctgggcagctaccgctccttcatcttcctgaagccagaagatgagaactaccagatgtgtgagggcatcgactttgaggagatcatcaagaatgatggagccctgctgaagaagaagtgccgcagcaagaaccccagcaaggagagcttcctgatcaacatcgtgcctgagaaggacaacctgaccagcctgtctgtgtacagtgaagatggctgggacctgccctacatcatgcacctgtggccacccatcctgctgaggaacctgctgccctacaagatcgcctactacatcgagggcattgaaaattctgtgttcaccctgtctgagggccacagcgcccagatctgcacagcccagctgggcaaggcccggctgcacctgaagctgctggactacctgaaccacgactggaagtctgagtaccacatcaagcccaaccagcaggacatcagctttgtgtccttcacctgtgtgacagagatggagaagacagacctggacattgctgtgcacatgacctacaacacaggccagacagtggtggccttccacagcccctactggatggtgaacaagacaggccgcatgctgcagtacaaggcagatggcatccacaggaagcacccccccaactacaagaagcctgtgctcttctccttccagcccaaccacttcttcaacaacaacaaggtgcagctgatggtgacagacagcgagctgagcaaccagttcagcattgacacagtgggcagccacggggctgtgaagtgcaagggcctgaagatggactaccaggtgggcgtgaccatcgacctgagcagcttcaacatcacccgcatcgtgaccttcacccccttctacatgatcaagaacaagagcaagtaccacatctctgtggccgaggagggcaatgacaagtggctgagcctggacctggagcagtgcatccccttctggccagaatatgccagcagcaagctgctgatccaggtggagaggagtgaagatcctcccaagaggatctacttcaacaagcaggagaactgcatcctgctgcggctggacaatgagctgggcggcatcatcgccgaggtgaacctggccgagcacagcaccgtcatcaccttcctggactaccatgatggagctgccaccttcctgctgatcaaccacaccaagaatgagctggtgcagtacaaccagagcagcctgtctgaaattgaggacagcctgcccccaggcaaggctgtgttctacacctgggccgaccctgtgggcagccggcggctgaagtggcgctgcaggaagagccacggggaggtgacccagaaggatgacatgatgatgcccatcgacctgggggagaagaccatctacctggtgtccttctttgagggcctgcagaggatcatcctcttcacagaggaccccagggtcttcaaggtgacctatgagagcgagaaggccgagctggccgagcaggagattgctgtggccctgcaggatgtgggcatcagcctggtgaacaactacaccaagcaggaggtggcctacatcggcatcaccagcagtgatgtggtgtgggagaccaagcccaagaagaaggcccgctggaagcccatgtctgtgaagcacacagagaagctggagcgggagttcaaggagtacacagagagcagccccagcgaggacaaggtgatccagctggacaccaacgtgcctgtgcggctgacccccaccggccacaacatgaagatcctgcagccccacgtgattgccctgcggaggaactacctgcctgccctgaaggtggagtacaacaccagcgcccaccagagcagcttccgcatccagatctaccgcatccagatccagaaccagatccatggagctgtgttcccctttgtgttctaccctgtgaagccacccaagtctgtgaccatggacagcgcccccaagcccttcacagatgtgtccatcgtgatgaggtctgctggccacagccagatcagccgcatcaagtacttcaaggtgctgatccaggagatggacctgcggctggacctgggcttcatctatgccctgacagacctgatgacagaggccgaggtgacagagaacacagaggtggagctgttccacaaggacatcgaggccttcaaggaggagtacaagacagccagcctggtggaccagagccaggtgtccctgtatgagtacttccacatcagccccatcaagctgcacctgtctgtgtccctgagcagcggccgggaggaggccaaggacagcaagcagaatggaggcctcatccctgtgcacagcctgaacctgctgctgaagagcattggagccaccctgacagatgtgcaggatgtggtgttcaagctggccttctttgagctgaactaccagttccacaccaccagtgacctgcagagcgaggtgatccgccactacagcaagcaggccatcaagcagatgtatgtgctgatcctgggcctggatgtgctgggcaaccccttcggcctcatccgggagttcagcgagggcgtggaggccttcttctatgagccctaccagggcgccatccagggccctgaggagtttgtggagggcatggccctgggcctgaaggccctggtgggcggcgctgtgggcggcctggccggggccgccagcaagatcactggagccatggccaagggcgtggccgccatgaccatggatgaggactaccagcagaagagaagagaggccatgaacaagcagcctgctggcttccgggagggcatcacccggggcggcaagggcctggtgtctggctttgtgtctggcatcaccggcatcgtgaccaagcccatcaagggggcccagaagggcggggccgccggcttcttcaagggcgtgggcaagggcctggtgggcgctgtggcccggcccaccggcggcatcatcgacatggccagcagcaccttccagggcatcaagagggccacagagaccagcgaggtggagagcctgcggcccccacgcttcttcaatgaagatggagtcatccggccctaccgcctgagagatggcactggaaaccagatgctgcaggccagcaagagcctcatctag

SEQ ID NO: 26912 - DNA, 9210 bp, Artificial Sequence
  derived and/or modified sequence
atggtgttcgagagcgtggtggtggacgtgctgaaccggttcctgggagactatgtcgtcgacctggacaccagccagttgtccctgggcatctggaagggggcagtagctctgaaaaacctgcaaatcaaggagaacgccctgagccaactggatgtccccttcaaggttaaggtcggccatatcgggaacctcaagctcatcattccatggaagaatttgtatacccagcccgtcgaagccgtgctcgaggagatctatcttctgattgtcccttcaagtaggatcaaatatgatccgcttaaagaggagaagcagctcatggaggcgaagcaacaggagttgaaacgcatcgaggaggctaagcagaaagtggtcgatcaagagcagcacctgcctgaaaaacaggacacttttgcagagaaattggtcacccagatcatcaagaatctccaggtgaagatctcttctatccacataagatacgaggatgacattacaaacagggacaaaccactgagctttggcatttctctccaaaatcttagtatgcagaccacggaccagtactgggtcccatgccttcatgacgagacagaaaagctggtacgcaaacttattcgacttgacaatctctttgcttactggaacgtcaaaagccagatgttctatctctctgattatgacaattcactagacgaccttaaaaacggaattgtgaacgagaacatcgtgcccgagggctacgacttcgttttcaggccaatctcagccaatgcaaagcttgtgatgaaccgacggtccgattttgatttctcagctccaaagataaatctagaaattgagcttcacaacatcgcaattgaatttaataagccccaatacttttccattatggaactactcgaaagcgttgacatgatggctcagaacctcccttatagaaagtttaagccagacgtgcctcttcaccaccatgctagagagtggtgggcgtatgccatccatggggttctggaggtgaacgtatgccccaggctgtggatgtggtcttggaaacacatcaggaagcatcgacagaaagtgaaacaatataaggagctgtacaagaaaaagctgacgtccaagaagcctcccggggagctgctcgtctcactggaagaactcgagaagactctggacgtatttaatatcactattgccaggcagaccgcagaggtcgaagtgaagaaagccgggtacaaaatatataaagagggtgtgaaagaccccgaagataacaagggctggttctcatggttgtggagctggagcgaacagaatactaatgaacagcaaccagacgtgcagcccgagaccttagaggagatgctgacccccgaagagaaggctctcctgtacgaggccatcggttatagtgagacagccgttgaccccacactattaaagacatttgaagccctgaaatttttcgtgcacctgaaatcgatgagtattgtcctccgggagaaccatcagaagcctgagctcgttgatatcgtgattgaggaattctccactcttatagtacagaggccaggagcccaggctattaagtttgagaccaaaattgattcattccatattacgggcctgccagacaatagtgaaaagccccgactcctgtcttcactggatgatgcaatgagcctttttcaaattactttcgaaatcaatcctctggacgagacagtgtctcagcggtgtattatagaggcagagcctctcgagattatctacgacgcccgcactgtcaacagcatcgtagaatttttccggccacctaaggaggttcacctggcacagctgactgcggccactcttaccaaactcgaagagttcaggtcaaaaacggccaccggcctgctgtatattatagagacccagaaagttcttgaccttaagataaacctcaaagcttcctatatcatagtgccgcaggacggcattttttcccccacatctaatctccttctgctggatctgggccatctaaaagtaacgagtaagtcccgttccgagctccctgatgtgaagcaaggagaagctaatcttaaagaaatcatggacagggcttacgactcatttgacattcaactgaccagtgttcagctcctgtacagccgcgtcggggataactggcgggaagcccgcaagctgtcggtaagcacacaacatatactggtgcccatgcacttcaatctggaactgagtaaggctatggttttcatggatgtgcgcatgcccaaattcaaaatatacggaaaacttccactgattagtctcagaatcagtgataaaaaacttcaagggattatggagctcatagagagtatccccaaacctgaacccgtgactgaggtgtccgcgcccgtcaagtctttccagatccaaacctcaacaagtctgggcacgtctcagatctcgcagaagatcatccctttgttggaactgccatctgtttctgaagacgacagcgaggaggaattcttcgacgcaccgtgttctccgctcgaagagcctctccagtttcctaccggtgttaaatcaataaggacacgaaaactccagaagcaggattgctcagttaatatgacgactttcaaaatccggtttgaagttccaaaagtgctcatcgaattctatcaccttgtgggagactgcgagcttagcgtcgttgagatactggtgcttggcctaggcgctgagattgagatacggacatatgaccttaaggcaaatgcattccttaaagagttttgcctgaaatgccccgagtacctagacgaaaataaaaagccggtgtatctggtcactacccttgacaacacaatggaagatctgctgactctggagtacgtgaaggccgagaaaaacgtgcccgatctcaaatccacctacaataatgtgctgcagctcatcaaggttaatttctcctctctcgacattcacctacacaccgaagcgctgctgaacaccataaactatcttcacaacattctccctcaaagcgaagagaaatctgctccagtatctacaacggagactgaggacaagggagacgtcatcaagaagctggctttaaagctgtctactaacgaggatattataacgctccagatcctggccgagctcagttgtctgcaaatcttcattcaggaccagaaatgcaacatctcagagatcaaaattgaggggcttgacagtgagatgattatgcgacccagcgaaacggagatcaatgcaaaattgaggaatattattgttctcgactctgatataactgctatctacaagaaagccgtctacatcaccgggaaggaagtgttctcattcaagatggtgtcatacatggatgccacagctggctccgcctacacggacatgaacgtagtggacattcaggtcaacctcattgtgggctgcattgaggtggtgttcgtgactaagtttctttacagcattttggcctttatcgacaatttccaggctgccaagcaggccctggctgaggcgaccgttcaggctgctggcatggcagctaccggagtcaaagaattagcccagaggtcttcaagaatggcccttgatattaatatcaaagctccagtggttgtgatccctcagtcgcccgtgtctgagaacgtttttgtcgcagacttcggcctcatcacgatgaccaatacctttcatatgattacagagtcccagtcatctccacctccggttatcgatctgattaccattaagttgagtgaaatgagactatatagatcaaggttcatcaacgacgcatatcaggaagtgttggacctccttctcccactgaatctggaagtagtcgtggagagaaacttgtgctgggaatggtaccaggaggttccctgctttaatgtcaacgcccagctgaaacctatggagtttatcctttcgcaagaggatatcactactatcttcaaaacgctgcatggcaacatttggtacgagaaggatgggtccgcctcaccagccgtgacgaaggatcagtactccgctacgtctggtgtcaccaccaacgcttcccatcactccgggggtgccacagtggttacggccgccgtggttgaggttcacagccgcgcactgctggtaaaaacaactctgaatatttcatttaagactgacgatcttacaatggtcctgtactcccccggacctaaacaggccagcttcaccgatgtgagggatccctcgctaaagctggcagagttcaagctggaaaatattattagtacactgaaaatgtacactgatggcagtactttttcttccttcagcctgaaaaactgcatcctggatgacaaaagaccccacgtcaaaaaggctaccccaaggatgatcggccttacggtaggtttcgacaagaaagacatgatggacattaaataccgcaaggttcgcgatggttgcgtcaccgatgccgtctttcaagagatgtacatctgtgcttctgttgaattcctccagactgtcgctaacgtcttcctcgaagcttacacaactggcactgctgtggagacaagcgtgcagacctggacagccaaagaagaagtccctactcaggaaagcgtcaagtgggaaatcaatgtcataattaagaatccagagattgttttcgtagcagacatgacgaaaaatgatgcccccgctctggtgatcaccacccaatgtgaaatttgttacaaagggaacctcgagaacagcacaatgactgccgctattaaggacctccaggttcgtgcctgtccattccttcccgttaagcggaagggtaagatcactacagttctgcagccttgtgacttattttatcagactacacagaaaggcacagacccccaagtaattgacatgagtgtcaagtcactcaccctgaaggtgtcacctgttattatcaacacaatgatcactattacgtcggcgctgtatactaccaaggaaactatccctgaggaaaccgcctcttctaccgcccacctgtgggaaaagaaagatactaagactctaaagatgtggtttctggaggagtccaacgagacggagaagatcgcgcccactaccgaattggtccctaagggagagatgattaaaatgaacattgacagtatcttcattgttttggaggcaggaattggtcaccgtactgtgcctatgttgcttgccaagagtaggtttagtggcgaaggcaaaaattggtcaagcctgataaacctgcattgtcagctggaacttgaagtccattactacaacgaaatgttcggggtttgggaacccctcctcgagccacttgaaatagaccaaaccgaagactttcgtccgtggaacttgggcatcaaaatgaagaagaaagcaaagatggctatcgttgaatccgatcctgaagaggaaaattataaggtccctgagtataagactgtgatctcttttcacagcaaggaccaacttaacatcaccctctccaaatgtgggttagtaatgctcaacaatctggtgaaagctttcacagaggcggcaactggctccagcgctgacttcgtgaaagatctggctcctttcatgatcctgaattcccttggacttactatttccgtttcaccttctgactccttctcggtgctgaacataccaatggcaaagagctatgtcttaaagaacggcgagtcactttccatggactacattcgcactaaggacaacgaccatttcaacgccatgacatcactgagcagcaaactgttcttcattctactgacacccgtgaaccacagtaccgccgacaagatacccttaaccaaggttggccgcagactgtatacagtgcggcatagggagtccggagtggagaggagtattgtctgtcagattgataccgtagagggaagtaaaaaagtcaccatccggagccctgtacagattaggaatcatttcagtgtgcccctcagcgtttacgaaggcgatacactgcttggcactgcatctcctgagaatgagttcaatatccctcttggatcctaccggtccttcatattcctcaagccggaggacgaaaactatcaaatgtgcgagggtatcgactttgaagaaattatcaaaaatgatggggcgctgctgaaaaaaaaatgccgaagcaagaatccatcaaaggagtcgtttttgatcaacattgtgcccgaaaaagacaatctgacatcgttaagtgtctacagcgaggacggatgggatctcccatacattatgcacctctggcccccgatcctactgagaaatcttctgccttacaagattgcctactacatcgagggtatagaaaactctgtctttactcttagtgagggtcacagcgctcaaatctgtacagcccagctcggcaaggcgcgactccatttaaagctcctcgactatcttaaccacgattggaaatccgaataccacatcaaaccaaatcaacaggacatttccttcgtatccttcacttgtgtcaccgagatggagaaaactgacttggatatcgcggttcacatgacctataacactggccagaccgtggttgcattccactccccgtattggatggtgaacaagacaggccgaatgctgcagtataaggctgatgggatccaccggaaacacccaccaaactataagaagccggttttgttttcattccaacctaatcatttcttcaacaataataaggtgcagttgatggttaccgattctgagctgagtaatcagtttagcatcgacactgtggggagtcacggcgctgtaaaatgcaaggggctcaagatggactaccaggtaggcgtcacgatagatttgagttcctttaatataaccaggattgtgacatttacgccattttacatgatcaaaaacaagagtaaataccacatctctgtggccgaagagggtaacgataagtggctcagtctggacttggagcagtgcattcccttttggcccgaatacgcttccagtaagctcctcatccaagtcgaaagatctgaggacccccccaagaggatttacttcaacaagcaggagaattgcatattgttacggctcgataatgagctcggaggaatcatagctgaggtgaacctggccgaacattccaccgtgataactttcctcgactaccatgacggcgccgccactttccttctgatcaatcacacaaaaaatgaactggttcaatacaaccagtcgagtctgtctgagatcgaggactcactacctcccggtaaggccgtattctacacttgggcggatccagtgggtagtcgcaggctgaaatggcgatgtaggaagagccacggcgaggttacacagaaggacgacatgatgatgcccattgatttgggtgagaaaaccatctatcttgtatcattctttgagggcttgcagcggattatactgttcacagaggatccacgtgtattcaaggttacatatgaaagtgaaaaggctgaactggcagagcaggagatcgctgtcgcccttcaagacgtcggcatctcccttgtgaacaactataccaaacaggaggtggcttacattggcatcacaagcagtgatgtagtttgggagaccaaacccaaaaagaaggcccgatggaaacccatgtcagtgaagcacaccgagaagctcgaacgggaatttaaggagtacactgagtccagcccttctgaagataaggtaatccagctggatactaatgtcccagtgcgcttgactccaaccggccacaatatgaagatcctacagcctcacgtgatcgcactgcgtaggaattaccttccagctctcaaagtggaatataacacatctgctcaccagtcttcattccggatacaaatctaccgcattcaaatacagaatcagattcatggtgctgtgtttccttttgttttttatccggtgaagcctcctaagtcggttacgatggattcagccccgaagccttttacagacgtgagtattgtgatgcggagcgcgggccacagccagatctctcgcattaagtacttcaaagtgcttatccaagagatggatctgagactcgatctggggtttatttacgctctgaccgatctcatgaccgaagcagaagttaccgagaacaccgaggtggagctgttccataaggacattgaagcatttaaagaagagtataagaccgcgtcactggtcgatcagtctcaggtctctctgtacgaatacttccatattagcccaattaagttgcatctcagcgttagcctctctagcggacgagaagaagctaaagattccaaacaaaatgggggcctcatccccgttcactctttaaacttgctgctcaagagcataggtgccactctcactgacgtgcaagacgtagtatttaagctcgctttcttcgaactgaactatcagttccatactacatccgaccttcagtcagaagtaatacgccactactccaagcaggccatcaagcaaatgtacgttttgattctgggcctggacgtgttagggaacccttttggcctcattcgcgagttttccgaaggagtagaggcatttttctacgagccataccagggcgcaatacaaggccccgaagagttcgtggaggggatggccttaggcctcaaagctttagtgggaggcgccgtgggcggcctcgccggggctgctagtaagattactggggccatggcaaaaggcgtggcagcaatgacaatggacgaggactaccaacagaaaagaagagaggctatgaataaacaaccggccggattccgagaggggattacacgtgggggaaagggacttgtctccggtttcgtcagcggaatcaccggcatcgtcaccaagccgatcaagggtgcccagaaggggggagccgcaggcttctttaagggggtcggaaagggcctggttggtgctgtcgcccggcctaccgggggcataattgacatggccagtagcacgtttcagggaattaagcgagcaacggagacatctgaagtcgagagccttcgtcctccacgattcttcaacgaagacggcgtgattcgtccttaccgacttagagacgggaccggtaaccagatgctgcaggcatctaaaagtctcatttag

SEQ ID NO: 26913 - DNA, 9209 bp, Artificial Sequence
  derived and/or modified sequence
atggtttttgagtctgtggtggttgatgtgttgaacaggttcctgggagactacgtggtggacctggacacgagtcagctttccttgggcatatggaagggcgctgttgctctgaagaacctgcagatcaaggagaatgctctgtctcagcttgatgtgccattcaaggtgaaggtgggccacatcggcaacctgaagctgattatcccttggaaaaatctgtacacccagcccgttgaagctgtcctcgaggagatatatctgctaatcgtgccatcaagccgcatcaagtatgatcctctcaaagaggagaagcagttgatggaagccaaacagcaggagctgaaaagaatagaggaggctaagcagaaggtagtggatcaggagcagcatctgcccgaaaagcaagatactttcgccgagaagctggtgacgcaaatcatcaagaacctacaggttaaaatatcctcaattcacatacgctacgaggacgacattaccaatcgagacaaaccgttgagctttggtattagcctgcagaaccttagcatgcagactaccgatcagtactgggtcccctgccttcatgacgagactgaaaagctcgtcagaaaactcataaggctagataacttgttcgcatactggaacgtgaagtcacagatgttctacctctctgattacgataattccctcgacgatctcaaaaatggcatcgtgaacgagaatatcgtccccgagggttatgactttgtgtttaggcctatctcggccaatgctaagctggtcatgaaccgtcgtagcgacttcgatttctcggcccctaaaatcaatttagagattgaactgcataacattgccatcgaattcaataagcctcagtacttttccattatggaattgctggagagcgttgacatgatggcccagaatctcccctacagaaagttcaaaccggatgtgcctttacatcaccatgccagagagtggtgggcttacgcgattcatggggtcttggaggtcaatgtgtgcccacggctctggatgtggagctggaagcatattaggaagcatcggcagaaggtgaaacagtataaggaactatataagaagaagctaaccagtaaaaaaccacccggtgaattattggtttcactggaagaattagagaaaacccttgacgtatttaacattaccatcgccaggcagactgccgaggtcgaggtgaagaaagcaggttataaaatctacaaagaaggggtcaaggatcccgaggacaacaaggggtggttctcttggctgtggagctggtcagagcaaaatactaacgagcagcagccggacgtgcagcccgaaactctcgaggaaatgctaacaccagaggaaaaggcgctactgtatgaggccattgggtattcagagacagccgtggaccctacactgctcaaaaccttcgaagcactaaaattctttgtgcacctcaagagtatgtcgatcgtgctgagagaaaatcatcagaaacccgaattagtggacatcgtaatcgaagagttcagcacactgatcgtgcagaggccaggcgcacaagcaattaagttcgagacgaagattgattcctttcatatcactggcctgccagataactccgagaagccccgactgttgagttccctggacgacgccatgagtctgttccagatcacatttgaaatcaatcccctggacgagacagtaagccagcgctgtattatcgaagccgagccattagagattatctacgacgcgcgaacagttaactcgatcgtagaattctttagaccaccaaaagaagtgcatttagcacaactaaccgcggctaccttgacaaagctcgaagagttccgcagcaagactgctacaggcctactgtacatcatcgagactcaaaaagtactcgatctgaaaatcaacttgaaagcctcatatatcattgtgcctcaagatggcatcttctcgcccacgagcaatctgttgctgctggacttgggccacctcaaggttacttctaaaagcaggagcgaactgcccgatgtcaagcaaggggaggcgaatttgaaggaaatcatggacagggcatacgattccttcgacatccagctgacctctgtacagttgttatatagtagggtcggggataactggagggaggctcgcaaactctccgtcagtacacagcatatcctggtccccatgcactttaacttggagctgtccaaagccatggtgtttatggacgtgcgcatgcctaagtttaaaatctacggaaaattgcctctgatcagtttacgcatctctgacaagaaactccaaggtataatggagctgatcgagtccattccgaagccggagcccgtcactgaggtctccgcccctgtcaagagcttccaaatccagacctccactagcttgggaacatcgcaaatctcacagaagatcatccccctgctggaactgccatccgtgtcagaagacgactctgaagaagaatttttcgacgccccatgctcaccattagaggagccgcttcagtttcccaccggcgtgaagtctatcagaacaagaaaactgcagaagcaagactgctcagtgaacatgactacttttaagattaggttcgaggtccccaaagttcttatcgaattctatcatctggtgggtgattgtgagctcagtgtggtcgagattctcgtgctgggcctgggcgcagagatagaaattcggacctacgatctcaaggctaatgccttcctgaaggagttctgtctgaagtgcccggagtacctggacgagaacaagaaacccgtctaccttgtcaccacattagataacacaatggaggacctgcttacacttgagtatgtaaaggccgaaaaaaatgtacccgatctcaagtcgacatacaataacgtactgcagttgatcaaagttaacttcagttccctggacatacacctccataccgaagcgctgctgaatactatcaattacttgcacaacattttaccccagtccgaagaaaagtcagccccagtgagtactaccgagacagaggacaaaggggatgtgataaagaagctggccttaaagctgtcgacaaatgaggatatcatcacactgcagatcctcgccgaactctcgtgtttacagatttttatccaggatcagaaatgcaatatctcggaaatcaagatagagggcttagattcggagatgatcatgaggcctagcgagaccgagatcaacgcgaagctgaggaacattattgttctggatagcgacattacggccatctataaaaaagcagtgtacatcaccgggaaggaggtctttagctttaaaatggtttcttatatggacgcaaccgctgggagcgcatacaccgacatgaacgtcgtggacatccaagtcaacctgattgtggggtgcattgaggtagttttcgtgaccaagttcctctattccatcctggcctttattgataacttccaagctgcaaagcaagccctcgcagaagccaccgttcaggctgctggtatggctgctaccggagtaaaagaactggcacagaggtcctctaggatggccctggatatcaacataaaggcaccagtcgtcgtaatcccacaatctccggtgtcagagaacgtgttcgtggccgattttggcttaataactatgacgaatacctttcatatgatcacggagtctcagtcaagcccacctccagtgattgatctcatcacaataaagctttctgagatgcgtctttatcgaagccgcttcattaacgacgcgtaccaggaggtcttagacctgctcctgcccctgaaccttgaggtggtggtggagcgaaacctgtgctgggaatggtaccaagaggtgccttgcttcaatgttaatgcgcaactcaaacccatggaatttatcctgtctcaagaggatatcactaccatattcaagacactgcatggaaacatttggtatgagaaggatggaagcgccagccccgctgtgactaaggaccagtacagcgccacttccggcgtaaccacgaatgctagtcatcacagcggtggtgccacagtagtgaccgcagccgtggttgaggttcattctagggcactgcttgttaagactacactgaatatttcctttaagaccgacgacctcacaatggtgctttactctccagggcctaaacaggcctcctttaccgatgtgagagacccctctctgaagttagctgaatttaaactggaaaacatcatcagcacattgaaaatgtacacagacggctccacattttcctcttttagcctcaagaattgcatcctggatgataagaggccacacgttaaaaaagccacccccagaatgatcgggctgaccgtgggttttgacaaaaaagatatgatggacatcaaataccgcaaagttcgagatgggtgcgtcaccgatgcagtctttcaggaaatgtatatttgcgcgagcgtggagtttcttcagaccgtcgcgaacgtgttcctggaggcttatacaacaggaactgcagtggaaacaagcgtgcagacctggacagcaaaagaggaggttcctactcaagagtccgtgaaatgggaaatcaatgtaattattaagaaccccgagatcgtttttgtcgccgatatgactaagaatgacgctcccgctctggtgattactacacagtgcgagatctgctacaaggggaaccttgaaaacagcacaatgactgccgcaattaaggacctgcaggtgcgtgcctgtccattcctgccagtaaagaggaagggcaagataactactgttttgcagccttgtgacctgttttatcagacaacccagaaggggaccgatccgcaggtgattgatatgagtgtgaagtcactgacactgaaggtctcaccagtcatcattaacacaatgataaccataacctcagccctttacacaacaaaagaaacaatccctgaggagacagcgagctcaaccgcccacctctgggagaagaaagacacgaaaaccctgaagatgtggttcctcgaggagagcaacgaaacagagaaaatagccccaactaccgagctcgtaccgaaaggagagatgatcaagatgaacattgattccatcttcatcgttctggaagccggaattggtcatcggaccgtgccgatgttactcgcgaagagcaggttttcaggtgaaggcaagaactggagctcgctcatcaatctccactgtcagctggaactggaagtccactattataacgagatgtttggtgtgtgggagcctctcctggaacctcttgaaatagatcaaaccgaggattttaggccctggaatctaggtattaaaatgaagaaaaaagctaagatggccatcgtagaaagcgacccagaagaggagaactataaggtgcctgaatacaagaccgtaatttccttccattcaaaggaccaactgaatatcacactcagtaagtgtgggctggtaatgctgaataatcttgttaaggcgttcaccgaggccgctactgggagctccgcagatttcgttaaggacctcgcaccttttatgattcttaactctttgggactcaccatctctgtcagtccctcggattcattctcggtgctcaacatcccaatggccaagtcttatgtattaaaaaacggcgagagcctgagtatggactatataagaactaaagacaacgaccacttcaacgcgatgacctcactcagttcaaaactttttttcatactcctcactcccgttaatcactcaactgctgataaaatccccctgacgaaggttgggagacgcctctacacagtccggcaccgcgaatcaggtgtggaacggagcatcgtgtgtcagattgatacagtggagggcagtaagaaggtgaccatccgctccccggtgcagataagaaaccacttttcagtgcccctttcagtgtacgagggggacacactacttggcacagcctctccagagaacgagtttaacatcccgttagggtcctaccgctcatttattttccttaaacctgaagatgaaaactatcagatgtgcgaaggaatcgacttcgaggagatcatcaagaatgacggcgcactgttgaagaagaaatgtcgctctaagaacccctctaaggaaagcttcttgatcaatattgtgccagagaaggacaacctgaccagcctgtcagtatattcagaagacgggtgggacttaccatacattatgcatctgtggcccccaatcttgctacgcaacctactcccctacaagatcgcatactatatcgagggaattgagaatagtgtttttaccttatcagagggacactccgcccagatatgtacggcacagttgggaaaggccagactgcacctcaagcttctggattatctgaaccatgactggaaatcagaatatcacattaagcccaatcagcaagatattagcttcgtgagttttacatgcgtgacagagatggagaagaccgacctcgatattgccgtgcacatgacatacaataccggccaaaccgtagtggcattccattccccatattggatggtgaataaaaccggcaggatgctgcagtataaggccgacggcattcaccgcaaacacccaccaaactacaaaaaaccagttctgtttagttttcaaccaaatcatttctttaataataacaaggtacagctaatggtcacagattcagaactttccaatcagttcagcatcgacaccgtggggtcacacggggcagtcaagtgcaaaggattgaaaatggactaccaagtgggtgtgacaattgacctcagctcattcaacatcacgcgcatcgttacttttactccattctacatgatcaagaataagtccaagtatcatatctccgtcgccgaggagggtaacgataagtggctgagtctagacctggaacaatgtatccccttttggcctgagtatgcctcaagtaagctactaattcaggttgaaaggtctgaggatccccctaaacggatttattttaacaaacaagagaactgtattttgctccgcctggataatgagctaggaggcataattgctgaggtgaacttggcagagcactctacggtgattactttcctggattatcatgatggagcagccacgttcttactgatcaaccacacaaagaacgaactcgtacaatacaaccaatcatctctgtctgagatcgaagattcactcccccctggtaaggcggtgttctacacatgggccgaccccgttggctctagaaggctgaagtggaggtgtagaaagagccacggcgaagtgactcagaaagatgacatgatgatgcccattgatctcggcgagaagactatctatctggtttctttttttgaagggctccagaggattatcctgtttacagaagatcctagagtgttcaaggttacttacgaaagcgagaaggctgagttggctgagcaagaaattgctgtagccctccaagatgtcgggatttccctcgtgaataattatactaaacaagaggttgcctacattgggatcacttcatccgatgttgtgtgggaaacaaaacccaaaaagaaggcaaggtggaagcctatgagcgtcaagcacacggagaagttggagagggagttcaaggaatacacagaatccagcccatcagaagacaaggtgatacagctggataccaacgtgccggtgaggctgacgcctactgggcacaacatgaaaatactccagccacacgtgatagcactgaggcggaactacctcccagccctcaaagtcgagtacaatacctcagcacatcagtccagctttcggatccagatctatcggattcagattcaaaaccaaattcatggagccgttttccccttcgtgttttacccagtgaagcctcctaagagcgtgacaatggactcggcaccaaaaccatttaccgacgtatctatagtgatgcggagtgccggacatagccaaataagccgcatcaagtactttaaggtgctcatacaggagatggatctgaggctggaccttggattcatctacgcccttacagatttgatgacagaagcagaagtgactgaaaacacagaggtagagctgtttcataaggacattgaagcttttaaggaggagtacaagactgcgtccttggtggaccagagccaggtgtctctctacgagtatttccacatcagtcccattaagttgcacctatccgtgtctcttagcagtggcagagaagaggctaaggactccaaacagaacggtggactcattccagttcatagcttaaatttgcttctgaagtcaatcggagctaccctcaccgatgttcaggatgtcgtcttcaaactggcattctttgaattgaattatcagttccacaccacgtccgatctccaatctgaagtgattcggcactatagtaagcaggcaattaagcagatgtatgtcctcattttgggtctggatgtactggggaatccttttgggctgatcagggaattctccgagggggttgaggcattcttttacgagccataccagggggctatccagggtccagaagaattcgtggagggcatggcactgggcttgaaggctcttgttggaggcgcagtcgggggactggcaggcgcagctagtaagattaccggggctatggccaagggagttgctgcgatgaccatggatgaagactatcagcagaagcgcagagaagccatgaataagcagcctgccggatttagggaggggatcacgcgaggtgggaagggcctggtatctggcttcgtctctggaatcaccggcattgtcacgaagccaataaagggtgcccagaagggaggagccgcaggttttttcaagggtgtgggcaaaggtctggttggggctgttgctagacctacaggcggaatcattgacatggcctcctcaacatttcaggggatcaagagggccaccgagacctcagaggtcgagagcctccgcccacctagattcttcaacgaggatggagttattagaccatacaggctcagagacggaactggaaaccaaatgctgcaggccagcaaatccttgatata

SEQ ID NO: 26914 - DNA, 10269 bp, Artificial Sequence
  derived and/or modified sequence
aggcgatggggaggaggcggggccgacaggaaagaggagccgggctcggcgcgaaaagggcaccctccagagccgcggccgcgcagccgcctttcctccctctcagggctgcgcgcccaggtctgcgccgcgctccgcctccagccgcgcgcagacttgcgcacgcgtcgtgagagcgaccgcctccgtctctcgctgggctcgctagggctgcgcgttgggccagcgggggcgccgcagctgaagccgccccggagccggtgaaccgaattacctcgagggaggggcgtggggaaggcggcgggaggaggagcgcacgggccggctgccgtgcccaccacggctgaggaacatggttttcgagtcggtggtcgtggacgtgttgaaccggttcttgggggactatgtggtggacttggacacgtcccagctctctctgggcatctggaaaggagctgtggccctcaagaatcttcaaattaaagaaaatgccctgagtcaactggatgtaccatttaaagttaaagttggtcacataggtaatcttaaacttataattccatggaaaaacctttatactcaacctgttgaagccgtattggaagaaatttatttacttatagtgccttcttctagaataaaatatgatcctttaaaagaagagaaacaactcatggaagcaaagcaacaggaactgaaaagaatagaagaagcaaaacaaaaagtagttgatcaagaacaacatctgccggaaaaacaggacacttttgcagaaaaattagttacacagatcataaaaaatcttcaggtgaaaatttccagtatccatattcgttatgaagatgatatcacaaatcgggacaaaccgctgtcatttggtatttcccttcaaaatctgagcatgcagacaactgatcaatactgggttccatgtttacatgatgaaactgagaaactggttcgtaagttaatccgattggataacctgtttgcctattggaatgtgaagtctcagatgttttatcttagtgattatgataactccttggacgacttgaagaatggcattgtcaatgaaaatattgttccagaaggttatgattttgtatttcgtcccatatctgctaatgccaaacttgtgatgaatcgccgatctgattttgacttttctgcccccaaaataaacttggaaattgagttacataacatagcaattgaatttaataaaccacagtatttcagtattatggagcttcttgaatcagttgatatgatggcacaaaatctgccatataggaagttcaaacctgatgtgcctcttcaccaccatgccagagaatggtgggcttatgctatacatggcgttcttgaagtaaatgtttgccccaggttatggatgtggtcatggaagcatattagaaaacataggcaaaaagtgaagcaatataaagaactgtataaaaaaaagttaacaagtaagaagccacctggtgaacttctcgtgtctttggaggagttggaaaaaaccttggatgtctttaatataactatagctagacagacggcagaagttgaggtaaagaaagctggatacaaaatttacaaagaaggagtaaaagatccagaggataataaagggtggtttagctggctatggtcttggtcagaacaaaatactaatgaacagcaaccagatgttcaacctgaaactcttgaagaaatgttgacacctgaagaaaaagctttactctatgaagcaattggctatagtgaaacagcagttgatccaactttactaaaaacatttgaagccttgaagttttttgtccacttgaaaagtatgtctattgttctaagagaaaatcatcaaaaacctgagctggtagatattgtaatagaagaatttagcaccttaattgtgcaaagaccaggagcacaagcaataaaatttgaaactaaaatagattcatttcatattactggcttaccagataattcagaaaaaccccgcctcctgtcttcattggatgatgcaatgtcacttttccaaattacatttgagataaatccattagatgaaactgtttctcagaggtgtatcatagaagctgaacctttagaaatcatatatgatgcaaggacagtgaatagtatagtggaattcttcagacctccaaaagaggtacatctagcacagctcactgcagcaactttgacaaaactggaagaatttcgcagtaagacagcaacaggtctactgtatattattgaaacacagaaagttcttgatctcaaaattaatttgaaggcttcatatattattgtcccacaagatggaatttttagtcctacatcaaatctgcttcttttggaccttggtcatctaaaggtgacgagtaaaagtcgttctgaattaccagatgtgaaacaaggtgaggccaatcttaaagagataatggatagagcttatgattcatttgatattcaacttacaagtgtacagctgctttacagtagagttggtgataattggagagaagcacgaaaactcagtgtatctacccagcatattttggtacccatgcacttcaatttggaactgtctaaggccatggttttcatggatgtaaggatgcccaaattcaagatttatggaaagttacctcttatttctttacgaatctcagataaaaaactacaagggattatggaattgattgaaagcattccaaaacctgaaccagtaactgaagtatctgcccctgtcaaatcattccagattcaaacatctacttctttgggaacatcacagatttcacagaaaataattcctctcttggaacttccatctgtttctgaagatgattcagaggaggaattttttgatgcaccatgtagtcccttggaagaacctcttcagtttccaactggagttaaaagtattcgaaccagaaagttacaaaagcaggattgttcagtaaatatgactacatttaaaataagatttgaagtaccaaaggttttgatcgagttttatcaccttgttggagattgtgaactatctgtggtagaaattcttgttttaggattgggtgcagaaattgagattagaacatacgatttgaaagcaaatgcctttttgaaagagttctgcttaaaatgcccagaatacttggatgaaaacaagaaaccagtttatttggttacaaccctggataacacaatggaagacctgttaacgctggaatatgtaaaggctgaaaagaatgtacccgacttgaaaagtacctataacaatgttttacaattgattaaggtaaatttttcctctttggatattcatttacacactgaagcacttctgaatacaataaattatcttcataatatccttccgcaatcagaggaaaaatcagccccagtgtccactacagagactgaagacaaaggagatgtcattaaaaaattagctttaaaactatccacaaatgaagatatcattactttgcagattttagcagaattatcgtgtttacagatctttattcaagatcagaaatgtaacatttctgaaattaagattgaagggcttgattctgagatgattatgaggccttcagaaactgaaataaacgcaaagctaaggaatataattgttttagattctgatataacagctatatacaaaaaggctgtttatatcactggaaaagaagttttcagcttcaaaatggtttcttacatggatgcaactgctggttctgcatacacagatatgaatgtggttgacattcaggttaatttaatagttggttgcattgaagtagtttttgtcacgaaatttctatattctatattggcttttatagataattttcaggcagctaaacaagccttggctgaggcaactgttcaggcagctggaatggctgctactggtgtaaaagaactcgcacaaaggagttccagaatggcactggatattaacatcaaagccccagttgtggtcatcccgcagtctccagtttctgaaaatgtttttgttgctgattttggactaattacaatgacaaatacctttcatatgataacagagagccagagctctcccccacctgttattgatttgataacaataaagctgagtgaaatgcgactatacagatctcgatttattaatgatgcataccaggaagtactggatctactcctgccattaaatcttgaggttgtggttgaacgaaatttatgctgggagtggtaccaggaagttccttgttttaatgtaaatgctcagctgaaaccaatggagttcattcttagtcaagaagatataacaactatttttaaaacattgcatggcaatatatggtatgaaaaagatggtagtgcctcacctgctgtaacaaaagaccaatacagtgccactagtggagttactactaatgcttcacaccattcaggaggagcaactgtggtgacagctgctgtggtagaagtacattcacgtgccttactagttaagacaacactaaacataagcttcaaaactgatgatctcaccatggtgctgtatagtccaggtcctaaacaggcttcctttacagatgttcgtgatccttctctgaaacttgctgaatttaaattggagaatattataagtactttaaaaatgtatacagatggctcaacattttcttccttctcattaaaaaactgtattttagatgataaaagacctcatgtcaagaaagcaactcctcgaatgataggactgacagttggttttgacaaaaaagacatgatggatataaagtacaggaaagtcagagatggttgtgtgactgatgcggtctttcaagaaatgtatatttgtgcaagcgtagaatttctgcagactgttgcaaatgtctttcttgaggcctacaccacaggcactgctgtagaaaccagtgtgcaaacatggactgctaaggaagaagtacctacacaggaatcagtgaagtgggaaattaatgttattattaaaaatcctgaaattgtgtttgtagctgacatgacaaaaaatgatgctcctgctttagtcattacaacacaatgtgaaatttgctataaaggtaaccttgaaaatagtacaatgactgctgccattaaagatctccaagtgagagcctgcccgtttcttccagtcaagagaaaaggcaaaatcactactgttttgcagccctgtgacttgttttatcaaactactcagaaaggtacagatccacaagtgatcgatatgtcagtaaaatccctgacactaaaggtttcaccagttattataaatactatgattaccataacttcagcactgtatacaactaaggaaaccatcccagaagaaacggcttcttctactgcacatttatgggaaaagaaggatacaaagactttaaaaatgtggtttcttgaagaatcaaatgaaactgaaaaaatagctcccacaactgaattggtacccaaaggcgagatgataaaaatgaacattgattctatttttatagttcttgaggctggaattggtcatagaacagtacctatgcttctggcaaagtcacgtttttcaggggaaggcaaaaactggagttccctaataaatctgcactgtcagcttgagctagaagtgcattattataatgaaatgtttggtgtatgggagcctttgcttgaacccttagaaattgatcagactgaggattttagaccatggaatcttggtatcaagatgaaaaagaaagcaaaaatggccattgttgagtcagatcctgaagaagaaaactacaaagtgccagaatataaaactgtcatcagtttccattcaaaagaccaattaaacattacattatccaaatgtggtcttgtaatgttaaacaatttagtcaaggcatttacagaagctgccactggatcttcagctgacttcgtaaaggatctagcaccatttatgattttaaattcccttggacttactatttctgtttcgccaagtgattcttttagtgtactcaacattcctatggcaaaatcatatgtattgaaaaatggagaaagtttaagtatggattatatccgaaccaaggacaatgatcatttcaatgcaatgaccagcctaagcagcaaactcttcttcattcttcttacacctgttaaccattctactgctgataagattcctttaacaaaagtgggacgacgtctgtacactgtaagacacagagagtctggcgttgaaagatctattgtttgtcaaattgatacagtagaaggaagtaagaaggtcacaattcgctccccagtgcagataagaaatcatttttcagtcccactgtctgtttacgaaggggataccttattgggaactgcctcacctgaaaatgaattcaacataccattaggatcttaccgatcattcatttttctgaagccagaagatgagaactatcaaatgtgtgaaggaattgactttgaagagattataaaaaatgatggtgctcttctaaagaagaaatgtagatctaaaaacccttctaaggaatcatttctcattaatattgttccagaaaaagataatttaacatctctatcagtgtattcagaagatggttgggatttaccatacataatgcatttgtggccacctatcctgctccgaaatcttcttccttacaaaattgcttattatatagagggaattgaaaattcggtttttactctaagtgaaggacattcagcccagatttgtactgcacagttgggtaaagccaggctacatttaaaattacttgactatctcaatcacgattggaaaagtgaatatcacataaagcctaatcagcaagacattagttttgtcagttttacttgtgttacagaaatggaaaagactgatttagatattgctgtccatatgacttacaatactggtcagacagttgtggcatttcatagtccttattggatggtcaataaaactggccgcatgttacagtacaaagcagacggaattcatcgaaagcatccacctaattataaaaagccagttctcttttcttttcagccaaatcacttttttaataacaataaggttcaacttatggtaactgatagtgagttgtccaatcagttttcaattgatactgttggtagtcatggagctgttaaatgtaaaggcctgaaaatggactatcaagttggtgtcactatagacctgagcagttttaacattactagaattgtgacatttacccctttttatatgattaaaaacaaaagcaaataccatatatcagtggctgaagaaggaaatgataaatggctctctcttgatttggagcagtgtatccccttttggcctgagtatgcttctagtaaacttcttattcaagtcgaaaggagtgaagatcctcccaaaaggatatattttaacaagcaggaaaattgtattctattgcgtctagataacgagcttggaggtattatagcagaagtgaatttggccgagcattctacagttattacatttttagattatcatgatggagcagctacattcctcttaataaatcacacaaagaatgaacttgttcaatacaatcaaagttctctcagtgaaatagaagattccctccctcctggtaaagccgtgttttatacatgggctgatccggtgggctctagaaggctgaagtggagatgtagaaaaagccatggtgaagtaacacagaaggatgatatgatgatgcctatagatttgggggaaaagacaatatatttagtttcattctttgaaggtttacaacgcattattttattcactgaagatccaagggtatttaaagtaacatatgaaagtgagaaagcagagttagcagagcaagaaattgcagtggcattacaagatgttggaatttctcttgtcaacaattacacgaagcaagaagtagcctatataggcattacaagttctgatgtggtttgggaaacaaagcccaagaagaaggcaagatggaagccaatgagtgtaaagcacactgagaagttagagagagaatttaaggaatatactgaatcttctccttcagaagataaggttattcagttggacactaatgttccggttcgcctaacccctactggtcataacatgaaaattctgcagccgcatgtaatagctctacgaagaaattatcttccagcattaaaagtggaatataacacatctgcacatcaatcatcatttagaattcagatttacagaatacagatccaaaatcagatacatggtgctgtatttccctttgtgttttatcctgttaaacctccaaagtcggtcaccatggattcagcaccaaagccctttacagatgtcagtattgtcatgagatctgcaggacattcccagatatcacgtattaagtatttcaaagtattgattcaagaaatggatctcaggttagatcttgggtttatctatgctttaacagaccttatgacagaagctgaggtgactgaaaatacagaggttgagctttttcataaagatatagaagctttcaaagaagaatataaaacagcctcattagtagatcaatcacaagtcagcctctatgaatattttcatatatctcctatcaagttacatttaagtgtttcactgagttccggcagagaagaagctaaagattcaaaacaaaatggaggactgattccagttcattctttaaatcttttgctgaagagtattggtgccacactgacagatgtacaagatgtagtttttaagcttgcattttttgaactcaactatcagttccatacaacatccgatctacagtctgaagtcataagacactattcaaaacaggccattaagcagatgtatgtactcattcttggacttgatgttttgggaaatccatttggcttaattagagaattttctgaaggtgtagaagcatttttttatgaaccttaccagggagccatccagggtcctgaagagtttgtggaaggaatggcactaggacttaaggcactagttggtggagctgttggtggattggctggtgctgcctccaaaatcaccggtgctatggctaagggggtagcagctatgaccatggatgaagactaccaacagaagagaagagaagccatgaataagcaaccagctggttttagagaaggcatcactcgtggaggaaaaggcttagtttctggatttgttagtggcataacaggaattgttacaaaaccaatcaaaggagctcaaaaaggaggagcagctggtttctttaaaggtgttgggaaaggtttagtaggagcggtagcaaggccaactggaggcatcatagacatggctagcagtacatttcagggaataaaaagagctacagagacttctgaagtggagagtctgcgacctcctcggttcttcaatgaagatggagttatcagaccgtacaggttgagggatgggactggaaatcaaatgttacaggcatcaaaaagtttgatatgaaaagttaatgcatgactttgcaagtgaaagccaacagtagattttagtcttaaaatttacaaactacgtacagctgtttcagtattttgaatacaaagaaaaccttttgtattggtaacttttaataggaattttaatgaatctggtttttttatagggtgttcttagttctgcactggatttgctagatttgttggaagcctttgtaccttatgtatcctcgtcattggtggtacttacttaaccaattaaaccatttctgttgtggggttattaaaccactggtagcttttataccagatatataatccttatatccaattacacatgaagaaggaaaagcaaaactcaggaacactgctattgtgaattactcttggattcttgtgctttgcctttgaaaatgcttaaatggccatgaccctcttcctgctttattctagtgtagtctttataaaacttgtgggatttgataagcagttcacatgcaaaccagtatcttttaataatacaaagtagcatctggaacaatagacagtttgaagttagaatctgcttagacaactttcttacttggtaaattcgactttttaaaacctggattatgctgtaggtaactagtaatcatatataggctataccagtgtcatgttgtttctgtggtttagaggtggaatactaaattaaatcatttgtttgaaaacaaa

SEQ ID NO: 26915 - protein, 894 aa, Artificial Sequence
  derived and/or modified sequence
MESTLSASNMQDPSSSPLEKCLGSANGNGDLDSEEGSSLEETGFNWGEYLEETGASAAPHTSFKHVEISIQSNFQPGMKLEVANKNNPDTYWVATIITTCGQLLLLRYCGYGEDRRADFWCDVVIADLHPVGWCTQNNKVLMPPDAIKEKYTDWTEFLIRDLTGSRTAPANLLEGPLRGKGPIDLITVGSLIELQDSQNPFQYWIVSVIENVGGRLRLRYVGLEDTESYDQWLFYLDYRLRPVGWCQENKYRMDPPSEIYPLKMASEWKCTLEKSLIDAAKFPLPMEVFKDHADLRSHFFTVGMKLETVNMCEPFYISPASVTKVFNNHFFQVTIDDLRPEPSKLSMLCHADSLGILPVQWCLKNGVSLTPPKGYSGQDFDWADYHKQHGAQEAPPFCFRNTSFSRGFTKNMKLEAVNPRNPGELCVASVVSVKGRLMWLHLEGLQTPVPEVIVDVESMDIFPVGWCEANSYPLTAPHKTVSQKKRKIAVVQPEKQLPPTVPVKKIPHDLCLFPHLDTTGTVNGKYCCPQLFINHRCFSGPYLNKGRIAELPQSVGPGKCVLVLKEVLSMIINAAYKPGRVLRELQLVEDPHWNFQEETLKAKYRGKTYRAVVKIVRTSDQVANFCRRVCAKLECCPNLFSPVLISENCPENCSIHTKTKYTYYYGKRKKISKPPIGESNPDSGHPKPARRRKRRKSIFVQKKRRSSAVDFTAGSGEESEEEDADAMDDDTASEETGSELRDDQTDTSSAEVPSARPRRAVTLRSGSEPVRRPPPERTRRGRGAPAASSAEEGEKCPPTKPEGTEDTKQEEEERLVLESNPLEWTVTDVVRFIKLTDCAPLAKIFQEQDIDGQALLLLTLPTVQECMELKLGPAIKLCHQIERVKVAFYAQYAN

SEQ ID NO: 26916 - protein, 160 aa, Artificial Sequence
  derived and/or modified sequence
MESTLSASNMQDPSSSPLEKCLGSANGNGDLDSEEGSSLEETGFNWGEYLEETGASAAPHTSFKHVEISIQSNFQPGMKLEVANKNNPDTYWVATIITTCGQLLLLRYCGYGEDRRADFWCDVVIADLHPVGWCTQNNKVLMPPDVESDVKPSASVQHIS

SEQ ID NO: 26917 - protein, 186 aa, Artificial Sequence
  derived and/or modified sequence
MESTLSASNMQDPSSSPLEKCLGSANGNGDLDSEEGSSLEETGFNWGEYLEETGASAAPHTSFKHVEISIQSNFQPGMKLEVANKNNPDTYWVATIITTCGQLLLLRYCGYGEDRRADFWCDVVIADLHPVGWCTQNNKVLMPPDAIKEKYTDWTEFLIRDLTGSRTAPANLLEGVCIVVIHLMYL

SEQ ID NO: 26918 - DNA, 2685 bp, Artificial Sequence
  derived and/or modified sequence
atggaatccaccttaagtgcctccaacatgcaggacccaagctccagtccactcgaaaaatgcctaggatccgccaacggaaatggagacctcgacagtgaggagggcagctctctggaggaaacaggcttcaattggggcgagtacctggaagagaccggagccagcgctgccccacatacctcattcaaacacgtcgagatctctatacagagcaacttccaacctggtatgaaacttgaagttgccaataaaaataacccggatacctattgggtggccactatcattacaacatgcggccagctgctgttactgcggtactgcggatacggggaggaccggagggccgatttctggtgtgatgtggttatcgccgatctgcatcccgtcggctggtgcacccagaataacaaggttctcatgccacctgacgccattaaggagaagtatactgactggaccgaattcttgatcagggatttgactggctcgcgtacggccccagctaatcttctggagggacccttgagaggaaaaggccctattgatctgatcactgtgggcagcctgattgaactccaggacagccagaatcctttccaatactggatcgtttccgtgattgagaatgtcgggggtcgcctgagactgagatacgttggcctggaagacactgagagttacgatcagtggttgttctatcttgactatcgcctgcgccctgtgggatggtgccaggaaaacaaatatcgtatggatcctccttctgagatctaccctctgaagatggccagtgagtggaagtgcaccttagagaagtcactgattgacgccgctaaattccctctgcctatggaagtgtttaaggaccatgccgacctgcgcagccatttctttaccgttggaatgaagcttgagacagtcaatatgtgtgaaccattttatatcagccctgcctccgttaccaaagtgtttaataaccacttttttcaggtgaccatcgacgacttgagaccagagccttctaagctctcaatgctctgccacgccgatagcttgggtatcctgccagtgcagtggtgtctcaagaacggcgtatcactgactccgcctaagggatacagtgggcaggacttcgactgggcagattatcacaagcagcacggcgcccaagaagccccgcccttttgttttcggaacacttctttttctcggggtttcaccaagaacatgaaactcgaggccgtgaacccaagaaatcctggcgagctctgtgtcgcatcagtggtctccgtgaaaggcagacttatgtggttacacctggaagggctgcagacccccgtgcccgaggtcatagttgacgttgagtcaatggatatctttccagtgggatggtgcgaggccaactcttacccgctcacggccccacacaaaacggtgagtcagaagaaacgcaagatcgccgtggtgcaacctgaaaaacagttgccacccacagtccccgtgaaaaagatcccgcatgacttgtgtcttttcccacatctcgacactactggtaccgtgaatggaaagtattgctgtcctcagctgttcattaatcatcgatgcttctctggtccctaccttaataagggtagaatcgcggaattgccacagagtgtgggccctggaaagtgtgtcttggtccttaaagaagtgctgtcaatgatcataaacgcggcttacaagcctggaagagtactcagggagctgcaactggtcgaggaccctcactggaatttccaagaggaaacgctgaaagccaagtacaggggcaagacctaccgggccgtggtcaagatcgtgcgcacttcagaccaagttgccaatttttgccgacgcgtctgcgccaagttggagtgttgccccaacctgttctcacctgtgctgatcagtgaaaactgccctgaaaattgttctatccataccaagactaagtacacgtactactacgggaagcgaaagaaaataagtaaacccccaatcggagagtcaaacccagactccgggcaccccaaacctgcacggaggcgtaagcgccgtaaatccatttttgtgcaaaagaaaagaagatcctcagccgtcgattttaccgcaggctctggagaggagagtgaggaggaggacgctgatgccatggacgatgacacagccagcgaagagaccggttcagaactccgggacgatcaaacagatactagctccgcagaggtgcctagcgctcgacctaggagagcagtgacgctgcgcagtgggtctgagccggtcaggcgccctcctcccgaaagaacacgcagagggcggggtgcgcctgccgcctctagtgccgaagagggcgagaagtgtcctcctacaaagcccgagggtacagaagatactaaacaggaggaggaggagagactagtcttggaatccaaccccctggaatggaccgtgactgacgtagtcaggttcatcaagctgaccgattgtgcccccctggccaaaatcttccaagagcaggacattgacgggcaggcactgctccttctgactctgcccactgtccaggagtgtatggagctgaagttgggacctgctatcaagctttgtcatcagatagagcgcgtcaaggtagccttctatgcgcagtacgctaactag

SEQ ID NO: 26919 - DNA, 483 bp, Artificial Sequence
  derived and/or modified sequence
atggagagtactctgtcagcaagcaatatgcaggacccctcttcgagccccttagagaaatgcctggggtccgcgaacggaaacggggatctcgactcggaggaagggtcctcactggaggagactggattcaattggggggaatacctcgaagagactggtgccagcgctgcccctcacactagctttaaacacgtggaaatttccatccagtccaatttccagccaggtatgaagttggaggtggctaataaaaataaccccgatacgtactgggtcgccactattatcaccacctgcggccagttattgctgctcaggtactgcggatacggggaggaccgacgggccgacttctggtgcgatgtggttatcgctgatctgcaccctgtcggttggtgtacccagaacaataaggtgctcatgcccccggacgtcgagagtgatgttaagccttctgcctctgttcagcacatttcctag

SEQ ID NO: 26920 - DNA, 561 bp, Artificial Sequence
  derived and/or modified sequence
atggaatccaccctcagcgcatccaacatgcaggacccaagtagcagccccctggagaagtgcctgggcagcgccaatgggaacggggatctagatagcgaggaagggtcttccttggaagaaactgggttcaactggggagaatatttggaggaaactggcgccagtgcagcccctcacaccagcttcaagcacgttgaaatatcgattcagtctaatttccaacccggcatgaaattggaggtggccaacaagaacaatcccgacacttattgggtggcaactataattactacatgtggccaacttctgctgcttaggtattgtggctatggggaggaccggcgggctgacttttggtgtgatgtcgtcattgccgacctgcatcccgtggggtggtgcacacagaacaacaaagtccttatgcccccggacgcaattaaagaaaagtacaccgattggaccgagtttctcatcagagatcttacaggtagtcgaactgcccccgctaacctgcttgaaggggtgtgcattgtagtgatacacctcatgtatttgtag

SEQ ID NO: 26921 - DNA, 483 bp, Artificial Sequence
  derived and/or modified sequence
atggaatccaccctctccgccagcaatatgcaagacccctcttccagcccactcgaaaaatgtctgggtagcgctaatggtaacggagatctggacagcgaagagggaagttccttggaggagactggtttcaactggggcgaatatttggaagaaactggggcaagtgccgccccacacacatcttttaagcacgtggagatctcaattcagtctaacttccagcccggaatgaaattagaggtagctaataagaataatcccgatacatattgggtggccactataatcactacatgcggtcagctgctgctattgcggtactgtggctatggagaggaccgcagagccgacttttggtgcgacgtagtgattgccgatctccaccctgttggctggtgtacccagaacaataaggtgttgatgcctccggatgtcgaatccgacgtcaaaccgagcgcctccgttcagcacataagttag

SEQ ID NO: 26922 - DNA, 2685 bp, Artificial Sequence
  derived and/or modified sequence
atggagtctactctgtccgcatccaacatgcaagacccctcttccagcccacttgagaagtgcctcggatccgccaacggaaatggcgatttggattccgaagaagggtcaagcctggaagagacaggattcaattggggcgaatatctggaggagaccggcgccagtgcagccccacacacttcctttaagcacgtcgaaatttctatccagtcaaactttcagccaggcatgaagttagaggtggccaacaagaataacccggatacctattgggtggctaccatcatcactacatgtggacagctgcttttgctgaggtactgtggctatggtgaggatcggcgtgctgacttctggtgcgacgtggtgatagcagacctacatcctgtcggatggtgcacgcaaaataacaaagtgttgatgcctccggacgcgatcaaggagaagtacaccgactggacagagtttctgataagggacctgaccgggagccgtaccgcccctgctaatctgttggaaggacctctgcggggaaaaggtcctattgacctaataaccgtgggttccctgattgagttacaggactcgcagaacccctttcagtactggattgtctccgtgatagaaaacgtggggggcaggctccgcctgcgctacgtggggctggaagataccgagtcctatgaccagtggcttttctatctggactaccgattaagacccgtggggtggtgccaggaaaataaatacagaatggaccctcccagcgagatttatccactcaaaatggcatctgaatggaaatgtacattggagaaatctctgattgatgccgctaaattccctctgcctatggaagtgttcaaagatcatgccgatcttaggagtcacttttttactgttggaatgaagcttgagacagtaaatatgtgtgagcccttttacatcagtccagctagcgtcacaaaggtcttcaataatcattttttccaggttacaattgatgatttgagacccgaaccatcgaaactatccatgttgtgtcacgcagactccctggggattctgcccgtacagtggtgcctgaaaaacggtgtgagcctcacaccccccaaagggtacagcggccaggactttgactgggccgactatcataaacagcacggcgcccaggaggccccgccattctgttttaggaatacctccttcagcaggggttttactaaaaatatgaaattagaagccgtgaaccctcggaatcccggtgaattgtgtgtcgcatccgtggtgagtgtgaagggtaggctgatgtggctgcacctggagggtctgcagacaccggtgcctgaagtgatcgtggatgtggagtccatggacatcttccctgtgggctggtgtgaggccaattcatatcctctgactgcacctcacaagaccgtctcacaaaaaaaaaggaagatcgcagtggtgcagcctgagaaacagctgcccccgaccgttccggtgaagaagatcccccacgatttatgtctttttccgcatcttgacaccacaggaactgtaaatgggaagtattgttgtcctcagttgtttattaaccatcgctgcttcagtggaccttacctgaataaaggccgtatcgccgaattgccccagtccgtggggcccgggaaatgcgtgttggtactcaaagaggttctatctatgatcataaatgccgcatacaagccagggagagtcttgagagaactgcagctcgtggaggacccgcattggaatttccaggaagaaacgctgaaggcaaagtacaggggcaagacctaccgggcagtggtgaagattgtccggaccagtgaccaggtggccaacttttgcagacgggtctgcgccaagctggagtgttgccctaatttattctctcctgtgttaatctcagaaaattgccctgagaattgttccattcacaccaagacaaagtatacgtattactacggcaaacgaaaaaaaatctccaagccccctattggcgaatcgaacccagacagcggtcatcctaaacccgccaggagaagaaagcgcagaaagagcatcttcgtccagaagaagaggagatctagtgccgtggactttactgccggttccggtgaggagagtgaagaggaagacgcagacgctatggatgatgacactgcctctgaagagaccggaagtgaactgcgtgacgaccagaccgatacttcaagtgctgaagtgcctagcgcaaggcccagaagggccgtgacgctgcgctccggaagcgagcccgtccgaaggccgccacctgaacgaacgcgcaggggccggggggcccctgccgctagtagcgctgaagagggggaaaagtgtcctcccaccaagccagagggtacagaggatactaagcaggaggaagaagaaaggctggtgctcgagagcaaccctctggaatggacagttacagatgtcgtgagatttattaagctgaccgactgcgctccactagcaaaaattttccaggagcaagacattgacgggcaggctctactgctactaacccttcctactgtgcaggagtgcatggaactcaaactaggaccagccattaaactgtgccaccagatcgagcgagtcaaggtggcattctatgcacaatacgctaattag

SEQ ID NO: 26923 - DNA, 2685 bp, Artificial Sequence
  derived and/or modified sequence
atggagagcaccctgagcgccagcaacatgcaggaccccagcagcagccccctggagaagtgcctgggcagcgccaatggaaatggagacctggacagcgaggagggcagcagcctggaggagaccggcttcaactggggcgagtacctggaggagactggagccagcgctgccccccacaccagcttcaagcacgtggagatcagcatccagagcaacttccagcccggcatgaagctggaggtggccaacaagaacaacccagacacctactgggtggccaccatcatcaccacctgtggccagctgctgctgctgcgctactgcggctatggagaagatagaagagctgacttctggtgtgatgtggtgattgctgacctgcaccctgtgggctggtgcacccagaacaacaaggtgctgatgcccccagatgccatcaaggagaagtacacagactggacagagttcctgatccgggacctgaccggcagcaggacagccccagccaacctgctggagggccccctgcggggcaagggccccatcgacctgatcaccgtgggcagcctcatcgagctgcaggacagccagaaccccttccagtactggatcgtgtctgtgattgaaaatgtgggcggccgcctgcggctgcgctacgtgggcctggaggacacagagagctatgaccagtggctgttctacctggactaccgcctgcggcctgtgggctggtgccaggagaacaagtacaggatggaccccccatctgagatctaccccctgaagatggccagcgagtggaagtgcaccctggagaagagcctgattgatgctgccaagttccccctgcccatggaggtgttcaaggaccatgctgacctgcggagccacttcttcaccgtgggcatgaagctggagaccgtgaacatgtgtgagcccttctacatcagccctgcctctgtgaccaaggtgttcaacaaccacttcttccaggtgaccattgatgacctgcggcctgagcccagcaagctgtccatgctgtgccacgccgacagcctgggcatcctgcctgtgcagtggtgcctgaagaatggagtgtccctgaccccacccaagggctacagcggccaggactttgactgggccgactaccacaagcagcacggggcccaggaggccccacccttctgcttcaggaacaccagcttcagccggggcttcaccaagaacatgaagctggaggccgtgaaccccaggaaccctggagagctgtgtgtggcctctgtggtgtctgtgaagggccgcctgatgtggctgcacctggagggcctgcagacccctgtgcctgaggtgattgtggatgtggagagcatggacatcttccctgtgggctggtgtgaggccaacagctaccccctgacagccccccacaagacagtgtcccagaagaagaggaagattgctgtggtgcagcctgagaagcagctgccccccaccgtgcctgtgaagaagatcccccatgacctgtgcctcttcccccacctggacaccactggaacagtgaatggcaagtactgctgcccccagctgttcatcaaccaccgctgcttcagcggcccctacctgaacaagggcagaattgctgagctgccccagagcgtgggccctggaaaatgtgtgctggtgctgaaggaggtgctgtccatgatcatcaatgctgcctacaagccaggccgggtgctgcgggagctgcagctggtggaggacccccactggaacttccaggaggagaccctgaaggccaagtaccggggcaagacctacagagctgtggtgaagatcgtgaggaccagtgaccaggtggccaacttctgcagaagagtgtgtgccaagctggagtgctgccccaacctcttcagccctgtgctgatcagcgagaactgcccagagaactgcagcatccacaccaagaccaagtacacctactactacggcaagaggaagaagatcagcaagccacccatcggggagagcaacccagattctggccaccccaagccagcccggcggaggaagaggaggaagagcatctttgtgcagaagaagaggaggagcagcgctgtggacttcaccgctggcagcggggaggagagcgaggaggaggatgctgatgccatggatgatgacacagccagcgaggagaccggcagcgagctgagagatgaccagacagacaccagcagcgctgaggtgcccagcgcccggccccggcgggctgtgaccctgcggagcggcagcgagcctgtgagaagacctcctcctgagaggacccggcggggccgcggggccccagctgccagcagcgctgaggagggggagaagtgcccccccaccaagccagagggcacagaggacaccaagcaggaggaggaggagcggctggtgctggagagcaaccccctggagtggacagtgacagatgtggtgcgcttcatcaagctgacagactgtgcccccctggccaagatcttccaggagcaggacattgatggccaggccctgctgctgctgaccctgcccaccgtgcaggagtgcatggagctgaagctgggccctgccatcaagctgtgccaccagatcgagcgggtgaaggtggccttctacgcccagtatgccaactag

SEQ ID NO: 26924 - DNA, 483 bp, Artificial Sequence
  derived and/or modified sequence
atggagagcaccctgagcgccagcaacatgcaggaccccagcagcagccccctggagaagtgcctgggcagcgccaatggaaatggagacctggacagcgaggagggcagcagcctggaggagaccggcttcaactggggcgagtacctggaggagactggagccagcgctgccccccacaccagcttcaagcacgtggagatcagcatccagagcaacttccagcccggcatgaagctggaggtggccaacaagaacaacccagacacctactgggtggccaccatcatcaccacctgtggccagctgctgctgctgcgctactgcggctatggagaagatagaagagctgacttctggtgtgatgtggtgattgctgacctgcaccctgtgggctggtgcacccagaacaacaaggtgctgatgcccccagatgtggagagtgatgtgaagcccagcgcctctgtgcagcacatctcctag

SEQ ID NO: 26925 - DNA, 561 bp, Artificial Sequence
  derived and/or modified sequence
atggagagcaccctgagcgccagcaacatgcaggaccccagcagcagccccctggagaagtgcctgggcagcgccaatggaaatggagacctggacagcgaggagggcagcagcctggaggagaccggcttcaactggggcgagtacctggaggagactggagccagcgctgccccccacaccagcttcaagcacgtggagatcagcatccagagcaacttccagcccggcatgaagctggaggtggccaacaagaacaacccagacacctactgggtggccaccatcatcaccacctgtggccagctgctgctgctgcgctactgcggctatggagaagatagaagagctgacttctggtgtgatgtggtgattgctgacctgcaccctgtgggctggtgcacccagaacaacaaggtgctgatgcccccagatgccatcaaggagaagtacacagactggacagagttcctgatccgggacctgaccggcagcaggacagccccagccaacctgctggagggcgtgtgcatcgtggtgatccacctgatgtacctgtag

SEQ ID NO: 26926 - DNA, 2685 bp, Artificial Sequence
  derived and/or modified sequence
atggagagcaccctgagcgccagcaacatgcaggaccccagcagctcgcccctggagaaatgtttgggcagcgcaaatggcaacggcgacctagattctgaggagggatcatccctggaggagaccgggtttaattggggagagtatttggaagagaccggggcctctgcagccccccacacaagctttaagcatgtggagatatccatacagtccaattttcagcccggaatgaagctggaagtcgccaataagaacaacccggatacttattgggtagctacaatcattactacgtgcggacagctcttactccttaggtattgcggctacggtgaggatcggagggccgatttttggtgcgatgtggtgatcgcagatctgcatcctgtcgggtggtgcacccagaacaataaggtcctaatgcctccagatgccatcaaggagaaatatacggactggaccgagttcctgattcgagacttgacgggctccaggacggcacccgcaaacctcctggagggtccactcagaggaaagggccccatcgatctaattacggtggggagcctgatcgaacttcaagattcgcagaacccttttcagtattggatcgtatccgtgatagagaacgtgggcggcaggttgcgcttgcgttacgtcggactggaagacaccgagtcatacgaccaatggctcttttacctggattaccgcctgagacctgttggttggtgccaggagaataagtaccgcatggacccccccagcgaaatttatccactgaaaatggcctctgaatggaagtgcactctcgagaagtcactcatcgatgctgccaagttccccctccccatggaggtttttaaggaccatgccgacctgagatctcatttttttactgtgggcatgaagctcgagactgtgaacatgtgcgaacctttctatatctctcctgcgtctgtcactaaagtattcaacaatcacttttttcaggttaccatcgatgacttacgacctgagccctccaagttatccatgttatgtcacgccgacagccttggaatactgccggtccagtggtgtttaaaaaacggtgtttcactgacgcctcccaaaggctattcgggccaagattttgattgggcagattatcacaagcagcatggcgcgcaggaagctccaccattttgcttccggaatacgtctttctctagggggtttacaaagaatatgaagctagaagcagtaaacccgcgcaatcccggagagctttgtgtagccagtgtggtttctgtgaaaggccgcctcatgtggctgcaccttgaggggctgcagacccccgtgccagaggttatagtggacgtggaaagtatggatatatttcccgtgggatggtgtgaagcaaacagctaccccctaacggcaccccacaagaccgtatctcagaaaaagcgaaagatagctgtggtgcagcctgaaaaacagctgccgcccacagtgccagtaaaaaagattcctcacgacttgtgcctgtttcctcacctggacactactggcaccgttaacgggaagtactgttgtccacagctgttcatcaatcacaggtgtttttccggaccttatctgaacaaaggtcgcatcgccgaactgcctcagagcgtgggacctgggaagtgcgtcctcgtcctgaaagaggtactcagcatgatcataaacgccgcttacaaacctggcagggtgctgcgcgagctccagctagtggaagacccacattggaactttcaagaggaaacccttaaggcgaaataccgcgggaagacttacagagccgtggtgaagattgtgaggacttctgaccaggtggcaaacttttgtcggcgagtgtgtgcgaagctggaatgctgtcctaacctgttctcccctgtgctgataagcgagaactgccccgaaaactgctcaatccacaccaagacaaagtacacatattactatgggaaaaggaagaaaattagtaaaccacccataggggaatctaatccagactccggccaccccaagcctgcccggagacggaagagacgaaagtctatatttgttcagaagaaaagacgctcatcagcagtggattttacggccgggtcaggagaagagagcgaggaagaggatgccgacgccatggatgatgacaccgctagtgaggagacaggcagtgagttacgggatgaccagactgataccagctcagccgaagtcccttccgcacgcccaagacgggctgtcaccttacgctctggtagcgagcctgtaaggcgtccgcctcccgagagaacccggcgaggccgaggcgcccctgctgccagttctgcagaggaaggggaaaagtgcccacccacaaagcctgagggtacagaggacacgaaacaggaggaagaggagcgcctggtactagagtcaaaccctctggagtggactgtgacagacgtggtgcgctttataaaactcacagactgcgcacccctggccaagatctttcaagaacaggatatcgacggccaggctctacttcttctcactctcccaactgtccaggagtgtatggagctcaaacttgggccagcaattaaactgtgccaccagatcgagagagtcaaggtcgccttctacgcccagtatgccaactag

SEQ ID NO: 26927 - DNA, 483 bp, Artificial Sequence
  derived and/or modified sequence
atggagagcaccctgagcgccagcaacatgcaggaccccagcagcagtccacttgaaaaatgcctgggaagcgctaatggcaacggagaccttgactccgaggaggggagttctctcgaagagacaggatttaactggggggaatacctggaggagacaggggcctctgcggcccctcacaccagttttaagcacgtggagattagtatccagagcaacttccaacccgggatgaagcttgaggtcgccaacaagaacaaccccgacacctactgggttgcaaccatcattaccacctgtgggcagctgctgctgttgaggtactgcgggtacggtgaggaccggcgagcagatttctggtgtgacgtggtgatcgccgatctacatcccgtgggctggtgcacacagaacaacaaagttctgatgccccccgacgtcgaaagcgacgtgaagccgtctgcctccgtgcagcatatctcgtag

SEQ ID NO: 26928 - DNA, 561 bp, Artificial Sequence
  derived and/or modified sequence
atggagagcaccctgagcgccagcaacatgcaggaccccagcagcagccccctggagaagtgccttggatccgctaacggcaacggtgaccttgacagcgaggagggcagttcgctggaggagacaggattcaattggggtgaatatctggaagaaaccggcgcgagcgcggctccgcacactagcttcaaacacgtggagatatccattcagtcaaactttcagccgggaatgaagctcgaagttgcgaacaaaaacaatcccgacacttactgggttgcaactatcataacaacgtgtgggcagctgctacttttaaggtactgtggctatggggaggaccgaagggccgacttctggtgtgatgttgtgattgccgatctgcaccccgttgggtggtgcacccaaaataacaaagtactcatgccccctgatgcgatcaaagagaagtacacggactggacagagtttctaattcgcgacctcaccggcagccgaacagcgcccgccaatctgctcgaaggggtatgtatcgtggtgatccatctgatgtatctgtag

SEQ ID NO: 26929 - DNA, 483 bp, Artificial Sequence
  derived and/or modified sequence
atggagagcaccctgagcgccagcaacatgcaggaccccagcagctctccactggagaagtgtctaggaagtgctaatggcaatggcgacctggacagcgaagagggctcatccctggaagagaccgggtttaactggggcgagtatcttgaggagacaggcgcctcggccgccccgcatacctccttcaaacacgtcgaaatcagtatccagagtaactttcagcctgggatgaaattggaagtggccaataagaacaatcctgacacatactgggttgccacaattatcacaacctgcggtcagttgctattattaaggtactgtgggtacggagaggatcggcgggccgacttttggtgcgatgtagttattgcagaccttcatcccgtgggctggtgtacacagaacaataaggttctgatgccccccgatgttgagtctgacgtgaaaccatcagcctcggttcagcacatatcctag

SEQ ID NO: 26930 - DNA, 2685 bp, Artificial Sequence
  derived and/or modified sequence
atggagagcaccctgagcgccagcaacatgcaggaccccagcagctcaccactcgaaaaatgtctgggctccgcaaacggtaatggggacctggactccgaagaaggctcttcccttgaggagactgggttcaattggggtgaatatctggaagaaacgggggcctccgcagctccacacacctcatttaagcacgtggagatctccatccagtcaaattttcagcccggcatgaaactggaggtggcgaacaagaataaccccgacacatactgggtggcgaccattattacaacctgtggccagctgctgcttctaagatattgcgggtatggtgaggatagacgtgccgatttttggtgcgacgttgtgattgcagacttgcacccggttggatggtgcacccagaataataaggtactgatgccacctgatgccatcaaagagaaatacaccgactggacggaattcctgattcgggatctgaccggctcccggactgcccctgcaaatttactggaaggccctttacgtggaaagggccctatagatttaattacggttggttctttgatcgagctccaggacagccagaaccctttccagtattggattgtgtcggtgattgagaatgtgggagggagactccggctccggtatgtgggattggaggataccgaatcctatgatcaatggctgttttatctggactaccgcctgcgccccgtagggtggtgccaggaaaataaataccgaatggatccaccctccgagatttaccctttaaaaatggcgtccgaatggaaatgcacactcgagaaatcactcatcgacgcagctaaattcccactccctatggaggtattcaaagaccatgcagatctgcggtctcactttttcactgttggtatgaaactcgaaaccgtgaatatgtgtgagcccttctacatcagtcctgcttcagttacaaaggtgttcaacaaccactttttccaggtgaccatcgacgatcttaggcctgaaccatctaagctgtctatgctgtgccacgcagattccctcgggattctgcccgtgcagtggtgtctcaagaatggtgtgagcctcacccctcccaagggttacagcgggcaggactttgactgggctgattaccacaagcagcacggtgcacaagaagccccccctttttgcttccgcaatacttcttttagtcggggattcaccaagaacatgaagctagaggcagtgaacccccgcaatcccggggagttgtgtgtcgcttccgtagtaagtgtaaaggggagacttatgtggctgcatttggagggcctgcagactccagtgcctgaagtcatcgtggacgtggaatcaatggatattttccccgtggggtggtgtgaagccaacagctaccccctgaccgctccacacaagactgtgagtcagaagaaacggaaaatcgctgtcgttcagcccgagaaacagctcccccctactgtgccagttaagaagattccgcacgacctctgtttattccctcatctggatacaacaggaacagtcaacgggaaatattgttgccctcagttgttcatcaaccacaggtgcttcagtggcccgtatctaaataagggtcggatcgccgaactgccccagagcgtgggtcctggcaaatgtgtattagtgctcaaagaggtgctgtccatgatcataaacgcagcttataaacctgggcgcgtgctcagagagctccagttggtcgaggatcctcactggaacttccaagaggaaacactaaaggctaaatatagggggaagacataccgcgccgtggtcaagattgttcgtaccagtgaccaggtcgcaaacttctgtcgcagagtatgcgcaaagctggagtgctgtccaaatcttttttcacccgtgctcatcagtgagaactgcccagagaattgtagcatccacaccaagacaaagtacacatattactacgggaagcgtaagaagatctctaaaccgcctatcggtgaatccaaccctgattcaggacaccctaagccggcccgacggagaaaaagaagaaaaagtatcttcgtgcagaagaagcgcaggagctctgctgtggatttcaccgcaggttctggagaggagagtgaagaggaggatgctgacgcgatggatgacgataccgcgtcagaagaaaccggtagcgagctccgggacgaccaaaccgatacctcaagcgccgaggtgccaagcgctagaccaagaagagctgtgacactgaggtccggatcagaacctgtgcggagacctcctccggaaagaacccgcagaggtaggggcgcacctgctgcttccagtgcagaagagggcgaaaagtgccctccaaccaagcctgagggaaccgaggacacaaagcaggaggaggaagaaagactcgtgctggaaagcaatcccctggagtggaccgtgaccgatgtagtgcgatttatcaagctaaccgattgcgcccccttggccaaaatctttcaggagcaagacatcgacggccaggctctgctcctcctgaccttgccgacagtgcaagagtgtatggagctgaagcttgggccagctattaaactgtgtcaccagatcgaacgtgtaaaggtggccttctacgcacaatacgccaattag

SEQ ID NO: 26931 - DNA, 7922 bp, Artificial Sequence
  derived and/or modified sequence
cgccttgtgtgtgctggatcctgcgcgggtagatccccgagtaattttttctgcaggatgaattaagagaagagacacttgctcatcaggcatggagagcactttgtcagcttccaatatgcaagacccttcatcttcacccttggaaaagtgtctcggctcagctaatggaaatggagaccttgattctgaagaaggctcaagcttggaggaaactggctttaactggggagaatatttggaagagacaggagcaagtgctgctccccacacatcattcaaacacgttgaaatcagcattcagagcaacttccagccaggaatgaaattggaagtggctaataagaacaacccggacacgtactgggtggccacgatcattaccacgtgcgggcagctgctgcttctgcgctactgcggttacggggaggaccgcagggccgacttctggtgtgacgtagtcatcgcggatttgcaccccgtggggtggtgcacacagaacaacaaggtgttgatgccgccggacgcaatcaaagagaagtacacagactggacagaatttctcatacgtgacttgactggttcgaggacagcacccgccaacctcctggaaggtcctctgcgagggaaaggccctatagacctcattacagttggttccttaatagaacttcaggattcccagaacccttttcagtactggatagttagtgtgattgaaaatgttggaggaagattacgccttcgctatgtgggattggaggacactgaatcctatgaccagtggttgttttacttggattacagacttcgaccagttggttggtgtcaagagaataaatacagaatggacccaccttcagaaatctatcctttgaagatggcctctgaatggaaatgtactctggaaaaatcccttattgatgctgccaaatttcctcttccaatggaagtgtttaaggatcacgcagatttgcgaagccatttcttcacagttgggatgaagcttgagacagtgaatatgtgcgagcccttttacatctctcctgcgtcggtgactaaggtttttaacaatcacttttttcaagtgactattgatgacctaagacctgaaccaagtaaactgtcaatgctgtgccatgcagattctttggggattttgccagtacagtggtgccttaaaaatggagtcagcctcactcctcccaaaggttactctggccaggacttcgactgggcagattatcacaagcagcatggggcgcaggaagcccctcccttctgcttccgaaatacatcattcagtcgaggtttcacaaagaacatgaaacttgaagctgtgaaccccaggaatccaggagaactgtgtgtggcctccgttgtgagtgtgaaggggcggctaatgtggcttcacctggaagggctgcagactcctgttccagaggtcattgttgatgtggaatccatggacatcttcccagtgggctggtgtgaagccaattcttatcctttgactgcaccacacaaaacagtctcacaaaagaagagaaagattgcagtcgtgcaaccagagaaacaattgccgcccacagtgcctgttaagaaaatacctcatgacctttgtttattccctcacctggacaccacaggaaccgtcaacgggaaatactgctgtcctcagctcttcatcaaccacaggtgtttctcaggcccttacctgaacaaaggaaggattgcagagctacctcagtcggtgggaccgggcaaatgcgtgctggttcttaaagaggttcttagcatgataatcaacgcagcctacaagcctggaagggtattaagagaattacagctggtagaagatccccactggaatttccaggaagagacgctgaaggccaaatacagaggcaaaacatacagggctgtggtcaaaatcgtacggacatctgaccaagtcgcaaatttctgccgccgagtctgtgccaagctagagtgctgtccaaatttgtttagtcctgtgctgatatctgaaaactgcccagagaactgctccattcataccaaaaccaaatacacctattactatggaaagagaaagaagatctccaagccccccatcggggaaagcaaccccgacagcggacaccccaaacccgccaggcggaggaagcgacggaaatccattttcgtgcagaagaaacggaggtcttctgccgtggacttcaccgcgggctcgggggaggaaagtgaagaggaggacgctgacgccatggacgatgacaccgccagtgaggagaccggctccgagctccgggatgaccagacggacacctcgtcggcggaggtgccctcggcccggccccggagggccgtcaccctgcggagcggctcagagcccgtgcgccggccacccccagagaggacacgaaggggccgcggggcgccggctgcctcctcagcagaggaaggggagaagtgcccgccgaccaagcccgaggggacagaggacacgaaacaggaggaggaggagagactggttctggagagcaacccgttggagtggacggtcaccgacgtggtgaggttcattaagctgacagactgtgcccccttggccaagatatttcaggagcaggatattgacggccaagcactcctgcttctgacccttccgacggtgcaggagtgcatggagctgaagctggggcctgccatcaagttatgccaccagatcgagagagtcaaagtggctttctacgcccagtacgccaactgagtctgccctcgggaggtggcccattattgctgggatgcggtgttggtaaaggtttccaggactgaaactttgattttccgggatatgttaaatggtacagccactaagtatcaccagaaaaccagaagcccaggatcttctgcctccgccagcctgtgagctgtttccatgttttcaaagcacagcagcagtcgcttctggggagtgccagttaaagtcatgcatcagaccctgccagacgtgggcctgcttcttggctcacccacgttttgcctttctcctgccccaaatcaggcagctcccttggagcagggtttcctcagatgaggactgcattctttgaaaacaaagaatgtcgccaaggaagaaacctcacgccatgctgtagtgtttcctgtaatcacacgagcacatttatatatgcagtttcccatggataggcgtgtgaccctggttgagtggcacttgcggtttcatcttggtggcaactcctttgcaatgcagctggcagcgacatccttataaaaacatgtgctaaagctctgtcctctgttagaggtgccttttaggaatacggggagtgaaggaaggccggcaggcatctccatgcaactagatggtttgtttgtttgtttgtttgtttgttgttcattttgttgtgttttttgagacagggtcttgctctgtcgcccaggttgtaatgcagtggcgcaatctcagctcactgcaacctctctctcccgggttcaagtgattctcctgcctcagcctcccaagtagctgggattacaggcacccaccaccatgcctggctaatttttgtatttttggtagagacagggtttcaccatgttggtcaggctagtcttgaactcccaacctcaagtgatctgcccgcctcggcctcccaacgtgctgggattacaggtgtgagccactacgccccggcccaactggatggtttttgattgaagcctagaacatctgtagagacaaactctacccagtcttttctagaccctcaactatctccagtgttgttgtttaatcgtagccggatcagggagtgagtcttttaggcaaatgttggattatatatcaaaggaaaagcttagtttcagagaggaggaagggaaagagatgtgagggaagcatttcatcaaccagctacgtcccccttagaaggatcactgcagcaggtcaccgagcaggagtccctctgagcgtcccttctgtctcgttctgccctagctggcagcatatgaaccaggcatgatgcagcaggagcagtgaatctggagtcagccacttggcaccctggtttcgctgagaacaaactctgagatcttgggtgacttctcatcactctggacctccattcctgtgaagtgacaggtgtggaccctgagggtgcggtggtgagcacactgtctcctgctggcattcaccccactcatgctggaaaggaagatccagatcgtacaaaaattagaaaaagaaagaataagaagggtctggtcccagttctgactcggccattcttacagctctttctggctttgagtttgcttgtggaatttcctgggcagttgtgttaaatccgccaggtcacgtgcagacaaagctgtggctgcgagagttggctggcctcttggaccagaagccatctccatatcctcatgagcgattccatatctccactcagaccctgtggactacagtgttccgctgtggtggctgccaagatgccttcttaaacttatgcaaggaaaccaaaccctcccacagttcccaagcagacactggaagcagaggcttctcacccttcctgctttttcaccacaatcaccttgagctcgtcccttggactagagtctccacagttccagtaaaattctgcggtgggctgatgagctgcttgcatttctgtgacatttccagatatgattctcagtgggattttggaaactttgattgctcaagctcacccttcttaacattctgtaatggttacagatgagaatggaaaacacatattttatggatgaggcgttttggtctcccctgcagtcgatttctagaatcaagttttagagttcggctgatgcatctgcctggggacctcagatgggaggagtgtgtcagttgtaccccgacagaaatgtctctgggatctgtggctggcttgccccgggcatctctcctttaagctcaagttttgaactctctgcggttttccacccctgccttctcagccacatgcttttggccttaaacgctcagtcttgtggagttcaactctgtcaaacgattggaaagggcatccatttccagatctttggcattttccccgcgctgactctttgatgatccttcactgtggccttttcaagctcagctgttcctgttgtatttgagacgagggtgagggaatgtggtggccacaaaagaacagggacttgcagcacaaatgtcacttctgtctcccttttcagtggtagcacggaggaggaggtgctgcgttggagggaggggatcctccaggagctctctggagcccatctaggaagctagagtgtgtggcccgccaggagctcaggaaggatacagccactgtcgcaggggaaagtgtttgcttcccgtggagccaagcgcccaagactctccgtatccttcaccctgacagtttaacttcagcgtttctctgtgcagttgcggtcaccatgggtgagcactgtctgtgcacgtgccagggaggagatggctgggaccactgcacaggagggcgcagcctggcgtcgccatgaaagttgtctctgtgccatctctccggtccttgaggagagcccagaaagattttaggacccaggaggtgcttttcctccagctgttgccagtgtccttctgagcctggattctccggggatttccgtcgtggtggatggacttcacatcagcagcagttctggtacagaattgtaatgtgttttcatttctctgtaggattcacctctcaccagcgtctgtcttaaaggtagggccaatttcatggagcatttttctgtgtgtgtccttgttgcttttgccagaaaaagtggatttgacatgcgtgccccgatgccaccatagcccctaggccaacaatgtcatggtctaaacaccaaaaagtgatgccccgcattccttccctggatggtaccgtttcttctccgtctctctttgatgattctttgggaccaaagtcctctccttagtgcgcctacttcctgtgggcatcatgccacttggaacttattggaactggcccgggagactctgcagtctgcgccgtttgaaaaccctgagaaagagatgccacctcaacttgaatcatgacagcccatcgctcagtctcaccctaaactcatggagcttgtttcagctcctcacttcttgactgtatttgtactatgttgaaaaaatatcctgtccacaaagacataagcctaacaacctagaaaaacaacagggtactactggcattacagaacttctttgcctttcaaaacaaaagcaaaacacagtgaacttcaccacggagctgcacagcgtggggaactcatccatcactttcaaaattagagtcatttgatccaagttggagtcagacacagtatttgagctgcacggcttctgggttctcccaccttatttgatcatattcgaaagattatttcctgtgtttgctttgatttgttcctcagtacattaaaatgatccacaccttgaacactgccctctctagaaggttgattttgatcagccttttgaagatgggtgtcgtttccctaacttatctcacagaattttgagtgttgtatttggcaagttctgagatttgccttctgtcttatgccaaacacccctttctaagagctgtccccgcttagttttagaagtactaggggttttcatacttattttatagaacacccatttatatttatttctgtatatagaactaaaaaaaacagtagtgttaaaaatctttgttgtggtttgagcatctttgctgcttttggattgagatggcgaatcaaggcttcacttcctctctcttctgtctttagaaagctgtgatcgtgcgtgcaattatttgaaaggcaacatagtcaattaagaaacctgtagttgttaaggaagaaattgttggcaagatatccatactgcccatatctcgttggtgcaataattaaatagcaaaggaaatctgtattggcaactattataattcaataattcttttgtttactgcccttttctgttcaagaattttctggaaattactccctttcacatggttgaactcttaagttgaccagttctcatagctctatcactagaatggtttgcagataccccaaacatactatgataaaatcaaattgtgctacttttgacccatgtaatttacctaaaagttgtaattgctgacagagtactgccttgaattttggtttaaaacctctctagtttcaatgacaagtaacaactcaaataattccatattgtttgaggaagaggccataatccttctgaattgttggcactaagtaatgggatttggcccagtaagtatgacggtcgtgtcgcctaaccaacgcagagcagtgctttttgtgtggctgaagcgatgtgctgacgaaaaaaggaaaattctaggacaatcgttggctaaaaatcaccttaggatgaaaaatttgaggcaaatttttttaaatgacagaaaaagataatcatctcacttgcttgaaacaggagccagcatgatctctggaagcatcaactatccctcgtcgtgattgttgaaagctctttcactgttttgcattctagtttgaatagtttgtattgaaattggattcctatcttgtgtatgtttttggtgcgtaaaagggaaaaattggtgtcattacttttgaaatttgcaggacgaagggcatgcttttggtttgctgtaagattgtattctgtatatatgttttcatgtaaataaatgaaaatctatatcagagttatattttaatttttattctaaatgaaaaaaaccctttttacttcaaaaaaattgtaagccacattgttaataaagtaaaaataaattcta

SEQ ID NO: 26932 - DNA, 693 bp, Artificial Sequence
  derived and/or modified sequence
aacgcgagctcgggtaattttttctgcaggatgaattaagagaagagacacttgctcatcaggcatggagagcactttgtcagcttccaatatgcaagacccttcatcttcacccttggaaaagtgtctcggctcagctaatggaaatggagaccttgattctgaagaaggctcaagcttggaggaaactggctttaactggggagaatatttggaagagacaggagcaagtgctgctccccacacatcattcaaacacgttgaaatcagcattcagagcaacttccagccaggaatgaaattggaagtggctaataagaacaacccggacacgtactgggtggccacgatcattaccacgtgcgggcagctgctgcttctgcgctactgcggttacggggaggaccgcagggccgacttctggtgtgacgtagtcatcgcggatttgcaccccgtggggtggtgcacacagaacaacaaggtgttgatgccgccggacgtagagagtgatgtcaagccatcagcttctgttcaacatatttcttagaaaaggatgtctcaaaacttcttcgagaccgtcacgaaatgaaacaactccccgatcccacacgaacctctcccaccaccctcaaacataaaccaacccaaaccctttgaaaagctccaaagaaaataaaatgtttttagaacttc

SEQ ID NO: 26933 - DNA, 2402 bp, Artificial Sequence
  derived and/or modified sequence
aaagcgcaagtttgtgcacacggtcgactgagccattggaaacccagctcacgaaccgcagccagggaaacgggagtttgcccagttgtccttgcggaggggtgtgcggaaacgcccgcgatgggaactttctgcagatcatgtaattttttctgcaggatgaattaagagaagagacacttgctcatcaggcatggagagcactttgtcagcttccaatatgcaagacccttcatcttcacccttggaaaagtgtctcggctcagctaatggaaatggagaccttgattctgaagaaggctcaagcttggaggaaactggctttaactggggagaatatttggaagagacaggagcaagtgctgctccccacacatcattcaaacacgttgaaatcagcattcagagcaacttccagccaggaatgaaattggaagtggctaataagaacaacccggacacgtactgggtggccacgatcattaccacgtgcgggcagctgctgcttctgcgctactgcggttacggggaggaccgcagggccgacttctggtgtgacgtagtcatcgcggatttgcaccccgtggggtggtgcacacagaacaacaaggtgttgatgccgccggacgcaatcaaagagaagtacacagactggacagaatttctcatacgtgacttgactggttcgaggacagcacccgccaacctcctggaaggtgtatgtattgttgttatacatctaatgtatctctgaagcaccccagttacgtgagctcagacctgacagcacctttgcatatatccttcagcagatgcgtgctttctgcagacactgccatccaaatagcctcccttcctcttttgtcctgaattacttaggtgactgatttgaatggcattgatgaaacttcccctgtgatgcaatcagcaaatggaaaatttgctctatgtgaatccaatttttaaatcacaatatgctaggatgtcttcctactgtcctatatctttaagcctctttcctatgtgagtgaatataaatcaaatcctgtagaatcactgttttgaacaggtgacaagatcatgtatgtgctaatatagtctcttggagtacattgataagtcgttccattaaatgttctattttgacgcataaccccaagatttgaacatacacacgttaaccaataattgaattaacttctcttgtaaaaacaagaggagaaatggcagatcgtatttcagtgtagccaaggaaattttaatgtattgaagaaaacatagtttaatctgaaatcttgatggtttatttgaaaataattttatgttgaaacatcttagtatgtatatgtagtatttgtatttgtataatggaacaggaagagaaaggcactgtgtcataagtaattattgaattacctagtctgtttttcttaagaatgcccctaaaaaggggaaaacttaatgaataacaagtaataaggtgtggattttgacagtatcatattctcttaaccttaaactttccctcttttcataaatgatattgacattttagaacgtcatagtctaatatagttaacgggttttgttttgtgaagattttgcctgatgtatttgttatatatcattagagatactattttaattgttcattaacaaatcaaaatgatgatagttcatcctttcaaaaggacaaattgtctcactatgttaattttctaaaacatatttgcctacaaagctggctgaacaaacacccttttcatatgctatcataggctaagaaggtttcttagaaggggcagtaattatacattctgtaaaccaattaccagcttaagtgtagaaataattttacatagtagtctaatttagctgatcattactgtgtgttagacatgtcattgacacacactcatgccttcgtcacataatcaaagtatgagagcattttggtcattagagtagcggccagtagagtaagatgaatgtctgggaaaccgtcatggtgtaaattgaatgctctgtattagaattatctgtctgttggaaaagtagaccgtttgctaccacgttttctaggtccaggcaaatttgggtagaactcttcttaaaagcatactgattgttaacaaaagcaattttatctgggaagggtgatttgtttggtgagaacttagcacaaactgttattttctattgacttgtgatttttttgttgttggatacggaatggggtacatggatgtgtgggagggaggaaagggaaggggtggggcatgggctgggcaaggatggggtggagggaacgccagactgttcgccagtaccttggatgatggtgtgaaaaaatattatcttctgctgtcatctgtttccatgagaaccttaaaataaagttt

SEQ ID NO: 26934 - DNA, 678 bp, Artificial Sequence
  derived and/or modified sequence
ataaagcgcaagtttgtgcacacggtcgactgagccattggaaacccagctcacgaaccgcagccagggaaacgggagtttgcccagttgtccttgcggaggggtgtgcggaaacgcccgcgatgggaactttctgcagatcatgtaattttttctgcaggatgaattaagagaagagacacttgctcatcaggcatggagagcactttgtcagcttccaatatgcaagacccttcatcttcacccttggaaaagtgtctcggctcagctaatggaaatggagaccttgattctgaagaaggctcaagcttggaggaaactggctttaactggggagaatatttggaagagacaggagcaagtgctgctccccacacatcattcaaacacgttgaaatcagcattcagagcaacttccagccaggaatgaaattggaagtggctaataagaacaacccggacacgtactgggtggccacgatcattaccacgtgcgggcagctgctgcttctgcgctactgcggttacggggaggaccgcagggccgacttctggtgtgacgtagtcatcgcggatttgcaccccgtggggtggtgcacacagaacaacaaggtgttgatgccgccggacgtagagagtgatgtcaagccatcagcttctgttcaacatatttcttag

SEQ ID NO: 26935 - DNA, 4363 bp, Artificial Sequence
  derived and/or modified sequence
ataaagcgcaagtttgtgcacacggtcgactgagccattggaaacccagctcacgaaccgcagccagggaaacgggagtttgcccagttgtccttgcggaggggtgtgcggaaacgcccgcgatgggaactttctgcagatcatgtaattttttctgcaggatgaattaagagaagagacacttgctcatcaggcatggagagcactttgtcagcttccaatatgcaagacccttcatcttcacccttggaaaagtgtctcggctcagctaatggaaatggagaccttgattctgaagaaggctcaagcttggaggaaactggctttaactggggagaatatttggaagagacaggagcaagtgctgctccccacacatcattcaaacacgttgaaatcagcattcagagcaacttccagccaggaatgaaattggaagtggctaataagaacaacccggacacgtactgggtggccacgatcattaccacgtgcgggcagctgctgcttctgcgctactgcggttacggggaggaccgcagggccgacttctggtgtgacgtagtcatcgcggatttgcaccccgtggggtggtgcacacagaacaacaaggtgttgatgccgccggacgcaatcaaagagaagtacacagactggacagaatttctcatacgtgacttgactggttcgaggacagcacccgccaacctcctggaaggtcctctgcgagggaaaggccctatagacctcattacagttggttccttaatagaacttcaggattcccagaacccttttcagtactggatagttagtgtgattgaaaatgttggaggaagattacgccttcgctatgtgggattggaggacactgaatcctatgaccagtggttgttttacttggattacagacttcgaccagttggttggtgtcaagagaataaatacagaatggacccaccttcagaaatctatcctttgaagatggcctctgaatggaaatgtactctggaaaaatcccttattgatgctgccaaatttcctcttccaatggaagtgtttaaggatcacgcagatttgcgaagccatttcttcacagttgggatgaagcttgagacagtgaatatgtgcgagcccttttacatctctcctgcgtcggtgactaaggtttttaacaatcacttttttcaagtgactattgatgacctaagacctgaaccaagtaaactgtcaatgctgtgccatgcagattctttggggattttgccagtacagtggtgccttaaaaatggagtcagcctcactcctcccaaaggttactctggccaggacttcgactgggcagattatcacaagcagcatggggcgcaggaagcccctcccttctgcttccgaaatacatcattcagtcgaggtttcacaaagaacatgaaacttgaagctgtgaaccccaggaatccaggagaactgtgtgtggcctccgttgtgagtgtgaaggggcggctaatgtggcttcacctggaagggctgcagactcctgttccagaggtcattgttgatgtggaatccatggacatcttcccagtgggctggtgtgaagccaattcttatcctttgactgcaccacacaaaacagtctcacaaaagaagagaaagattgcagtcgtgcaaccagagaaacaattgccgcccacagtgcctgttaagaaaatacctcatgacctttgtttattccctcacctggacaccacaggaaccgtcaacgggaaatactgctgtcctcagctcttcatcaaccacaggtgtttctcaggcccttacctgaacaaaggaaggattgcagagctacctcagtcggtgggaccgggcaaatgcgtgctggttcttaaagaggttcttagcatgataatcaacgcagcctacaagcctggaagggtattaagagaattacagctggtagaagatccccactggaatttccaggaagagacgctgaaggccaaatacagaggcaaaacatacagggctgtggtcaaaatcgtacggacatctgaccaagtcgcaaatttctgccgccgagtctgtgccaagctagagtgctgtccaaatttgtttagtcctgtgctgatatctgaaaactgcccagagaactgctccattcataccaaaaccaaatacacctattactatggaaagagaaagaagatctccaagccccccatcggggaaagcaaccccgacagcggacaccccaaacccgccaggcggaggaagcgacggaaatccattttcgtgcagaagaaacggaggtcttctgccgtggacttcaccgcgggctcgggggaggaaagtgaagaggaggacgctgacgccatggacgatgacaccgccagtgaggagaccggctccgagctccgggatgaccagacggacacctcgtcggcggaggtgccctcggcccggccccggagggccgtcaccctgcggagcggctcagagcccgtgcgccggccacccccagagaggacacgaaggggccgcggggcgccggctgcctcctcagcagaggaaggggagaagtgcccgccgaccaagcccgaggggacagaggacacgaaacaggaggaggaggagagactggttctggagagcaacccgttggagtggacggtcaccgacgtggtgaggttcattaagctgacagactgtgcccccttggccaagatatttcaggagcaggatattgacggccaagcactcctgcttctgacccttccgacggtgcaggagtgcatggagctgaagctggggcctgccatcaagttatgccaccagatcgagagagtcaaagtggctttctacgcccagtacgccaactgagtctgccctcgggaggtggcccattattgctgggatgcggtgttggtaaaggtttccaggactgaaactttgattttccgggatatgttaaatggtacagccactaagtatcaccagaaaaccagaagcccaggatcttctgcctccgccagcctgtgagctgtttccatgttttcaaagcacagcagcagtcgcttctggggagtgccagttaaagtcatgcatcagaccctgccagacgtgggcctgcttcttggctcacccacgttttgcctttctcctgccccaaatcaggcagctcccttggagcagggtttcctcagatgaggactgcattctttgaaaacaaagaatgtcgccaaggaagaaacctcacgccatgctgtagtgtttcctgtaatcacacgagcacatttatatatgcagtttcccatggataggcgtgtgaccctggttgagtggcacttgcggtttcatcttggtggcaactcctttgcaatgcagctggcagcgacatccttataaaaacatgtgctaaagctctgtcctctgttagaggtgccttttaggaatacggggagtgaaggaaggccggcaggcatctccatgcaactagatggtttgtttgtttgtttgtttgtttgttgttcattttgttgtgttttttgagacagggtcttgctctgtcgcccaggttgtaatgcagtggcgcaatctcagctcactgcaacctctctctcccgggttcaagtgattctcctgcctcagcctcccaagtagctgggattacaggcacccaccaccatgcctggctaatttttgtatttttggtagagacagggtttcaccatgttggtcaggctagtcttgaactcccaacctcaagtgatctgcccgcctcggcctcccaacgtgctgggattacaggtgtgagccactacgccccggcccaactggatggtttttgattgaagcctagaacatctgtagagacaaactctacccagtcttttctagaccctcaactatctccagtgttgttgtttaatcgtagccggatcagggagtgagtcttttaggcaaatgttggattatatatcaaaggaaaagcttagtttcagagaggaggaagggaaagagatgtgagggaagcatttcatcaaccagctacgtcccccttagaaggatcactgcagcaggtcaccgagcaggagtccctctgagcgtcccttctgtctcgttctgccctagctggcagcatatgaaccaggcatgatgcagcaggagcagtgaatctggagtcagccacttggcaccctggtttcgctgagaacaaactctgagatcttgggtgacttctcatcactctggacctccattcctgtgaagtgacaggtgtggaccctgagggtgcggtggtgagcacactgtctcctgctggcattcaccccactcatgctggaaaggaagatccagatcgtac

SEQ ID NO: 26936 - DNA, 2685 bp, Artificial Sequence
  derived and/or modified sequence
atggagtccacactgagcgccagcaatatgcaggacccttccagctcccctctggagaaatgtctcggatccgcaaacggtaacggggatctcgacagtgaggagggcagcagtctggaagagaccggcttcaactggggcgagtatctggaagaaaccggtgcctctgccgctccgcatacaagtttcaagcatgttgaaatctctatccagtctaattttcaacctggcatgaaactggaagttgcgaataagaataacccagacacttactgggtggccacaattattaccacctgtggccagttactactcttaaggtactgtggctacggagaagacagacgcgcagacttttggtgcgatgtcgtgatcgcagatctgcaccccgtgggttggtgcacacagaacaacaaggtgttgatgcctccggacgcgatcaaggaaaagtacaccgattggaccgaattcctgatccgggatctgaccggctccagaacagcacccgctaatctcctggagggtccactgcggggtaaagggccaatcgatctgattacagtgggctctttaatcgaactccaggattcccagaatccatttcaatactggatcgtttccgtcattgagaatgtgggagggagacttcggctgagatatgtcggtctggaagacaccgaaagctacgatcagtggcttttctaccttgactaccgcctgcgcccagttggatggtgccaagaaaacaagtatcgtatggaccctccctcagagatatatccattgaagatggcatcagagtggaagtgcacactggaaaagtcactgatcgacgccgctaagttccccctcccaatggaggtgtttaaggaccatgccgatttgcggagccactttttcaccgtgggaatgaagctggagacagtcaatatgtgcgaacccttctacatatctcctgcttcagtcacaaaagtgtttaacaaccacttctttcaggtgactattgacgatcttcgtcctgaaccctctaagttgtcaatgctctgccacgcggacagtctgggcatactacctgtgcagtggtgtctgaagaacggcgtgtcactgacccccccaaaaggatactctgggcaagattttgattgggctgactaccacaaacagcatggagctcaggaagccccacccttttgtttccgaaacactagtttcagcagggggttcaccaagaacatgaagctcgaagcagtcaatcccagaaaccctggagaactatgtgtagctagcgtcgtgtccgtgaaaggaagattgatgtggctgcacctagagggactgcagacaccagttcctgaagtgatcgtggacgtagagagcatggatatcttccctgtgggatggtgtgaggccaacagttaccctttgacagcccctcataagacggtttcccagaaaaagcggaagatagccgtggtccagccagaaaaacagctcccaccgacggtgcccgtgaaaaagatcccccatgatctctgcttatttcctcacctcgatacaaccggtaccgtgaatggcaagtattgttgccctcaactatttattaatcacaggtgttttagcggcccatatttaaacaaaggccgtattgcggaattgccccagtctgtgggaccagggaaatgtgtgctggtcctgaaggaggtgctgtcgatgataatcaacgcagcatataaacctggccgtgttctccgcgaactacagctggtagaagacccccattggaactttcaggaggagacactgaaggctaagtacagggggaaaacctatagggcagtcgtgaagattgtcagaacatcagaccaagtggccaatttctgtagacgggtatgcgccaagttggagtgctgccccaacctattcagtcccgttctcatttccgaaaattgccccgagaactgttccattcatactaagacaaagtatacctactactacgggaagcggaaaaaaatcagtaaaccacccatcggcgaatcgaatcccgatagcggccatccaaagcccgctaggcggaggaaaagaaggaaatcaatctttgttcagaaaaagcgcaggagctcggccgtcgacttcaccgccggttccggtgaagaatcagaggaggaagacgcagatgcaatggatgacgacactgcgtccgaagagacaggctccgaacttagggatgaccaaaccgatacgtcgtccgcagaggtgccgtccgccaggcctcgcagagctgtgaccctgcgatccggctccgaaccggtgaggcgccctcctccggagaggacccgccgaggacgcggagccccagcagccagctccgcagaggagggcgaaaaatgccctccaacgaagccagaaggaacagaggatactaagcaggaagaggaagaacgattagtgctggagtctaatcccctggagtggacagtcaccgatgtggtgcgttttatcaagttaacagactgtgcccctctcgccaaaattttccaggaacaggacattgacggtcaggcccttctactgttaaccctgcctactgttcaagaatgcatggaactaaagctgggaccagccatcaaactctgtcatcagattgagagagtgaaagtcgccttttacgcccagtacgccaattag

SEQ ID NO: 26937 - DNA, 483 bp, Artificial Sequence
  derived and/or modified sequence
atggagagcaccctgtccgcttcgaacatgcaagacccttcatcttctcccctggagaaatgcctgggcagcgcaaacggaaacggagacctggacagtgaggagggctccagcttagaagagaccgggttcaattggggagagtacttggaggaaaccggagcctctgcagcccctcacacctctttcaagcacgtcgagatcagcatccagtcaaattttcagcctggaatgaagttggaagtggcgaacaaaaacaaccctgacacgtactgggtcgcgactattattactacttgtggacagctgctgctgctgcgatactgcggttatggcgaggacagaagggccgacttttggtgtgatgtggtgattgccgatcttcacccagtaggctggtgcacccagaataataaggtcctaatgcctccggacgtggagtcagacgtgaaaccttctgccagtgtccaacacattagttag

SEQ ID NO: 26938 - DNA, 561 bp, Artificial Sequence
  derived and/or modified sequence
atggaatcaacactgtccgcatctaacatgcaggatccttcctcctctccactggagaagtgtctagggtccgcgaatggaaatggtgacctggactcagaggagggaagttccctcgaagagactggctttaattggggggagtaccttgaagagaccggagcctctgctgctcctcacacttcatttaagcatgttgagattagtatccaatctaacttccagcccggaatgaagctggaggtcgcgaacaaaaataacccggacacctactgggttgcaacaataattactacatgcggccaattgttgcttcttcgttactgcgggtacggcgaagatcgcagagcagatttctggtgtgatgttgtcatcgccgacctccatcccgtcgggtggtgtactcagaataacaaggtgctgatgccacccgacgctattaaagaaaagtacacagactggacagaatttttaatcagggatttgactggatcgcgcaccgctcctgccaatctgttagaaggtgtgtgtatagttgttatccatttgatgtacctgtag

SEQ ID NO: 26939 - DNA, 483 bp, Artificial Sequence
  derived and/or modified sequence
atggagtccaccttgtctgcttccaacatgcaggatccaagctcgagtcctctcgagaagtgcctcggctccgctaatggaaatggagacctggactctgaagaggggagctctctggaagagacaggcttcaactggggcgagtacctagaagagaccggcgcaagcgccgcaccacacacctctttcaagcatgtggagatcagcattcaaagcaacttccaacctggcatgaaattggaggtggcaaacaagaataaccccgacacctattgggttgccaccatcattacaacctgtggccagctgctacttctgaggtactgcggttacggggaggatcgtagagcagatttctggtgtgatgtggtcattgccgacctgcaccccgtgggatggtgcacacagaacaataaggtgcttatgccgccagacgtggagtcagatgtcaagcccagcgcgtccgtgcagcacatctcctag

SEQ ID NO: 26940 - DNA, 2685 bp, Artificial Sequence
  derived and/or modified sequence
atggagagtaccttaagcgcaagcaatatgcaggacccctctagcagcccactggaaaaatgtcttgggtctgcaaatgggaacggagatctggattcagaggaaggaagttccttagaagagaccgggtttaattggggagagtacctggaggaaaccggcgcttcagctgcccctcatacaagctttaaacacgtggagatctctatccagagtaatttccagcccggaatgaagttagaggtggccaataagaataacccggatacttattgggtggctactattattacgacctgcgggcagctactgctgctgcggtactgtggatatggggaagacaggagagccgatttttggtgtgatgtcgtgatcgcggatctgcatccagttggttggtgcactcagaacaataaggtgctcatgccaccagatgccattaaggagaagtacacagattggactgagttccttattagagatctgaccggcagccggacggctcccgcaaacttgctggagggcccactccgagggaaagggcctattgaccttatcactgtgggctctctgattgaacttcaagatagtcaaaacccgtttcagtattggatagtttccgttatagagaacgtgggtggcagactgcgacttaggtatgtcggtctggaggatactgagagttacgaccagtggctcttttacttggactaccgactccgccctgtcggctggtgtcaggaaaataaataccgcatggatccaccttctgagatctacccgttgaaaatggcctctgaatggaagtgcactctcgagaagtcactgatagatgccgcaaaatttccgctccccatggaggttttcaaggaccacgctgacctgcgcagtcactttttcacagtcggaatgaagttagagactgtcaacatgtgcgaacccttctacatttccccagcgagtgtcaccaaggttttcaataaccacttcttccaggtgaccatcgacgatcttaggcccgagccgtcaaagctgagtatgttatgtcacgctgacagtcttggcatcctgcccgttcagtggtgtcttaaaaatggtgtctctctaacacctcctaaaggatattccggtcaggatttcgactgggccgattaccacaagcaacatggagcccaggaagctccccctttctgttttagaaatacaagcttttcgcgcggttttacaaagaatatgaaactggaagccgtcaatccaaggaaccctggagagctatgcgtcgcctcagtcgtatccgttaaggggaggctgatgtggctgcacctggaggggttacagactccagtgccggaagtgatcgttgacgttgagagtatggatattttcccggtaggatggtgcgaagcaaactcctacccactgaccgctccccacaaaaccgtgtctcagaagaagagaaaaatcgcagttgtgcagccagaaaaacagttacctcccacggtgccagtgaagaaaatcccccacgacctgtgcttgtttccacacttagacaccaccggtactgtcaatggcaagtactgctgtccacagttattcatcaaccacagatgtttctccggaccctacctcaacaaaggaaggatcgccgaacttccccagagtgtggggcctggaaagtgcgtacttgtcctgaaggaggtcctgtctatgattattaacgccgcttacaaacccggacgtgtgttgcgcgagctgcaactggtggaggaccctcactggaactttcaggaagaaactttaaaggcaaaatatagggggaaaacttaccgagccgtcgtcaagatcgtgagaacaagcgaccaggttgccaatttttgcaggcgggtgtgtgctaagctcgaatgctgtccaaatctcttcagcccagttcttatttccgagaattgccccgagaattgcagtatacataccaagactaaatatacgtattattacgggaaaagaaagaaaataagcaagccccctataggcgaatcaaacccggactccggccatcctaagcctgcacgccgtcgcaaacggaggaaatcaatcttcgtgcagaagaagagacgcagctcggcagtggacttcacagctggctcaggagaggaatccgaagaagaggacgcagatgccatggatgatgacaccgcctccgaagagaccgggagtgaactccgggacgatcagacggatacatcgtccgccgaagtgcccagcgctagacctcgcagagccgtaaccttacggtcgggttcagagccagtccggaggccaccacccgaacgcacaaggcggggtagaggggctcctgccgctagctccgcggaagaaggtgagaagtgtcctcccacaaaacctgaggggacagaggataccaagcaggaggaggaagaacgactggtcctggaaagtaatcctttagagtggacagtcacggacgtggtccgctttattaagttgactgattgcgcccctctcgccaagatcttccaagagcaggatatcgatggacaggctctgctcctccttaccctgccaaccgtgcaagagtgtatggagttaaagttgggcccagctattaaactgtgtcaccaaatagaaagagtgaaggttgccttctatgctcagtacgccaactag

SEQ ID NO: 26941 - DNA, 2685 bp, Artificial Sequence
  derived and/or modified sequence
atggagagcaccctgagcgccagcaacatgcaggaccccagcagcagccccctggagaagtgcctgggcagcgccaacggcaacggcgacctggacagcgaggagggcagcagcctggaggagaccggcttcaactggggcgagtacctggaggagaccggcgccagcgccgccccccacaccagcttcaagcacgtggagatcagcatccagagcaacttccagcccggcatgaagctggaggtggccaacaagaacaaccccgacacctactgggtggccaccatcatcaccacctgcggccagctgctgctgctgagatactgcggctacggcgaggacagaagagccgacttctggtgcgacgtggtgatcgccgacctgcaccccgtgggctggtgcacccagaacaacaaggtgctgatgccccccgacgccatcaaggagaagtacaccgactggaccgagttcctgatcagagacctgaccggcagcagaaccgcccccgccaacctgctggagggccccctgagaggcaagggccccatcgacctgatcaccgtgggcagcctgatcgagctgcaggacagccagaaccccttccagtactggatcgtgagcgtgatcgagaacgtgggcggcagactgagactgagatacgtgggcctggaggacaccgagagctacgaccagtggctgttctacctggactacagactgagacccgtgggctggtgccaggagaacaagtacagaatggacccccccagcgagatctaccccctgaagatggccagcgagtggaagtgcaccctggagaagagcctgatcgacgccgccaagttccccctgcccatggaggtgttcaaggaccacgccgacctgagaagccacttcttcaccgtgggcatgaagctggagaccgtgaacatgtgcgagcccttctacatcagccccgccagcgtgaccaaggtgttcaacaaccacttcttccaggtgaccatcgacgacctgagacccgagcccagcaagctgagcatgctgtgccacgccgacagcctgggcatcctgcccgtgcagtggtgcctgaagaacggcgtgagcctgaccccccccaagggctacagcggccaggacttcgactgggccgactaccacaagcagcacggcgcccaggaggccccccccttctgcttcagaaacaccagcttcagcagaggcttcaccaagaacatgaagctggaggccgtgaaccccagaaaccccggcgagctgtgcgtggccagcgtggtgagcgtgaagggcagactgatgtggctgcacctggagggcctgcagacccccgtgcccgaggtgatcgtggacgtggagagcatggacatcttccccgtgggctggtgcgaggccaacagctaccccctgaccgccccccacaagaccgtgagccagaagaagagaaagatcgccgtggtgcagcccgagaagcagctgccccccaccgtgcccgtgaagaagatcccccacgacctgtgcctgttcccccacctggacaccaccggcaccgtgaacggcaagtactgctgcccccagctgttcatcaaccacagatgcttcagcggcccctacctgaacaagggcagaatcgccgagctgccccagagcgtgggccccggcaagtgcgtgctggtgctgaaggaggtgctgagcatgatcatcaacgccgcctacaagcccggcagagtgctgagagagctgcagctggtggaggacccccactggaacttccaggaggagaccctgaaggccaagtacagaggcaagacctacagagccgtggtgaagatcgtgagaaccagcgaccaggtggccaacttctgcagaagagtgtgcgccaagctggagtgctgccccaacctgttcagccccgtgctgatcagcgagaactgccccgagaactgcagcatccacaccaagaccaagtacacctactactacggcaagagaaagaagatcagcaagccccccatcggcgagagcaaccccgacagcggccaccccaagcccgccagaagaagaaagagaagaaagagcatcttcgtgcagaagaagagaagaagcagcgccgtggacttcaccgccggcagcggcgaggagagcgaggaggaggacgccgacgccatggacgacgacaccgccagcgaggagaccggcagcgagctgagagacgaccagaccgacaccagcagcgccgaggtgcccagcgccagacccagaagagccgtgaccctgagaagcggcagcgagcccgtgagaagacccccccccgagagaaccagaagaggcagaggcgcccccgccgccagcagcgccgaggagggcgagaagtgcccccccaccaagcccgagggcaccgaggacaccaagcaggaggaggaggagagactggtgctggagagcaaccccctggagtggaccgtgaccgacgtggtgagattcatcaagctgaccgactgcgcccccctggccaagatcttccaggagcaggacatcgacggccaggccctgctgctgctgaccctgcccaccgtgcaggagtgcatggagctgaagctgggccccgccatcaagctgtgccaccagatcgagagagtgaaggtggccttctacgcccagtacgccaactag

SEQ ID NO: 26942 - DNA, 483 bp, Artificial Sequence
  derived and/or modified sequence
atggagagcaccctgagcgccagcaacatgcaggaccccagcagcagccccctggagaagtgcctgggcagcgccaacggcaacggcgacctggacagcgaggagggcagcagcctggaggagaccggcttcaactggggcgagtacctggaggagaccggcgccagcgccgccccccacaccagcttcaagcacgtggagatcagcatccagagcaacttccagcccggcatgaagctggaggtggccaacaagaacaaccccgacacctactgggtggccaccatcatcaccacctgcggccagctgctgctgctgagatactgcggctacggcgaggacagaagagccgacttctggtgcgacgtggtgatcgccgacctgcaccccgtgggctggtgcacccagaacaacaaggtgctgatgccccccgacgtggagagcgacgtgaagcccagcgccagcgtgcagcacatcagctag

SEQ ID NO: 26943 - DNA, 561 bp, Artificial Sequence
  derived and/or modified sequence
atggagagcaccctgagcgccagcaacatgcaggaccccagcagcagccccctggagaagtgcctgggcagcgccaacggcaacggcgacctggacagcgaggagggcagcagcctggaggagaccggcttcaactggggcgagtacctggaggagaccggcgccagcgccgccccccacaccagcttcaagcacgtggagatcagcatccagagcaacttccagcccggcatgaagctggaggtggccaacaagaacaaccccgacacctactgggtggccaccatcatcaccacctgcggccagctgctgctgctgagatactgcggctacggcgaggacagaagagccgacttctggtgcgacgtggtgatcgccgacctgcaccccgtgggctggtgcacccagaacaacaaggtgctgatgccccccgacgccatcaaggagaagtacaccgactggaccgagttcctgatcagagacctgaccggcagcagaaccgcccccgccaacctgctggagggcgtgtgcatcgtggtgatccacctgatgtacctgtag

SEQ ID NO: 26944 - protein, 317 aa, Artificial Sequence
  derived and/or modified sequence
MRFRFGVVVPPAVAGARPELLVVGSRPELGRWEPRGAVRLRPAGTAAGDGALALQEPGLWLGEVELAAEEAAQDGAEPGRVDTFWYKFLKREPGGELSWEGNGPHHDRCCTYNENNLVDGVYCLPIGHWIEATGHTNEMKHTTDFYFNIAGHQAMHYSRILPNIWLGSCPRQVEHVTIKLKHELGITAVMNFQTEWDIVQNSSGCNRYPEPMTPDTMIKLYREEGLAYIWMPTPDMSTEGRVQMLPQAVCLLHALLEKGHIVYVHCNAGVGRSTAAVCGWLQYVMGWNLRKVQYFLMAKRPAVYIDEEAASQDTFPL

SEQ ID NO: 26945 - protein, 237 aa, Artificial Sequence
  derived and/or modified sequence
  misc_feature (1)..(1): Xaa can be any naturally occurring amino acid
XDTFWYKFLKREPGGELSWEGNGPHHDRCCTYNENNLVDGVYCLPIGHWIEATGHTNEMKHTTDFYFNIAGHQAMHYSRILPNIWLGSCPRQVEHVTIKLKHELGITAVMNFQTEWDIVQNSSGCNRYPEPMTPDTMIKLYREEGLAYIWMPTPDMSTEGRVQMLPQAVCLLHALLEKGHIVYVHCNAGVGRSTAAVCGWLQYVMGWNLRKVQYFLMAKRPAVYIDEEAASQDTFPL

SEQ ID NO: 26946 - DNA, 954 bp, Artificial Sequence
  derived and/or modified sequence
atgaggttccggtttggcgtcgttgttcccccggcagtggcaggcgcccgccctgagctactcgtggtggggtcaagaccagagctggggagatgggagccgagaggcgcagtccgtctgcgccctgcaggcactgctgccggggacggtgcattggctctccaagagcccgggctgtggctcggcgaagtggaacttgccgcggaggaggccgcgcaagatggggctgagcccggaagggtcgacacattctggtataagttccttaagcgcgaacccggcggcgagctgagctgggaaggaaacgggccacatcatgaccggtgttgcacttataacgaaaacaatcttgtcgacggcgtctactgtctgccgatcgggcactggattgaggcaactggccacactaatgagatgaaacacacaacagacttctactttaacatcgccgggcaccaagccatgcattattcccggatactgccaaatatctggctgggaagctgtccccgtcaagtggagcacgtgacgattaagctcaaacacgagctgggaatcactgccgtaatgaactttcagacagagtgggatatagtgcagaacagctctggctgcaaccgctatccagagcctatgacgcccgacacgatgataaaactttatcgtgaagagggtctggcttatatttggatgccgactccggacatgtccaccgagggcagggtccaaatgcttcctcaggctgtgtgcctgctgcatgcgctgttagaaaagggacacatagtttatgttcactgcaatgctggggttggtcgcagtacagccgccgtgtgtggatggctgcagtacgtaatgggatggaatctccgcaaagttcaatatttcctcatggccaagaggcccgcggtatacattgatgaagaggccgcatcccaggacaccttccctctgtag

SEQ ID NO: 26947 - DNA, 714 bp, Artificial Sequence
  derived and/or modified sequence
tgagatacattttggtacaaattcttaaagcgtgagcccggcggcgagctgtcctgggaaggaaatgggccacaccacgatagatgctgtacctataacgagaataatttggtagatggagtgtattgcctgcctatcggccattggatcgaggctacaggccacacaaatgaaatgaaacacaccactgacttttatttcaatatagctggtcaccaggccatgcactattcccgcatcctgcccaacatctggctgggatcctgccctcgacaggtggaacacgtgaccattaaactaaaacatgagctcggaatcaccgccgtcatgaacttccaaaccgagtgggatatcgtgcagaacagtagtggctgcaatcggtatcctgagcctatgaccccagacacaatgatcaagctctaccgggaggaggggcttgcttacatttggatgcctactccagatatgtccaccgaaggccgagtgcagatgctaccgcaggcggtgtgcttgttgcatgctctgttggaaaagggacatattgtctacgtgcactgcaacgccggggtgggcaggagcactgccgctgtgtgcggttggctgcagtacgttatgggctggaatctgcgaaaagtgcagtatttcctcatggcaaagcgacctgccgtgtatattgacgaggaggccgcctctcaggataccttccccctgtag

SEQ ID NO: 26948 - DNA, 954 bp, Artificial Sequence
  derived and/or modified sequence
atgaggttccgctttggagtggtggtgcccccagctgtggccggggcccggcctgagctgctggtggtgggcagcaggcctgagctgggccgctgggagcccagaggagctgtgcggctgcggcctgctggaacagctgctggagatggagccctggccctgcaggagcccggcctgtggctgggggaggtggagctggccgctgaggaggccgcccaggatggagctgagcccggccgggtggacaccttctggtacaagttcctgaagcgggagcctggaggagagctgtcctgggagggcaatggcccccaccacgaccgctgctgcacctacaatgaaaacaacctggtggatggagtgtactgcctgcccatcggccactggattgaggccaccggccacaccaatgagatgaagcacaccacagacttctacttcaacattgctggccaccaggccatgcactacagccgcatcctgcccaacatctggctgggcagctgcccccggcaggtggagcacgtgaccatcaagctgaagcatgagctgggcatcacagctgtgatgaacttccagacagagtgggacatcgtgcagaacagcagcggctgcaaccgctacccagagcccatgaccccagacaccatgatcaagctgtaccgggaggagggcctggcctacatctggatgcccaccccagacatgagcacagagggccgggtgcagatgctgccccaggccgtgtgcctgctgcacgccctgctggagaagggccacatcgtgtatgtgcactgcaatgctggggtgggccgcagcacagctgctgtgtgtggctggctgcagtatgtgatgggctggaacctgaggaaggtgcagtacttcctgatggccaagaggcctgctgtgtacattgatgaggaggccgccagccaggacaccttccccctgtag

SEQ ID NO: 26949 - DNA, 714 bp, Artificial Sequence
  derived and/or modified sequence
tgagacaccttctggtacaagttcctgaagcgggagcctggaggagagctgtcctgggagggcaatggcccccaccacgaccgctgctgcacctacaatgaaaacaacctggtggatggagtgtactgcctgcccatcggccactggattgaggccaccggccacaccaatgagatgaagcacaccacagacttctacttcaacattgctggccaccaggccatgcactacagccgcatcctgcccaacatctggctgggcagctgcccccggcaggtggagcacgtgaccatcaagctgaagcatgagctgggcatcacagctgtgatgaacttccagacagagtgggacatcgtgcagaacagcagcggctgcaaccgctacccagagcccatgaccccagacaccatgatcaagctgtaccgggaggagggcctggcctacatctggatgcccaccccagacatgagcacagagggccgggtgcagatgctgccccaggccgtgtgcctgctgcacgccctgctggagaagggccacatcgtgtatgtgcactgcaatgctggggtgggccgcagcacagctgctgtgtgtggctggctgcagtatgtgatgggctggaacctgaggaaggtgcagtacttcctgatggccaagaggcctgctgtgtacattgatgaggaggccgccagccaggacaccttccccctgtag

SEQ ID NO: 26950 - DNA, 954 bp, Artificial Sequence
  derived and/or modified sequence
atgcggttccggttcggcgtggtggtgccccccgccgtggccggcgcccgacccgagcttcttgtggtcgggagtcgccctgaattaggccgatgggagcctagaggtgccgtaagacttagacctgccggcaccgctgcgggggatggagcgctggccctgcaggaacccgggttgtggttaggcgaagtggaactcgctgccgaagaagccgctcaggacggcgctgagcccgggcgggtggacaccttctggtacaagtttctaaaacgagagccggggggagagctctcttgggagggcaatgggccacaccacgaccggtgttgtacctataacgaaaacaacctggttgacggcgtgtactgtcttcccatcggccactggatagaagccactgggcatacgaatgaaatgaagcacaccaccgatttttattttaacatcgcgggacaccaggcgatgcattattctcggatcctgccaaacatttggctcggatcatgcccccgacaggtcgagcatgtgacaatcaagctgaagcacgaactaggtatcacagcagttatgaacttccagactgagtgggacattgtacagaattcatccggatgtaatcggtacccggaacccatgacccccgatacaatgatcaagctgtacagagaagagggactggcttacatttggatgcccacgcccgatatgtcaacagaaggcagggttcaaatgctgccccaggctgtgtgtctcctgcacgcattgttagagaaaggtcatatagtgtacgtccattgcaatgcgggcgtggggaggagcacagccgccgtgtgcgggtggctacagtacgtgatggggtggaacttgcgtaaggtacagtatttcctgatggctaagcgtcctgcagtctacatcgacgaggaggccgcttcccaggacacctttcctctctag

SEQ ID NO: 26951 - DNA, 714 bp, Artificial Sequence
  derived and/or modified sequence
tgagacaccttctggtacaagttcctgaagcgggagcccggcggcgagctttcttgggagggaaatggaccccaccatgacagatgctgcacttacaacgaaaacaacctcgtcgacggcgtctactgtctgcctattggccattggattgaggcaactggccatacaaatgagatgaagcatacaaccgacttctacttcaatatcgcagggcaccaggccatgcactacagtcgcatcctgccaaatatctggctgggatcctgccccagacaggtcgaacacgtgactattaaactcaagcatgagctcggaataacagcagtgatgaacttccagactgaatgggatattgtccagaattcgtcaggctgtaatcgctaccccgagcctatgactcctgataccatgataaaactgtaccgcgaggaagggcttgcctacatttggatgcctacccccgacatgagtacggaagggcgagtgcagatgctgccgcaggcagtgtgcttgctccatgccctcctggagaagggccacatcgtttatgtgcactgcaatgcgggtgtggggaggagtactgcagccgtctgcgggtggctgcagtatgtcatgggatggaacctccgcaaagtgcagtatttcctgatggccaagaggccagccgtatacattgatgaagaggctgcttctcaagatactttccctctttag

SEQ ID NO: 26952 - DNA, 954 bp, Artificial Sequence
  derived and/or modified sequence
atgagatttcgcttcggagtggtggtgcctcccgcagtcgctggagccagaccagagctcctggtggtgggcagccgcccagagctcggtagatgggagccccgtggggcagtgaggctgagaccggctggcaccgccgctggcgacggcgcattagcactacaggagccaggcctgtggctgggggaagtggaattagccgctgaagaagctgctcaagacggagctgagcctggcagagtagacacattttggtataagtttcttaagcgggagccgggaggcgaattgagctgggaagggaatggtccacatcatgacagatgctgcacctataatgaaaacaatctcgtagacggcgtctattgcctgccaatcgggcactggatagaagccactggacacactaatgaaatgaagcatacaaccgatttttactttaatatcgcaggtcatcaggcaatgcattactccagaattctcccaaacatctggctcggctcttgccccaggcaagttgagcacgtgaccattaaattaaagcatgagcttgggattacggccgtcatgaatttccagaccgagtgggacatcgtgcagaattcctccgggtgcaataggtatcctgagcctatgacacccgacaccatgatcaaactctacagggaagaaggcctcgcttacatttggatgcccactccagatatgagcaccgaaggacgggtgcaaatgttgcctcaggctgtatgtctcctgcatgctctgctggagaagggacatatcgtgtacgtgcactgcaacgccggagtgggcagaagtactgcggcagtgtgcggctggctgcaatatgtgatgggctggaatctccgcaaggtgcagtattttctgatggcaaaacgacctgccgtatatatcgatgaggaagctgctagccaggacacatttccgctgtag

SEQ ID NO: 26953 - DNA, 714 bp, Artificial Sequence
  derived and/or modified sequence
taggacacattctggtataagttcctaaaaagagagcccggaggggagctcagctgggaggggaatgggcctcaccacgatagatgctgtacctacaatgaaaacaatctcgtggacggagtgtattgtctcccaattggacattggattgaggccaccggacacacaaatgagatgaaacatacaacagacttctattttaatatcgctgggcaccaggcgatgcactacagccgcattctgccaaacatttggctgggaagctgtcctcggcaggtggagcatgtgacaatcaagcttaagcacgaattggggataacggcagtcatgaattttcagaccgagtgggatatcgttcaaaatagctccggatgtaataggtatccagagcccatgactcccgataccatgattaaactctacagagaggaggggctagcatatatatggatgcctacccctgatatgtccacagaaggcagggttcagatgctcccacaggcagtgtgtctattgcatgccctacttgagaaaggacatatcgtgtacgtccattgcaatgctggcgtgggacggtcgaccgcagcagtatgcggctggctgcagtacgtcatggggtggaacctacggaaggttcagtacttccttatggcaaagaggcccgctgtttatatcgacgaggaggccgcatcgcaggatacttttcccctttag

SEQ ID NO: 26954 - DNA, 954 bp, Artificial Sequence
  derived and/or modified sequence
atgagattcagattcggcgtggtggtgccccccgccgtggccggcgccagacccgagctgctggtggtgggcagcagacccgagctgggcagatgggagcccagaggcgccgtgagactgagacccgccggcaccgccgccggcgacggcgccctggccctgcaggagcccggcctgtggctgggcgaggtggagctggccgccgaggaggccgcccaggacggcgccgagcccggcagagtggacaccttctggtacaagttcctgaagagagagcccggcggcgagctgagctgggagggcaacggcccccaccacgacagatgctgcacctacaacgagaacaacctggtggacggcgtgtactgcctgcccatcggccactggatcgaggccaccggccacaccaacgagatgaagcacaccaccgacttctacttcaacatcgccggccaccaggccatgcactacagcagaatcctgcccaacatctggctgggcagctgccccagacaggtggagcacgtgaccatcaagctgaagcacgagctgggcatcaccgccgtgatgaacttccagaccgagtgggacatcgtgcagaacagcagcggctgcaacagataccccgagcccatgacccccgacaccatgatcaagctgtacagagaggagggcctggcctacatctggatgcccacccccgacatgagcaccgagggcagagtgcagatgctgccccaggccgtgtgcctgctgcacgccctgctggagaagggccacatcgtgtacgtgcactgcaacgccggcgtgggcagaagcaccgccgccgtgtgcggctggctgcagtacgtgatgggctggaacctgagaaaggtgcagtacttcctgatggccaagagacccgccgtgtacatcgacgaggaggccgccagccaggacaccttccccctgtag

SEQ ID NO: 26955 - DNA, 714 bp, Artificial Sequence
  derived and/or modified sequence
tgagacaccttctggtacaagttcctgaagagagagcccggcggcgagctgagctgggagggcaacggcccccaccacgacagatgctgcacctacaacgagaacaacctggtggacggcgtgtactgcctgcccatcggccactggatcgaggccaccggccacaccaacgagatgaagcacaccaccgacttctacttcaacatcgccggccaccaggccatgcactacagcagaatcctgcccaacatctggctgggcagctgccccagacaggtggagcacgtgaccatcaagctgaagcacgagctgggcatcaccgccgtgatgaacttccagaccgagtgggacatcgtgcagaacagcagcggctgcaacagataccccgagcccatgacccccgacaccatgatcaagctgtacagagaggagggcctggcctacatctggatgcccacccccgacatgagcaccgagggcagagtgcagatgctgccccaggccgtgtgcctgctgcacgccctgctggagaagggccacatcgtgtacgtgcactgcaacgccggcgtgggcagaagcaccgccgccgtgtgcggctggctgcagtacgtgatgggctggaacctgagaaaggtgcagtacttcctgatggccaagagacccgccgtgtacatcgacgaggaggccgccagccaggacaccttccccctgtag

SEQ ID NO: 26956 - DNA, 1694 bp, Artificial Sequence
  derived and/or modified sequence
gagaactggacgatcgcctggcttagaagttttcctccctccccgaaccccgttttctcttccatttcttccggtcgcgtgtccccagcgcccacaggtggaaatcaaccgcccgcggggttgcggggcacaaagaggcagctagcggctccgctgaccccttcccgccggcctggacgaagtctgggctcgggagccgcgtgatgcatcccaaagaaggcgcagaacagcacgtgttctccccggtgcccggggctcccacaccaccgcccaatcgctgcggccgcctagtgctcgggccgcgcctgccggccgcggggactccgggcccgggtattcgcgccgccgccgcccgccatgcgcttccgctttggggtggtggtgccacccgccgtggccggcgcccggccggagctgctggtggtggggtcgcggcccgagctggggcgttgggagccgcgcggtgccgtccgcctgaggccggccggcaccgcggcgggcgacggggccctggccctgcaggagccgggcctgtggctcggggaggtggagctggcggccgaggaggcggcgcaggacggggcggagccgggccgcgtggacacgttctggtacaagttcctgaagcgggagccgggaggagagctctcctgggaaggcaatggacctcatcatgaccgttgctgtacttacaatgaaaacaacttggtggatggtgtgtattgtctcccaataggacactggattgaggccactgggcacaccaatgaaatgaagcacacaacagacttctattttaatattgcaggccaccaagccatgcattattcaagaattctaccaaatatctggctgggtagctgccctcgtcaggtggaacatgtaaccatcaaactgaagcatgaattggggattacagctgtaatgaatttccagactgaatgggatattgtacagaattcctcaggctgtaaccgctacccagagcccatgactccagacactatgattaaactatatagggaagaaggcttggcctacatctggatgccaacaccagatatgagcaccgaaggccgagtacagatgctgccccaggcggtgtgcctgctgcatgcgctgctggagaagggacacatcgtgtacgtgcactgcaacgctggggtgggccgctccaccgcggctgtctgcggctggctccagtatgtgatgggctggaatctgaggaaggtgcagtatttcctcatggccaagaggccggctgtctacattgacgaagaggcagctagccaggacacatttccactataattttacaaagttaaatttataagctagcattaagtaaagtgaagtccagctcccttgctaaaaataactagaggtaataattggtattcaggtaactcatttacagtcataatgtgttgtgaaaatttaatcttaaaaattaaatttttaaactatgtgggtctgtgaatttctttaatgtctaagaaatccagcttcataatttccatgatacaaagatcttttttcaggtggatttttacctttgttccttttgctctgatagacaaaatcagtttaggactattaaagaatgttttggaataaactgtctttttcctcaatgaatgggatgtctaatgtatttcaaaatcacccaaaacttttggcaaataaaagcattt

SEQ ID NO: 26957 - DNA, 1037 bp, Artificial Sequence
  derived and/or modified sequence
tggacacgttctggtacaagttcctgaagcgggagccgggaggagagctctcctgggaaggcaatggacctcatcatgaccgttgctgtacttacaatgaaaacaacttggtggatggtgtgtattgtctcccaataggacactggattgaggccactgggcacaccaatgaaatgaagcacacaacagacttctattttaatattgcaggccaccaagccatgcattattcaagaattctaccaaatatctggctgggtagctgccctcgtcaggtggaacatgtaaccatcaaactgaagcatgaattggggattacagctgtaatgaatttccagactgaatgggatattgtacagaattcctcaggctgtaaccgctacccagagcccatgactccagacactatgattaaactatatagggaagaaggcttggcctacatctggatgccaacaccagatatgagcaccgaaggccgagtacagatgctgccccaggcggtgtgcctgctgcatgcgctgctggagaagggacacatcgtgtacgtgcactgcaacgctggggtgggccgctccaccgcggctgtctgcggctggctccagtatgtgatgggctggaatctgaggaaggtgcagtatttcctcatggccaagaggccggctgtctacattgacgaagaggcagctagccaggacacatttccactataattttacaaagttaaatttataagctagcattaagtaaagtgaagtccagctcccttgctaaaaataactagaggtaataattggtattcaggtaactcatttacagtcataatgtgttgtgaaaatttaatcttaaaaattaaatttttaaactatgtgggtctgtgaatttctttaatgtctaagaaatccagcttcataatttccatgatacaaagatcttttttcaggtggatttttacctttgttccttttgctctgatagacaaaatcagtttaggactattaaagaatgttttggaataaactgtctttttcctcaat

SEQ ID NO: 26958 - protein, 1215 aa, Artificial Sequence
  derived and/or modified sequence
MSSMPKPERHAESLLDICHDTNSSPTDLMTVTKNQNIILQSISRSEEFDQDGDCSHSTLVNEEEDPSGGRQDWQPRTEEFSTSHMKYSGRSIKFLLPPLSLLPTRSGVLTIPQNHKFPKEKERNIPSLTSFVPKLSVSVRQSDELSPSNEPPGALVKSLMDPTLRSSDGFIWSRNMCSFPKTNHHRQCLEKEENWKSKEIEECNKIEITHFEKGQSLVSFENLKEGNIPAVREEDIDCHGSKTRKPEEENSQYLSSRKNESSVAKNYEQDPEIVCTIPSKFQETQHSEITPSQDEEMRNNKAASKRVSLHKNEAMEPNNILEECTVLKSLSSVVFDDPIDKLPEGCSSMETNIKISIAERAKPEMSRMVPLIHITFPVDGSPKEPVIAKPSLQTRKGTIHNNHSVNIPVHQENDKHKMNSHRSKLDSKTKTSKKTPQNFVISTEGPIKPTMHKTSIKTQIFPALGLVDPRPWQLPRFQKKMPQIAKKQSTHRTQKPKKQSFPCICKNPGTQKSCVPLSVQPTEPRLNYLDLKYSDMFKEINSTANGPGIYEMFGTPVYCHVRETERDENTYYREICSAPSGRRITNKCRSSHSERKSNIRTRLSQKKTHMKCPKTSFGIKQEHKVLISKEKSSKAVHSNLHDIENGDGISEPDWQIKSSGNEFLSSKDEIHPMNLAQTPEQSMKQNEFPPVSDLSIVEEVSMEESTGDRDISNNQILTTSLRDLQELEELHHQIPFIPSEDSWAVPSEKNSNKYVQQEKQNTASLSKVNASRILTNDLEFDSVSDHSKTLTNFSFQAKQESASSQTYQYWVHYLDHDSLANKSITYQMFGKTLSGTNSISQEIMDSVNNEELTDELLGCLAAELLALDEKDNNSCQKMANETDPENLNLVLRWRGSTPKEMGRETTKVKIQRHSSGLRIYDREEKFLISNEKKIFSENSLKSEEPILWTKGEILGKGAYGTVYCGLTSQGQLIAVKQVALDTSNKLAAEKEYRKLQEEVDLLKALKHVNIVAYLGTCLQENTVSIFMEFVPGGSISSIINRFGPLPEMVFCKYTKQILQGVAYLHENCVVHRDIKGNNVMLMPTGIIKLIDFGCARRLAWAGLNGTHSDMLKSMHGTPYWMAPEVINESGYGRKSDIWSIGCTVFEMATGKPPLASMDRMAAMFYIGAHRGLMPPLPDHFSENAADFVRMCLTRDQHERPSALQLLKHSFLERSH

SEQ ID NO: 26959 - DNA, 3648 bp, Artificial Sequence
  derived and/or modified sequence
atgagcagcatgcccaagcccgagagacacgccgagagcctgctggacatctgccacgacaccaacagcagccccaccgacctgatgaccgtgaccaagaaccagaacatcatcctgcagagcatcagcagaagcgaggagttcgaccaggacggcgactgcagccacagcaccctggtgaacgaggaggaggaccccagcggcggcagacaggactggcagcccagaaccgaggagttcagcaccagccacatgaagtacagcggcagaagcatcaagttcctgctgccccccctgagcctgctgcccaccagaagcggcgtgctgaccatcccccagaaccacaagttccccaaggagaaggagagaaacatccccagcctgaccagcttcgtgcccaagctgagcgtgagcgtgagacagagcgacgagctgagccccagcaacgagccccccggcgccctggtgaagagcctgatggaccccaccctgagaagcagcgacggcttcatctggagcagaaacatgtgcagcttccccaagaccaaccaccacagacagtgcctggagaaggaggagaactggaagagcaaggagatcgaggagtgcaacaagatcgagatcacccacttcgagaagggccagagcctggtgagcttcgagaacctgaaggagggcaacatccccgccgtgagagaggaggacatcgactgccacggcagcaagaccagaaagcccgaggaggagaacagccagtacctgagcagcagaaagaacgagagcagcgtggccaagaactacgagcaggaccccgagatcgtgtgcaccatccccagcaagttccaggagacccagcacagcgagatcacccccagccaggacgaggagatgagaaacaacaaggccgccagcaagagagtgagcctgcacaagaacgaggccatggagcccaacaacatcctggaggagtgcaccgtgctgaagagcctgagcagcgtggtgttcgacgaccccatcgacaagctgcccgagggctgcagcagcatggagaccaacatcaagatcagcatcgccgagagagccaagcccgagatgagcagaatggtgcccctgatccacatcaccttccccgtggacggcagccccaaggagcccgtgatcgccaagcccagcctgcagaccagaaagggcaccatccacaacaaccacagcgtgaacatccccgtgcaccaggagaacgacaagcacaagatgaacagccacagaagcaagctggacagcaagaccaagaccagcaagaagaccccccagaacttcgtgatcagcaccgagggccccatcaagcccaccatgcacaagaccagcatcaagacccagatcttccccgccctgggcctggtggaccccagaccctggcagctgcccagattccagaagaagatgccccagatcgccaagaagcagagcacccacagaacccagaagcccaagaagcagagcttcccctgcatctgcaagaaccccggcacccagaagagctgcgtgcccctgagcgtgcagcccaccgagcccagactgaactacctggacctgaagtacagcgacatgttcaaggagatcaacagcaccgccaacggccccggcatctacgagatgttcggcacccccgtgtactgccacgtgagagagaccgagagagacgagaacacctactacagagagatctgcagcgcccccagcggcagaagaatcaccaacaagtgcagaagcagccacagcgagagaaagagcaacatcagaaccagactgagccagaagaagacccacatgaagtgccccaagaccagcttcggcatcaagcaggagcacaaggtgctgatcagcaaggagaagagcagcaaggccgtgcacagcaacctgcacgacatcgagaacggcgacggcatcagcgagcccgactggcagatcaagagcagcggcaacgagttcctgagcagcaaggacgagatccaccccatgaacctggcccagacccccgagcagagcatgaagcagaacgagttcccccccgtgagcgacctgagcatcgtggaggaggtgagcatggaggagagcaccggcgacagagacatcagcaacaaccagatcctgaccaccagcctgagagacctgcaggagctggaggagctgcaccaccagatccccttcatccccagcgaggacagctgggccgtgcccagcgagaagaacagcaacaagtacgtgcagcaggagaagcagaacaccgccagcctgagcaaggtgaacgccagcagaatcctgaccaacgacctggagttcgacagcgtgagcgaccacagcaagaccctgaccaacttcagcttccaggccaagcaggagagcgccagcagccagacctaccagtactgggtgcactacctggaccacgacagcctggccaacaagagcatcacctaccagatgttcggcaagaccctgagcggcaccaacagcatcagccaggagatcatggacagcgtgaacaacgaggagctgaccgacgagctgctgggctgcctggccgccgagctgctggccctggacgagaaggacaacaacagctgccagaagatggccaacgagaccgaccccgagaacctgaacctggtgctgagatggagaggcagcacccccaaggagatgggcagagagaccaccaaggtgaagatccagagacacagcagcggcctgagaatctacgacagagaggagaagttcctgatcagcaacgagaagaagatcttcagcgagaacagcctgaagagcgaggagcccatcctgtggaccaagggcgagatcctgggcaagggcgcctacggcaccgtgtactgcggcctgaccagccagggccagctgatcgccgtgaagcaggtggccctggacaccagcaacaagctggccgccgagaaggagtacagaaagctgcaggaggaggtggacctgctgaaggccctgaagcacgtgaacatcgtggcctacctgggcacctgcctgcaggagaacaccgtgagcatcttcatggagttcgtgcccggcggcagcatcagcagcatcatcaacagattcggccccctgcccgagatggtgttctgcaagtacaccaagcagatcctgcagggcgtggcctacctgcacgagaactgcgtggtgcacagagacatcaagggcaacaacgtgatgctgatgcccaccggcatcatcaagctgatcgacttcggctgcgccagaagactggcctgggccggcctgaacggcacccacagcgacatgctgaagagcatgcacggcaccccctactggatggcccccgaggtgatcaacgagagcggctacggcagaaagagcgacatctggagcatcggctgcaccgtgttcgagatggccaccggcaagccccccctggccagcatggacagaatggccgccatgttctacatcggcgcccacagaggcctgatgccccccctgcccgaccacttcagcgagaacgccgccgacttcgtgagaatgtgcctgaccagagaccagcacgagagacccagcgccctgcagctgctgaagcacagcttcctggagagaagccactag

SEQ ID NO: 26960 - DNA, 3648 bp, Artificial Sequence
  derived and/or modified sequence
atgagttccatgcctaagcctgaacgacatgccgaatcactgctagacatatgtcacgacaccaattctagtcctaccgaccttatgacagtaacaaagaaccagaacattatcctgcagtctatcagtagatcggaagagttcgatcaggatggcgattgcagccacagcaccctggtaaacgaagaggaggatccttccggtggcaggcaggactggcagcctagaactgaagaattttcaactagccatatgaagtattcaggtaggtccattaagtttcttttacctcccctgtctctactgccaacaaggagcggtgtactcaccattccccaaaatcacaagttcccaaaggagaaggagcgaaatatcccatccttgacttcctttgtacccaaattgtccgtgagcgtgcgacagagtgacgagttatcaccatcgaacgaaccaccaggagccttggtcaaaagcttgatggacccaaccctgcggagtagcgacgggtttatttggtcccgcaacatgtgttctttccctaagacaaaccaccaccggcaatgcctggagaaagaagaaaactggaaatccaaggaaatcgaggagtgcaataagattgaaattacgcacttcgagaaagggcagtctctcgtgtcctttgaaaatctgaaagaaggcaatatccccgcagtgcgggaagaggacattgactgtcacggcagcaaaacaagaaaacccgaggaggaaaacagtcagtacttgtccagcagaaaaaatgagtctagcgtcgctaaaaattacgagcaggaccctgagatagtctgcactataccctctaagttccaggagacgcaacacagcgaaataacccctagtcaggatgaggagatgcgcaataacaaagcggcctcgaaacgagttagcctgcataagaatgaggcaatggaacctaataatattctggaggagtgtactgtgttgaaaagtctttccagcgtcgtgttcgatgacccgatcgacaagctcccggagggttgctcctccatggagaccaatataaagatatccattgccgagcgcgccaagcctgagatgtcacggatggtcccactcatccacatcaccttccctgtggatggatcccctaaagagccagtcatcgctaagccatccctacagacacgtaaaggtacaattcataacaaccactccgtgaacatacctgtgcatcaggaaaatgacaagcacaagatgaattcacacagatcaaaactggattctaagacgaagacatccaagaagactcctcaaaacttcgtgatttctaccgagggccctatcaagccaacaatgcataagaccagtatcaagacacagatattccctgctctcgggctggtggatccccgaccctggcagctgccccggtttcagaaaaagatgccgcagatagcgaaaaagcagtccacccatcggactcagaaacccaaaaaacaatccttcccgtgcatctgtaaaaatcccgggacacagaaaagttgcgtgcctttgagtgtgcagcctacagagccccgattaaactatctggacttgaaatacagcgatatgttcaaagagatcaacagtacagcgaatggtcccggcatctacgaaatgtttgggacacccgtttactgccatgtgcgggagacagagcgtgacgaaaatacctattacagggaaatctgcagcgcaccttccggtagaagaatcacgaacaagtgccgctccagtcactccgaacgcaaatcaaacatccggacaagattgtcacagaagaagacacacatgaagtgccccaagacatcctttggcattaagcaggagcataaggtgctgatcagcaaagaaaaaagcagcaaggctgtgcactccaatctacacgacattgaaaatggagacggaataagcgaacctgactggcagattaagtcttcaggcaacgagttcctaagtagtaaagatgaaatccaccctatgaatctggcccaaacacctgaacagagtatgaaacaaaatgaatttccccctgtatcggacctctccatagtcgaagaggtttctatggaggagtcaactggggacagagacatttccaataaccaaatcctcaccaccagcctccgcgatctccaagagctggaggagctgcaccaccagatcccttttatcccgagcgaggattcttgggctgtgccttctgagaagaattctaacaaatatgtccaacaggagaaacaaaatactgcctccttaagtaaggttaatgcctctcgaatcctgacaaatgacttggagttcgactcagtgagcgatcactccaagactctgaccaacttcagttttcaggcaaagcaggagtccgctagcagccagacatatcagtactgggtccactacttggaccacgacagtcttgccaacaagtccattacttaccagatgtttggtaagactctcagtggcaccaatagcataagtcaggagattatggattccgtgaacaacgaggagcttactgatgagctgttgggatgcctggctgcagagctactcgcccttgacgaaaaggacaacaattcgtgccagaaaatggccaacgaaacggaccctgaaaacctcaatctggttctgagatggagaggatccacgcccaaagagatgggccgagaaacgacaaaggtgaaaatccaaaggcattcctctggtctgcggatctacgacagagaagagaaattcctgatttccaatgagaagaagatattttctgagaattctctcaagagcgaggagcctatcttgtggactaagggggagatcctcggaaagggggcttatggcaccgtctactgtggactcacaagtcaagggcagctgatcgctgtcaaacaggtcgccttggatacttccaacaagctggccgcggaaaaagagtacagaaaactgcaggaagaggtcgatctgcttaaggctctcaaacatgttaatatcgttgcatacctaggcacttgcttgcaggagaacacggtgagcattttcatggaattcgtgccgggcggttcaatttcctccatcattaatcgcttcggcccactgcccgaaatggtcttttgtaagtatacgaagcagatcctgcagggggttgcctatctccacgagaactgcgtagtgcatcgggatattaagggcaacaatgtaatgcttatgcctacagggatcataaaactcatcgacttcggatgcgctcggcgcctagcttgggccgggctgaacgggacgcactccgacatgctgaagtcaatgcatggcacaccctactggatggcacccgaggtgatcaatgagagcggatacggtaggaaatccgatatatggtccataggctgtactgtgtttgagatggccactggaaaaccaccactggcttcaatggatcgtatggcggctatgttctacatcggggcccatcggggattaatgcctcccttgcctgatcacttctcggagaacgctgccgactttgtgaggatgtgtctaacacgtgaccaacacgagaggccatccgctcttcagttgctcaaacattctttcctggagagaagtcactag

SEQ ID NO: 26961 - DNA, 3648 bp, Artificial Sequence
  derived and/or modified sequence
atgagctccatgcccaagccagagagacatgctgagagcctgctggacatctgccacgacaccaacagcagccccacagacctgatgacagtgaccaagaaccagaacatcatcctgcagagcatcagccgctctgaggagtttgaccaggatggagactgcagccacagcaccctggtgaatgaggaggaggaccccagcggcggccggcaggactggcagcccaggacagaggagttcagcaccagccacatgaagtacagcggccgcagcatcaagttcctgctgccccccctgagcctgctgcccaccaggtctggagtgctgaccatcccccagaaccacaagttccccaaggagaaggagaggaacatccccagcctgaccagctttgtgcccaagctgtctgtgtctgtgcggcagagtgatgagctgagccccagcaatgaacctcctggggccctggtgaagagcctgatggaccccaccctgcggagcagtgatggcttcatctggagcaggaacatgtgcagcttccccaagaccaaccaccaccggcagtgcctggagaaggaggagaactggaagagcaaggagattgaggagtgcaacaagattgagatcacccactttgagaagggccagagcctggtgtcctttgagaacctgaaggagggcaacatcccagctgtgcgggaggaggacatcgactgccacggcagcaagaccaggaagccagaggaggagaacagccagtacctgagcagcaggaagaatgaatcttctgtggccaagaactatgagcaggaccctgagatcgtgtgcaccatccccagcaagttccaggagacccagcacagcgagatcacccccagccaggatgaggagatgaggaacaacaaggccgccagcaagagggtgtccctgcacaagaatgaggccatggagcccaacaacatcctggaggagtgcaccgtgctgaagagcctgagctctgtggtgtttgatgaccccatcgacaagctgcctgagggctgcagctccatggagaccaacatcaagatcagcattgctgagcgggccaagccagagatgagcaggatggtgcccctcatccacatcaccttccctgtggatggcagccccaaggagcctgtgattgccaagcccagcctgcagaccaggaagggcaccatccacaacaaccacagcgtgaacatccctgtgcaccaggagaatgacaagcacaagatgaacagccacaggagcaagctggacagcaagaccaagaccagcaagaagaccccccagaactttgtgatcagcacagagggccccatcaagcccaccatgcacaagaccagcatcaagacccagatcttccctgccctgggcctggtggacccccggccctggcagctgccccgcttccagaagaagatgccccagatcgccaagaagcagagcacccacaggacccagaagcccaagaagcagagcttcccctgcatctgcaagaaccctggcacccagaagagctgtgtgcccctgtctgtgcagcccacagagccccggctgaactacctggacctgaagtacagcgacatgttcaaggagatcaacagcacagccaatggacctggcatctatgagatgtttggcacccctgtgtactgccacgtgcgggagacagaaagagatgagaacacctactaccgggagatctgcagcgcccccagcggccgccgcatcaccaacaagtgccgcagcagccacagcgagaggaagagcaacatccgcacccggctgagccagaagaagacccacatgaagtgccccaagaccagctttggcatcaagcaggagcacaaggtgctgatcagcaaggagaagagcagcaaggctgtgcacagcaacctgcatgacattgaaaatggagatggcatcagcgagccagactggcagatcaagagcagtggaaatgagttcctgagcagcaaggatgagatccaccccatgaacctggcccagaccccagagcagagcatgaagcagaatgagttcccccctgtgtctgacctgagcatcgtggaggaggtgtccatggaggagagcactggagaccgggacatcagcaacaaccagatcctgaccaccagcctgcgggacctgcaggagctggaggagctgcaccaccagatccccttcatccccagcgaggacagctgggccgtgcccagcgagaagaacagcaacaagtatgtgcagcaggagaagcagaacacagccagcctgagcaaggtgaatgccagccgcatcctgaccaatgacctggagtttgacagcgtgtctgaccacagcaagaccctgaccaacttctccttccaggccaagcaggagagcgccagcagccagacctaccagtactgggtgcactacctggaccatgacagcctggccaacaagagcatcacctaccagatgtttgggaagaccctgagcggcaccaacagcatcagccaggagatcatggacagcgtgaacaatgaggagctgacagatgagctgctgggctgcctggccgctgagctgctggccctggatgagaaggacaacaacagctgccagaagatggccaatgaaacagatcctgagaacctgaacctggtgctgcgctggaggggcagcacccccaaggagatgggccgggagaccaccaaggtgaagatccagaggcacagcagcggcctgcgcatctatgaccgggaggagaagttcctgatcagcaatgagaagaagatcttcagcgagaacagcctgaagtctgaggagcccatcctgtggaccaagggggagatcctgggcaagggggcctatggaacagtgtactgcggcctgaccagccagggccagctgattgctgtgaagcaggtggccctggacaccagcaacaagctggccgctgagaaggagtacaggaagctgcaggaggaggtggacctgctgaaggccctgaagcacgtgaacatcgtggcctacctgggcacctgcctgcaggagaacacagtgtccatcttcatggagtttgtgcctgggggcagcatcagcagcatcatcaaccgcttcggccccctgcctgagatggtgttctgcaagtacaccaagcagatcctgcagggcgtggcctacctgcacgagaactgtgtggtgcaccgggacatcaagggcaacaacgtgatgctgatgcccaccggcatcatcaagctgattgactttggctgtgcccggcggctggcctgggccggcctgaatggcacccacagcgacatgctgaagtccatgcacggcaccccctactggatggcccctgaggtgatcaatgaaagtggctacggcaggaagagtgacatctggagcatcggctgcaccgtgtttgagatggccaccgggaagccacccctggcctccatggacaggatggccgccatgttctacatcggggcccaccggggcctgatgccacccctgcctgaccacttctctgaaaatgctgctgactttgtgaggatgtgcctgacccgggaccagcacgagcggcccagcgccctgcagctgctgaagcacagcttcctggagaggagccactag

SEQ ID NO: 26962 - DNA, 3648 bp, Artificial Sequence
  derived and/or modified sequence
atgagcagcatgcccaagcccgagcggcacgccgagagcctgctggacatctgtcatgacactaattcttcccccactgacttgatgactgtgacaaagaatcaaaacatcatccttcaatccatctcccgaagcgaagaattcgaccaggacggcgactgcagtcacagcacactcgtgaatgaagaggaggaccccagcgggggtcggcaggactggcaacctaggacagaggaattcagcacaagccacatgaaatactctggacggtctatcaaatttttgttgccgccactgtccttactccccacccgttcaggcgtgctgacgatcccacagaatcataaatttcccaaagaaaaggaaagaaacataccatcattgacaagtttcgtcccgaagctgtccgtgagcgtgagacagtctgacgaactgtcgccgtctaacgagccgcccggcgccctcgtcaagtccctgatggacccaactctgaggagttcggacggctttatctggtcacggaatatgtgctccttcccgaaaacaaaccaccacaggcagtgtctagagaaggaagaaaattggaagagcaaggagatagaagaatgtaataaaattgagataactcacttcgaaaaaggccagtccctggtttccttcgaaaacctgaaggagggaaatatccctgccgttcgcgaagaggacatcgactgtcatggatcaaagacaagaaaacccgaagaggagaattctcagtacctatccagcaggaagaatgagtcatccgttgccaagaattacgagcaggatccagaaatcgtgtgtaccatccctagcaaattccaggagacgcagcacagcgaaatcacacctagtcaggacgaggagatgaggaataataaggcagcttcaaagagggtatctctgcacaaaaacgaagctatggagcctaacaacatcctcgaggagtgcactgtcctgaagagcctgtcttctgtcgtgttcgatgaccccatcgacaagttacccgagggttgttcatccatggagaccaatataaagataagcattgccgagcgtgcaaagccagagatgtctaggatggtcccattgattcacatcacctttcctgtagacggcagccccaaggagcccgttatcgctaagccctccctgcagactcgcaagggtacgatccacaacaatcattccgtgaacatcccagtgcaccaggagaacgacaaacacaagatgaattcccaccgctccaaactagacagcaagactaagacttctaagaaaacgcctcagaattttgtgatttcaacagagggtccaattaagccaactatgcacaagacctccattaaaacacagatcttccctgccctgggcctggtggacccacgcccttggcagctccctaggtttcagaagaaaatgccccagattgctaagaagcagtcaacgcaccggacacagaaaccaaagaagcaaagcttcccttgtatttgcaaaaatcctggcactcagaaatcctgcgtgcctctctccgtccagcctacagaaccaaggctcaattatcttgacttaaagtacagcgacatgtttaaggagatcaactcaaccgcaaatggacctggtatttatgaaatgtttggtacaccggtatactgccacgtgcgtgagaccgagcgtgacgaaaatacatattacagagaaatctgctcagccccgtctggcaggcgtattaccaacaagtgtcgtagtagccattctgaaaggaaatcgaacattcgcactagactgagtcagaagaagacccacatgaagtgccccaagacaagttttgggatcaaacaggaacataaggtgttgatctccaaagaaaagtccagtaaagcggtgcattccaacctccatgacattgagaacggagatgggatctctgaacccgattggcagatcaagtcatctgggaatgagttcttgtccagcaaggatgagattcaccccatgaatctggctcaaaccccagaacagtcgatgaaacagaacgaattcccccctgtgtcggacctaagcatagtcgaggaagtctccatggaggagtctactggtgaccgcgatatttcgaacaatcagatccttacaacaagcctacgtgacctgcaagagctagaggaactgcatcaccagattcccttcattccttctgaagacagttgggccgtccccagcgagaagaactcgaacaaatacgttcaacaggagaaacaaaataccgcttcgctttccaaagtgaacgccagccggatcctaacaaacgacttggagtttgactccgtatctgatcattctaaaactctgacaaacttctctttccaagccaagcaagagtcagcctccagccagacttaccagtattgggtgcattacctggatcatgactccctggcaaataagtctatcacttatcagatgttcgggaagacactgtccggtactaatagcatcagtcaggagatcatggactcggtgaacaatgaggaactgaccgacgagctacttggctgtcttgctgccgaacttctggcgctggacgagaaagataacaacagttgtcagaaaatggctaatgagaccgaccctgagaatctgaatctcgttctgagatggaggggatcaacccccaaagagatggggcgcgaaactacaaaagtcaaaattcaacgccactctagcgggctccgcatctacgaccgagaggagaagtttctgatctctaatgaaaagaaaattttcagcgagaacagcctgaagtctgaagagccaatcctctggacaaagggtgagatcttgggtaagggtgcttacgggactgtgtattgcggcctgacttctcagggccagcttattgcagtgaagcaagtagcactcgacacaagtaacaagttggctgccgagaaggagtataggaaactccaggaggaagttgacctccttaaggcgctaaaacacgtgaatatcgtggcatacttgggcacttgtttgcaggagaacaccgtgagcattttcatggagtttgtacctggcggttctatctcctccattatcaatagattcggcccgttacccgagatggtcttttgtaagtatactaagcagattctacagggtgtggcataccttcacgagaattgtgtggtccaccgggatattaaggggaataatgtaatgttgatgcccacgggcatcatcaaacttatcgactttggatgtgcccgtaggctggcatgggctggactgaatggcacgcactcagacatgcttaagtctatgcacggaacaccatattggatggccccagaggtgattaatgagtccggatacggacgcaagagcgatatttggtccatcggatgtacagtgtttgagatggcaaccggcaaacctcctttagctagtatggatagaatggccgccatgttttatattggagctcaccgcggtctcatgccccccctgcccgaccactttagtgaaaacgccgccgattttgtccggatgtgtctaacacgggatcaacacgaacgaccatcggcgctccagttattgaaacactctttcctcgagaggagccactag

SEQ ID NO: 26963 - DNA, 3648 bp, Artificial Sequence
  derived and/or modified sequence
atgtctagcatgccaaaacccgaacgccacgctgagtcactgctggacatctgtcatgatacaaattcttctccgaccgatttaatgacagtgactaaaaatcagaacattattctacaatccatttctcggtcggaagagtttgaccaggatggcgactgcagccactctaccttggtgaacgaggaagaagacccgtcagggggaaggcaggactggcaacctagaacagaagagtttagcaccagtcacatgaagtattctggtaggtccattaagtttctccttccaccactgtcactccttcctacgcggtctggcgttctcacaattccacaaaatcataaatttcccaaggagaaggagagaaatatcccatctctcaccagctttgtcccaaagctgtccgtgtcagtgcggcaatccgatgaattgtcccctagcaatgagccacctggcgctctcgtgaagtctcttatggaccccaccctgcgtagcagcgacggcttcatctggtcaagaaatatgtgcagctttcctaagactaatcatcacaggcaatgtttagaaaaggaggagaactggaaatcaaaagaaatcgaggagtgtaataagattgagattacacatttcgaaaagggccaatccctcgtgagctttgagaatctcaaggaaggcaacatcccggctgtgcgcgaggaggacatagactgtcacggctctaagacccgcaagcctgaagaggaaaatagccagtatctgtcctctcggaagaatgagagttctgtggccaaaaactatgaacaggatcccgagattgtgtgcacaattccatctaagtttcaagagacacaacattcggagattacaccatctcaggacgaggagatgcgaaataacaaggccgcatcaaagagagtttcattgcataagaatgaagcaatggaacctaacaatatattagaggagtgtaccgttttaaaatcactgagtagtgtagtgttcgatgatcctatcgacaagctcccagagggctgtagctcaatggagacgaatatcaagatttcgatcgcagagagggctaagcctgaaatgagccggatggtcccactgattcacattaccttcccagtagatggttctcccaaagaaccggtgatcgcaaaaccatccctccaaactcgtaaggggaccatccacaacaaccactccgtaaacatacccgtgcatcaggagaatgacaagcacaaaatgaactcgcatagaagcaagttggatagcaaaacaaaaacatcaaagaaaactccacaaaattttgttataagcactgaaggcccaattaagcctaccatgcacaagaccagcattaagacccagatcttccctgctctggggctggtcgacccgcgtccctggcagctccccaggttccaaaaaaagatgccacagattgctaagaaacagtcaactcaccgaacgcagaagcctaaaaagcagtctttcccttgcatctgtaaaaaccctggcacacaaaagtcctgcgttcctctcagtgttcagcctaccgagcctaggctgaattacttggatctgaaatattccgacatgtttaaggagattaatagtaccgccaacggacccggtatatatgaaatgttcggaacaccagtgtattgccatgtgcgggaaacagagcgggacgaaaatacgtattaccgagagatctgctccgccccaagtgggagacgcattacgaacaagtgccgctcgtctcactccgagagaaagtcaaatatacgaactcggctgtctcaaaaaaaaactcacatgaagtgccctaagaccagcttcgggattaaacaggagcataaggtgctgatcagtaaagagaaatccagcaaagccgtgcatagcaatcttcacgacatcgagaatggcgatgggatcagtgaacctgattggcagatcaagagcagcggtaacgaatttctctcatcaaaggatgagattcacccaatgaacttggcccagacgcccgagcagagcatgaagcagaacgagtttccacctgtctcagacctgagtatcgtcgaggaagtgagcatggaagaaagtaccggcgatcgcgacataagcaataatcagatcctgactactagtctacgtgacctccaggagctggaagagttacatcatcaaatcccatttatcccctcggaagactcatgggccgtgccctccgagaagaattctaataagtacgtgcaacaggaaaagcagaacacagcttcattgtctaaggtcaatgcctccagaatcttgactaacgacctggaattcgattcagtctcagaccactcaaaaactctgaccaacttttccttccaggctaaacaagaaagcgcctcttcacagacgtatcaatattgggtccattacctcgatcacgattcactagctaataagtccataacataccaaatgtttggcaagacgcttagcggaacgaatagtattagccaagagattatggattcagtcaacaatgaagaactcacagatgagttgcttgggtgccttgccgctgaactgttggccctggacgagaaagacaataattcttgtcagaagatggctaacgagacggacccagagaacctcaatttggtgcttcgctggcggggatccacccctaaagagatggggcgagagactaccaaggttaagattcagcgccacagctctgggctgagaatctatgacagagaggaaaagtttctgataagtaatgagaaaaaaatattctcagagaatagcttaaaaagcgaagaaccaattttgtggacaaagggggagattttaggtaaaggtgcttatgggaccgtgtattgtggcttaacctcccagggacaactgatagccgttaagcaggtggctctcgatacttccaacaaactagcagccgaaaaggaataccgcaagctacaggaagaggtggatctccttaaggctttgaaacacgttaacatcgtggcctatttgggaacctgtcttcaggagaacactgtctcaatttttatggagtttgtgcccggaggtagtattagttccattatcaaccgtttcggacccctcccggagatggtcttctgtaagtacaccaagcagatactgcagggggtagcctacttacacgaaaactgtgtggtgcatcgggatatcaagggcaataatgtcatgctgatgcccaccgggatcatcaaactgatagacttcggatgtgcaagaaggctagcatgggcaggcctgaatggcacccattccgatatgctgaaaagtatgcacgggacgccctattggatggcgcctgaggtaattaacgagtctggctatgggcgaaagtccgatatatggtccatcgggtgcactgtgttcgagatggctaccggcaagccaccacttgcctcaatggaccgcatggccgcaatgttctatatcggtgcccaccggggtctcatgccaccacttcctgaccacttttccgagaacgcggcagattttgtgaggatgtgccttacacgcgatcaacacgagcggccaagcgccctgcaacttttgaagcatagcttcctggaaaggtcccattag

SEQ ID NO: 26964 - DNA, 3719 bp, Artificial Sequence
  derived and/or modified sequence
ttcaaagaaacagcagcttttggacattttaatgagttctatgccaaaaccagaaagacatgctgagtcattgcttgacatttgtcatgatacaaactcttctccaactgatttgatgacagttaccaaaaatcaaaacatcatcttgcaaagcatcagcagaagtgaggagttcgaccaagatggtgactgcagtcattccacactggttaatgaagaagaagatcccagtggtggtagacaggactggcaacccaggacagaagagttttcgacctctcatatgaagtacagtggccgaagcatcaagttccttctgccaccactgtcactcttgcccacgcgatctggtgtccttactatcccccaaaatcacaagtttccaaaagaaaaagaaagaaacattccaagtctcacatcttttgtgcctaagctctcagtgtctgttcgtcaatctgatgagctcagcccatcaaacgagcctccgggagccctagttaagtcgttgatggatccgactctcaggtcttctgatggcttcatttggtcaagaaacatgtgctcttttcctaagactaaccatcacaggcaatgcctggagaaggaggaaaactggaaatccaaggaaatagaagaatgtaacaaaattgaaatcactcactttgaaaaagggcagtctttggtgtcttttgagaatttgaaggaaggcaatattcctgcagttagggaagaggatattgactgccatggtagtaaaacgcgaaaacctgaagaagagaactctcaatatctttcatcaagaaagaatgagagttcagtagccaaaaactatgaacaagatccagaaatagtatgtaccattccaagcaagttccaagaaacccagcattcagaaataactccaagccaggatgaagagatgagaaataataaagctgcttcaaaaagagtttcattacataaaaatgaagcaatggaaccaaacaatattttagaagagtgtactgtacttaaaagcttatccagtgtagtctttgatgaccccattgataaactcccagaaggttgtagcagcatggagacaaacataaaaatatcaatagcagaaagagccaaaccagaaatgagtaggatggtgcctcttatccacatcaccttccctgtggatggaagccccaaggaaccagtgatagccaaaccaagcctccaaacaagaaagggaaccattcataacaaccatagtgtcaacatacctgtacaccaagaaaatgacaagcataagatgaattcccataggagtaagttggattcaaagaccaagacaagtaagaagacacctcagaattttgtgatttctactgaaggtcccattaagcctaccatgcataaaaccagcataaaaacacaaattttcccggctttgggacttgtggaccccaggccttggcaattgcccaggtttcaaaagaaaatgccacagatagcaaagaagcaatcaactcaccggactcagaaacctaaaaagcaatcatttccttgcatctgtaaaaatccaggaacacagaagtcatgtgttcctctctctgttcaaccgacagagccaagactaaattacctagatcttaagtatagtgatatgttcaaagaaatcaattcaactgctaatggacctggaatctatgaaatgtttgggacccctgtttattgtcatgtgcgagagactgaaagggatgaaaacacgtattaccgtgagatatgttcggctccatcaggcagacgtatcaccaataaatgtcgatcttcacacagtgagaggaagagcaatatcagaacaagactttctcagaaaaaaacacatatgaaatgcccaaagacttcatttggcattaaacaagagcacaaagtcttaatttctaaagaaaagagttccaaggctgtacatagcaacctacatgacattgaaaatggtgatggtatttcagaaccagactggcagataaagtcttcaggaaatgagtttctatcttccaaagatgaaattcatcccatgaacttggctcagacacctgagcagtccatgaaacagaatgaattccctcctgtctcagatttatccattgttgaagaagtttctatggaagagtctactggtgatagagacatttctaacaatcaaatactcaccacaagcctcagagatctgcaagaacttgaagagctacatcaccagatcccatttatcccttcagaagacagctgggcagtgcccagtgagaagaattctaacaagtatgtacagcaagaaaagcagaatacagcatctcttagtaaagtaaatgccagccgaattttaactaatgatctagagtttgatagtgtttcagatcactctaaaacacttacaaatttctctttccaagcaaaacaagaaagtgcatcttcccagacatatcaatattgggtacattatttggatcatgatagtttagcaaataagtcaatcacatatcaaatgtttggaaaaaccttaagtggcacaaattcaatttcccaagaaattatggactctgtaaataatgaagaattgacagatgaactattaggttgtctagctgcagaattattagctcttgatgagaaagataacaactcttgccaaaaaatggcaaatgaaacagatcctgaaaacctaaatcttgtcctcagatggagaggaagtaccccaaaagaaatgggcagagagacaacaaaagtcaaaatacagaggcatagtagtgggctcaggatatatgacagggaggagaaatttctcatctcaaatgaaaagaagatattttctgaaaatagtttaaagtctgaagaacctatcctatggaccaagggtgagattcttggaaagggagcctacggcacagtatactgtggtctcactagtcaaggacagctaatagctgtaaaacaggtggctttggatacctctaataaattagctgctgaaaaggaataccggaaactacaggaagaagtagatttgctcaaagcactgaaacatgtcaacattgtggcctatttggggacatgcttgcaagagaacactgtgagcattttcatggagtttgttcctggtggctcaatctctagtattataaaccgttttgggccattgcctgagatggtgttctgtaaatatacgaaacaaatacttcaaggtgttgcttatctccatgagaactgtgtggtacatcgcgatatcaaaggaaataatgttatgctcatgccaactggaataataaagctgattgactttggctgtgccaggcgtttggcctgggcaggtttaaatggcacccacagtgacatgcttaagtccatgcatgggactccatattggatggccccagaagtcatcaatgagtctggctatggacggaaatcagatatctggagcattggttgtactgtgtttgagatggctacagggaagcctccactggcttccatggacaggatggccgccatgttttacatcggagcacaccgagggctgatgcctcctttaccagaccacttctcagaaaatgcagcagactttgtgcgcatgtgcctgaccagggaccagcatgagcgaccttctgctctccagctcctgaagcactccttcttggagagaagtcactgaatatacatcaagactttcttcccagttccactgcagatgc

SEQ ID NO: 26965 - protein, 510 aa, Artificial Sequence
  derived and/or modified sequence
MSSMPKPERHAESLLDICHDTNSSPTDLMTVTKNQNIILQSISRSEEFDQDGDCSHSTLVNEEEDPSGGRQDWQPRTEGVEITVTFPRDVSPPQEMSQEDLKEKNLINSSLQEWAQAHAVSHPNEIETVELRKKKLTMRPLVLQKEESSRELCNVNLGFLLPRSCLELNISKSVTREDAPHFLKEQQRKSEEFSTSHMKYSGRSIKRHSSGLRIYDREEKFLISNEKKIFSENSLKSEEPILWTKGEILGKGAYGTVYCGLTSQGQLIAVKQVALDTSNKLAAEKEYRKLQEEVDLLKALKHVNIVAYLGTCLQENTVSIFMEFVPGGSISSIINRFGPLPEMVFCKYTKQILQGVAYLHENCVVHRDIKGNNVMLMPTGIIKLIDFGCARRLAWAGLNGTHSDMLKSMHGTPYWMAPEVINESGYGRKSDIWSIGCTVFEMATGKPPLASMDRMAAMFYIGAHRGLMPPLPDHFSENAADFVRMCLTRDQHERPSALQLLKHSFLERSH

SEQ ID NO: 26966 - DNA, 1533 bp, Artificial Sequence
  derived and/or modified sequence
atgagcagcatgcccaagcccgagagacacgccgagagcctgctggacatctgccacgacaccaacagcagccccaccgacctgatgaccgtgaccaagaaccagaacatcatcctgcagagcatcagcagaagcgaggagttcgaccaggacggcgactgcagccacagcaccctggtgaacgaggaggaggaccccagcggcggcagacaggactggcagcccagaaccgagggcgtggagatcaccgtgaccttccccagagacgtgagccccccccaggagatgagccaggaggacctgaaggagaagaacctgatcaacagcagcctgcaggagtgggcccaggcccacgccgtgagccaccccaacgagatcgagaccgtggagctgagaaagaagaagctgaccatgagacccctggtgctgcagaaggaggagagcagcagagagctgtgcaacgtgaacctgggcttcctgctgcccagaagctgcctggagctgaacatcagcaagagcgtgaccagagaggacgccccccacttcctgaaggagcagcagagaaagagcgaggagttcagcaccagccacatgaagtacagcggcagaagcatcaagagacacagcagcggcctgagaatctacgacagagaggagaagttcctgatcagcaacgagaagaagatcttcagcgagaacagcctgaagagcgaggagcccatcctgtggaccaagggcgagatcctgggcaagggcgcctacggcaccgtgtactgcggcctgaccagccagggccagctgatcgccgtgaagcaggtggccctggacaccagcaacaagctggccgccgagaaggagtacagaaagctgcaggaggaggtggacctgctgaaggccctgaagcacgtgaacatcgtggcctacctgggcacctgcctgcaggagaacaccgtgagcatcttcatggagttcgtgcccggcggcagcatcagcagcatcatcaacagattcggccccctgcccgagatggtgttctgcaagtacaccaagcagatcctgcagggcgtggcctacctgcacgagaactgcgtggtgcacagagacatcaagggcaacaacgtgatgctgatgcccaccggcatcatcaagctgatcgacttcggctgcgccagaagactggcctgggccggcctgaacggcacccacagcgacatgctgaagagcatgcacggcaccccctactggatggcccccgaggtgatcaacgagagcggctacggcagaaagagcgacatctggagcatcggctgcaccgtgttcgagatggccaccggcaagccccccctggccagcatggacagaatggccgccatgttctacatcggcgcccacagaggcctgatgccccccctgcccgaccacttcagcgagaacgccgccgacttcgtgagaatgtgcctgaccagagaccagcacgagagacccagcgccctgcagctgctgaagcacagcttcctggagagaagccactag

SEQ ID NO: 26967 - DNA, 1533 bp, Artificial Sequence
  derived and/or modified sequence
atgtcatccatgccaaagccggagcgccatgctgagagtctgctggatatttgtcatgatactaactcgagtcccactgacttgatgactgtgaccaagaaccagaatataattttgcagagcatcagcaggtcggaagaattcgaccaagatggcgactgtagccacagtacattagtgaacgaagaagaagatcctagtggcgggcgacaggattggcaaccacggaccgagggcgttgagatcaccgtgacatttccacgagatgtttcacctccccaggaaatgagccaggaggatctcaaagagaaaaatctgatcaattccagtttacaagagtgggcccaagctcacgcagtttcacatccgaacgaaatcgaaaccgtggagctccgaaaaaaaaagctaacaatgcggccactggtccttcagaaggaggagtccagcagagagctgtgcaacgtgaacttgggcttcctgttgccccgcagttgtctggagttaaatatttcgaagtcagttacaagggaagacgccccacattttctcaaggagcaacagcgtaaatcagaggaattctccaccagccacatgaaatactctggtcgatcgattaaacgacactcatccgggctacggatatatgatagggaagagaaatttctgatctcaaacgaaaagaaaattttctcagagaattcccttaagtccgaagagcccattctgtggacaaagggagagatcttaggcaagggggcttacggtactgtctactgcggcctgacatcgcaggggcagcttattgctgtgaagcaggtggctctggatacttcaaataagctcgccgcagagaaggagtacagaaaacttcaggaagaagttgacctgttgaaagcattgaagcatgttaacatcgtggcgtatctcggaacttgcctccaggagaacacagtgtctatctttatggagttcgtcccagggggaagtatctctagcataatcaaccgtttcgggcctcttccggaaatggtgttctgcaagtacactaaacagatcctgcaaggcgtcgcctatttgcatgagaattgtgtggtgcatagagacattaaaggcaacaacgtgatgttgatgccaacgggcataataaaactgatcgatttcggatgcgctagaagactggcctgggccggtcttaacggaacacacagcgacatgctgaaatcaatgcacgggacaccctattggatggcaccggaagttatcaatgaatccggatatgggcggaaatcagatatatggagcattggctgtaccgtgttcgagatggcgacgggtaagccacccctggcttcgatggaccggatggctgccatgttctacattggtgcccatcgcggactgatgcccccactgccagaccattttagcgagaacgccgccgatttcgtgcgcatgtgcctcacacgtgaccagcacgagcgcccctctgccctgcaactgctgaaacattctttcctggagcgttctcattag

SEQ ID NO: 26968 - DNA, 1533 bp, Artificial Sequence
  derived and/or modified sequence
atgagctccatgcccaagccagagagacatgctgagagcctgctggacatctgccacgacaccaacagcagccccacagacctgatgacagtgaccaagaaccagaacatcatcctgcagagcatcagccgctctgaggagtttgaccaggatggagactgcagccacagcaccctggtgaatgaggaggaggaccccagcggcggccggcaggactggcagcccaggacagaaggagtggagatcaccgtgaccttccccagagatgtgagccccccccaggagatgagccaggaggacctgaaggagaagaacctgatcaacagcagcctgcaggagtgggcccaggcccatgctgtgagccaccccaatgaaattgagaccgtggagctgaggaagaagaagctgaccatgaggcccctggtgctgcagaaggaggagagcagccgggagctgtgcaatgtgaacctgggcttcctgctgcccaggagctgcctggagctgaacatcagcaagtctgtgaccagagaagatgccccccacttcctgaaggagcagcagaggaagtctgaggagttcagcaccagccacatgaagtacagcggccgcagcatcaagaggcacagcagcggcctgcgcatctatgaccgggaggagaagttcctgatcagcaatgagaagaagatcttcagcgagaacagcctgaagtctgaggagcccatcctgtggaccaagggggagatcctgggcaaaggagcctacggcaccgtgtactgcggcctgaccagccagggccagctgattgctgtgaagcaggtggccctggacaccagcaacaagctggccgctgagaaggagtacaggaagctgcaggaggaggtggacctgctgaaggccctgaagcacgtgaacatcgtggcctacctgggcacctgcctgcaggagaacacagtgtccatcttcatggagtttgtgcctgggggcagcatcagcagcatcatcaacagatttggccccctgcctgagatggtgttctgcaagtacaccaagcagatcctgcagggcgtggcctacctgcacgagaactgtgtggtgcaccgggacatcaagggcaacaacgtgatgctgatgcccaccggcatcatcaagctgattgactttggctgtgcccggcggctggcctgggccggcctgaatggcacccacagcgacatgctgaagtccatgcacggcaccccctactggatggcccctgaggtgatcaatgaaagtggctacggcaggaagagtgacatctggagcatcggctgcaccgtgtttgagatggccaccgggaagccacccctggcctccatggacaggatggccgccatgttctacatcggggcccaccggggcctgatgccacccctgcctgaccacttctctgaaaatgctgctgactttgtgaggatgtgcctgacccgggaccagcacgagcggcccagcgccctgcagctgctgaagcacagcttcctggagaggagccactag

SEQ ID NO: 26969 - DNA, 1533 bp, Artificial Sequence
  derived and/or modified sequence
atgagcagcatgcccaagcccgagcggcacgccgagagcctgctggatatttgtcatgatactaactcttctcctacagatctaatgaccgtcacaaagaatcagaacattattctccagtctatcagccggtccgaagaattcgatcaagatggtgactgctctcactcaacactggtcaatgaagaggaagatccttcaggcgggagacaggactggcagcccagaacagagggcgtggaaattacagttactttcccacgggatgtttccccacctcaggagatgtcacaagaagacctgaaggagaaaaacctcataaatagcagtcttcaggaatgggcgcaggctcacgctgtgtcccatccaaacgagatcgaaactgtggaactacggaaaaaaaagctgacaatgcgacctctcgtgctgcaaaaagaagaaagtagtcgtgagctttgtaacgtaaatctgggattcctgttaccacgatcctgtctcgagctgaatatctccaaatccgttactcgagaggacgctccacattttctgaaagaacagcagaggaaatcagaggagttttcaacatctcacatgaagtactccgggcgatccatcaagagacactcatcagggctacggatatacgatagagaagagaagttcctcatatctaatgagaagaagatctttagcgagaactccctgaagtccgaagaaccaatcctctggactaagggagaaatcctgggaaagggggcctatggcacagtgtactgtggcctgacctcacagggtcagctcatcgctgttaagcaggtggcactggacaccagtaataaattggctgccgaaaaagagtacaggaaactgcaggaagaagtggatttactgaaggcactgaagcacgtcaacatcgtggcatacctgggcacctgcctgcaggagaatacggtgtctatttttatggagtttgtgcctggagggagcatcagcagcataataaacaggtttggcccactgccagagatggttttttgcaaatacaccaaacagatccttcagggggtggcctatctgcacgaaaactgcgtggtacatagagatataaaaggcaataacgtgatgctcatgcccaccgggatcatcaaactcatcgatttcggatgcgcccgccgcttagcctgggccggattgaacggcacacatagtgatatgctcaaaagcatgcatggcacgccctactggatggcaccggaggtaattaacgaatctggttacgggcgaaagtccgacatctggtctattggctgcacagtcttcgagatggctactggaaagccacccctcgcctccatggaccgcatggccgccatgttttatatcggtgctcataggggcctgatgccaccgctgcctgatcatttctcagaaaacgccgctgatttcgttaggatgtgcttaactagggaccagcatgagagacctagcgccctacagctgctgaaacacagctttttggagcggtcacattag

SEQ ID NO: 26970 - DNA, 1533 bp, Artificial Sequence
  derived and/or modified sequence
atgtcctccatgcctaaaccagagcgtcacgctgagagccttctcgacatttgtcacgatacaaacagctcgccgacagatctcatgactgtgacgaagaaccagaacatcatccttcagagcatatcacggagcgaagagttcgatcaggacggcgactgctctcattccactttagtgaatgaggaggaggatcctagcggcggacgacaagactggcagccacgcactgagggggttgaaatcacagtgacattcccgagggatgtcagtcccccacaggaaatgagccaggaagacttaaaggaaaaaaatctgatcaactcctccttgcaggagtgggctcaagcccatgctgttagtcacccaaatgagatcgagacggtggagctgcgcaaaaaaaaactgactatgaggccgctggttctgcagaaggaggaatcaagcagagaactttgtaatgtgaacttaggctttttgctaccacgctcctgcctggagcttaacatcagcaagtctgtgactcgagaagatgccccacacttcctcaaggagcagcaaaggaaatccgaagaattttccaccagtcacatgaagtacagtgggagatctatcaagagacacagcagtggcctgagaatctacgaccgggaggagaagttcctcatctccaacgaaaagaagatatttagcgagaattctctcaaatccgaggaaccaatactgtggacaaaaggtgagatattaggaaaaggcgcttatggtaccgtctactgtggcttgaccagccaaggccagctgatagctgtcaagcaagtggctctggacacaagcaacaagctcgccgctgaaaaggagtacaggaagctacaggaggaggtggacttactgaaggccctgaagcatgtcaatatcgtcgcataccttggaacctgcttgcaagaaaataccgtgagcatttttatggagttcgtgcctggtggctcaatatcctcgatcattaataggttcgggcctctgccagaaatggttttttgtaagtacaccaagcagatcctccaaggggtggcgtacctccacgagaattgcgtagtacaccgggatatcaagggtaacaacgtaatgctgatgccaacaggaattataaaactgattgatttcggttgtgctcgcagactggcatgggcaggtctgaacggaactcacagcgatatgcttaaatccatgcacgggacaccctactggatggcccctgaagtcataaatgagtctggatatggccgaaaatccgacatctggagtatcggctgcaccgttttcgaaatggccacagggaagccgcctctggcctctatggataggatggctgcaatgttctatatcggggctcataggggactcatgcccccactgccagaccattttagcgaaaatgcagccgacttcgtgcgtatgtgtttaaccagagatcagcatgagaggccctcagccctgcaactgctgaaacacagttttctggagcgttctcactag

SEQ ID NO: 26971 - DNA, 1604 bp, Artificial Sequence
  derived and/or modified sequence
ttcaaagaaacagcagcttttggacattttaatgagttctatgccaaaaccagaaagacatgctgagtcattgcttgacatttgtcatgatacaaactcttctccaactgatttgatgacagttaccaaaaatcaaaacatcatcttgcaaagcatcagcagaagtgaggagttcgaccaagatggtgactgcagtcattccacactggttaatgaagaagaagatcccagtggtggtagacaggactggcaacccaggacagaaggtgttgagatcactgtaacttttccaagagatgtcagtcctccccaagaaatgagccaagaagacttaaaagaaaagaatctgataaactcatcgcttcaagaatgggcacaagcacatgcagtttctcatccaaatgaaatagaaacggtggagctcaggaaaaagaagctgaccatgcggcccttagttttgcaaaaagaggaaagttccagggagctctgcaatgtgaacttgggctttttgctaccaagatcttgtttagaactgaacatttccaagtctgtaaccagagaagatgctcctcattttctgaaggagcagcaaagaaaatctgaagagttttcgacctctcatatgaagtacagtggccgaagcatcaagaggcatagtagtgggctcaggatatatgacagggaggagaaatttctcatctcaaatgaaaagaagatattttctgaaaatagtttaaagtctgaagaacctatcctatggaccaagggtgagattcttggaaagggagcctacggcacagtatactgtggtctcactagtcaaggacagctaatagctgtaaaacaggtggctttggatacctctaataaattagctgctgaaaaggaataccggaaactacaggaagaagtagatttgctcaaagcactgaaacatgtcaacattgtggcctatttggggacatgcttgcaagagaacactgtgagcattttcatggagtttgttcctggtggctcaatctctagtattataaaccgttttgggccattgcctgagatggtgttctgtaaatatacgaaacaaatacttcaaggtgttgcttatctccatgagaactgtgtggtacatcgcgatatcaaaggaaataatgttatgctcatgccaactggaataataaagctgattgactttggctgtgccaggcgtttggcctgggcaggtttaaatggcacccacagtgacatgcttaagtccatgcatgggactccatattggatggccccagaagtcatcaatgagtctggctatggacggaaatcagatatctggagcattggttgtactgtgtttgagatggctacagggaagcctccactggcttccatggacaggatggccgccatgttttacatcggagcacaccgagggctgatgcctcctttaccagaccacttctcagaaaatgcagcagactttgtgcgcatgtgcctgaccagggaccagcatgagcgaccttctgctctccagctcctgaagcactccttcttggagagaagtcactgaatatacatcaagactttcttcccagttccactgcagatgc

SEQ ID NO: 26972 - protein, 462 aa, Artificial Sequence
  derived and/or modified sequence
MSSMPKPERHAESLLDICHDTNSSPTDLMTVTKNQNIILQSISRSEEFDQDGDCSHSTLVNEEEDPSGGRQDWQPRTEGVEITVTFPRDVSPPQEMSQEDLKEKNLINSSLQEWAQAHAVSHPNEIETVELRKKKLTMRPLVLQKEESSRELCNVNLGFLLPRSCLELNISKSVTREDAPHFLKEQQRKSEEFSTSHMKYSGRSIKRHSSGLRIYDREEKFLISNEKKIFSENSLKSEEPILWTKVDLLKALKHVNIVAYLGTCLQENTVSIFMEFVPGGSISSIINRFGPLPEMVFCKYTKQILQGVAYLHENCVVHRDIKGNNVMLMPTGIIKLIDFGCARRLAWAGLNGTHSDMLKSMHGTPYWMAPEVINESGYGRKSDIWSIGCTVFEMATGKPPLASMDRMAAMFYIGAHRGLMPPLPDHFSENAADFVRMCLTRDQHERPSALQLLKHSFLERSH

SEQ ID NO: 26973 - DNA, 1389 bp, Artificial Sequence
  derived and/or modified sequence
atgagcagcatgcccaagcccgagagacacgccgagagcctgctggacatctgccacgacaccaacagcagccccaccgacctgatgaccgtgaccaagaaccagaacatcatcctgcagagcatcagcagaagcgaggagttcgaccaggacggcgactgcagccacagcaccctggtgaacgaggaggaggaccccagcggcggcagacaggactggcagcccagaaccgagggcgtggagatcaccgtgaccttccccagagacgtgagccccccccaggagatgagccaggaggacctgaaggagaagaacctgatcaacagcagcctgcaggagtgggcccaggcccacgccgtgagccaccccaacgagatcgagaccgtggagctgagaaagaagaagctgaccatgagacccctggtgctgcagaaggaggagagcagcagagagctgtgcaacgtgaacctgggcttcctgctgcccagaagctgcctggagctgaacatcagcaagagcgtgaccagagaggacgccccccacttcctgaaggagcagcagagaaagagcgaggagttcagcaccagccacatgaagtacagcggcagaagcatcaagagacacagcagcggcctgagaatctacgacagagaggagaagttcctgatcagcaacgagaagaagatcttcagcgagaacagcctgaagagcgaggagcccatcctgtggaccaaggtggacctgctgaaggccctgaagcacgtgaacatcgtggcctacctgggcacctgcctgcaggagaacaccgtgagcatcttcatggagttcgtgcccggcggcagcatcagcagcatcatcaacagattcggccccctgcccgagatggtgttctgcaagtacaccaagcagatcctgcagggcgtggcctacctgcacgagaactgcgtggtgcacagagacatcaagggcaacaacgtgatgctgatgcccaccggcatcatcaagctgatcgacttcggctgcgccagaagactggcctgggccggcctgaacggcacccacagcgacatgctgaagagcatgcacggcaccccctactggatggcccccgaggtgatcaacgagagcggctacggcagaaagagcgacatctggagcatcggctgcaccgtgttcgagatggccaccggcaagccccccctggccagcatggacagaatggccgccatgttctacatcggcgcccacagaggcctgatgccccccctgcccgaccacttcagcgagaacgccgccgacttcgtgagaatgtgcctgaccagagaccagcacgagagacccagcgccctgcagctgctgaagcacagcttcctggagagaagccactag

SEQ ID NO: 26974 - DNA, 1389 bp, Artificial Sequence
  derived and/or modified sequence
atgtctagcatgcctaagcccgagaggcatgctgagtcgttgctagatatatgtcatgatacgaattcctcaccaacagacttgatgacagtgactaagaaccaaaacattatcctgcagagtatttcccgcagcgaagagtttgaccaagatggtgactgctcacacagcaccttggtgaacgaggaggaggaccccagcggtggtcgccaagattggcagccaagaactgagggggtggagattactgttacctttccaagggatgtgagccctcctcaggagatgtcccaggaagacctcaaagagaagaatctgatcaatagtagcctccaagagtgggcgcaggcccacgcagtgagccatccaaacgagattgagaccgtcgaattgcgtaaaaagaaactgactatgcggcccctcgtcctgcagaaggaagaatcttctcgggagctatgcaacgtgaatctgggatttctgctcccgagatcttgcttagagctaaatatctcaaagagcgtaacccgcgaagacgcccctcatttcttgaaggagcagcagcggaagtccgaagaattcagtacctcgcacatgaagtattccggtcgctccatcaagaggcatagcagtggcctgaggatttacgaccgggaggagaaatttctcatttctaacgagaaaaaaatcttttctgagaacagtcttaagtccgaagagccaatcctgtggactaaagtcgacctgttaaaggctcttaagcacgtgaatatagtagcttacctaggaacttgcctgcaggagaacaccgtgtccatcttcatggagttcgttccaggaggttcaattagcagcatcattaatcgctttggcccacttcccgaaatggtcttctgcaagtacacgaagcagattctgcagggcgtggcatatttgcacgaaaattgtgtcgtacacagggacattaagggcaacaatgttatgctgatgcccactggaattatcaaactcatcgactttggttgtgccaggcgcttggcgtgggcgggattaaatggaacacactccgatatgctgaagagcatgcacgggacgccctattggatggcccctgaggtgattaatgagagcggatacggaaggaaatccgacatctggtctatcggatgtaccgtttttgagatggctactggcaagccacccttggcaagtatggatcggatggctgccatgttttacatcggcgctcatagagggttgatgccacccttgcccgatcacttctcggagaacgcagccgacttcgtgagaatgtgccttaccagggatcaacacgagcggcccagcgcactccagctgcttaagcattcctttctcgagcgtagccattag

SEQ ID NO: 26975 - DNA, 1389 bp, Artificial Sequence
  derived and/or modified sequence
atgagctccatgcccaagccagagagacatgctgagagcctgctggacatctgccacgacaccaacagcagccccacagacctgatgacagtgaccaagaaccagaacatcatcctgcagagcatcagccgctctgaggagtttgaccaggatggagactgcagccacagcaccctggtgaatgaggaggaggaccccagcggcggccggcaggactggcagcccaggacagaaggagtggagatcaccgtgaccttccccagagatgtgagccccccccaggagatgagccaggaggacctgaaggagaagaacctgatcaacagcagcctgcaggagtgggcccaggcccatgctgtgagccaccccaatgaaattgagaccgtggagctgaggaagaagaagctgaccatgaggcccctggtgctgcagaaggaggagagcagccgggagctgtgcaatgtgaacctgggcttcctgctgcccaggagctgcctggagctgaacatcagcaagtctgtgaccagagaagatgccccccacttcctgaaggagcagcagaggaagtctgaggagttcagcaccagccacatgaagtacagcggccgcagcatcaagaggcacagcagcggcctgcgcatctatgaccgggaggagaagttcctgatcagcaatgagaagaagatcttcagcgagaacagcctgaagtctgaggagcccatcctgtggaccaaggtggacctgctgaaggccctgaagcacgtgaacatcgtggcctacctgggcacctgcctgcaggagaacacagtgtccatcttcatggagtttgtgcctgggggcagcatcagcagcatcatcaacagatttggccccctgcctgagatggtgttctgcaagtacaccaagcagatcctgcagggcgtggcctacctgcacgagaactgtgtggtgcaccgggacatcaagggcaacaacgtgatgctgatgcccaccggcatcatcaagctgattgactttggctgtgcccggcggctggcctgggccggcctgaatggcacccacagcgacatgctgaagtccatgcacggcaccccctactggatggcccctgaggtgatcaatgaaagtggctacggcaggaagagtgacatctggagcatcggctgcaccgtgtttgagatggccaccgggaagccacccctggcctccatggacaggatggccgccatgttctacatcggggcccaccggggcctgatgccacccctgcctgaccacttctctgaaaatgctgctgactttgtgaggatgtgcctgacccgggaccagcacgagcggcccagcgccctgcagctgctgaagcacagcttcctggagaggagccactag

SEQ ID NO: 26976 - DNA, 1389 bp, Artificial Sequence
  derived and/or modified sequence
atgagcagcatgcccaagcccgagcggcacgccgagagcctgctggatatctgccacgacactaatagctccccaacggatctgatgacagtcactaaaaaccaaaacatcatcttgcagagcatcagtcgtagtgaggaattcgatcaggacggtgattgctcacactctacactggttaacgaagaggaggatccatccggcggccgccaggattggcagcctagaaccgagggagtggagattacagttacctttccacgcgacgtgagcccacctcaagagatgtcccaagaagatctcaaagagaaaaatctcatcaacagttcactacaggagtgggcccaggcccatgcggtgtcccacccgaacgaaatcgaaactgttgagctcaggaagaaaaaactaactatgcgccccctagtgctgcagaaggaggagagtagcagggaattatgcaatgtgaacctagggtttttgctgcctaggagctgtctggaactgaacatttctaaatctgtcacccgcgaagacgctcctcattttctaaaggagcagcaacgaaagtctgaggagttttcaacgtcacacatgaaatactctggccggagcattaagcgtcatagcagcggtctgaggatctacgatagggaggaaaaatttctcatttcaaacgagaaaaagattttcagcgaaaactcattgaaaagcgaagaaccaatcttatggacgaaggtggatctactgaaagccctgaagcatgtcaatattgtcgcttatctcggtacgtgtttacaggagaacaccgtctctatttttatggagttcgtgcccggcggatccatatccagcattatcaatcggtttggccctctgcccgagatggtcttttgtaagtacacaaagcaaatactgcaaggcgtagcctacttacatgaaaactgtgttgtgcatcgggacataaagggtaacaatgttatgttgatgccgacgggtattatcaaactcattgactttgggtgcgcacggcggttggcatgggccggtctgaacggtacacactctgacatgctcaagtcaatgcacgggacgccatactggatggcccctgaggttattaatgaaagtggctacggcaggaagtcagacatctggtccatagggtgcacagtattcgaaatggcaactgggaaaccaccactcgccagtatggaccgcatggcagccatgttctacattggcgctcatcgaggcttgatgccccccctgcccgatcacttctccgaaaatgctgccgacttcgtgagaatgtgtctgactagggaccagcatgaaaggccctctgcccttcagttgctaaaacacagtttccttgaacgatctcattag

SEQ ID NO: 26977 - DNA, 1389 bp, Artificial Sequence
  derived and/or modified sequence
atgtcgagcatgcccaagccagaaaggcacgccgaatccctgctcgatatatgccatgatacaaacagtagtccaactgacctcatgacggtgaccaaaaaccagaatatcatcctgcaaagcatcagccggagtgaagaattcgaccaggacggggattgttcccactctacactggtgaacgaggaggaggatccaagtgggggacgccaggattggcagccccgtaccgaaggcgtagagataaccgtgactttcccgagggatgtctccccaccacaggaaatgtctcaggaggatttaaaagagaaaaatctgataaattcttctctgcaagaatgggcccaggcccatgcagtgtctcatccaaatgagattgaaactgtcgaactgaggaagaaaaagctaacaatgaggcccttagtgctgcagaaggaagaaagctcgcgggagctgtgcaacgtcaacctggggtttctgctgcctaggtcctgcctcgagcttaatatcagcaaaagcgttacgcgcgaagacgcccctcacttccttaaagagcaacagcgcaaatcagaggaattttccacctctcatatgaagtacagcggcaggagcataaagcgtcactcctccgggctgaggatttacgacagggaggagaagttcctgatctcaaacgagaaaaagatcttttccgaaaacagtctcaaatcagaagagcctattctctggaccaaggtggacttgctgaaggctctgaaacatgttaacatagtcgcctatcttggaacctgcctgcaggagaatactgtctctattttcatggaattcgtgcccggaggaagcatctccagcatcattaacagatttgggcctttaccagaaatggtattctgtaaatatactaagcaaattcttcagggagttgcatatctgcatgagaattgtgtcgttcatcgtgacattaaaggcaataatgtaatgctcatgcccactggcattatcaagcttatcgattttggctgtgctaggagactcgcgtgggccggattgaatggaactcattctgatatgttgaagagcatgcatggcactccatattggatggctcccgaggtgatcaatgagtccgggtatggaagaaagagcgatatttggagcattgggtgtaccgtgtttgaaatggcaacaggaaagccccctctggcttcaatggaccgaatggccgctatgttctatataggggctcacagaggcctgatgccaccccttcctgatcatttttccgagaatgccgcagattttgttcgtatgtgcctgacgagagatcagcacgaacgcccaagtgctctgcagttactaaagcacagctttttagagcggtcacattag

SEQ ID NO: 26978 - DNA, 1460 bp, Artificial Sequence
  derived and/or modified sequence
ttcaaagaaacagcagcttttggacattttaatgagttctatgccaaaaccagaaagacatgctgagtcattgcttgacatttgtcatgatacaaactcttctccaactgatttgatgacagttaccaaaaatcaaaacatcatcttgcaaagcatcagcagaagtgaggagttcgaccaagatggtgactgcagtcattccacactggttaatgaagaagaagatcccagtggtggtagacaggactggcaacccaggacagaaggtgttgagatcactgtaacttttccaagagatgtcagtcctccccaagaaatgagccaagaagacttaaaagaaaagaatctgataaactcatcgcttcaagaatgggcacaagcacatgcagtttctcatccaaatgaaatagaaacggtggagctcaggaaaaagaagctgaccatgcggcccttagttttgcaaaaagaggaaagttccagggagctctgcaatgtgaacttgggctttttgctaccaagatcttgtttagaactgaacatttccaagtctgtaaccagagaagatgctcctcattttctgaaggagcagcaaagaaaatctgaagagttttcgacctctcatatgaagtacagtggccgaagcatcaagaggcatagtagtgggctcaggatatatgacagggaggagaaatttctcatctcaaatgaaaagaagatattttctgaaaatagtttaaagtctgaagaacctatcctatggaccaaggtagatttgctcaaagcactgaaacatgtcaacattgtggcctatttggggacatgcttgcaagagaacactgtgagcattttcatggagtttgttcctggtggctcaatctctagtattataaaccgttttgggccattgcctgagatggtgttctgtaaatatacgaaacaaatacttcaaggtgttgcttatctccatgagaactgtgtggtacatcgcgatatcaaaggaaataatgttatgctcatgccaactggaataataaagctgattgactttggctgtgccaggcgtttggcctgggcaggtttaaatggcacccacagtgacatgcttaagtccatgcatgggactccatattggatggccccagaagtcatcaatgagtctggctatggacggaaatcagatatctggagcattggttgtactgtgtttgagatggctacagggaagcctccactggcttccatggacaggatggccgccatgttttacatcggagcacaccgagggctgatgcctcctttaccagaccacttctcagaaaatgcagcagactttgtgcgcatgtgcctgaccagggaccagcatgagcgaccttctgctctccagctcctgaagcactccttcttggagagaagtcactgaatatacatcaagactttcttcccagttccactgcagatgc

SEQ ID NO: 26979 - protein, 180 aa, Artificial Sequence
  derived and/or modified sequence
MLCLLLTLGVALVCGVPAMDIPQTKQDLELPKLAGTWHSMAMATNNISLMATLKAPLRVHITSLLPTPEDNLEIVLHRWENNSCVEKKVLGEKTENPKKFKINYTVANEATLLDTDYDNFLFLCLQDTTTPIQSMMCQYLARVLVEDDEIMQGFIRAFRPLPRHLWYLLDLKQMEEPCRF

SEQ ID NO: 26980 - protein, 86 aa, Artificial Sequence
  derived and/or modified sequence
MLCLLLTLGVALVCGVPAMDIPQTKQDLELPKDTTTPIQSMMCQYLARVLVEDDEIMQGFIRAFRPLPRHLWYLLDLKQMEAPCWL

SEQ ID NO: 26981 - protein, 132 aa, Artificial Sequence
  derived and/or modified sequence
LMATLKAPLRVHITSLLPTPEDNLEIVLHRWENNSCVEKKVLGEKTENPKKFKINYTVANEATLLDTDYDNFLFLCLQDTTTPIQSMMCQYLARVLVEDDEIMQGFIRAFRPLPRHLWYLLDLKQMEEPCRF

SEQ ID NO: 26982 - protein, 126 aa, Artificial Sequence
  derived and/or modified sequence
  misc_feature (1)..(1): Xaa can be any naturally occurring amino acid
XPLRVHITSLLPTPEDNLEIVLHRWENNSCVEKKVLGEKTENPKKFKINYTVANEATLLDTDYDNFLFLCLQDTTTPIQSMMCQYLARVLVEDDEIMQGFIRAFRPLPRHLWYLLDLKQMEEPCRF

SEQ ID NO: 26983 - protein, 169 aa, Artificial Sequence
  derived and/or modified sequence
MLCLLLTLGVALVCGVPAMDIPQTKQDLELPKLAGTWHSMAMATNNISLMATLKAPLRVHITSLLPTPEDNLEIVLHRWENNSCVEKKVLGEKTENPKKFKINYTVANEATLLDTDYDNFLFLCLQDTTTPIQSMMCQYLESWWRTMRSCRDSSGLSGPCPGTYGTCWT

SEQ ID NO: 26984 - DNA, 543 bp, Artificial Sequence
  derived and/or modified sequence
atgctctgcttattattaacactcggtgtcgccctggtttgcggagtccctgctatggacatcccacagaccaagcaggatctggagctgcctaaactcgccggcacctggcattccatggcgatggccacaaataatataagcctcatggcaaccctaaaggctcctttgagggtgcatattaccagtctgttgccaacaccggaagacaacctggagattgtgctgcatcggtgggaaaataatagctgcgttgagaaaaaagtgctaggagaaaagacagagaacccaaagaagttcaaaattaactacaccgttgcaaatgaagccactctcctggacaccgactacgacaatttcttgtttctgtgcttgcaggataccacaacacctatacagtctatgatgtgccagtacctagcaagagtgctcgtggaagatgacgagatcatgcaggggtttatccgggcctttcgacccttgccaaggcacctgtggtacctgctcgacttaaaacagatggaggaaccgtgccgattctag

SEQ ID NO: 26985 - DNA, 543 bp, Artificial Sequence
  derived and/or modified sequence
atgctctgtctcctgcttaccctgggcgtggctctggtttgtggggtcccagcgatggatatccctcaaaccaaacaggatttggagctaccaaagctcgctgggacatggcacagcatggcgatggcaaccaacaatatctctctcatggcaacattgaaggccccactccgcgtgcacatcactagtctgctgccaacccccgaagataacctcgagattgtcctgcatcgctgggaaaacaactcatgcgttgagaagaaagtactgggcgagaaaactgagaatcccaagaaattcaaaataaattatacagtggcaaatgaggcaactttgctggatacagattacgataatttcctgtttctgtgtctacaggacactacgaccccaatacaatccatgatgtgtcagtatctagcacgagtgctggttgaggatgatgagatcatgcaggggtttatccgagccttccggccgttacctcggcacctctggtatctcctggacctgaagcaaatggaggaaccttgcagattctag

SEQ ID NO: 26986 - DNA, 399 bp, Artificial Sequence
  derived and/or modified sequence
ttgatggccacgctgaaagcccctctgagggttcacataactagtctgttgcctactcccgaggataatctggagatcgtgttacataggtgggagaacaattcctgcgtggagaagaaggtcctgggagagaaaactgaaaatcccaagaaatttaagatcaattacacagtggccaacgaggcgacactgttggacaccgactatgacaactttctgttcctctgtttgcaagataccaccacgcccattcagagcatgatgtgccagtacctcgccagagtgctggttgaagatgacgagataatgcagggcttcattcgggccttccgccctctgcctcgacacctctggtatctgttggacctgaagcagatggaggagccctgccgcttttag

SEQ ID NO: 26987 - DNA, 543 bp, Artificial Sequence
  derived and/or modified sequence
atgttgtgtctcctgctgacactgggtgtggcactcgtgtgtggtgtgcctgcgatggacattccacagacaaaacaggatctagagttaccaaaactggcgggcacttggcatagcatggctatggccactaataatatttccttaatggcgacattgaaggctccactgcgcgtacacatcacctcactgctgccaacccccgaagacaacctcgagattgtgcttcaccgatgggagaataatagctgcgtggaaaagaaggtgctgggggaaaaaactgaaaacccgaaaaagttcaagattaattacacagttgctaacgaggcgacactgctcgataccgactatgataatttcctttttctgtgtctgcaggacaccacaaccccgatccagagcatgatgtgtcagtatcttgctcgagttcttgtggaggacgatgaaattatgcagggctttatccgcgccttccggccccttcccaggcacctgtggtaccttctggacctcaagcagatggaagagccttgtaggttttag

SEQ ID NO: 26988 - DNA, 510 bp, Artificial Sequence
  derived and/or modified sequence
atgctgtgtctgcttctgactttaggcgtagcactcgtgtgcggggtgcccgccatggatattccccagaccaagcaggacctggaactgcccaaactggctggtacttggcattcaatggccatggccacaaacaatatttccttgatggcgacgttgaaggcaccactccgcgtccacatcacgagccttctgccaacccccgaggacaacctcgagattgttctgcacaggtgggaaaataattcatgtgtcgagaaaaaggtgcttggggagaaaaccgagaacccaaagaaatttaagattaactatacggtcgccaacgaagcaacgctgcttgacaccgactacgacaactttcttttcctctgcttgcaagatacaaccacacccatccagagtatgatgtgccagtaccttgaaagctggtggcggacgatgagatcctgtagagactcgtccggcctgtctggaccatgccccggcacatatgggacgtgctggacttag

SEQ ID NO: 26989 - DNA, 543 bp, Artificial Sequence
  derived and/or modified sequence
atgctgtgcctgctgctgaccctgggcgtggccctggtgtgtggggtgcctgccatggacatcccccagaccaagcaggacctggagctgcccaagctggccggcacctggcacagcatggccatggccaccaacaacatcagcctgatggccaccctgaaggcccccctgcgggtgcacatcaccagcctgctgcccaccccagaggacaacctggagatcgtgctgcaccgctgggagaacaacagctgtgtggagaagaaggtgctgggggagaagacagagaaccccaagaagttcaagatcaactacacagtggccaatgaggccaccctgctggacacagattatgacaacttcctgttcctgtgcctgcaggacaccaccacccccatccagagcatgatgtgccagtacctggcccgggtgctggtggaggatgatgagatcatgcagggcttcatccgggccttccggcccctgcccaggcacctgtggtacctgctggacctgaagcagatggaggagccctgccgcttctag

SEQ ID NO: 26990 - DNA, 399 bp, Artificial Sequence
  derived and/or modified sequence
ctgatggccaccctgaaggcccccctgcgggtgcacatcaccagcctgctgcccaccccagaggacaacctggagatcgtgctgcaccgctgggagaacaacagctgtgtggagaagaaggtgctgggggagaagacagagaaccccaagaagttcaagatcaactacacagtggccaatgaggccaccctgctggacacagattatgacaacttcctgttcctgtgcctgcaggacaccaccacccccatccagagcatgatgtgccagtacctggcccgggtgctggtggaggatgatgagatcatgcagggcttcatccgggccttccggcccctgcccaggcacctgtggtacctgctggacctgaagcagatggaggagccctgccgcttctag

SEQ ID NO: 26991 - DNA, 510 bp, Artificial Sequence
  derived and/or modified sequence
atgctgtgcctgctgctgaccctgggcgtggccctggtgtgtggggtgcctgccatggacatcccccagaccaagcaggacctggagctgcccaagctggccggcacctggcacagcatggccatggccaccaacaacatcagcctgatggccaccctgaaggcccccctgcgggtgcacatcaccagcctgctgcccaccccagaggacaacctggagatcgtgctgcaccgctgggagaacaacagctgtgtggagaagaaggtgctgggggagaagacagagaaccccaagaagttcaagatcaactacacagtggccaatgaggccaccctgctggacacagattatgacaacttcctgttcctgtgcctgcaggacaccaccacccccatccagagcatgatgtgccagtacctggagagctggtggaggaccatgaggagctgccgggacagcagcggcctgagcggcccctgccccggcacctacggcacctgctggacctag

SEQ ID NO: 26992 - DNA, 543 bp, Artificial Sequence
  derived and/or modified sequence
atgctgtgcctgctgctgaccctgggcgtggccctggtgtgcggcgtccccgctatggacatcccccagactaagcaggatttagagctgccgaaacttgctggcacatggcatagcatggccatggccaccaataatatttcactgatggccactttgaaagcccccttacgggtgcatattacatcactcctcccgaccccggaggataatctcgagattgtcttgcataggtgggaaaataattcatgtgtggagaagaaggtgcttggagagaaaactgaaaaccccaagaaatttaagatcaattacaccgtagccaatgaagcaaccctgctcgacacggactacgataatttcctgtttctttgtctgcaggatacgacaactcctatccagagcatgatgtgccagtatctcgcacgcgtcttggtcgaagatgacgagattatgcagggatttatccgggcgttccggcccctaccacgacatctgtggtacctgcttgatttaaaacaaatggaagagccttgtcggttttag

SEQ ID NO: 26993 - DNA, 543 bp, Artificial Sequence
  derived and/or modified sequence
atgctgtgcctgctgctgaccctgggcgtggccctggtgtgcggcgtcccggctatggatatcccccagactaagcaggatcttgagctgcctaagctggcgggcacatggcactctatggctatggcaactaacaacatcagcctgatggctactcttaaagctccgctgcgcgtgcatataacatccctgctccctacaccagaagataacctggagattgtgctccatcgctgggaaaacaacagttgcgtggagaaaaaagtgttgggagagaaaaccgagaacccaaagaaattcaagataaactacaccgtcgcaaatgaggcaacgctgttggacacggattatgataattttctttttctgtgcctgcaggacacaactacccctatccagagtatgatgtgccagtacttggcaagagtcctggttgaggacgatgagatcatgcaagggttcatcagagccttccggccactgccccgccacctttggtatctccttgatctgaaacagatggaggaaccttgtcggttctag

SEQ ID NO: 26994 - DNA, 399 bp, Artificial Sequence
  derived and/or modified sequence
ctgatggccaccctgaaggcccccctgcgggtgcacatcaccagcttgctgccaaccccagaggacaacttagaaatcgttctgcataggtgggagaacaacagctgtgtggagaaaaaggtgctcggagagaagaccgagaacccaaagaaattcaaaataaactatacagtggccaacgaggccacacttctggacaccgactacgataacttcctctttctctgtctccaggacacgaccaccccaattcaaagcatgatgtgccagtaccttgccagggtgctagtagaggatgacgagattatgcaagggtttatccgcgcattccgccccctcccccggcacctatggtacctgttagacctgaagcagatggaagaaccatgcaggttctag

SEQ ID NO: 26995 - DNA, 543 bp, Artificial Sequence
  derived and/or modified sequence
atgctgtgcctgctgctgaccctgggcgtggccctggtgtgcggcgtgcctgctatggacattccccaaacgaagcaggatctggagctccccaaactcgcgggaacatggcacagcatggccatggccactaacaatatttctttaatggccactcttaaggcacctttgcgggtacatataacctctctcctcccaacgcctgaagataacctcgaaatcgttctccaccgttgggagaataacagttgcgttgaaaagaaagtgttgggtgaaaagactgaaaacccaaagaaattcaaaattaattacaccgtggctaacgaagcgacactgcttgatactgattacgacaacttcttgtttctgtgtcttcaggatacaacaacacccattcagtcaatgatgtgccagtacttggcacgcgtgttggttgaagacgatgagattatgcagggattcatcagggcgtttcgtcctctcccgcggcatttatggtacctcctggatttgaagcaaatggaagaaccgtgtcggttctag

SEQ ID NO: 26996 - DNA, 510 bp, Artificial Sequence
  derived and/or modified sequence
atgctgtgcctgctgctgaccctgggcgtggccctggtgtgcggcgtgccagctatggatattccacaaacaaagcaggatctggaactcccaaagttggcaggaacctggcattcaatggccatggctacgaataacattagtctcatggcaaccctcaaggccccactcagggtgcatattaccagcctcctgcctactcctgaggataacctcgagatcgtgctgcaccggtgggaaaataacagctgcgtcgagaaaaaggtgctcggtgagaaaaccgagaacccaaagaaatttaagataaactatactgtcgctaatgaggccaccctgctcgacaccgattatgataacttcctgttcctgtgcttgcaggacactacaacaccaattcagagtatgatgtgtcaatacctcgaatcctggtggcggacaatgagatcttgtcgtgactcctcggggctgagcggtccatgccccggtacttacggcacctgttggacctag

SEQ ID NO: 26997 - DNA, 543 bp, Artificial Sequence
  derived and/or modified sequence
atgctgtgcctgctcctgaccctgggtgttgctcttgtctgcggcgtgccagccatggatatcccacagacaaagcaagacctagagctgcctaaactcgcaggaacctggcactctatggctatggccacaaataatattagtttaatggccacccttaaagcccctttgcgggtgcacatcaccagcctgctgcctaccccagaggacaatctcgaaattgtgctgcaccggtgggaaaataattcctgtgttgaaaaaaaagtgctgggggagaagacagagaacccgaagaaattcaaaatcaactataccgttgcaaatgaagctaccctcctggatactgattatgacaacttcctgtttctttgcttgcaagacaccaccacacctattcagtccatgatgtgtcaatatttagcgagggtgctagtggaagacgatgaaatcatgcaggggttcatccgagcctttaggcccctgccacggcacctttggtaccttctggatctgaaacagatggaggagccctgccgtttttag

SEQ ID NO: 26998 - DNA, 543 bp, Artificial Sequence
  derived and/or modified sequence
atgctatgtttgctcctgacactgggagttgcccttgtctgtggcgtacccgcaatggacatcccccagacgaaacaggacctggaacttcccaaactggcaggcacctggcactctatggccatggcgaccaataacatttctctgatggccaccctgaaagcccctcttcgggtgcatattacaagcctcttacctactcccgaagacaacttggaaatcgtattgcacagatgggagaacaatagctgcgtggagaagaaggtcttgggcgagaagaccgaaaatccaaaaaagtttaagatcaattacacagtggcgaatgaggcaactctgctcgataccgactatgacaatttcctgtttctgtgtcttcaggatactaccacccccatccagtccatgatgtgtcaataccttgccagagttctcgttgaggacgacgagattatgcaggggtttatcagggcatttcgccctctcccaagacacctgtggtacctgctggacctgaagcagatggaggaaccatgccggttttag

SEQ ID NO: 26999 - DNA, 399 bp, Artificial Sequence
  derived and/or modified sequence
cttatggctactttgaaggcccctctcagggtgcacattacctctctacttcccacaccagaagataatctggaaattgtgctgcacagatgggaaaataactcttgcgtggagaagaaagttctgggcgagaagaccgaaaaccctaagaagttcaaaataaattacactgtagccaacgaagccactctgctggataccgattatgataactttctgtttctttgcctccaggacacaacgactcccatccagtccatgatgtgccagtatctggctcgagtccttgtggaggatgacgaaataatgcaagggtttattagagcgttccgccctctgccgcgacatctgtggtacctgctagacctgaagcagatggaggaaccctgccggttctag

SEQ ID NO: 27000 - DNA, 543 bp, Artificial Sequence
  derived and/or modified sequence
atgctctgcctgcttcttacactcggagtggccctcgtctgcggggtgccagccatggacattcctcagaccaaacaggatttggagctgccgaagctcgccggaacatggcacagcatggccatggccacaaacaacatttctctcatggccacactgaaggctcccctgagggtgcacatcacaagcctgctgccaactccagaggacaacctggaaatcgtgctacaccggtgggagaacaactcatgtgtcgagaagaaggttcttggcgaaaagaccgagaatcccaaaaagttcaagattaattataccgttgccaatgaggctaccttgttggacaccgactatgacaacttcttatttttatgcctccaagacacgaccaccccgatccagagcatgatgtgtcaatacttggcaagagtgctcgtggaagacgatgaaattatgcagggctttattcgagccttccggccactcccacgacacctgtggtacctcttggacttgaaacaaatggaggagccctgtcgcttttag

SEQ ID NO: 27001 - DNA, 510 bp, Artificial Sequence
  derived and/or modified sequence
atgctgtgtctattacttaccctaggggtggcgctggtctgtggtgtgccagccatggatataccacaaacgaagcaggacctggagctgccgaaactagcaggaacctggcactctatggccatggcaaccaataacatttccctgatggcaaccctgaaagcaccattgagagtacacatcacgtccctccttcccactcccgaggacaacctggagatcgtcctgcacaggtgggagaataactcctgcgtggagaagaaggtcctgggggaaaagactgagaacccaaagaaattcaaaattaactataccgtggcaaatgaagctacattactggacaccgactacgacaactttctgtttctgtgtctgcaggacacgacaactccaattcaaagtatgatgtgccaatacttggaaagctggtggcgaacaatgcgcagctgccgcgatagtagtggcctttccggcccatgtcccggaacttatggtacatgctggacttag

SEQ ID NO: 27002 - DNA, 821 bp, Artificial Sequence
  derived and/or modified sequence
ctcagagccacccacagccgcagccatgctgtgcctcctgctcaccctgggcgtggccctggtctgtggtgtcccggccatggacatcccccagaccaagcaggacctggagctcccaaagttggcagggacctggcactccatggccatggcgaccaacaacatctccctcatggcgacactgaaggcccctctgagggtccacatcacctcactgttgcccacccccgaggacaacctggagatcgttctgcacagatgggagaacaacagctgtgttgagaagaaggtccttggagagaagactgagaatccaaagaagttcaagatcaactatacggtggcgaacgaggccacgctgctcgatactgactacgacaatttcctgtttctctgcctacaggacaccaccacccccatccagagcatgatgtgccagtacctggccagagtcctggtggaggacgatgagatcatgcagggattcatcagggctttcaggcccctgcccaggcacctatggtacttgctggacttgaaacagatggaagagccgtgccgtttctaggtgagctcctgcctggtcctgcctcctggctcacctccgcctccaggaagaccagactcccacccttccacacctccagagcagtgggacttcctcctgccctttcaaagaataaccacagctcagaagacgatgacgtggtcatctgtgtcgccatccccttcctgctgcacacctgcaccacggccatggggaggctgctccctgggggcagagtctctggcagaggttattaataaacccttggagcatg

SEQ ID NO: 27003 - DNA, 850 bp, Artificial Sequence
  derived and/or modified sequence
ggctccagagctcagagccacccacagccgcagccatgctgtgcctcctgctcaccctgggcgtggccctggtctgtggtgtcccggccatggacatcccccagaccaagcaggacctggagctcccaaagttggcagggacctggcactccatggccatggcgaccaacaacatctccctcatggcgacactgaaggcccctctgagggtccacatcacctcactgttgcccacccccgaggacaacctggagatcgttctgcacagatgggagaacaacagctgtgttgagaagaaggtccttggagagaagactgagaatccaaagaagttcaagatcaactatacggtggcgaacgaggccacgctgctcgatactgactacgacaatttcctgtttctctgcctacaggacaccaccacccccatccagagcatgatgtgccagtacctggccagagtcctggtggaggacgatgagatcatgcagggattcatcagggctttcaggcccctgcccaggcacctatggtacttgctggacttgaaacagatggaagagccgtgccgtttctaggtgagctcctgcctggtcctgcctcctggtgacctgtaaacccaacagctcacctccgcctccaggaagaccagactcccacccttccacacctccagagcagtgggacttcctcctgccctttcaaagaataaccacagctcagaagacgatgacgtggtcatctgtgtcgccatccccttcctgctgcacacctgcaccacggccatggggaggctgctccctgggggcagagtctctggcagaggttattaataaacccttggagcatg

SEQ ID NO: 27004 - DNA, 465 bp, Artificial Sequence
  derived and/or modified sequence
ctcatggcgacactgaaggcccctctgagggtccacatcacctcactgttgcccacccccgaggacaacctggagatcgttctgcacagatgggagaacaacagctgtgttgagaagaaggtccttggagagaagactgagaatccaaagaagttcaagatcaactatacggtggcgaacgaggccacgctgctcgatactgactacgacaatttcctgtttctctgcctacaggacaccaccacccccatccagagcatgatgtgccagtacctggccagagtcctggtggaggacgatgagatcatgcagggattcatcagggctttcaggcccctgcccaggcacctatggtacttgctggacttgaaacagatggaagagccgtgccgtttctaggtgagctcctgcctggtcctgcctcctggatggagtctcgctctgtcaccaggctggagtgcagtg

SEQ ID NO: 27005 - DNA, 990 bp, Artificial Sequence
  derived and/or modified sequence
catccctctggctccagagctcagagccacccacagccgcagccatgctgtgcctcctgctcaccctgggcgtggccctggtctgtggtgtcccggccatggacatcccccagaccaagcaggacctggagctcccaaagttggcagggacctggcactccatggccatggcgaccaacaacatctccctcatggcgacactgaaggcccctctgagggtccacatcacctcactgttgcccacccccgaggacaacctggagatcgttctgcacagatgggagaacaacagctgtgttgagaagaaggtccttggagagaagactgagaatccaaagaagttcaagatcaactatacggtggcgaacgaggccacgctgctcgatactgactacgacaatttcctgtttctctgcctacaggacaccaccacccccatccagagcatgatgtgccagtacctggccagagtcctggtggaggacgatgagatcatgcagggattcatcagggctttcaggcccctgcccaggcacctatggtacttgctggacttgaaacagatggaagagccgtgccgtttctagctcacctccgcctccaggaagaccagactcccacccttccacacctccagagcagtgggacttcctcctgccctttcaaagaataaccacagctcagaagacgatgacgtggtcatctgtgtcgccatccccttcctgctgcacacctgcaccacggccatggggaggctgctccctgggggcagagtctctggcagaggttattaataaacccttggagcatgtcctgtctggatgcgcagccactgctgggtgtgggattcagggacgagggcctggggtcggggcaggcccaggccaccgcctggcagaaccggagctcctacagacccatgggcagcttctggtggagaaaatacctcaagtttcttatctacaaaacaaaagggtccactttcacaaa

SEQ ID NO: 27006 - DNA, 838 bp, Artificial Sequence
  derived and/or modified sequence
agcatccctctggctccagagctcagagccacccacagccgcagccatgctgtgcctcctgctcaccctgggcgtggccctggtctgtggtgtcccggccatggacatcccccagaccaagcaggacctggagctcccaaagttggcagggacctggcactccatggccatggcgaccaacaacatctccctcatggcgacactgaaggcccctctgagggtccacatcacctcactgttgcccacccccgaggacaacctggagatcgttctgcacagatgggagaacaacagctgtgttgagaagaaggtccttggagagaagactgagaatccaaagaagttcaagatcaactatacggtggcgaacgaggccacgctgctcgatactgactacgacaatttcctgtttctctgcctacaggacaccaccacccccatccagagcatgatgtgccagtacctggagtcctggtggaggacgatgagatcatgcagggattcatcagggctttcaggcccctgcccaggcacctatggtacttgctggacttgaaacagatggaagagccgtgccgtttctaggtgagctcctgcctggtcctgcctcctggctcacctccgcctccaggaagaccagactcccacccttccacacctccagagcagtgggacttcctcctgccctttcaaagaataaccacagctcagaagacgatgacgtggtcatctgtgtcgccatccccttcctgctgcacacctgcaccacggccatggggaggctgctccctgggggcagagtctctggcagaggttattaataaacccttggagcatg

SEQ ID NO: 27007 - DNA, 543 bp, Artificial Sequence
  derived and/or modified sequence
atgctgtgcctgctgctgaccctgggcgtggccctggtgtgcggcgtgcccgccatggacatcccccagaccaagcaggacctggagctgcccaagctggccggcacctggcacagcatggccatggccaccaacaacatcagcctgatggccaccctgaaggcccccctgagagtgcacatcaccagcctgctgcccacccccgaggacaacctggagatcgtgctgcacagatgggagaacaacagctgcgtggagaagaaggtgctgggcgagaagaccgagaaccccaagaagttcaagatcaactacaccgtggccaacgaggccaccctgctggacaccgactacgacaacttcctgttcctgtgcctgcaggacaccaccacccccatccagagcatgatgtgccagtacctggccagagtgctggtggaggacgacgagatcatgcagggcttcatcagagccttcagacccctgcccagacacctgtggtacctgctggacctgaagcagatggaggagccctgcagattctag

SEQ ID NO: 27008 - DNA, 399 bp, Artificial Sequence
  derived and/or modified sequence
ctgatggccaccctgaaggcccccctgagagtgcacatcaccagcctgctgcccacccccgaggacaacctggagatcgtgctgcacagatgggagaacaacagctgcgtggagaagaaggtgctgggcgagaagaccgagaaccccaagaagttcaagatcaactacaccgtggccaacgaggccaccctgctggacaccgactacgacaacttcctgttcctgtgcctgcaggacaccaccacccccatccagagcatgatgtgccagtacctggccagagtgctggtggaggacgacgagatcatgcagggcttcatcagagccttcagacccctgcccagacacctgtggtacctgctggacctgaagcagatggaggagccctgcagattctag

SEQ ID NO: 27009 - DNA, 510 bp, Artificial Sequence
  derived and/or modified sequence
atgctgtgcctgctgctgaccctgggcgtggccctggtgtgcggcgtgcccgccatggacatcccccagaccaagcaggacctggagctgcccaagctggccggcacctggcacagcatggccatggccaccaacaacatcagcctgatggccaccctgaaggcccccctgagagtgcacatcaccagcctgctgcccacccccgaggacaacctggagatcgtgctgcacagatgggagaacaacagctgcgtggagaagaaggtgctgggcgagaagaccgagaaccccaagaagttcaagatcaactacaccgtggccaacgaggccaccctgctggacaccgactacgacaacttcctgttcctgtgcctgcaggacaccaccacccccatccagagcatgatgtgccagtacctggagagctggtggagaaccatgagaagctgcagagacagcagcggcctgagcggcccctgccccggcacctacggcacctgctggacctag

SEQ ID NO: 27010 - protein, 471 aa, Artificial Sequence
  derived and/or modified sequence
MSGASSSEQNNNSYETKTPNLRMSEKKCSWASYMTNSPTLIVMIGLPARGKTYVSKKLTRYLNWIGVPTKVFNLGVYRREAVKSYKSYDFFRHDNEEAMKIRKQCALVALEDVKAYLTEENGQIAVFDATNTTRERRDMILNFAEQNSFKVFFVESVCDDPDVIAANILEVKVSSPDYPERNRENVMEDFLKRIECYKVTYRPLDPDNYDKDLSFIKVINVGQRFLVNRVQDYIQSKIVYYLMNIHVQPRTIYLCRHGESEFNLLGKIGGDSGLSVRGKQFAQALRKFLEEQEITDLKVWTSQLKRTIQTAESLGVPYEQWKILNEIDAGVCEEMTYAEIEKRYPEEFALRDQEKYLYRYPGGESYQDLVQRLEPVIMELERQGNVLVISHQAVMRCLLAYFLDKGADELPYLRCPLHTIFKLTPVAYGCKVETIKLNVEAVNTHRDKPTAAETTLAVRRRPSAASLMLPC

SEQ ID NO: 27011 - protein, 373 aa, Artificial Sequence
  derived and/or modified sequence
MKIRKQCALVALEDVKAYLTEENGQIAVFDATNTTRERRDMILNFAEQNSFKVFFVESVCDDPDVIAANILEVKVSSPDYPERNRENVMEDFLKRIECYKVTYRPLDPDNYDKDLSFIKVINVGQRFLVNRVQDYIQSKIVYYLMNIHVQPRTIYLCRHGESEFNLLGKIGGDSGLSVRGKQFAQALRKFLEEQEITDLKVWTSQLKRTIQTAESLGVPYEQWKILNEIDAGVCEEMTYAEIEKRYPEEFALRDQEKYLYRYPGGESYQDLVQRLEPVIMELERQGNVLVISHQAVMRCLLAYFLDKGADELPYLRCPLHTIFKLTPVAYGCKVETIKLNVEAVNTHRDKPTAAETTLAVRRRPSAASLMLPC

SEQ ID NO: 27012 - protein, 264 aa, Artificial Sequence
  derived and/or modified sequence
MEDFLKRIECYKVTYRPLDPDNYDKDLSFIKVINVGQRFLVNRVQDYIQSKIVYYLMNIHVQPRTIYLCRHGESEFNLLGKIGGDSGLSVRGKQFAQALRKFLEEQEITDLKVWTSQLKRTIQTAESLGVPYEQWKILNEIDAGVCEEMTYAEIEKRYPEEFALRDQEKYLYRYPGGESYQDLVQRLEPVIMELERQGNVLVISHQAVMRCLLAYFLDKGAGCKVETIKLNVEAVNTHRDKPTAAETTLAVRRRPSAASLMLPC

SEQ ID NO: 27013 - DNA, 1416 bp, Artificial Sequence
  derived and/or modified sequence
atgtcaggtgctagttcttcggaacagaacaacaacagctacgaaactaaaacaccgaatctccggatgtcagagaagaaatgttcctgggcttcgtatatgacaaattcacctacacttatcgtgatgattggcttgcccgcgcgaggaaaaacatatgtctccaagaagcttactcggtacctgaactggattggagtaccgaccaaagttttcaatctcggcgtttacagaagagaagctgtgaagtcatacaagtcatacgacttttttcggcacgataacgaggaagcaatgaaaatcagaaaacagtgcgcgctggtggcactcgaggatgtaaaagcttatttgactgaggagaacggccagattgccgtatttgacgctaccaacacaaccagggagcggagggatatgattttgaacttcgcagaacagaactcgtttaaagtgttctttgttgagtcggtctgtgatgacccagacgtgatcgctgccaatattctggaagttaaggtcagcagccctgactatcctgaaaggaatagggagaacgtcatggaagacttcctgaagagaatcgagtgctacaaagtcacctatcggccactcgaccctgataactatgacaaggacctgtcattcataaaggttattaatgttggccagcgctttctggtgaaccgggttcaggattatattcagtccaaaattgtctattacctgatgaacatccatgtgcagcctaggactatctacttgtgtagacacggagagtctgaattcaaccttctcggtaagattggaggcgattccggcctaagcgttcgtggcaagcagttcgctcaggccctgagaaagttcctggaagaacaggaaattacagatctgaaagtatggacaagccaactgaagcgcaccattcagaccgccgagtccctcggagtgccctacgaacaatggaagatcctgaatgaaatcgatgcaggagtgtgcgaagaaatgacttacgcggagatcgagaagcggtaccccgaggagttcgcactgcgtgaccaagaaaagtatctgtacagataccccggcggcgaaagctaccaggacctggttcagcgcttagagcccgtcattatggaattggagagacaagggaacgtcttggtgatctctcaccaagccgttatgagatgccttctggcctatttcctcgataagggcgctgacgaattaccctatctccggtgccccctccatactatcttcaaactcaccccggtggcttatggctgtaaggtggaaacgattaaactcaacgtggaggccgtcaacactcatcgcgataagcccaccgccgccgaaacaacccttgcggtccgccgtaggcctagcgccgcctctctgatgcttccatgctag

SEQ ID NO: 27014 - DNA, 1122 bp, Artificial Sequence
  derived and/or modified sequence
atgaagatcaggaagcagtgtgccctggtggccttggaggacgtgaaagcctacttgacagaggagaacggccagattgcagtgttcgacgctactaacactactcgggagagaagggacatgatattgaacttcgccgaacaaaacagctttaaggtttttttcgtggagtccgtctgcgacgatccagacgtcattgccgctaacattcttgaggttaaggtgtccagtcccgactatcccgaaaggaaccgcgagaacgttatggaagacttcttaaaacgaatcgagtgttacaaagtcacctaccgtcccctggatccagacaactatgataaggacctgtctttcataaaggttatcaatgtcggacagcgctttctggtaaacagggtgcaggactatattcagtcaaaaatcgtgtactatttgatgaacatccatgtccaaccaagaaccatatacctttgtaggcacggggagtccgagtttaacctactggggaagatcgggggcgactcagggctgtctgtgaggggcaagcagttcgcccaggcactgcggaagttcttagaggagcaagagatcaccgaccttaaagtgtggacgtcacaactgaaacggacaattcaaactgccgaatcactgggtgtaccttatgagcagtggaaaatactcaatgaaatagacgccggcgtatgcgaggaaatgacctacgctgaaatcgagaaacgctacccagaagaattcgcgctgcgggatcaggaaaagtatctgtatcggtaccctgggggtgaatcttatcaggacttggttcaacgtcttgagccggtaataatggagcttgaaaggcaggggaacgtactggttatctcccaccaggcagttatgcggtgcttgcttgcctactttctggataagggggccgatgaactcccttatttgcggtgcccactacataccatctttaaacttacgccagtggcctatggctgcaaggtagaaacgattaagctgaatgtagaggctgtcaacacgcaccgggacaagccaacagccgctgaaacgacactcgccgtcagacggagaccgtccgccgcaagcctgatgcttccctgttag

SEQ ID NO: 27015 - DNA, 795 bp, Artificial Sequence
  derived and/or modified sequence
atggaggactttctcaagaggattgagtgctacaaggtgacctaccgtccactcgaccccgacaactacgacaaggacctgtcttttataaaggtgattaacgtgggccagcggttccttgttaacagagtacaggattatattcagagcaagattgtgtattatctcatgaatatccacgtgcagccccgcactatttacctgtgtcgccacggcgagagtgaattcaatctcctgggcaaaatcggaggcgattccgggctgagcgtgagaggaaaacagttcgctcaggccctgaggaagtttctggaggagcaggagataaccgacctgaaagtgtggacaagtcaactgaagcgcactatccagaccgccgagtcccttggcgtaccgtatgagcagtggaaaatcctgaacgagattgatgccggcgtctgcgaggagatgacctacgccgaaatcgagaaacggtatccagaggagttcgcccttcgcgaccaggagaagtatctatatcgctacccaggcggtgaatcctaccaggacctggtccagagactcgaacccgtgatcatggagctggagaggcaaggaaacgtgttggtgatttcccatcaggccgtaatgagatgcctccttgcctactttctcgataagggcgctgggtgtaaagtggaaactattaaactgaatgttgaagccgtcaacacccaccgggataagcctaccgctgcagagacgactctagccgtgcggcggcgtccatcagcggccagtttgatgctcccttgttag

SEQ ID NO: 27016 - DNA, 1416 bp, Artificial Sequence
  derived and/or modified sequence
atgtctggggccagcagcagcgagcagaacaacaacagctatgagaccaagacccccaacctgaggatgtctgagaagaagtgctcctgggccagctacatgaccaacagccccaccctgattgtgatgattggcctgcctgcccggggcaagacctacgtgtccaagaagctgacccgctacctgaactggattggagtgcccaccaaggtgttcaacctgggcgtgtaccgccgggaggccgtgaagagctacaagagctatgacttcttcagacatgacaatgaggaggccatgaagatcaggaagcagtgtgccctggtggccctggaggatgtgaaggcctacctgacagaggagaatggccagattgctgtgtttgatgccaccaacaccacccgggagcggcgggacatgatcctgaactttgctgagcagaacagcttcaaggtgttctttgtggagagcgtgtgtgatgatcctgatgtgattgctgccaacatcctggaggtgaaggtgagcagcccagactacccagagaggaaccgggagaatgtgatggaggacttcctgaagagaattgagtgctacaaggtgacctaccggcccctggaccctgacaactatgacaaggacctgtccttcatcaaggtgatcaacgtgggccagcgcttcctggtgaacagagtgcaggactacatccagagcaagatcgtgtactacctgatgaacatccacgtgcagcccaggaccatctacctgtgcagacatggagagagcgagttcaacctgctgggcaagattggaggagacagcggcctgtctgtgcggggcaagcagtttgcccaggccctgaggaagttcctggaggagcaggagatcacagacctgaaggtgtggaccagccagctgaagaggaccatccagacagctgagagcctgggcgtgccctatgagcagtggaagatcctgaatgaaattgatgctggggtgtgtgaggagatgacctacgccgagattgagaagcgctacccagaggagtttgccctgcgggaccaggagaagtacctgtaccgctacccaggaggagagagctaccaggacctggtgcagaggctggagcctgtgatcatggagctggagcggcagggcaatgtgctggtgatcagccaccaggccgtgatgcgctgcctgctggcctacttcctggacaagggagcagatgagctgccctacctgcgctgccccctgcacaccatcttcaagctgacccctgtggcctacggctgcaaggtggagaccatcaagctgaatgtggaggccgtgaacacccaccgggacaagcccacagctgctgagaccaccctggccgtgagaagaagaccttctgctgccagcctgatgctgccctgctag

SEQ ID NO: 27017 - DNA, 1122 bp, Artificial Sequence
  derived and/or modified sequence
atgaagatcaggaagcagtgtgccctggtggccctggaggatgtgaaggcctacctgacagaggagaatggccagattgctgtgtttgatgccaccaacaccacccgggagcggcgggacatgatcctgaactttgctgagcagaacagcttcaaggtgttctttgtggagagcgtgtgtgatgatcctgatgtgattgctgccaacatcctggaggtgaaggtgagcagcccagactacccagagaggaaccgggagaatgtgatggaggacttcctgaagagaattgagtgctacaaggtgacctaccggcccctggaccctgacaactatgacaaggacctgtccttcatcaaggtgatcaacgtgggccagcgcttcctggtgaacagagtgcaggactacatccagagcaagatcgtgtactacctgatgaacatccacgtgcagcccaggaccatctacctgtgcagacatggagagagcgagttcaacctgctgggcaagattggaggagacagcggcctgtctgtgcggggcaagcagtttgcccaggccctgaggaagttcctggaggagcaggagatcacagacctgaaggtgtggaccagccagctgaagaggaccatccagacagctgagagcctgggcgtgccctatgagcagtggaagatcctgaatgaaattgatgctggggtgtgtgaggagatgacctacgccgagattgagaagcgctacccagaggagtttgccctgcgggaccaggagaagtacctgtaccgctacccaggaggagagagctaccaggacctggtgcagaggctggagcctgtgatcatggagctggagcggcagggcaatgtgctggtgatcagccaccaggccgtgatgcgctgcctgctggcctacttcctggacaagggagcagatgagctgccctacctgcgctgccccctgcacaccatcttcaagctgacccctgtggcctacggctgcaaggtggagaccatcaagctgaatgtggaggccgtgaacacccaccgggacaagcccacagctgctgagaccaccctggccgtgagaagaagaccttctgctgccagcctgatgctgccctgctag

SEQ ID NO: 27018 - DNA, 795 bp, Artificial Sequence
  derived and/or modified sequence
atggaggacttcctgaagagaattgagtgctacaaggtgacctaccggcccctggaccctgacaactatgacaaggacctgtccttcatcaaggtgatcaacgtgggccagcgcttcctggtgaacagagtgcaggactacatccagagcaagatcgtgtactacctgatgaacatccacgtgcagcccaggaccatctacctgtgcagacatggagagagcgagttcaacctgctgggcaagattggaggagacagcggcctgtctgtgcggggcaagcagtttgcccaggccctgaggaagttcctggaggagcaggagatcacagacctgaaggtgtggaccagccagctgaagaggaccatccagacagctgagagcctgggcgtgccctatgagcagtggaagatcctgaatgaaattgatgctggggtgtgtgaggagatgacctacgccgagattgagaagcgctacccagaggagtttgccctgcgggaccaggagaagtacctgtaccgctacccaggaggagagagctaccaggacctggtgcagaggctggagcctgtgatcatggagctggagcggcagggcaatgtgctggtgatcagccaccaggccgtgatgcgctgcctgctggcctacttcctggacaagggagctggctgcaaggtggagaccatcaagctgaatgtggaggccgtgaacacccaccgggacaagcccacagctgctgagaccaccctggccgtgagaagaagacccagcgctgccagcctgatgctgccctgctag

SEQ ID NO: 27019 - DNA, 1416 bp, Artificial Sequence
  derived and/or modified sequence
atgagcggcgccagcagcagcgagcagaacaacaacagctacgagactaagaccccaaacctgaggatgagtgagaagaaatgtagctgggcaagctacatgacgaactctcccactctcatagtgatgatcgggctacctgctagaggtaaaacatacgtcagtaaaaagctgacaagatacctgaattggattggagtgcctacaaaggtttttaaccttggtgtttaccgacgggaggctgtcaaatcgtacaaatcttacgacttctttagacatgataatgaagaggctatgaagatccgcaagcaatgcgcgctggttgcactggaagacgtcaaggcctacttgaccgaggaaaatggtcagattgcagtttttgatgccactaacacaacaagggaaagaagggacatgatcctgaattttgcggaacagaatagctttaaagtcttctttgtggaaagtgtctgtgatgaccctgatgtgattgctgccaacatactcgaggtaaaagtgagtagccccgattacccagaacggaacagggagaacgtaatggaggactttctgaaacggatcgaatgctacaaggtgacatacaggcctctggatcccgataactatgacaaggatctcagtttcataaaagtcatcaatgtggggcagcggtttctagtgaacagagtgcaggattacatccaatcgaagattgtatactacttgatgaacattcacgtgcagcccaggaccatttacctgtgtcgacacggcgaaagcgaatttaatttgctcggaaagataggaggcgactcaggtttaagcgtgcgcgggaaacagttcgcccaggctcttcgaaaattcctggaggagcaggaaatcacagatctgaaggtttggactagtcaactgaaaaggacaattcaaacagccgagagtcttggagtcccgtacgagcaatggaaaatcctaaacgaaatcgatgctggggtctgcgaggagatgacatatgccgaaattgagaaacgttaccccgaggagttcgcgttacgcgaccaggagaagtatctgtataggtaccctggtggcgaatcgtaccaggatctcgtacagcgtctggagcccgtgattatggagttggagcgacaagggaatgtgctcgtgatttctcaccaggctgtgatgcgatgcttgctggcgtactttcttgataagggagcggatgaattgccctacctcagatgcccacttcacacaattttcaaactgacccctgtcgcctacggctgcaaggttgaaaccattaagctgaatgtcgaggctgttaacacccaccgggacaaacccaccgcggctgaaaccactctggcagtgaggaggagaccatccgcagcgagtctgatgttaccctgctag

SEQ ID NO: 27020 - DNA, 1122 bp, Artificial Sequence
  derived and/or modified sequence
atgaagatccggaagcagtgcgccctggtggccctggaggacgtgaaagcctacttaacagaagagaatggtcagattgccgttttcgacgccaccaatacgactcgagaacgtagggacatgatcctcaacttcgccgagcagaacagctttaaggtgttttttgtcgagtctgtctgcgatgacccagacgttattgccgccaatatactggaggtcaaagtgagttcccccgactacccagaaaggaacagagagaacgtaatggaggactttcttaaacgcatcgagtgctataaggtgacctatagaccgctggatccagacaattacgataaagacctgtccttcattaaagtgatcaacgtgggacagaggtttctggtgaaccgagtccaagattatatacagagtaagattgtgtattacctgatgaacatccacgtgcagcctagaaccatatatttatgtaggcacggcgagtccgagttcaatctgctgggcaagatcggaggcgactctggtctatctgtgcgcggaaagcagttcgcacaggccctgagaaagttccttgaggaacaggaaataactgacctgaaggtctggacgagccagctgaagaggactattcagactgctgagtcgcttggcgtgccctacgagcagtggaagatcctgaatgaaattgacgcaggagtgtgcgaggagatgacctacgcggagattgagaagcgttatcccgaagagtttgcccttcgcgaccaagagaaatacctgtacaggtaccctggcggcgagtcctatcaagatcttgttcagcggctggagcccgtcattatggagctggagaggcaagggaacgtgctggttattagccaccaagcagtgatgcggtgcctgttggcatattttcttgacaaaggcgcagacgaactgccctatttgcgctgccctctgcataccatctttaaactcaccccagtggcctatggatgtaaggtggagacaattaagctcaatgtggaggcagtcaacacacatcgtgacaagccaaccgccgctgaaaccacactcgctgtccgaaggcgtcccagcgcagcttccctgatgctgccctgttag

SEQ ID NO: 27021 - DNA, 795 bp, Artificial Sequence
  derived and/or modified sequence
atggaggacttcctgaagcggatcgagtgctacaaggtgacctaccgaccattggatcctgacaattatgacaaggacctgagcttcataaaagtcatcaacgtggggcagcgcttcctggttaaccgcgtgcaggattacattcaaagcaaaatagtctattacctcatgaacattcatgtgcaacctcgaacaatctacctgtgcaggcatggagagtccgagttcaaccttctgggtaaaattgggggtgattctggcctatccgtcagggggaagcagttcgcacaggcattgcgcaagtttctcgaggagcaggagatcacagacctgaaagtgtggacaagccagcttaaacgtactatccaaactgccgagagcctgggtgtcccttacgaacaatggaagatcctcaatgaaatagacgctggcgtgtgcgaggagatgacttatgccgagattgagaaaagatacccagaggagtttgcacttagggaccaggaaaaatacctctatagatatcctggtggcgagagttatcaggaccttgtgcaaagactggaacctgtaataatggagttggaacgtcagggcaatgtccttgtcattagccaccaagcagttatgagatgtctgctggcgtacttcttagataagggggcgggttgcaaagttgaaaccatcaaactgaacgtagaggccgtgaacactcacagggataagcccacagctgccgagacaacgttagccgtgagacgccgtccaagcgccgcgtctttaatgctgccttgttag

SEQ ID NO: 27022 - DNA, 1416 bp, Artificial Sequence
  derived and/or modified sequence
atgagcggagcaagctcgagcgagcagaacaataacagctatgagacaaaaacccctaatctcaggatgtccgagaagaagtgctcctgggctagttatatgactaattccccaaccttgatcgtaatgattggcctcccagctagggggaagacttacgtgagcaaaaaactgacccgataccttaattggatcggtgtcccgacaaaggtgttcaacttgggagtataccggagggaggccgttaaatcctacaaatcctatgacttcttcagacacgataacgaggaggctatgaagatccgcaaacagtgcgcccttgtggcccttgaggacgtcaaggcatatctcacagaagagaatggacaaatcgccgtctttgacgcaaccaacactaccagggagcgcagagacatgattcttaacttcgcagaacagaatagtttcaaggtgttcttcgtcgagagcgtgtgcgacgacccagacgtgatcgcagcgaacatcctggaggtgaaggtgtcgagccctgactacccagaacggaatagggagaatgtgatggaggattttcttaaacgcatcgaatgctacaaggtgacttataggccactggacccggacaactatgacaaggacttatcttttattaaggtcatcaacgtaggtcagagattcctggtcaaccgtgtccaagactatatccagtccaagattgtgtactacctaatgaacattcatgtacagcccagaacaatttacctatgccggcacggggagagcgagttcaatctgctgggcaagataggcggagattccggcctaagcgtgaggggaaagcagttcgcacaagctctccggaagttccttgaggagcaggaaatcactgatctgaaagtttggactagccagctgaaaaggacgatccagacggccgaatccctcggtgttccctatgagcaatggaagatcctaaacgagatcgatgcaggagtgtgcgaagagatgacctatgcagagatcgaaaaaaggtaccccgaggagtttgcgcttagggaccaggaaaagtacctttacaggtaccccggtggcgagtcttaccaggatctggtccaaagactggagccggtaatcatggagctggagcgccaaggaaacgtgctcgttattagccaccaagcagtgatgcgctgtttacttgcctattttctggataagggcgctgatgagctgccttatctccgctgcccgctccacaccatttttaagcttacacctgtggcgtacgggtgtaaggttgagaccatcaagctgaatgttgaagccgttaacacccacagagacaagcctaccgccgctgagaccacactcgcggtgagacgaagaccaagcgcagcttccttaatgctgccttgctag

SEQ ID NO: 27023 - DNA, 1122 bp, Artificial Sequence
  derived and/or modified sequence
atgaagatacgcaaacagtgtgctctcgtggccctggaggacgtgaaagcttacctgaccgaggaaaacgggcagatcgccgtcttcgacgcgactaacactacacgggaaaggagagacatgatactaaattttgctgagcagaatagtttcaaggtgttctttgtggagagtgtttgcgatgatcccgacgtcatcgcggctaacatcctggaggttaaggtatcaagccccgactacccggagaggaaccgggaaaacgtcatggaagacttcctcaaacggattgaatgctataaggtgacctaccggcctctcgacccagataattacgacaaagacctgtctttcatcaaggtcattaacgtggggcagcgatttctagtgaatagagtccaggactacatccaaagtaagattgtttactatctgatgaacatccacgtacagccacgaaccatctacctgtgtcgccacggggagtcggaatttaacctgttgggaaagatcgggggagactctggactgtctgtgcgaggaaagcagtttgctcaggccctgcgcaaatttctggaggaacaagaaatcaccgacctgaaagtgtggacatctcagctgaagagaaccattcagacagccgagtcccttggggtgccctacgagcagtggaagattctgaacgagatcgatgctggggtgtgcgaggagatgacatatgccgaaattgagaaaagatatcccgaggaattcgcactgagagaccaggagaaatatttgtatcgctaccccggaggggagtcctaccaggaccttgtgcagagactggaacctgtgatcatggaattagagcgtcagggcaatgtacttgtgatttcccaccaggcggtgatgagatgcctactggcttactttctggacaagggagcagacgagttgccgtacctaaggtgtcctttgcataccatctttaaactgacccctgtcgcatacgggtgtaaggtggagacaattaaactgaacgtggaagccgtgaacacccacagagacaagccgacagccgcagagacgactctcgctgtcaggaggaggccctctgccgctagcctgatgttaccctgctag

SEQ ID NO: 27024 - DNA, 795 bp, Artificial Sequence
  derived and/or modified sequence
atggaggacttcttaaaacgcattgagtgctacaaggtgacctacaggcccttggatcccgacaactacgacaaagacctaagcttcataaaggttataaatgtcggccagagatttctcgtgaaccgcgtacaagactatatccagtcgaagatcgtgtactacctgatgaatatccatgttcaaccacggacaatttatctttgcagacacggggaaagcgagttcaacttgctcggcaagatcggtggagactccggactttccgtacgcggtaaacagttcgcgcaggccctgcggaagtttttagaggagcaagagattaccgacctgaaagtgtggacatcgcagttgaagagaactatacagactgcagagtccctgggtgttccgtatgagcagtggaaaatcctcaatgaaatcgatgcaggagtctgcgaagaaatgacgtacgcggaaatagaaaaacggtatcccgaggagtttgctttgcgagaccaggaaaaatatctttaccggtaccccggtggggagtcttaccaagatctggtgcagcgtttggaacccgtcatcatggaactggagcgccaggggaatgtactcgtgatctcacaccaggccgtgatgcgctgtctcctggcttacttcctggacaagggtgcaggctgtaaggtggagaccattaagctaaatgtcgaagctgtgaatacccatcgcgacaagccaaccgccgctgagaccacgctcgccgtgcgacggcgtccttctgccgcttcattaatgctgccatgttag

SEQ ID NO: 27025 - DNA, 3494 bp, Artificial Sequence
  derived and/or modified sequence
gttacagggcaggcgccggggccaaggcagggagggatcttaggagagatcgtaggacatctgaagagctgccatgtctggggcatcttcctcagaacagaacaacaacagctatgaaaccaaaaccccaaatcttcgaatgtcagagaagaaatgttcatgggcctcctacatgaccaactccccgactctgatcgttatgattggtttgccagcccggggtaaaacctacgtgtccaagaaactaacacgctacctcaactggattggagtccccaccaaagtgtttaatcttggggtgtatcggcgtgaagcagtcaagtcctataagtcctacgacttctttcggcatgacaatgaggaggccatgaagatccgcaaacagtgtgctctggtggcgctggaagatgttaaggcgtatctcactgaggagaatggtcagattgcggtgtttgatgccaccaatacaacccgggagaggagggacatgattttgaactttgctgaacagaattccttcaaggtattctttgtggaatccgtctgtgatgatcctgatgtcattgctgccaatattctggaggttaaggtatcaagccctgactatcctgaaaggaacagagagaacgtgatggaggacttcctgaagagaattgaatgctacaaagttacctaccgacctcttgacccagacaactatgacaaggatctttctttcatcaaggtgataaacgtgggccagcgatttttagtcaacagagtccaggactacatccagagcaagatagtctactacctcatgaatatccacgtccagcctcgcaccatttacctttgccggcatggagaaagcgagttcaatctcttggggaagattgggggtgactctggcctctcggtgcggggaaagcagtttgcccaagctctaaggaaatttctggaggaacaggaaataacagacctcaaagtgtggacaagccagttgaagaggaccatacagactgctgaatctctcggggtgccctatgagcagtggaagattctgaatgagattgatgctggtgtgtgtgaagagatgacctatgcagagattgagaaacggtacccagaagagtttgcacttcgagatcaagagaagtatctgtatcgatatcctggtggggagtcataccaggacctggtgcagcggctggagcctgtcatcatggagctggaacgtcagggcaatgtcctcgtcatctcccaccaggctgtcatgcgctgcctcctggcctacttcttggataagggcgcagatgagctaccatacttgagatgccctctccataccatcttcaaacttactcctgtggcctatgggtgcaaagtggaaacaattaaacttaacgtggaggctgtgaacacgcaccgtgacaagccaactgcagcagagaccacactggctgtgcgcagacgcccctccgcagcgtccctcatgttgccttgctaatgatgtggatgttcaggcctcacctctccaaacgactgggatctactgaaaagcttgggatgtcagcttcacagaggctagaacaggaagttaagtgggaactggactttgggggccaccaaaacgaggcctggagaaacgtcaccatatttcctcccctcctgcctaatgggaatatcagttacactgaaaaatttaacttccctgtgcctcaaaacatttagcaacctgaaccagtgactttttgtcatctctgtgctgagtttggtccaagttggtcaatctcattctgtataggcatttaacatcctacctgtgactgtctgcatcctttgctggctcttttttgcccaaagtgcaaatgcacttcttcagatttacttttcaagtgagaaggtaagagctggtctctgccactgttccaggcgagcaggctagagtctaatatacttatgctagcagttaccatttgccacattggaagcaagagacaaatcaccaggtgaatggagggtcttctgagaaattcagtccctaaaacatcttctctgccttgatagaagaacagtgtcagtggcaaccttttcatttagagaagtttttcttgttccaggcccttcaggacaggatctgactgcaagactccccaaaatgggtacccatcttctaagttcccttttgtagctactgtacttttgacttgatgcatgtgcctctcatgcatcaagatggggctgatgtggttctcctgggtggttgggaatgtggactagacagaaaagtagagtgccatttatatcacgtgagtaagtcaagaaagctccttgagaatcagcccgatcagggagtgttttggcttcagaacaggtggaaggagacacgcccctctgtgggctctgtcaccatgatacagtccttgagagagctgtggctgtgacttggagggcagtagtctcctgatacctgcctcttggccactggtcactattgtggtcactgatctctcatataaaagtgagggtggcggggtcatggaccagcgcctcagtgcattagtcattcgcttttccttacagacaaatcagataactcttccccagtgattgtcaaatgtatgaatgtatctctgtaaatgtggttttgacatgtcactgttactgaaggagagtatggaatccccacaggatattatatcttgcaaggaaagtctattttttaaagaatagtatgtttttagctttacttttctttcttttccttttcactcaaatgctcacttgctgggcaaaagggtgagtagcaagaaaagtaatgatatgtagcttttctcaaatggttcttttatactgtggatgatacaggactctgttacctaagatgtgataagctgggctgcaggcggttcagcatccagcaactaggagctgcttttctacgtacaaagctgccttcaggaaggctccttaccctgtagcagatgattttcatctggctgcctaccgcatgctgtactataatgatttagttgtgatatggatttctctctgcatcgaaaactgtcttttgatgatcagacaatgtttatatttagttatttattctatccatgtaaggcatttttgagttttcttgtcactgtttgcatgtatttaatcagaatgtaatataatttatgttgtcaggtttttttttgtttgtttgtttggggttttttttgtagaaatttaggtagttagagcttttaagtctaatgtcatattaacttaagttaaatttccagaacgtagatatctgtcttctgtaaaaggaaaataacgatgttaagggacagtgaattttttttgaatactttgtttctcattgatttttattgtaagtgtaaaccaagagatgcatttctctggagaagtgtttatctcctggattaataaaatcatgctaaaatatgcgagtaatatgtattgcttttgtaataagaacataaaataaaattatttttaattaa

SEQ ID NO: 27026 - DNA, 1783 bp, Artificial Sequence
  derived and/or modified sequence
tttcccagtattgcctcactatagaagtctggatcgcttgctacaatttgtgctatgaggcgtctcatctcaggggcacaagctggattcaagactcctccttcgacgacatagtacacactagtaaagaggcaagagttgtctgctgggaccacggttctgacatctgaagagctgccatgtctggggcatcttcctcagaacagaacaacaacagctatgaaaccaaaaccccaaatcttcgaatgtcagagaagaaatgttcatgggcctcctacatgaccaactccccgactctgatcgttatgattggtttgccagcccggggtaaaacctacgtgtccaagaaactaacacgctacctcaactggattggagtccccaccaaaggccaagaaacaagtcccatttggtggggccatcatattattttgctgctgaaggatttgggtgtcttctacagtgtttaatcttggggtgtatcggcgtgaagcagtcaagtcctataagtcctacgacttctttcggcatgacaatgaggaggccatgaagatccgcaaacagtgtgctctggtggcgctggaagatgttaaggcgtatctcactgaggagaatggtcagattgcggtgtttgatgccaccaatacaacccgggagaggagggacatgattttgaactttgctgaacagaattccttcaaggtattctttgtggaatccgtctgtgatgatcctgatgtcattgctgccaatattctggaggttaaggtatcaagccctgactatcctgaaaggaacagagagaacgtgatggaggacttcctgaagagaattgaatgctacaaagttacctaccgacctcttgacccagacaactatgacaaggatctttctttcatcaaggtgataaacgtgggccagcgatttttagtcaacagagtccaggactacatccagagcaagatagtctactacctcatgaatatccacgtccagcctcgcaccatttacctttgccggcatggagaaagcgagttcaatctcttggggaagattgggggtgactctggcctctcggtgcggggaaagcagtttgcccaagctctaaggaaatttctggaggaacaggaaataacagacctcaaagtgtggacaagccagttgaagaggaccatacagactgctgaatctctcggggtgccctatgagcagtggaagattctgaatgagattgatgctggtgtgtgtgaagagatgacctatgcagagattgagaaacggtacccagaagagtttgcacttcgagatcaagagaagtatctgtatcgatatcctggtggggagtcataccaggacctggtgcagcggctggagcctgtcatcatggagctggaacgtcagggcaatgtcctcgtcatctcccaccaggctgtcatgcgctgcctcctggcctacttcttggataagggcgcagatgagctaccatacttgagatgccctctccataccatcttcaaacttactcctgtggcctatgggtgcaaagtggaaacaattaaacttaacgtggaggctgtgaacacgcaccgtgacaagccaactgcagcagagaccacactggctgtgcgcagacgcccctccgcagcgtccctcatgttgccttgctaatgatgtggatgttcaggcctcacctctccaaacgactgggatctactgaaaagcttgggatgtcagcttcacagaggctagaacaggaagttaagtgggaactggactttggggg

SEQ ID NO: 27027 - DNA, 1245 bp, Artificial Sequence
  derived and/or modified sequence
gatgaggcctttactggttcctatgatttcaggaggttaaggtatcaagccctgactatcctgaaaggaacagagagaacgtgatggaggacttcctgaagagaattgaatgctacaaagttacctaccgacctcttgacccagacaactatgacaaggatctttctttcatcaaggtgataaacgtgggccagcgatttttagtcaacagagtccaggactacatccagagcaagatagtctactacctcatgaatatccacgtccagcctcgcaccatttacctttgccggcatggagaaagcgagttcaatctcttggggaagattgggggtgactctggcctctcggtgcggggaaagcagtttgcccaagctctaaggaaatttctggaggaacaggaaataacagacctcaaagtgtggacaagccagttgaagaggaccatacagactgctgaatctctcggggtgccctatgagcagtggaagattctgaatgagattgatgctggtgtgtgtgaagagatgacctatgcagagattgagaaacggtacccagaagagtttgcacttcgagatcaagagaagtatctgtatcgatatcctggtggggagtcataccaggacctggtgcagcggctggagcctgtcatcatggagctggaacgtcagggcaatgtcctcgtcatctcccaccaggctgtcatgcgctgcctcctggcctacttcttggataagggcgcagggtgcaaagtggaaacaattaaacttaacgtggaggctgtgaacacgcaccgtgacaagccaactgcagcagagaccacactggctgtgcgcagacgcccctccgcagcgtccctcatgttgccttgctaatgatgtggatgttcaggcctcacctctccaaacgactgggatctactgaaaagcttgggatgtcagcttcacagaggctagaacaggaagttaagtgggaactggactttgggggccaccaaaacgaggcctggagaaacgtcaccatatttcctcccctcctgcctaatgggaatatcagttacactgaaaaatttaacttccctgtgcctcaaaacatttagcaacctgaaccagtgactttttgtcatctctgtgctgagtttggtccaagttggtcaatctcattctgtataggcatttaacatcctacctgtgactgtctgcatcctttgctggctcttttttgcccaaagtgcaaatgcac

SEQ ID NO: 27028 - DNA, 1416 bp, Artificial Sequence
  derived and/or modified sequence
atgagcggcgccagcagcagcgagcagaacaacaacagctacgagaccaagacccccaacctgagaatgagcgagaagaagtgcagctgggccagctacatgaccaacagccccaccctgatcgtgatgatcggcctgcccgccagaggcaagacctacgtgagcaagaagctgaccagatacctgaactggatcggcgtgcccaccaaggtgttcaacctgggcgtgtacagaagagaggccgtgaagagctacaagagctacgacttcttcagacacgacaacgaggaggccatgaagatcagaaagcagtgcgccctggtggccctggaggacgtgaaggcctacctgaccgaggagaacggccagatcgccgtgttcgacgccaccaacaccaccagagagagaagagacatgatcctgaacttcgccgagcagaacagcttcaaggtgttcttcgtggagagcgtgtgcgacgaccccgacgtgatcgccgccaacatcctggaggtgaaggtgagcagccccgactaccccgagagaaacagagagaacgtgatggaggacttcctgaagagaatcgagtgctacaaggtgacctacagacccctggaccccgacaactacgacaaggacctgagcttcatcaaggtgatcaacgtgggccagagattcctggtgaacagagtgcaggactacatccagagcaagatcgtgtactacctgatgaacatccacgtgcagcccagaaccatctacctgtgcagacacggcgagagcgagttcaacctgctgggcaagatcggcggcgacagcggcctgagcgtgagaggcaagcagttcgcccaggccctgagaaagttcctggaggagcaggagatcaccgacctgaaggtgtggaccagccagctgaagagaaccatccagaccgccgagagcctgggcgtgccctacgagcagtggaagatcctgaacgagatcgacgccggcgtgtgcgaggagatgacctacgccgagatcgagaagagataccccgaggagttcgccctgagagaccaggagaagtacctgtacagataccccggcggcgagagctaccaggacctggtgcagagactggagcccgtgatcatggagctggagagacagggcaacgtgctggtgatcagccaccaggccgtgatgagatgcctgctggcctacttcctggacaagggcgccgacgagctgccctacctgagatgccccctgcacaccatcttcaagctgacccccgtggcctacggctgcaaggtggagaccatcaagctgaacgtggaggccgtgaacacccacagagacaagcccaccgccgccgagaccaccctggccgtgagaagaagacccagcgccgccagcctgatgctgccctgctag

SEQ ID NO: 27029 - DNA, 1122 bp, Artificial Sequence
  derived and/or modified sequence
atgaagatcagaaagcagtgcgccctggtggccctggaggacgtgaaggcctacctgaccgaggagaacggccagatcgccgtgttcgacgccaccaacaccaccagagagagaagagacatgatcctgaacttcgccgagcagaacagcttcaaggtgttcttcgtggagagcgtgtgcgacgaccccgacgtgatcgccgccaacatcctggaggtgaaggtgagcagccccgactaccccgagagaaacagagagaacgtgatggaggacttcctgaagagaatcgagtgctacaaggtgacctacagacccctggaccccgacaactacgacaaggacctgagcttcatcaaggtgatcaacgtgggccagagattcctggtgaacagagtgcaggactacatccagagcaagatcgtgtactacctgatgaacatccacgtgcagcccagaaccatctacctgtgcagacacggcgagagcgagttcaacctgctgggcaagatcggcggcgacagcggcctgagcgtgagaggcaagcagttcgcccaggccctgagaaagttcctggaggagcaggagatcaccgacctgaaggtgtggaccagccagctgaagagaaccatccagaccgccgagagcctgggcgtgccctacgagcagtggaagatcctgaacgagatcgacgccggcgtgtgcgaggagatgacctacgccgagatcgagaagagataccccgaggagttcgccctgagagaccaggagaagtacctgtacagataccccggcggcgagagctaccaggacctggtgcagagactggagcccgtgatcatggagctggagagacagggcaacgtgctggtgatcagccaccaggccgtgatgagatgcctgctggcctacttcctggacaagggcgccgacgagctgccctacctgagatgccccctgcacaccatcttcaagctgacccccgtggcctacggctgcaaggtggagaccatcaagctgaacgtggaggccgtgaacacccacagagacaagcccaccgccgccgagaccaccctggccgtgagaagaagacccagcgccgccagcctgatgctgccctgctag

SEQ ID NO: 27030 - DNA, 795 bp, Artificial Sequence
  derived and/or modified sequence
atggaggacttcctgaagagaatcgagtgctacaaggtgacctacagacccctggaccccgacaactacgacaaggacctgagcttcatcaaggtgatcaacgtgggccagagattcctggtgaacagagtgcaggactacatccagagcaagatcgtgtactacctgatgaacatccacgtgcagcccagaaccatctacctgtgcagacacggcgagagcgagttcaacctgctgggcaagatcggcggcgacagcggcctgagcgtgagaggcaagcagttcgcccaggccctgagaaagttcctggaggagcaggagatcaccgacctgaaggtgtggaccagccagctgaagagaaccatccagaccgccgagagcctgggcgtgccctacgagcagtggaagatcctgaacgagatcgacgccggcgtgtgcgaggagatgacctacgccgagatcgagaagagataccccgaggagttcgccctgagagaccaggagaagtacctgtacagataccccggcggcgagagctaccaggacctggtgcagagactggagcccgtgatcatggagctggagagacagggcaacgtgctggtgatcagccaccaggccgtgatgagatgcctgctggcctacttcctggacaagggcgccggctgcaaggtggagaccatcaagctgaacgtggaggccgtgaacacccacagagacaagcccaccgccgccgagaccaccctggccgtgagaagaagacccagcgccgccagcctgatgctgccctgctag

SEQ ID NO: 27031 - protein, 291 aa, Artificial Sequence
  derived and/or modified sequence
MAVQVVQAVQAVHLESDAFLVCLNHALSTEKEEVMGLCIGELNDDTRSDSKFAYTGTEMRTVAEKVDAVRIVHIHSVIILRRSDKRKDRVEISPEQLSAASTEAERLAELTGRPMRVVGWYHSHPHITVWPSHVDVRTQAMYQMMDQGFVGLIFSCFIEDKNTKTGRVLYTCFQSIQAQKSSEYERIEIPIHIVPHVTIGKVCLESAVELPKILCQEEQDAYRRIHSLTHLDSVTKIHNGSVFTKNLCSQMSAVSGPLLQWLEDRLEQNQQHLQELQQEKEELMQELSSLE

SEQ ID NO: 27032 - protein, 248 aa, Artificial Sequence
  derived and/or modified sequence
MAVQVVQAVQAVHLESDAFLVCLNHALSTEKEEVMGLCIGEVSSPSRSDSKFAYTGTEMRTVAEKVDAVRIVHIHSVIILRRSDKRKDRVEISPEQLSAASTETHRLAELTGRPMRVVGWYHSHPHITVWPSHVDVRTQAMYQMMDQGFVGLIFSCFIEDKNTKTGRVLYTCFQSIQAQKSSDLTHLDSVTKIHNGSEVFTKNLCSQMSAVSGPLLQWLEDRLEQNQQHLQELQQEKEELMQELSSLE

SEQ ID NO: 27033 - DNA, 876 bp, Artificial Sequence
  derived and/or modified sequence
atggcggtgcaggtcgtgcaggccgtgcaagcagtccatctcgagtcagacgctttcctggtgtgcctgaatcacgcattaagtaccgaaaaggaagaggtcatggggctctgtatcggcgagctaaatgacgatacgcggtctgacagcaagtttgcatacacagggaccgaaatgcggacagtcgcagaaaaggtcgacgcagtcagaatagtccatatccactccgtaatcattctgcgtcggagcgacaaaaggaaggacagagtggaaatcagccccgaacaactgtcagctgcctcaacggaggcggagagactcgcagaactcactgggagaccaatgcgtgtggtggggtggtatcacagccacccccacataacagtatggcccagccacgttgatgtgagaacccaggccatgtaccagatgatggatcaaggattcgtagggctgatcttttcctgctttattgaagacaagaacaccaagacaggccgcgtgctgtatacctgtttccagtctatacaggcccaaaaatcgtccgaatatgagaggatcgaaataccgatccacatagtcccccacgtcacaattggcaaagtgtgcctggaatctgcggtcgagttacccaagatactctgtcaggaagaacaagacgcttacaggaggatccatagcctcactcatctcgattcggtcaccaagattcacaacggtagcgtgtttaccaagaatttgtgctcgcagatgtcagccgtgagcggacctctacttcagtggcttgaggaccgtctcgagcagaaccagcagcatttgcaggagctgcaacaggaaaaggaggagctcatgcaggaactcagctctcttgaatag

SEQ ID NO: 27034 - DNA, 747 bp, Artificial Sequence
  derived and/or modified sequence
atggctgtccaagtcgtgcaggcagtgcaagctgtgcatctagagtctgatgccttccttgtgtgccttaatcatgctttaagcactgagaaggaggaggtcatggggctttgtatcggcgaggtgagctccccatctagatccgattctaagttcgcttacaccggaactgagatgcgaactgtagccgagaaggtcgatgctgtgcggatcgtccacatccatagtgtgatcatcttacgtcgaagcgataagaggaaggacagagttgagattagtccagagcaactctctgccgccagtacagagacacacaggttggccgagctcacgggtcgacctatgagggtggttggctggtaccatagccaccctcacatcacggtctggccctcacatgtggatgtaagaacgcaggccatgtaccaaatgatggatcagggcttcgtaggcctcatatttagctgttttatcgaagacaagaacaccaagactggacgggtattgtacacctgtttccaatcgattcaagcccagaagagctctgacctgacacatctagactcagtgaccaagatccacaacgggtccgaagtgttcacaaagaacctgtgctcccagatgagcgctgtgtctggcccactgcttcagtggctggaggatcggttggagcagaaccagcaacatttgcaagagctgcagcaggaaaaagaggagctgatgcaggagctcagttccctagagtag

SEQ ID NO: 27035 - DNA, 876 bp, Artificial Sequence
  derived and/or modified sequence
atggctgtgcaggtggtgcaggccgtgcaggccgtgcacctggagagtgatgccttcctggtgtgcctgaaccacgccctgagcacagagaaggaggaggtgatgggcctgtgcattggagagctgaatgatgacaccaggagtgacagcaagtttgcctacacaggaacagagatgaggacagtggccgagaaggtggatgctgtgagaattgtgcacatccacagcgtcatcatcctgcggcggagtgacaagaggaaggacagagtggagatcagccctgagcagctgtctgctgccagcacagaggccgagcggctggccgagctgaccggccggcccatgagggtggtgggctggtaccacagccacccccacatcaccgtgtggcccagccacgtggatgtgaggacccaggccatgtaccagatgatggaccagggctttgtgggcctcatcttcagctgcttcatcgaggacaagaacaccaagacaggccgggtgctgtacacctgcttccagagcatccaggcccagaagagcagtgaatatgaaagaattgagatccccatccacatcgtgccccacgtgaccatcggcaaggtgtgcctggagagcgctgtggagctgcccaagatcctgtgccaggaggagcaggatgcctaccgccgcatccacagcctgacccacctggacagcgtgaccaagatccacaatggatctgtgttcaccaagaacctgtgcagccagatgtctgctgtgtctggccccctgctgcagtggctggaggaccggctggagcagaaccagcagcacctgcaggagctgcagcaggagaaggaggagctgatgcaggagctgagcagcctggagtag

SEQ ID NO: 27036 - DNA, 747 bp, Artificial Sequence
  derived and/or modified sequence
atggctgtgcaggtggtgcaggccgtgcaggccgtgcacctggagagtgatgccttcctggtgtgcctgaaccacgccctgagcacagagaaggaggaggtgatgggcctgtgcattggagaggtgagcagccccagcagaagtgacagcaagtttgcctacacaggaacagagatgaggacagtggccgagaaggtggatgctgtgagaattgtgcacatccacagcgtcatcatcctgcggcggagtgacaagaggaaggacagagtggagatcagccctgagcagctgtctgctgccagcacagagacccaccggctggccgagctgaccggccggcccatgagggtggtgggctggtaccacagccacccccacatcaccgtgtggcccagccacgtggatgtgaggacccaggccatgtaccagatgatggaccagggctttgtgggcctcatcttcagctgcttcatcgaggacaagaacaccaagacaggccgggtgctgtacacctgcttccagagcatccaggcccagaagagcagtgacctgacccacctggacagcgtgaccaagatccacaatggaagtgaggtgttcaccaagaacctgtgcagccagatgtctgctgtgtctggccccctgctgcagtggctggaggaccggctggagcagaaccagcagcacctgcaggagctgcagcaggagaaggaggagctgatgcaggagctgagcagcctggagtag

SEQ ID NO: 27037 - DNA, 876 bp, Artificial Sequence
  derived and/or modified sequence
atggccgtgcaggtggtgcaggccgtgcaggccgtgcacctggagtcagacgccttcctggtctgtctgaaccatgccttgtctactgagaaggaagaggtaatgggtctttgtataggcgagctcaatgacgacactcgcagcgacagtaaattcgcctatacaggtaccgagatgcggactgtcgctgagaaagttgatgctgttagaatagtccacatccattctgtcatcatcctacgaagaagcgacaaaagaaaagatagggtggaaattagccctgaacagctgagcgcagcatcaacagaggcggaacggctggctgagttaacagggcggcctatgagagtagtggggtggtaccactcccaccctcacatcaccgtctggccatcgcacgtggatgtgagaactcaggccatgtatcagatgatggaccagggatttgtcgggttgatatttagctgtttcattgaagataaaaatactaaaacaggaagagtgctgtatacctgtttccagagcatccaggcccagaaatcaagcgagtatgagcgaatcgaaatcccaattcacatcgtgccccacgtcacaatcggcaaagtgtgtcttgagagcgccgtagaactgcctaagatactatgccaagaggagcaggatgcttaccgccgtatccattctctcactcatttagattccgtcacaaagatccataacggctcagtctttaccaaaaacctgtgctcacaaatgtccgccgttagcgggccactgctacagtggctggaggatcgattggaacagaaccagcagcatctccaagaactgcaacaggagaaagaagagctgatgcaagagctgagcagcttggagtag

SEQ ID NO: 27038 - DNA, 747 bp, Artificial Sequence
  derived and/or modified sequence
atggccgtgcaggtggtgcaggccgtgcaggccgtgcacctggagagtgatgcgttcctggtgtgtctaaaccatgccctgagcaccgaaaaagaagaggtgatggggctgtgcataggggaggtatccagtccatcacgcagtgactccaagtttgcatatacagggactgagatgcgaacggttgctgagaaagtggacgcagtgcgtattgttcatatccattccgtcattatcttgagacgcagcgataagaggaaagatagggtggagatttctcccgagcagctctctgccgctagtaccgagacgcatcgactggccgaactgaccggccgacctatgagggtggtcggctggtatcactcccacccacacatcacagtatggcccagtcatgtggacgtacggacccaggctatgtatcagatgatggatcagggctttgtggggcttattttctcctgttttatcgaggacaaaaataccaagaccgggcgggtactgtatacatgcttccaaagtatccaagcccagaaatccagtgatctcactcacttagatagcgtgaccaaaattcacaacggaagcgaggtgtttacaaaaaatttgtgttcccagatgtccgctgtctcaggccccctcctccagtggttggaggatcgcttagagcagaatcagcagcacctgcaggagctgcaacaggaaaaagaagagcttatgcaggagttaagctcgctggagtag

SEQ ID NO: 27039 - DNA, 876 bp, Artificial Sequence
  derived and/or modified sequence
atggccgtgcaggttgtacaggccgttcaagcagtccacctggagtccgatgcctttctggtttgcctcaaccatgccttgtcgacagaaaaagaggaagtgatggggctgtgtattggggaactaaacgacgacacaaggtccgactctaagttcgcttacaccgggacggaaatgaggacagtagctgagaaagttgacgctgtgcgtatcgtgcatattcactctgtaatcatactccgtcggtccgataaaaggaaggaccgcgtggagattagccctgagcagctcagcgctgcttctacagaggctgaacgccttgctgagttgacggggagacctatgcgcgtcgtggggtggtatcattcccacccgcatatcactgtgtggcccagccacgttgatgtgaggacccaggccatgtaccagatgatggatcagggttttgttggcctcatattcagctgttttatcgaagacaagaacactaagacgggcagggtattgtacacctgttttcagtctattcaggcacagaaaagctctgaatatgaaaggatcgaaatcccaattcatatcgtgccccatgtgacaattggcaaggtctgcctcgagagcgccgttgaactcccaaagattctgtgccaagaggagcaagatgcttataggagaatacactccctgacacatctggatagcgttaccaagattcacaacggctctgtcttcactaagaacttgtgctcgcagatgtccgccgttagcgggcctctgctgcagtggttagaggatcgactagaacaaaatcagcagcacctacaggaacttcagcaggaaaaagaagagttaatgcaggagctgtcgtccttggaatag

SEQ ID NO: 27040 - DNA, 747 bp, Artificial Sequence
  derived and/or modified sequence
atggccgtgcaagtcgttcaggccgttcaggccgtacatcttgagagcgacgcttttctcgtctgtctgaatcatgcactgtctaccgaaaaggaagaagtaatgggcttgtgcatcggcgaagtttcgagcccaagccgctcagacagtaagttcgcctataccgggacagagatgcgcaccgttgccgagaaggtggacgcggtgcgaatagtccacattcactccgtaataatcctgaggagatctgacaaacggaaggacagagtcgaaatctcacctgagcagctcagtgctgcaagcacagaaacacatcgcctggccgaactgaccggtaggcctatgcgcgtagtgggctggtatcactcccacccacatataactgtgtggcctagtcacgtcgatgtaaggactcaggctatgtatcagatgatggaccaggggtttgtggggcttattttttcatgctttattgaagataagaatactaagacagggcgtgtcctatacacgtgtttccagtctatccaagcccaaaagtcaagcgaccttacacatctggatagtgtaacaaaaatccacaacggaagcgaggtattcacaaaaaatttgtgttcccagatgtctgctgtgtccgggcctttactccagtggctggaagaccgtctcgaacaaaaccagcagcatcttcaggagcttcagcaggagaaagaggagttgatgcaggagctgagctctctggagtag

SEQ ID NO: 27041 - DNA, 2496 bp, Artificial Sequence
  derived and/or modified sequence
gagcgcacagcgctgggcgctggggaggctgcgccgcagcacccggttggtcaggaccaagtgggcccgaggcggacgtgagaagggtcgggccaagatggcggtgcaggtggtgcaggcggtgcaggcggttcatctcgagtctgacgctttcctcgtttgtctcaaccacgctctgagcacagagaaggaggaagtaatggggctgtgcataggggagttgaacgatgatacaaggagtgactccaaatttgcatatactggaactgaaatgcgcacagttgctgaaaaggttgatgccgtcagaattgttcacattcattctgtcatcatcttacgacgttctgataagaggaaggaccgagtagaaatttctccagagcagctgtctgcagcttcaacagaggcagagaggttggctgaactgacaggccgccccatgagagttgtgggctggtatcattcccatcctcatataactgtttggccttcacatgttgatgttcgcacacaagccatgtaccagatgatggatcaaggctttgtaggacttattttttcctgtttcatagaagataagaacacaaagactggccgggtactctacacttgcttccaatccatacaggcccaaaagagttcagagtatgagagaatcgaaatcccaatccatattgtacctcatgtcactatcgggaaagtgtgccttgaatcagcagtagagctgcccaagatcctgtgccaggaggagcaggatgcgtataggaggatccacagccttacacatctggactcagtaaccaagatccataatggctcagtgtttaccaagaatctgtgcagtcagatgtcggcagtcagcgggcctctcctacagtggttggaggacagactggagcaaaaccaacagcatttgcaggaattacaacaagaaaaggaagagcttatgcaagaactttcttctctagaataaatcaggagacaaaatggggaaagatgaaaatatccagtgtaaagttacttaagctaaatcaatttcaaagaagaaaaacttggaggactcattttacctgacttcaagacttactataaagctatagtaatcaagatagatggtattggcagaggaacagacacatacgtcaatggaacagatgagagaacccagaaataaacccatataaatatgctcagctgattttgaaaaagtgaaaaagcaattcaatggaggaagaatagcctttctgacaaattatgctagagcaattagacacccatggcgaggagaaaaaagaacctctacttaaacctcacatcttatataaaatttaactcaaaatgtataacggacttaaatgtgatacataaaactagataactttgaaaaaagccacaggagaaaaatcttcaggatcttgggctaggtgacaagttcttggactttgccccgaaagcacatccataaaagacaaaatctgatatattggacttcttcaaaatttaaaaacttgtgatttaagaagaggaaaagataagctacagattgagatgaatttgcaaaccatatatctgatcaatttggaatatataaagtgtactaaaaactcaactgaagtcaggcatggtagctcatgcttgtaatctcaccactttgggaggccaagatgggaggagtgcttgaggttaggcgttccagaccagcctgggcaacatagtgagactcttgtctctacaaaaagtttttttaaaaaattaactgggcaccatgacacacaccagtagtcccagctactagggaggcaggaggatcacttgagcccaggagtttgaggctgcggtgagctgtgatcacaccaccacactccaacctgtgtaacagagtgaggcctcatctcaaaaaaaaaaaaaggccacaaaactcaacaataaaaacaaacagtccaattagaaaatgggcaaaagacatgaatagatgtttcactgaagaggatctatagatggcaagtaagcatatgaaaagctgttaaactccataagtcatcagggaatgcaaattgaaaccacagcgaggctatgacttacttatctcaatggctaaagaaaaaatagtgaaaataccaaatactgatgaggatacaaactggatattttatacattgctgacaggaatgtaaaatggtacagccactctgggaaagagtttatgaatttcttatcaagttaaacataattttttaatcaagttaaacataagacccagcagttgtgctcctggacattcattccagagaaatgaaaacctatattgtacttgtactcaaatattcataggagctttatttgtaatagccccaaactggaaacaacccagatgtcctacaacaggtacatggttaaacaaaccatccataacttggaatactgctctggaatgaaaaggaactaactgttgatacaagaacttggttgtacctcaggggtattatggtgaacaaa

SEQ ID NO: 27042 - DNA, 747 bp, Artificial Sequence
  derived and/or modified sequence
atggcggtgcaggtggtgcaggcggtgcaggcggttcatctcgagtctgacgctttcctcgtttgtctcaaccacgctctgagcacagagaaggaggaagtaatggggctgtgcataggggaggtgagtagtcccagtaggagtgactccaaatttgcatatactggaactgaaatgcgcacagttgctgaaaaggttgatgccgtcagaattgttcacattcattctgtcatcatcttacgacgttctgataagaggaaggaccgagtagaaatttctccagagcagctgtctgcagcttcaacagagacacacaggttggctgaactgacaggccgccccatgagagttgtgggctggtatcattcccatcctcatataactgtttggccttcacatgttgatgttcgcacacaagccatgtaccagatgatggatcaaggctttgtaggacttattttttcctgtttcatagaagataagaacacaaagactggccgggtactctacacttgcttccaatccatacaggcccaaaagagttcagaccttacacatctggactcagtaaccaagatccataatggctcagaagtgtttaccaagaatctgtgcagtcagatgtcggcagtcagcgggcctctcctacagtggttggaggacagactggagcaaaaccaacagcatttgcaggaattacaacaagaaaaggaagagcttatgcaagaactttcttctctagaataa

SEQ ID NO: 27043 - DNA, 876 bp, Artificial Sequence
  derived and/or modified sequence
atggccgtgcaggtggtgcaggccgtgcaggccgtgcacctggagagcgacgccttcctggtgtgcctgaaccacgccctgagcaccgagaaggaggaggtgatgggcctgtgcatcggcgagctgaacgacgacaccagaagcgacagcaagttcgcctacaccggcaccgagatgagaaccgtggccgagaaggtggacgccgtgagaatcgtgcacatccacagcgtgatcatcctgagaagaagcgacaagagaaaggacagagtggagatcagccccgagcagctgagcgccgccagcaccgaggccgagagactggccgagctgaccggcagacccatgagagtggtgggctggtaccacagccacccccacatcaccgtgtggcccagccacgtggacgtgagaacccaggccatgtaccagatgatggaccagggcttcgtgggcctgatcttcagctgcttcatcgaggacaagaacaccaagaccggcagagtgctgtacacctgcttccagagcatccaggcccagaagagcagcgagtacgagagaatcgagatccccatccacatcgtgccccacgtgaccatcggcaaggtgtgcctggagagcgccgtggagctgcccaagatcctgtgccaggaggagcaggacgcctacagaagaatccacagcctgacccacctggacagcgtgaccaagatccacaacggcagcgtgttcaccaagaacctgtgcagccagatgagcgccgtgagcggccccctgctgcagtggctggaggacagactggagcagaaccagcagcacctgcaggagctgcagcaggagaaggaggagctgatgcaggagctgagcagcctggagtag

SEQ ID NO: 27044 - DNA, 747 bp, Artificial Sequence
  derived and/or modified sequence
atggccgtgcaggtggtgcaggccgtgcaggccgtgcacctggagagcgacgccttcctggtgtgcctgaaccacgccctgagcaccgagaaggaggaggtgatgggcctgtgcatcggcgaggtgagcagccccagcagaagcgacagcaagttcgcctacaccggcaccgagatgagaaccgtggccgagaaggtggacgccgtgagaatcgtgcacatccacagcgtgatcatcctgagaagaagcgacaagagaaaggacagagtggagatcagccccgagcagctgagcgccgccagcaccgagacccacagactggccgagctgaccggcagacccatgagagtggtgggctggtaccacagccacccccacatcaccgtgtggcccagccacgtggacgtgagaacccaggccatgtaccagatgatggaccagggcttcgtgggcctgatcttcagctgcttcatcgaggacaagaacaccaagaccggcagagtgctgtacacctgcttccagagcatccaggcccagaagagcagcgacctgacccacctggacagcgtgaccaagatccacaacggcagcgaggtgttcaccaagaacctgtgcagccagatgagcgccgtgagcggccccctgctgcagtggctggaggacagactggagcagaaccagcagcacctgcaggagctgcagcaggagaaggaggagctgatgcaggagctgagcagcctggagtag

SEQ ID NO: 27045 - protein, 845 aa, Artificial Sequence
  derived and/or modified sequence
MGTSALWALWLLLALCWAPRESGATGTGRKAKCEPSQFQCTNGRCITLLWKCDGDEDCVDGSDEKNCVKKTCAESDFVCNNGQCVPSRWKCDGDPDCEDGSDESPEQCHMRTCRIHEISCGAHSTQCIPVSWRCDGENDCDSGEDEENCGNITCSPDEFTCSSGRCISRNFVCNGQDDCSDGSDELDCAPPTCGAHEFQCSTSSCIPISWVCDDDADCSDQSDESLEQCGRQPVIHTKCPASEIQCGSGECIHKKWRCDGDPDCKDGSDEVNCPSRTCRPDQFECEDGSCIHGSRQCNGIRDCVDGSDEVNCKNVNQCLGPGKFKCRSGECIDISKVCNQEQDCRDWSDEPLKECHINECLVNNGGCSHICKDLVIGYECDCAAGFELIDRKTCGDIDECQNPGICSQICINLKGGYKCECSRGYQMDLATGVCKAVGKEPSLIFTNRRDIRKIGLERKEYIQLVEQLRNTVALDADIAAQKLFWADLSQKAIFSASIDDKVGRHVKMIDNVYNPAAIAVDWVYKTIYWTDAASKTISVATLDGTKRKFLFNSDLREPASIAVDPLSGFVYWSDWGEPAKIEKAGMNGFDRRPLVTADIQWPNGITLDLIKSRLYWLDSKLHMLSSVDLNGQDRRIVLKSLEFLAHPLALTIFEDRVYWIDGENEAVYGANKFTGSELATLVNNLNDAQDIIVYHELVQPSGKNWCEEDMENGGCEYLCLPAPQINDHSPKYTCSCPSGYNVEENGRDCQRINVTTAVSEVSVPPKGTSAAWAILPLLLLVMAAVGGYLMWRNWQHKNMKSMNFDNPVYLKTTEEDLSIDIGRHSASVGHTYPAISVVSTDDDLA

SEQ ID NO: 27046 - DNA, 2538 bp, Artificial Sequence
  derived and/or modified sequence
atgggcaccagcgccctgtgggccctgtggctgctgctggccctgtgctgggcccccagagagagcggcgccaccggcaccggcagaaaggccaagtgcgagcccagccagttccagtgcaccaacggcagatgcatcaccctgctgtggaagtgcgacggcgacgaggactgcgtggacggcagcgacgagaagaactgcgtgaagaagacctgcgccgagagcgacttcgtgtgcaacaacggccagtgcgtgcccagcagatggaagtgcgacggcgaccccgactgcgaggacggcagcgacgagagccccgagcagtgccacatgagaacctgcagaatccacgagatcagctgcggcgcccacagcacccagtgcatccccgtgagctggagatgcgacggcgagaacgactgcgacagcggcgaggacgaggagaactgcggcaacatcacctgcagccccgacgagttcacctgcagcagcggcagatgcatcagcagaaacttcgtgtgcaacggccaggacgactgcagcgacggcagcgacgagctggactgcgccccccccacctgcggcgcccacgagttccagtgcagcaccagcagctgcatccccatcagctgggtgtgcgacgacgacgccgactgcagcgaccagagcgacgagagcctggagcagtgcggcagacagcccgtgatccacaccaagtgccccgccagcgagatccagtgcggcagcggcgagtgcatccacaagaagtggagatgcgacggcgaccccgactgcaaggacggcagcgacgaggtgaactgccccagcagaacctgcagacccgaccagttcgagtgcgaggacggcagctgcatccacggcagcagacagtgcaacggcatcagagactgcgtggacggcagcgacgaggtgaactgcaagaacgtgaaccagtgcctgggccccggcaagttcaagtgcagaagcggcgagtgcatcgacatcagcaaggtgtgcaaccaggagcaggactgcagagactggagcgacgagcccctgaaggagtgccacatcaacgagtgcctggtgaacaacggcggctgcagccacatctgcaaggacctggtgatcggctacgagtgcgactgcgccgccggcttcgagctgatcgacagaaagacctgcggcgacatcgacgagtgccagaaccccggcatctgcagccagatctgcatcaacctgaagggcggctacaagtgcgagtgcagcagaggctaccagatggacctggccaccggcgtgtgcaaggccgtgggcaaggagcccagcctgatcttcaccaacagaagagacatcagaaagatcggcctggagagaaaggagtacatccagctggtggagcagctgagaaacaccgtggccctggacgccgacatcgccgcccagaagctgttctgggccgacctgagccagaaggccatcttcagcgccagcatcgacgacaaggtgggcagacacgtgaagatgatcgacaacgtgtacaaccccgccgccatcgccgtggactgggtgtacaagaccatctactggaccgacgccgccagcaagaccatcagcgtggccaccctggacggcaccaagagaaagttcctgttcaacagcgacctgagagagcccgccagcatcgccgtggaccccctgagcggcttcgtgtactggagcgactggggcgagcccgccaagatcgagaaggccggcatgaacggcttcgacagaagacccctggtgaccgccgacatccagtggcccaacggcatcaccctggacctgatcaagagcagactgtactggctggacagcaagctgcacatgctgagcagcgtggacctgaacggccaggacagaagaatcgtgctgaagagcctggagttcctggcccaccccctggccctgaccatcttcgaggacagagtgtactggatcgacggcgagaacgaggccgtgtacggcgccaacaagttcaccggcagcgagctggccaccctggtgaacaacctgaacgacgcccaggacatcatcgtgtaccacgagctggtgcagcccagcggcaagaactggtgcgaggaggacatggagaacggcggctgcgagtacctgtgcctgcccgccccccagatcaacgaccacagccccaagtacacctgcagctgccccagcggctacaacgtggaggagaacggcagagactgccagagaatcaacgtgaccaccgccgtgagcgaggtgagcgtgccccccaagggcaccagcgccgcctgggccatcctgcccctgctgctgctggtgatggccgccgtgggcggctacctgatgtggagaaactggcagcacaagaacatgaagagcatgaacttcgacaaccccgtgtacctgaagaccaccgaggaggacctgagcatcgacatcggcagacacagcgccagcgtgggccacacctaccccgccatcagcgtggtgagcaccgacgacgacctggcctag

SEQ ID NO: 27047 - DNA, 2538 bp, Artificial Sequence
  derived and/or modified sequence
atgggaaccagcgccctttgggccctctggctgctcttagccctctgctgggcccctcgcgaaagcggagcgacaggtactgggcgcaaggccaagtgcgaacccagtcagttccagtgcacaaacggacggtgcattaccttgctgtggaaatgtgatggcgacgaagactgtgtggatgggtctgatgagaaaaactgtgtgaaaaagacatgcgcagaaagcgacttcgtctgcaacaatggacagtgtgtcccgtcgagatggaaatgtgacggggacccggattgtgaggacggcagcgacgagagcccagagcagtgccacatgagaacatgtcggattcacgaaattagctgtggggcacacagcacacaatgcatcccagtgagctggagatgcgatggagaaaatgattgtgactcaggcgaagacgaagaaaactgtgggaatattacctgttcaccagacgaatttacatgcagttccgggaggtgtatcagccgcaacttcgtgtgcaacggacaggatgactgcagcgatggatccgatgagctggactgcgcaccaccgacttgcggtgcgcacgagtttcagtgcagtacctcaagctgtattcctatctcgtgggtgtgcgacgacgacgccgactgcagcgatcagtccgacgagtcactcgaacagtgcgggagacagccagttattcacaccaagtgtcccgcgtctgagatccagtgcgggtccggggagtgcatccacaaaaaatggcgttgcgatggtgaccccgattgcaaagacggaagtgacgaggtcaactgcccgtccaggacctgtaggcccgaccagtttgaatgcgaggacggatcgtgcattcacggatcccgacagtgcaatggcatccgggactgtgtggacggatccgatgaggtgaactgtaaaaatgtgaaccaatgcctggggcctggcaagtttaaatgtagaagcggggaatgcattgatatttccaaagtgtgcaatcaggaacaagactgtcgcgattggagtgacgaaccccttaaggaatgtcatatcaatgaatgtctggtgaacaatggcggatgtagccacatctgtaaagacctggtgatcgggtatgagtgcgactgcgctgccggtttcgagcttatagaccgaaagacttgtggagatatagatgaatgccaaaaccctggcatttgttcccagatctgtatcaatttgaagggcggctataagtgcgaatgctcgaggggctaccagatggacctggccaccggagtatgcaaggcagtcggcaaggaaccctctctcatttttacgaaccgcagagacatccgaaaaatcgggctcgagagaaaggaatatatccagcttgtggagcagctgagaaacactgtcgctctggacgccgatattgccgcccagaaactgttctgggcagatctgtcccaaaaagctattttctccgcctctatcgatgataaagttggcaggcacgtgaagatgatagataacgtatacaatcctgctgcaattgccgtggactgggtttacaagacaatctactggaccgacgcagcaagtaagaccatatcagtggccacattggatggaacaaaacgcaaatttctattcaactccgatttacgtgagccagcatcaatcgcagtagatccattgagtgggttcgtctactggagtgattggggggaaccagcaaaaattgaaaaagccggcatgaacgggtttgataggagaccactggtgaccgccgatatccagtggcctaacgggatcactctcgacctcatcaagtcgcggctgtactggttggactctaaactgcacatgttgtcctcagtcgacctgaacggccaggatagacgcatcgtacttaaaagtcttgaatttcttgcccatccgttggcccttactatttttgaggaccgagtctattggattgacggagaaaacgaggccgtgtacggtgcgaacaaattcaccggaagcgagcttgccactttagtaaataacctcaacgacgcccaggacatcatcgtgtatcacgaacttgtccagccctctggtaagaattggtgtgaagaggacatggaaaatggcgggtgtgaatacttatgcctgcccgctcctcagatcaacgaccactcccccaagtacacgtgctcatgtccaagcgggtacaacgtagaggaaaacggaagggattgtcagcgaataaacgtgacgacggcagtgagtgaagtgtcggttccaccaaaggggaccagtgctgcctgggctattttacccttactcctcttggtcatggccgccgttggtgggtacctcatgtggcgaaactggcagcacaagaacatgaagtcaatgaatttcgataatcctgtctatctcaaaacaacagaggaagatctgtcgatcgatataggtagacatagtgcctcagtaggccacacttaccctgctatttccgttgttagtaccgacgacgacctggcctag

SEQ ID NO: 27048 - DNA, 2538 bp, Artificial Sequence
  derived and/or modified sequence
atgggcaccagcgccctgtgggccctgtggctgctgctggccctgtgctgggccccccgggagagcggggccactggaactggaaggaaggccaagtgtgagcccagccagttccagtgcaccaacggccgctgcatcaccctgctgtggaagtgtgatggagatgaggactgtgtggatggcagtgatgagaagaactgtgtgaagaagacctgtgccgagagtgactttgtgtgcaacaacggccagtgtgtgcccagccgctggaagtgtgatggagaccctgactgtgaagatggcagtgatgagagccctgagcagtgccacatgaggacctgccgcatccacgagatcagctgtggggcccacagcacccagtgcatccctgtgtcctggaggtgtgatggagaaaatgactgtgacagcggggaggatgaggagaactgtggcaacatcacctgcagcccagatgagttcacctgcagcagcggccgctgcatcagcaggaactttgtgtgcaatggccaggatgactgcagtgatggcagtgatgagctggactgtgccccacccacctgtggggcccacgagttccagtgcagcaccagcagctgcatccccatctcctgggtgtgtgatgatgatgctgactgcagcgaccagagtgatgagagcctggagcagtgtggccggcagcctgtgatccacaccaagtgcccagccagcgagatccagtgtggcagcggggagtgcatccacaagaagtggaggtgtgatggagaccctgactgcaaggatggcagtgatgaggtgaactgccccagcaggacctgcaggccagaccagtttgaatgtgaagatggcagctgcatccacggcagccggcagtgcaatggcatccgggactgtgtggatggcagtgatgaggtgaactgcaagaatgtgaaccagtgcctgggccctgggaagttcaagtgccgcagcggggagtgcatcgacatcagcaaggtgtgcaaccaggagcaggactgccgggactggagcgatgagcccctgaaggagtgccacatcaatgaatgtctggtgaacaacggcggctgcagccacatctgcaaggacctggtgattggctatgaatgtgactgtgccgccggctttgagctgattgacaggaagacctgtggggacattgatgagtgccagaaccctggcatctgcagccagatctgcatcaacctgaagggcggctacaagtgtgagtgcagccggggctaccagatggacctggccactggagtgtgcaaggctgtgggcaaggagcccagcctcatcttcaccaacagaagagacatcaggaagattggcctggagaggaaggagtacatccagctggtggagcagctgaggaacacagtggccctggatgctgacattgctgcccagaagctgttctgggccgacctgagccagaaggccatcttcagcgccagcattgatgacaaggtgggcagacatgtgaagatgattgacaacgtgtacaacccagctgccatcgctgtggactgggtgtacaagaccatctactggacagatgctgccagcaagaccatctctgtggccaccctggatggcaccaagaggaagttcctgttcaacagcgacctgcgggagcccgccagcattgctgtggaccccctgagcggctttgtgtactggagcgactggggcgagcccgccaagattgagaaggccggcatgaatggatttgacagaagacccctggtgacagctgacatccagtggcccaacggcatcaccctggacctgatcaagagccggctgtactggctggacagcaagctgcacatgctgagctctgtggacctgaatggccaggaccggcgcatcgtgctgaagagcctggagttcctggcccaccccctggccctgaccatctttgaggacagagtgtactggattgatggagaaaatgaggccgtgtatggagccaacaagttcaccggcagcgagctggccaccctggtgaacaacctgaatgatgcccaggacatcatcgtgtaccacgagctggtgcagcccagcggcaagaactggtgtgaggaggacatggagaatggaggctgtgagtacctgtgcctgcctgccccccagatcaatgaccacagccccaagtacacctgcagctgccccagcggctacaacgtggaggagaatggccgggactgccagaggatcaacgtgaccacagctgtgtctgaggtgtctgtgccccccaagggcaccagcgctgcctgggccatcctgcccctgctgctgctggtgatggctgctgtgggcggctacctgatgtggaggaactggcagcacaagaacatgaagtccatgaactttgacaaccctgtgtacctgaagaccacagaggaggacctgagcattgatattggccgccacagcgcctctgtgggccacacctacccagccatctctgtggtgtccacagatgatgacctggcctag

SEQ ID NO: 27049 - DNA, 2538 bp, Artificial Sequence
  derived and/or modified sequence
atgggcaccagcgccctgtgggccctgtggctgctgctggccctgtgttgggccccaagagaaagcggggccactgggactggcaggaaggccaaatgcgaaccatcccagtttcagtgcaccaatggacgttgcatcaccttgttatggaagtgtgacggagatgaagattgcgtggacggctccgatgagaaaaactgcgtcaaaaagacctgtgccgagagcgattttgtgtgtaataacggccaatgcgtgcccagtaggtggaaatgcgatggagaccccgactgtgaagacgggtctgacgagagccccgaacagtgccacatgcgcacctgtagaatccatgagatatcctgtggtgcacacagcacccagtgcatccctgttagctggcggtgtgacggagaaaacgattgtgactctggagaggacgaagagaactgcgggaatattacctgctcccctgacgaatttacatgttcatcagggcggtgcatctcgcgaaatttcgtgtgcaacgggcaggatgattgctccgacggctccgacgaacttgattgtgcaccccctacctgcggcgcccacgagtttcagtgtagcacttctagctgtatccccatctcctgggtatgcgatgatgacgccgactgcagtgatcaatctgacgaatcccttgaacagtgtggcagacaacctgtcattcacaccaagtgccccgcctcagagatccagtgtggctcgggcgagtgcattcataaaaagtggcggtgcgatggagaccctgattgtaaggacggaagcgatgaggtcaattgcccctccaggacttgccgtcccgaccaatttgaatgcgaggatggaagctgcatacatggatcacgtcagtgcaatggcattcgggactgtgtagacggctccgatgaagtgaactgtaaaaatgtgaaccaatgtctcggacccggaaagttcaagtgtagatcaggagagtgcatcgatatatccaaggtgtgtaatcaggagcaggactgtagagactggagtgacgaaccattaaaagaatgtcatatcaatgagtgtttagttaataatgggggctgctcccatatttgtaaagatctcgttattggttacgaatgcgactgcgccgcggggttcgagttaatagaccgcaaaacttgtggggacatcgatgagtgtcagaacccaggcatttgctcccagatttgcataaacttaaaagggggatacaagtgcgagtgtagtcgtggatatcaaatggatctggccacgggcgtctgcaaggctgttggcaaagaaccgagcttgattttcactaaccgtagggatattaggaagattggcttagaacggaaggaatatattcagctcgtcgagcaactgcggaacacagttgccctcgacgcggatatcgccgcccagaaactattctgggcagacctcagccaaaaggcgatttttagcgcatcaatcgacgataaggtaggacggcatgtgaaaatgatcgacaacgtgtacaatccagctgcaatcgccgtcgactgggtctacaagacaatatattggaccgatgcagcctcgaagacgatctccgtggcgactctcgatggaacaaagcggaaattcctgttcaactcagatctaagagagcccgcgagcatcgctgtggatccattgagtggcttcgtgtactggagtgattggggtgagcctgccaagatcgagaaggcaggcatgaacggatttgaccggaggcctctggtgaccgccgatattcaatggcccaatgggatcacgttggacttgatcaaatcccgactctactggttggactccaaactccatatgcttagcagtgtcgatttaaacggccaagatcggaggatcgtcctcaagagcttagaattcctggcacacccactggctttaactatttttgaggaccgcgtgtactggattgatggcgagaacgaagccgtttatggggctaacaagttcacgggaagtgaacttgccaccctggtgaacaacttaaacgatgcccaggatattatagtttatcacgagttagtgcagccttcaggtaaaaactggtgcgaagaggatatggaaaacggcggctgcgaatatctttgccttcctgcccctcagattaacgatcacagccccaaatacacttgttcatgcccatcaggctacaacgtcgaggagaatggccgcgactgccaacgcatcaatgtcactacagccgtctccgaggtcagtgttccacctaagggcaccagcgcagcctgggccattctacctctcttactcctggtaatggctgctgtaggcggctatttgatgtggcgcaactggcaacataagaacatgaagtctatgaacttcgacaaccccgtatacctgaaaacgaccgaagaggatttaagtattgacattggcagacatagtgccagtgtgggtcatacttaccccgctataagcgtggtgtctactgatgatgacttggcatag

SEQ ID NO: 27050 - DNA, 2538 bp, Artificial Sequence
  derived and/or modified sequence
atgggcacttcagccctctgggccttgtggctgcttttagccttgtgctgggccccacgtgagagtggcgctactgggactgggagaaaggccaaatgtgagcccagccagttccagtgcacgaacggtaggtgtatcacccttctctggaagtgcgatggcgatgaggattgtgttgacgggtcagatgaaaagaactgtgttaagaaaacctgcgctgagtctgattttgtgtgcaacaatggacaatgcgtgcccagtcgatggaaatgcgacggtgatcccgattgcgaagatggatctgacgagagtcctgagcagtgccacatgcggacctgtcgcattcatgagatttcatgcggggctcacagtactcagtgtattccggtcagttggaggtgtgacggcgagaatgactgtgacagtggggaagatgaggaaaattgcggcaatattacttgcagcccagacgaatttacctgtagctccgggagatgtatcagccgcaatttcgtctgcaacggacaagacgattgctctgatggcagcgacgagctagattgtgcccctcctacttgtggggctcatgagttccaatgcagcacctcctcttgcatacccatctcctgggtgtgcgacgacgacgccgattgctctgatcaaagtgacgaaagcctcgagcagtgcggaaggcagcctgtgattcataccaaatgcccagccagcgaaatccaatgtgggtcgggagaatgcatccacaaaaagtggcggtgtgacggggatcccgactgtaaggatggctccgacgaggtgaattgcccttctcggacttgtagaccagaccagtttgagtgtgaagatgggtcttgtattcatggttcgcggcagtgtaatgggatccgcgattgtgttgacggaagtgacgaagtaaactgtaagaacgtgaatcagtgccttggaccaggaaaattcaaatgtaggagtggagagtgcatagatatatccaaggtctgcaatcaagaacaagactgccgcgactggtccgacgaacctctgaaagagtgccacattaatgagtgcttggtgaacaatggtggctgtagccacatatgtaaggacctggtgatcggctacgagtgcgattgcgcagctggcttcgagctcatcgacaggaagacatgtggagatatcgacgagtgccagaatcctggcatctgcagtcagatttgtataaaccttaaggggggatataaatgcgaatgcagtcgtggctaccagatggacctggccaccggcgtctgtaaggctgtgggcaaggaacctagccttatctttacaaatagaagagacattaggaagatcgggctggagcgaaaggaatatatccagctggtggagcaacttaggaatacagtggctctggacgcggacatagcagcccaaaagcttttctgggcagatttgagccaaaaagcaatatttagcgccagcattgatgataaagttgggaggcacgtaaaaatgattgacaatgtttataatcctgctgccattgcagtggactgggtgtataaaacgatctattggacagacgccgctagtaaaacaatctccgtggctactctggacggcacaaaacgaaaattcctatttaatagcgacctgcgcgaaccagccagcattgccgtggaccctctttccgggtttgtatactggagcgactggggagagcccgctaagatcgagaaggccggtatgaatggtttcgaccggcgacccctcgtgacagctgacatccagtggcccaatggcatcactctggatcttatcaagagtagactgtactggcttgattctaagctccacatgctgtcatccgtcgatctgaacggccaggaccgcaggattgtgcttaagagcctagaatttctagcgcatccactggccctcaccattttcgaggacagggtgtattggattgacggtgagaacgaagctgtgtatggtgccaataagttcactggatccgagctggccaccctagtgaataatctgaacgacgcacaggacatcatagtgtaccacgagctggtgcaacctagcgggaaaaactggtgtgaggaggacatggaaaatggtggatgcgaatatctctgcctgcccgcacctcagatcaatgatcactcgcctaagtatacatgcagctgtccaagtgggtacaacgtggaggagaatggcagggattgtcaaaggatcaacgttaccacggctgtgtcagaagtcagcgttccgcctaagggcacgtctgcagcctgggctatactccccctgctgctgttagtcatggccgcagttggtggctacctgatgtggcgaaactggcagcacaaaaacatgaaatctatgaatttcgataaccccgtctacttgaagaccactgaagaggacctgagcatcgatattggccgacacagcgcctcagtggggcatacatatcccgcaatttctgtagtcagcacagatgatgatctcgcctag

SEQ ID NO: 27051 - DNA, 3240 bp, Artificial Sequence
  derived and/or modified sequence
cttcttcctcctttcggaaggactggtaacttgtcgtgcggagcgaacggcggcggcggcggcggcggcggcaccatccaggcgggcaccatgggcacgtccgcgctctgggcgctctggctgctgctcgcgctgtgctgggcgccccgggagagcggcgccaccggaaccgggagaaaagccaaatgtgaaccctcccaattccagtgcacaaatggtcgctgtattacgctgttgtggaaatgtgatggggatgaagactgtgttgacggcagtgatgaaaagaactgtgtaaagaagacgtgtgctgaatctgacttcgtgtgcaacaatggccagtgtgttcccagccgatggaagtgtgatggagatcctgactgcgaagatggttcagatgaaagcccagaacagtgccatatgagaacatgccgcatacatgaaatcagctgtggcgcccattctactcagtgtatcccagtgtcctggagatgtgatggtgaaaatgattgtgacagtggagaagatgaagaaaactgtggcaatataacatgtagtcccgacgagttcacctgctccagtggccgctgcatctccaggaactttgtatgcaatggccaggatgactgcagcgatggcagtgatgagctggactgtgccccgccaacctgtggcgcccatgagttccagtgcagcacctcctcctgcatccccatcagctgggtatgcgacgatgatgcagactgctccgaccaatctgatgagtccctggagcagtgtggccgtcagccagtcatacacaccaagtgtccagccagcgaaatccagtgcggctctggcgagtgcatccataagaagtggcgatgtgatggggaccctgactgcaaggatggcagtgatgaggtcaactgtccctctcgaacttgccgacctgaccaatttgaatgtgaggatggcagctgcatccatggcagcaggcagtgtaatggtatccgagactgtgtcgatggttccgatgaagtcaactgcaaaaatgtcaatcagtgcttgggccctggaaaattcaagtgcagaagtggagaatgcatagatatcagcaaagtatgtaaccaggagcaggactgcagggactggagtgatgagcccctgaaagagtgtcatataaacgaatgcttggtaaataatggtggatgttctcatatctgcaaagacctagttataggctacgagtgtgactgtgcagctgggtttgaactgatagataggaaaacctgtggagatattgatgaatgccaaaatccaggaatctgcagtcaaatttgtatcaacttaaaaggcggttacaagtgtgaatgtagtcgtggctatcaaatggatcttgctactggcgtgtgcaaggcagtaggcaaagagccaagtctgatcttcactaatcgaagagacatcaggaagattggcttagagaggaaagaatatatccaactagttgaacagctaagaaacactgtggctctcgatgctgacattgctgcccagaaactattctgggccgatctaagccaaaaggctatcttcagtgcctcaattgatgacaaggttggtagacatgttaaaatgatcgacaatgtctataatcctgcagccattgctgttgattgggtgtacaagaccatctactggactgatgcggcttctaagactatttcagtagctaccctagatggaaccaagaggaagttcctgtttaactctgacttgcgagagcctgcctccatagctgtggacccactgtctggctttgtttactggtcagactggggtgaaccagctaaaatagaaaaagcaggaatgaatggattcgatagacgtccactggtgacagcggatatccagtggcctaacggaattacacttgaccttataaaaagtcgcctctattggcttgattctaagttgcacatgttatccagcgtggacttgaatggccaagatcgtaggatagtactaaagtctctggagttcctagctcatcctcttgcactaacaatatttgaggatcgtgtctactggatagatggggaaaatgaagcagtctatggtgccaataaattcactggatcagagctagccactctagtcaacaacctgaatgatgcccaagacatcattgtctatcatgaacttgtacagccatcaggtaaaaattggtgtgaagaagacatggagaatggaggatgtgaatacctatgcctgccagcaccacagattaatgatcactctccaaaatatacctgttcctgtcccagtgggtacaatgtagaggaaaatggccgagactgtcaaaggatcaatgtgaccacagcagtatcagaggtcagtgttcccccaaaagggacttctgccgcatgggccattcttcctctcttgctcttagtgatggcagcagtaggtggctacttgatgtggcggaattggcaacacaagaacatgaaaagcatgaactttgacaatcctgtgtacttgaaaaccactgaagaggacctctccatagacattggtagacacagtgcttctgttggacacacgtacccagcaatatcagttgtaagcacagatgatgatctagcttgacttctgtgacaaatgttgacctttgaggtctaaacaaataatacccccgtcggaatggtaaccgagccagcagctgaagtctctttttcttcctctcggctggaagaacatcaagatacctttgcgtggatcaagcttgtgtacttgaccgtttttatattacttttgtaaatattcttgtccacattctacttcagctttggatgtggttaccgagtatctgtaacccttgaatttctagacagtattgccacctctggccaaatatgcactttccctagaaagccatattccagcagtgaaacttgtgctatagtgtataccacctgtacatacattgtataggccatctgtaaatatcccagagaacaatcactattcttaagcactttgaaaatatttctatgtaaattattgtaaactttttcaatggttgggacaatggcaataggacaaaacgggttactaagatgaaattgccaaaaaaatttataaactaattttgtacgtatgaatgatatctttgacctcaatggaggtttgcaaagactgagtgttcaaactactgtacattttttttcaagtgctaaaaaattaaaccaagcagcttaa

SEQ ID NO: 27052 - DNA, 957 bp, Artificial Sequence
  derived and/or modified sequence
atgactctagatcatcaaattatcaatcccacgctgaagtggtctcagcccgcagtgccctccggcgggccacttgttcagcacgcccataccacgctcgatagtgatgctgggttgactgagaaccccctaaccaagttactggcaatcggtaaggaagacgataacgcgcaatggcacctttcaggaagtattctcgacgtgtattcaggcgaacaggggatttctcccataaacatgggactgacctcggcatcctgtccttcctccctgccgatgaaaagagagatcaccgagaccgatacccgtgcactggccaaagaacgccaaaagaaggacaatcacaacctgatcgaaaggagaaggcgatataatattaactacaggatcaaggagttgggcactcttatccctaagtcaaatgatcccgatatgcggtggaataaagggactatcctgaaagcgtccgtagagtacattaagtggcttcagaaggagcagcagagagccagggagctcgagcaccggcagaaaaaactggagcaggccaataggcggctgctgctcagaatccaagagctcgaaatacaagctcgaacacacggcctgccaacactggcctcactgggcacagtcgacctgggggctcatgtcaccaaacagcaaagtcaccccgagcagaatagtgtcgattactgtcagcaattgaccgtatctcagggcccctcgcccgaattgtgcgaccaggcaattgcattcagtgaccccctctcttacttcaccgacctgtctttttctgccgcactaaaggaggagcagaggttggatggtatgctcctcgacgataccatatccccttttggtaccgaccccctcctatccgctacatctcctgccgtgagcaaggagtcatcccggcgcagctcattttcttcagatgatggcgacgagttgtag

SEQ ID NO: 27053 - DNA, 594 bp, Artificial Sequence
  derived and/or modified sequence
atgacgctggaccaccagatcatcaatccgacattgaaatggagtcagccagccgtcccctcaggcggcccattggtacaacatgcacatactacactggatagtgacgcaggactaacggagaatccattaactaagctgctagccataggcaaggaggacgacaacgcacagtggcatctaagcggatcaatcctggacgtatattccggagagcaaggaatatctcccataaacatgggactgaccagtgcttcatgccccagctcccttccaatgaaacgcgagataactgaaactgacacacgggcattggcgaaagagcggcagaagaaggataaccataacttgatcgagcgccgcaggcgctacaatataaattataggattaaggagctcgggacactgataccaaagagtaatgatcctgatatgcgctggaataaaggcaccatcctgaaggcatcagtggagtatatcaagtggttacagaaggaacagcagcgggcccgggaacttgagcataggcaaaaaaagctggaacaagcaaatcgtcgactgctgttacgtatacaggtgtttattcggatgtag

SEQ ID NO: 27054 - DNA, 957 bp, Artificial Sequence
  derived and/or modified sequence
atgaccctggaccaccagatcatcaaccccaccctgaagtggagccagcctgctgtgcccagcggcggccccctggtgcagcacgcccacaccaccctggacagtgatgctggcctgacagagaaccccctgaccaagctgctggccatcggcaaggaggatgacaatgcccagtggcacctgagcggcagcatcctggatgtgtacagcggggagcagggcatcagccccatcaacatgggcctgaccagcgccagctgccccagcagcctgcccatgaagcgggagatcacagaaacagacacccgggccctggccaaggagcggcagaagaaggacaaccacaacctgattgaaagaagaagacgctacaacatcaactaccgcatcaaggagctgggcaccctcatccccaagagcaatgaccctgacatgcgctggaacaagggcaccatcctgaaggcctctgtggagtacatcaagtggctgcagaaggagcagcagagggcccgggagctggagcaccggcagaagaagctggagcaggccaacagaaggctgctgctgcgcatccaggagctggagatccaggcccggacccacggcctgcccaccctggccagcctgggcaccgtggacctgggcgcccacgtgaccaagcagcagagccaccctgagcagaacagcgtggactactgccagcagctgactgtgtcccagggccccagccctgagctgtgtgaccaggccatcgccttcagtgaccccctgagctacttcacagacctgtccttctctgctgccctgaaggaggagcagaggctggatggcatgctgctggatgacaccatcagcccctttggaacagaccccctgctgagcgccaccagccctgctgtgtccaaggagagcagccgccgcagcagcttcagcagtgatgatggagatgagctgtag

SEQ ID NO: 27055 - DNA, 594 bp, Artificial Sequence
  derived and/or modified sequence
atgaccctggaccaccagatcatcaaccccaccctgaagtggagccagcctgctgtgcccagcggcggccccctggtgcagcacgcccacaccaccctggacagtgatgctggcctgacagagaaccccctgaccaagctgctggccatcggcaaggaggatgacaatgcccagtggcacctgagcggcagcatcctggatgtgtacagcggggagcagggcatcagccccatcaacatgggcctgaccagcgccagctgccccagcagcctgcccatgaagcgggagatcacagaaacagacacccgggccctggccaaggagcggcagaagaaggacaaccacaacctgattgaaagaagaagacgctacaacatcaactaccgcatcaaggagctgggcaccctcatccccaagagcaatgaccctgacatgcgctggaacaagggcaccatcctgaaggcctctgtggagtacatcaagtggctgcagaaggagcagcagagggcccgggagctggagcaccggcagaagaagctggagcaggccaacagaaggctgctgctgcgcatccaggtgttcatccgcatgtag

SEQ ID NO: 27056 - DNA, 957 bp, Artificial Sequence
  derived and/or modified sequence
atgaccctggaccaccagatcatcaaccccaccctgaagtggagccagcccgctgtgccttccggcgggccactggtgcagcacgcgcacactaccctggacagtgatgccggcctcactgaaaaccctttgacaaaattacttgcaattggcaaagaggacgacaatgcccagtggcatctgtctggctcaatactggacgtgtactcaggcgagcaaggcattagcccaatcaatatgggactgacgtcggcaagctgccctagcagtctgcctatgaagagagagatcactgaaaccgatacgagagctctcgctaaagagcggcagaaaaaggacaaccacaacctgatcgagcgccgaagaagatataacataaattatcggattaaggagctgggcactctgattcccaaatcaaatgacccagacatgcgctggaacaaaggtacaattctgaaggcatcagtggaatacattaaatggttgcagaaggagcaacaacgcgccagagaactggaacatagacagaagaagttagaacaagctaacaggcgcttgcttttgaggattcaggagcttgagatccaggctagaactcacgggctgcccactcttgcctccctcggaacagttgatctgggcgcccacgttacaaaacagcagtcgcatcctgagcagaactcagttgattattgccaacaactcactgtgtcccaggggccttcacccgagctctgcgatcaggcaattgccttctccgatccactgtcatacttcacagacctcagcttttcagccgcgttaaaagaagagcagcggctagacggaatgctgctggatgataccattagcccattcggcactgatccacttctttcggccacttcacccgcagtgtctaaagagagctctcgacggagtagcttctccagcgatgacggagatgagttgtag

SEQ ID NO: 27057 - DNA, 594 bp, Artificial Sequence
  derived and/or modified sequence
atgaccctggaccaccagatcatcaaccccaccctgaagtggagccagcctgcagtgccttctggcgggcctctggtgcagcacgctcacacaactctggattcagatgcagggttgactgaaaatccgctgaccaagctgctcgcgatcggtaaggaagatgataatgctcaatggcacctctcagggagcatacttgatgtctattctggggagcagggcatatcgccaattaatatgggtctgacgtctgcgtcctgcccctcctcactgccaatgaagcgcgagattactgaaaccgacactcgcgcactggcaaaggagcgtcagaagaaagataatcataacctcattgagagaagacggaggtataatatcaactatcggatcaaggagctggggaccctgattcccaagagtaacgatccggatatgcgatggaataaaggtactattctgaaagcatccgtcgaatacattaaatggttgcagaaggaacaacagagagcacgggagctggaacacaggcaaaagaagctggaacaggccaaccgccgtcttctgctccgcattcaggtcttcattagaatgtag

SEQ ID NO: 27058 - DNA, 957 bp, Artificial Sequence
  derived and/or modified sequence
atgacccttgatcatcagatcattaacccaacacttaagtggtcccagccggcagtcccttcaggaggacccttagtccagcacgcacatactacactcgactcggatgccggtctgactgaaaatcccttgacaaagttgctggccatcgggaaggaggacgacaacgcccaatggcacctatctggttcaatcttggacgtatattctggagaacagggcatctcacccatcaacatggggctgacaagtgccagttgcccttcttctctgcccatgaagcgcgagattaccgagactgatacccgggctctcgccaaggagagacagaaaaaggacaaccacaacctgatcgagcgaaggcgcagatataatataaactatcgtattaaggagctaggcacccttatcccaaaatctaatgatcccgacatgcgctggaataagggcacgatattaaaagctagcgtcgaatacataaaatggctccaaaaggaacagcagagggctagggaattagagcacagacagaagaaactggagcaggcaaataggagattgctgcttcggattcaagaactcgaaattcaggcccgaacccatggactgcctacgcttgccagcctaggcacagtggatctgggagctcacgtcactaaacagcagtcacatccagaacaaaacagtgtagactattgtcagcaactaacagtgtcccagggccctagtccggaactgtgcgatcaggccatagcgttctccgatccccttagctatttcactgatctaagctttagtgccgctctcaaggaggaacagagactggatgggatgctgcttgacgacacaatcagtccgttcgggacagatccgctgttaagtgctacaagcccggcagtgagcaaggagtcatcccggaggagttcattttcttccgacgatggtgatgagctttag

SEQ ID NO: 27059 - DNA, 594 bp, Artificial Sequence
  derived and/or modified sequence
atgactctggaccatcagatcatcaaccccaccctcaaatggtcacaacctgccgtgccaagtggaggacctttggtgcagcacgcccacaccacactagattccgacgctggcttgacggaaaacccactgaccaagctcctggccatcgggaaagaagacgacaacgctcagtggcacctcagcgggtcaattctggatgtgtactctggggaacaggggattagccccataaatatgggcctgacatctgcaagctgtccgtcctcactgccaatgaagcgtgaaattactgaaacggatactagagctctggcgaaggaacgacagaagaaagataatcataacctgatcgagcggcgaaggcggtacaatatcaactatcggattaaagagcttggcaccttaattcccaagtctaatgatcccgacatgaggtggaataagggcactatcctaaaggccagtgttgaatatatcaagtggttgcaaaaagaacagcaacgagctcgggagttggaacaccgacagaagaaactggaacaggccaatcgcaggctgctcttgcgcatccaggtgttcatccggatgtag

SEQ ID NO: 27060 - DNA, 957 bp, Artificial Sequence
  derived and/or modified sequence
atgaccctggaccaccagatcatcaaccccaccctgaagtggagccagcccgccgtgcccagcggcggccccctggtgcagcacgcccacaccaccctggacagcgacgccggcctgaccgagaaccccctgaccaagctgctggccatcggcaaggaggacgacaacgcccagtggcacctgagcggcagcatcctggacgtgtacagcggcgagcagggcatcagccccatcaacatgggcctgaccagcgccagctgccccagcagcctgcccatgaagagagagatcaccgagaccgacaccagagccctggccaaggagagacagaagaaggacaaccacaacctgatcgagagaagaagaagatacaacatcaactacagaatcaaggagctgggcaccctgatccccaagagcaacgaccccgacatgagatggaacaagggcaccatcctgaaggccagcgtggagtacatcaagtggctgcagaaggagcagcagagagccagagagctggagcacagacagaagaagctggagcaggccaacagaagactgctgctgagaatccaggagctggagatccaggccagaacccacggcctgcccaccctggccagcctgggcaccgtggacctgggcgcccacgtgaccaagcagcagagccaccccgagcagaacagcgtggactactgccagcagctgaccgtgagccagggccccagccccgagctgtgcgaccaggccatcgccttcagcgaccccctgagctacttcaccgacctgagcttcagcgccgccctgaaggaggagcagagactggacggcatgctgctggacgacaccatcagccccttcggcaccgaccccctgctgagcgccaccagccccgccgtgagcaaggagagcagcagaagaagcagcttcagcagcgacgacggcgacgagctgtag

SEQ ID NO: 27061 - DNA, 594 bp, Artificial Sequence
  derived and/or modified sequence
atgaccctggaccaccagatcatcaaccccaccctgaagtggagccagcccgccgtgcccagcggcggccccctggtgcagcacgcccacaccaccctggacagcgacgccggcctgaccgagaaccccctgaccaagctgctggccatcggcaaggaggacgacaacgcccagtggcacctgagcggcagcatcctggacgtgtacagcggcgagcagggcatcagccccatcaacatgggcctgaccagcgccagctgccccagcagcctgcccatgaagagagagatcaccgagaccgacaccagagccctggccaaggagagacagaagaaggacaaccacaacctgatcgagagaagaagaagatacaacatcaactacagaatcaaggagctgggcaccctgatccccaagagcaacgaccccgacatgagatggaacaagggcaccatcctgaaggccagcgtggagtacatcaagtggctgcagaaggagcagcagagagccagagagctggagcacagacagaagaagctggagcaggccaacagaagactgctgctgagaatccaggtgttcatcagaatgtag

SEQ ID NO: 27062 - protein, 598 aa, Artificial Sequence
  derived and/or modified sequence
MGGCFSKPKPVELKIEVVLPEKERGKEELSASGKGSPRAYQGNGTARHFHTEERLSTPHPYPSPQDCVEAAVCHVKDLENGQMREVELGWGKVLLVKDNGEFHALGHKCPHYGAPLVKGVLSRGRVRCPWHGACFNISTGDLEDFPGLDSLHKFQVKIEKEKVYVRASKQALQLQRRTKVMAKCISPSAGYSSSTNVLIVGAGAAGLVCAETLRQEGFSDRIVLCTLDRHLPYDRPKLSKSLDTQPEQLALRPKEFFRAYGIEVLTEAQVVTVDVRTKKVVFKDGFKLEYSKLLLAPGSSPKTLSCKGKEVENVFTIRTPEDANRVVRLARGRNVVVVGAGFLGMEVAAYLTEKAHSVSVVELEETPFRRFLGERVGRALMKMFENNRVKFYMQTEVSELRGQEGKLKEVVLKSSKVVRADVCVVGIGAVPATGFLRQSGIGLDSRGFIPVNKMMQTNVPGVFAAGDAVTFPLAWRNNRKVNIPHWQMAHAQGRVAAQNMLAQEAEMSTVPYLWTAMFGKSLRYAGYGEGFDDVIIQGDLEELKFVAFYTKGDEVIAVASMNYDPIVSKVAEVLASGRAIRKREVETGDMSWLTGKGS

SEQ ID NO: 27063 - protein, 586 aa, Artificial Sequence
  derived and/or modified sequence
MGGALGLRQLPICAPACRPSSGHSPWAAASPNPNQWSSRSRWCCLRRSEARRSCRPVGRAAPGPTRAMARPATSTRRSACPPLTPTPALRIAWRLLSATSRTSRMASVLSRGRVRCPWHGACFNISTGDLEDFPGLDSLHKFQVKIEKEKVYVRASKQALQLQRRTKVMAKCISPSAGYSSSTNVLIVGAGAAGLVCAETLRQEGFSDRIVLCTLDRHLPYDRPKLSKSLDTQPEQLALRPKEFFRAYGIEVLTEAQVVTVDVRTKKVVFKDGFKLEYSKLLLAPGSSPKTLSCKGKEVENVFTIRTPEDANRVVRLARGRNVVVVGAGFLGMEVAAYLTEKAHSVSVVELEETPFRRFLGERVGRALMKMFENNRVKFYMQTEVSELRGQEGKLKEVVLKSSKVVRADVCVVGIGAVPATGFLRQSGIGLDSRGFIPVNKMMQTNVPGVFAAGDAVTFPLAWRNNRKVNIPHWQMAHAQGRVAAQNMLAQEAEMSTVPYLWTAMFGKSLRYAGYGEGFDDVIIQGDLEELKFVAFYTKGDEVIAVASMNYDPIVSKVAEVLASGRAIRKREVETGDMSWLTGKGS

SEQ ID NO: 27064 - protein, 270 aa, Artificial Sequence
  derived and/or modified sequence
MGGCFSKPKPVELKIEVVLPEKERGKEELSASGKGSPRAYQGNGTARHFHTEERLSTPHPYPSPQDCVEAAVCHVKDLENGQMREVELGWGKVLLVKDNGEFHALGHKCPHYGAPLVKGVLSRGRVRCPWHGACFNISTGDLEDFPGLDSLHKFQVKIEKEKVYVRASKQALQLQRRTKVMAKCISPSAGYSSSTNVLIVGAGAAGLVCAETLRQEGFSDRIVLCTLDRHLPYDRPKLSKSLDTQPEQLALRPKEFFRAYGIEVLTEAQV

SEQ ID NO: 27065 - DNA, 1797 bp, Artificial Sequence
  derived and/or modified sequence
atgggcggctgcttcagcaagcccaagcccgtggagctgaagatcgaggtggtgctgcccgagaaggagagaggcaaggaggagctgagcgccagcggcaagggcagccccagagcctaccagggcaacggcaccgccagacacttccacaccgaggagagactgagcaccccccacccctaccccagcccccaggactgcgtggaggccgccgtgtgccacgtgaaggacctggagaacggccagatgagagaggtggagctgggctggggcaaggtgctgctggtgaaggacaacggcgagttccacgccctgggccacaagtgcccccactacggcgcccccctggtgaagggcgtgctgagcagaggcagagtgagatgcccctggcacggcgcctgcttcaacatcagcaccggcgacctggaggacttccccggcctggacagcctgcacaagttccaggtgaagatcgagaaggagaaggtgtacgtgagagccagcaagcaggccctgcagctgcagagaagaaccaaggtgatggccaagtgcatcagccccagcgccggctacagcagcagcaccaacgtgctgatcgtgggcgccggcgccgccggcctggtgtgcgccgagaccctgagacaggagggcttcagcgacagaatcgtgctgtgcaccctggacagacacctgccctacgacagacccaagctgagcaagagcctggacacccagcccgagcagctggccctgagacccaaggagttcttcagagcctacggcatcgaggtgctgaccgaggcccaggtggtgaccgtggacgtgagaaccaagaaggtggtgttcaaggacggcttcaagctggagtacagcaagctgctgctggcccccggcagcagccccaagaccctgagctgcaagggcaaggaggtggagaacgtgttcaccatcagaacccccgaggacgccaacagagtggtgagactggccagaggcagaaacgtggtggtggtgggcgccggcttcctgggcatggaggtggccgcctacctgaccgagaaggcccacagcgtgagcgtggtggagctggaggagacccccttcagaagattcctgggcgagagagtgggcagagccctgatgaagatgttcgagaacaacagagtgaagttctacatgcagaccgaggtgagcgagctgagaggccaggagggcaagctgaaggaggtggtgctgaagagcagcaaggtggtgagagccgacgtgtgcgtggtgggcatcggcgccgtgcccgccaccggcttcctgagacagagcggcatcggcctggacagcagaggcttcatccccgtgaacaagatgatgcagaccaacgtgcccggcgtgttcgccgccggcgacgccgtgaccttccccctggcctggagaaacaacagaaaggtgaacatcccccactggcagatggcccacgcccagggcagagtggccgcccagaacatgctggcccaggaggccgagatgagcaccgtgccctacctgtggaccgccatgttcggcaagagcctgagatacgccggctacggcgagggcttcgacgacgtgatcatccagggcgacctggaggagctgaagttcgtggccttctacaccaagggcgacgaggtgatcgccgtggccagcatgaactacgaccccatcgtgagcaaggtggccgaggtgctggccagcggcagagccatcagaaagagagaggtggagaccggcgacatgagctggctgaccggcaagggcagctag

SEQ ID NO: 27066 - DNA, 1761 bp, Artificial Sequence
  derived and/or modified sequence
atgggcggcgccctgggcctgagacagctgcccatctgcgcccccgcctgcagacccagcagcggccacagcccctgggccgccgccagccccaaccccaaccagtggagcagcagaagcagatggtgctgcctgagaagaagcgaggccagaagaagctgcagacccgtgggcagagccgcccccggccccaccagagccatggccagacccgccaccagcaccagaagaagcgcctgcccccccctgacccccacccccgccctgagaatcgcctggagactgctgagcgccaccagcagaaccagcagaatggccagcgtgctgagcagaggcagagtgagatgcccctggcacggcgcctgcttcaacatcagcaccggcgacctggaggacttccccggcctggacagcctgcacaagttccaggtgaagatcgagaaggagaaggtgtacgtgagagccagcaagcaggccctgcagctgcagagaagaaccaaggtgatggccaagtgcatcagccccagcgccggctacagcagcagcaccaacgtgctgatcgtgggcgccggcgccgccggcctggtgtgcgccgagaccctgagacaggagggcttcagcgacagaatcgtgctgtgcaccctggacagacacctgccctacgacagacccaagctgagcaagagcctggacacccagcccgagcagctggccctgagacccaaggagttcttcagagcctacggcatcgaggtgctgaccgaggcccaggtggtgaccgtggacgtgagaaccaagaaggtggtgttcaaggacggcttcaagctggagtacagcaagctgctgctggcccccggcagcagccccaagaccctgagctgcaagggcaaggaggtggagaacgtgttcaccatcagaacccccgaggacgccaacagagtggtgagactggccagaggcagaaacgtggtggtggtgggcgccggcttcctgggcatggaggtggccgcctacctgaccgagaaggcccacagcgtgagcgtggtggagctggaggagacccccttcagaagattcctgggcgagagagtgggcagagccctgatgaagatgttcgagaacaacagagtgaagttctacatgcagaccgaggtgagcgagctgagaggccaggagggcaagctgaaggaggtggtgctgaagagcagcaaggtggtgagagccgacgtgtgcgtggtgggcatcggcgccgtgcccgccaccggcttcctgagacagagcggcatcggcctggacagcagaggcttcatccccgtgaacaagatgatgcagaccaacgtgcccggcgtgttcgccgccggcgacgccgtgaccttccccctggcctggagaaacaacagaaaggtgaacatcccccactggcagatggcccacgcccagggcagagtggccgcccagaacatgctggcccaggaggccgagatgagcaccgtgccctacctgtggaccgccatgttcggcaagagcctgagatacgccggctacggcgagggcttcgacgacgtgatcatccagggcgacctggaggagctgaagttcgtggccttctacaccaagggcgacgaggtgatcgccgtggccagcatgaactacgaccccatcgtgagcaaggtggccgaggtgctggccagcggcagagccatcagaaagagagaggtggagaccggcgacatgagctggctgaccggcaagggcagctag

SEQ ID NO: 27067 - DNA, 2230 bp, Artificial Sequence
  derived and/or modified sequence
caggtcctagagcagctccagcaggatggcggctccagcgtctctaaggcctgcagggggtccagccccatggggggcgccctaggcctccgacagctccccatctgtgctcctgcctgccggccatcctcaggccactcgccatgggcggctgcttctccaaacccaaaccagtggagctcaagatcgaggtggtgctgcctgagaaggagcgaggcaaggaggagctgtcggccagtgggaagggcagcccccgggcctaccagggcaatggcacggcccgccacttccacacggaggagcgcctgtccacccctcacccctaccccagccctcaggattgcgtggaggctgctgtctgccacgtcaaggacctcgagaatggccagatgcgggaagtggagctgggctgggggaaggtgttgctggtgaaggacaatggggagttccacgccctgggccataagtgtccgcactacggcgcacccctggtgaaaggcgttctgtcccgtggtcgggtgcgctgcccctggcacggcgcctgcttcaacatcagcactggggacctggaggacttccctggcctggacagtctacacaagttccaggtgaagattgagaaggagaaggtgtacgtccgggccagcaagcaggccctacagctgcagcgaaggaccaaggtgatggccaagtgtatctctccaagtgctgggtacagcagtagcaccaatgtgctcattgtgggtgcaggtgcagctggcctggtgtgtgcagagacactgcggcaggagggcttctccgaccggatcgtcctgtgcacgctagaccggcaccttccctacgaccgtcccaagctcagcaagtccctggacacacagcctgagcagctggccctgaggcccaaggagtttttccgagcctatggcatcgaggtgctcaccgaggctcaggtggtcacagtggacgtgagaactaagaaggtcgtgttcaaggatggcttcaagctggagtacagcaagctgctgctggcaccagggagcagccccaagactctgagctgcaaaggcaaagaagtggagaacgtgttcactatccggacgccagaggatgccaatcgcgtggtgaggctggcccgaggccgcaacgtggtcgtcgtgggagccggcttcctggggatggaggtggccgcttacctgacggagaaggcccactctgtgtctgtggtggagctggaggagacgcccttcaggaggttcctgggggagcgcgtgggtcgagccctcatgaagatgtttgagaacaaccgggtgaagttctacatgcagacggaggtgtctgagctgcggggccaggagggaaagctgaaggaggttgtgctgaagagcagcaaggtcgtgcgggctgacgtctgcgtggtgggcattggtgcagtgcccgccacaggcttcctgaggcaaagcggcatcggtttggattcccgaggcttcatccctgtcaacaagatgatgcagaccaatgtcccaggcgtgtttgcagctggcgatgctgtcaccttcccccttgcctggaggaacaaccgcaaagtgaacattccacattggcagatggctcatgctcaggggcgcgtggcagcccagaacatgttggcgcaggaggcggagatgagcactgtgccctacctctggaccgccatgtttggcaagagcctgcgctacgcgggctacggagaaggcttcgacgacgtcatcatccagggggatctggaggagctgaagtttgtggctttttacactaaaggcgacgaggtgatcgccgtggccagcatgaactacgatcccattgtgtccaaggtcgctgaggtgctggcctcaggccgtgccatccggaagcgggaggtggagactggcgacatgtcctggcttacggggaaaggatcctgagctcacatgcagtagacttgggcaggcaaagggggcaccaagggcacaggccaagccttgggggcaggtgccaatctccagtcccaggatcccccagggcagaacctgagccctcccagtgcttgccttcagccacctggctcccctcctgggaggcctctgctggatccagaagatgctcaaccctcaaggcctctgctgccactgacagctggcactggaggcaggacaagccctgcctcttctccctctattgggactggtcccctgaagaaccctgcaacacgtta

SEQ ID NO: 27068 - DNA, 2157 bp, Artificial Sequence
  derived and/or modified sequence
gctgggcctggaacacggagcagtggctgccctgcgaggaggtcctagagcagctccagcaggatggcggctccagcgtctctaaggcctgcagggggtccagccccatggggggcgccctaggcctccgacagctccccatctgtgctcctgcctgccggccatcctcaggccactcgccatgggcggctgcttctccaaacccaaaccagtggagctcaagatcgaggtggtgctgcctgagaaggagcgaggcaaggaggagctgtcggccagtgggaagggcagcccccgggcctaccagggcaatggcacggcccgccacttccacacggaggagcgcctgtccacccctcacccctaccccagccctcaggattgcgtggaggctgctgtctgccacgtcaaggacctcgagaatggccagcgttctgtcccgtggtcgggtgcgctgcccctggcacggcgcctgcttcaacatcagcactggggacctggaggacttccctggcctggacagtctacacaagttccaggtgaagattgagaaggagaaggtgtacgtccgggccagcaagcaggccctacagctgcagcgaaggaccaaggtgatggccaagtgtatctctccaagtgctgggtacagcagtagcaccaatgtgctcattgtgggtgcaggtgcagctggcctggtgtgtgcagagacactgcggcaggagggcttctccgaccggatcgtcctgtgcacgctagaccggcaccttccctacgaccgtcccaagctcagcaagtccctggacacacagcctgagcagctggccctgaggcccaaggagtttttccgagcctatggcatcgaggtgctcaccgaggctcaggtggtcacagtggacgtgagaactaagaaggtcgtgttcaaggatggcttcaagctggagtacagcaagctgctgctggcaccagggagcagccccaagactctgagctgcaaaggcaaagaagtggagaacgtgttcactatccggacgccagaggatgccaatcgcgtggtgaggctggcccgaggccgcaacgtggtcgtcgtgggagccggcttcctggggatggaggtggccgcttacctgacggagaaggcccactctgtgtctgtggtggagctggaggagacgcccttcaggaggttcctgggggagcgcgtgggtcgagccctcatgaagatgtttgagaacaaccgggtgaagttctacatgcagacggaggtgtctgagctgcggggccaggagggaaagctgaaggaggttgtgctgaagagcagcaaggtcgtgcgggctgacgtctgcgtggtgggcattggtgcagtgcccgccacaggcttcctgaggcaaagcggcatcggtttggattcccgaggcttcatccctgtcaacaagatgatgcagaccaatgtcccaggcgtgtttgcagctggcgatgctgtcaccttcccccttgcctggaggaacaaccgcaaagtgaacattccacattggcagatggctcatgctcaggggcgcgtggcagcccagaacatgttggcgcaggaggcggagatgagcactgtgccctacctctggaccgccatgtttggcaagagcctgcgctacgcgggctacggagaaggcttcgacgacgtcatcatccagggggatctggaggagctgaagtttgtggctttttacactaaaggcgacgaggtgatcgccgtggccagcatgaactacgatcccattgtgtccaaggtcgctgaggtgctggcctcaggccgtgccatccggaagcgggaggtggagactggcgacatgtcctggcttacggggaaaggatcctgagctcacatgcagtagacttgggcaggcaaagggggcaccaagggcacaggccaagccttgggggcaggtgccaatctccagtcccaggatcccccagggcagaacctgagccctcccagtgcttgccttcagccacctggctcccctcctgggaggcctctgctggatccagaagatgctcaaccctcaaggcctctgctgccactgacagctggcactggaggcaggacaagccctgcctcttctccctctattgggactggtcccctgaagaaccctgcaacacgtt

SEQ ID NO: 27069 - DNA, 813 bp, Artificial Sequence
  derived and/or modified sequence
atgggcggctgcttcagcaagcccaagcccgtggagctgaagatcgaggtggtgctgcccgagaaggagagaggcaaggaggagctgagcgccagcggcaagggcagccccagagcctaccagggcaacggcaccgccagacacttccacaccgaggagagactgagcaccccccacccctaccccagcccccaggactgcgtggaggccgccgtgtgccacgtgaaggacctggagaacggccagatgagagaggtggagctgggctggggcaaggtgctgctggtgaaggacaacggcgagttccacgccctgggccacaagtgcccccactacggcgcccccctggtgaagggcgtgctgagcagaggcagagtgagatgcccctggcacggcgcctgcttcaacatcagcaccggcgacctggaggacttccccggcctggacagcctgcacaagttccaggtgaagatcgagaaggagaaggtgtacgtgagagccagcaagcaggccctgcagctgcagagaagaaccaaggtgatggccaagtgcatcagccccagcgccggctacagcagcagcaccaacgtgctgatcgtgggcgccggcgccgccggcctggtgtgcgccgagaccctgagacaggagggcttcagcgacagaatcgtgctgtgcaccctggacagacacctgccctacgacagacccaagctgagcaagagcctggacacccagcccgagcagctggccctgagacccaaggagttcttcagagcctacggcatcgaggtgctgaccgaggcccaggtgtag

SEQ ID NO: 27070 - DNA, 390 bp, Artificial Sequence
  derived and/or modified sequence
atgggcggctgcttcagcaagcccaagcccgtggagctgaagatcgaggtggtgctgcccgagaaggagagaggcaaggaggagctgagcgccagcggcaagggcagccccagagcctaccagggcaacggcaccgccagacacttccacaccgaggagagactgagcaccccccacccctaccccagcccccaggactgcgtggaggccgccgtgtgccacgtgaaggacctggagaacggccagatgagagaggtggagctgggctggggcaaggtgctgctggtgaaggacaacggcgagttccacgccctgggccacaagtgcccccactacggcgcccccctggtgaagggcgtgctgagcagaggcagagtgagatgcccctag

SEQ ID NO: 27071 - DNA, 1797 bp, Artificial Sequence
  derived and/or modified sequence
atgggaggttgcttctccaagcctaaaccggtcgaactgaagatcgaagtggtgctccccgaaaaggagcgagggaaagaagagttgtctgccagcgggaaggggtctccccgcgcgtaccaaggtaatggcacagctcgccatttccataccgaggagagattatctactccgcatccttatcctagtccacaagattgcgtggaagcagctgtgtgtcatgtcaaagacctggaaaatggccagatgcgggaagttgagctggggtggggaaaagttctgctagttaaggacaacggtgaattccatgctctcggccacaagtgtcctcattatggggctcccttggtcaaaggcgtgttgagtaggggccgggtgcgatgtccttggcacggagcctgtttcaatatttcaacaggagatcttgaagacttcccaggcctggattcgctacacaagttccaggttaagatcgaaaaggagaaggtgtacgttagggcctctaaacaagccctgcagctgcagcgaagaaccaaagtaatggccaagtgtatctcgccctccgccggatatagctctagcaccaacgtgcttatcgtgggtgccggggcggctggcctcgtgtgtgccgagacattgcgccaagagggtttctccgaccggatcgtgctatgcacactggaccgccatctgccatatgaccgtcctaagctgagcaaaagtttagacacccaacctgagcaattagctctcagaccaaaggagttttttcgggcctacggcatcgaggtgctcaccgaggcccaggtggtgacagtggacgtgcggacaaagaaggttgtttttaaagacggcttcaaactggagtacagtaagctgcttttggctcccggctcatcccctaagaccctttcgtgtaaaggcaaagaagtggaaaatgttttcaccattcgcacacctgaggacgctaaccgcgtggtgagactggccagaggtcgcaacgtagtggttgtgggcgccggattcctcggaatggaggtggcagcatacctgaccgagaaagctcacagtgtgtccgtagttgaactggaagaaacccctttcaggagatttctcggtgagagagtgggcagagcgcttatgaaaatgttcgagaacaacagggtgaaattctacatgcagacggaggtgagcgaactgcgagggcaggaaggcaaactaaaggaagtcgttcttaaatcctctaaggttgtgcgggcagacgtgtgtgtggtgggaatcggagccgtgcccgccacgggcttcctacggcagagtgggattggtctcgacagtcgcggttttatccccgtcaataaaatgatgcaaacaaatgtgccgggcgtgttcgctgctggcgatgccgtgacctttccactggcctggcgcaataaccgcaaggttaatataccccattggcagatggctcatgcgcaggggagagttgctgcccagaatatgctggcacaggaagccgaaatgagcaccgtgccatatctgtggaccgcaatgtttggaaagtcactgagatacgccggatacggagaaggattcgacgatgtgattatccaaggcgatctcgaggagcttaagttcgtggctttttacaccaaaggagatgaagtgattgccgtggcttccatgaactatgaccctattgtgtctaaggttgccgaagtccttgcatcagggagggccattcggaagagagaggttgaaactggtgacatgtcttggctcaccggtaagggtagctag

SEQ ID NO: 27072 - DNA, 1761 bp, Artificial Sequence
  derived and/or modified sequence
atgggtggcgcactcggcctccggcagttacctatctgtgctccagcatgtcgtccaagctcagggcacagtccctgggcggcggcatcaccgaacccaaaccaatggtctagcagaagtcggtggtgttgtctgcggagaagcgaggcaaggagatcttgtcgtcccgttggccgagcagctccaggtccaactagagcaatggcaagacccgccacgtccacacgcagaagcgcctgccccccactgacacctactcctgctctccgcatcgcttggagactgctatcagccaccagcagaacctcacgcatggcctcagtgctctcacgtggtagggttcgatgcccttggcacggtgcatgcttcaacatctccactggcgaccttgaggacttcccaggcttggattccttacataagttccaggtaaagattgaaaaagagaaggtgtacgtgcgtgctagcaagcaggctctgcagctgcagcggaggacgaaagtgatggcaaaatgtatctccccgtcagcgggatatagcagcagcacaaacgtgctgattgtcggggcaggcgcagctggactagtctgcgccgaaactctgcggcaggaagggttctcggaccgaattgtcctgtgcactcttgaccgtcacctgccttatgatcggccaaaactgtctaagtccctggacacccagcccgagcagttggccctcaggcccaaagaatttttcagggcatacggtatcgaagtcctgaccgaggcccaggtggtcacagtcgacgttcggactaagaaggtagtctttaaggatggcttcaagttggagtattccaagctcttgcttgcaccaggctctagccctaagacactcagctgcaagggtaaggaggtggaaaatgtatttacaatccggacaccagaagatgcgaatagggtagtaaggctggctcgcgggcggaatgtggttgtggttggcgccggcttcctcggcatggaggtcgcagcttatctgactgaaaaggctcatagtgtgagtgtcgtggagctggaagagacaccattccgcaggttcttgggggagcgcgtaggcagagccctcatgaagatgttcgaaaacaatagagtgaaattctatatgcaaaccgaagtctctgagcttcggggccaagagggcaaactgaaagaggtagtactcaagagcagtaaggtagtccgggcagacgtttgcgtggtaggaatcggggccgtccccgcaacaggcttcctgagacagagtgggatcggccttgattctcgcggtttcattccagtgaataagatgatgcaaaccaacgtgcccggtgtgtttgccgcaggtgatgctgtcacattcccacttgcttggcgcaacaatagaaaggtgaacattcctcactggcagatggctcacgcacaggggcgagtggcagcccaaaatatgcttgcccaggaagccgagatgagcaccgtaccatacctgtggaccgccatgttcggaaagtcacttcggtacgccggttacggtgaagggtttgacgacgtgataattcagggtgacctggaagagctgaaatttgtggccttttacactaagggagatgaggttatcgccgtcgcctctatgaactatgatcctattgtctctaaagtagccgaggttttggcctcaggacgagcgatccgcaagcgggaagtcgaaactggggatatgagctggctaactggtaaaggaagttag

SEQ ID NO: 27073 - DNA, 1797 bp, Artificial Sequence
  derived and/or modified sequence
atgggaggatgtttctctaaaccaaagcccgtcgagctcaaaatcgaggttgtcctcccagaaaaagagcggggaaaagaggaactgtcggcgtctggcaaaggtagccctagagcctaccagggcaacgggaccgcacgccatttccacaccgaggaacgactcagcactccccacccctacccttccccacaggactgcgtcgaagcggctgtgtgccacgtgaaggatcttgagaatggacagatgagagaagtggaacttggctggggtaaagtgctattggtaaaggataacggggaattccacgcacttggccacaaatgcccccattacggagcaccgctggttaagggggtgttgagtagggggcgagtgcgatgtccttggcacggcgcatgcttcaacatttctactggtgatctggaggattttcccggattggatagcctacacaaattccaggtgaaaatcgagaaagagaaggtctatgtccgtgcctcaaagcaggcgctgcagctgcagagaagaaccaaggtgatggctaagtgcattagcccttcagcaggctattcctcctcaactaatgtgctgattgtcggggcaggcgctgcaggattggtgtgtgccgaaacgctaagacaggaggggttcagtgatcgaatagtattatgcacactcgacagacatctcccttacgaccggcccaaacttagtaagtctctggacactcaaccagagcaacttgccctgagacccaaggagtttttcagagcctatggaatcgaggtcctcacagaggcacaagtcgtgaccgttgacgtaagaaccaaaaaggtggtgttcaaagatgggtttaagctggagtactcaaagctgctccttgcccctggatcttctccaaagactctgtcctgtaaaggtaaagaggtcgagaacgtgtttaccatcaggacgccggaagacgctaaccgggtagtaagactggcccggggcagaaatgttgtcgtggtcggagccggctttctcgggatggaagtagccgcgtacctcacagaaaaggcacacagcgtgtcagtggttgagctggaggagactcccttcagaaggttcctgggagagagagtggggcgcgcgctgatgaagatgttcgaaaacaatagggtgaaattttacatgcagaccgaggtttccgaacttagagggcaagaggggaagctcaaagaggtggttctaaaaagctctaaagtggttcgagccgacgtgtgcgtcgtgggtataggggccgtgccggccacaggattcctaaggcagtcgggaattggactggattcgcgagggttcattcctgtgaataagatgatgcagacaaatgtgccaggggtgttcgccgccggggatgccgtgaccttcccgctggcctggagaaacaacaggaaagttaacataccccactggcagatggctcacgcccagggacgcgttgctgcccagaacatgctggcacaggaggctgaaatgagcacagtgccctacctgtggacagcaatgttcggtaagagcctgaggtatgcaggctatggcgagggattcgatgacgtcatcattcagggtgacctagaagaactgaagttcgtggctttctataccaaaggagatgaagtcattgcggtggcaagcatgaactatgatcctatagtctccaaagtagcagaagtcttggcgtcgggcagggccatccggaaaagagaggtcgaaacaggcgatatgagctggctcaccggaaaaggctcctag

SEQ ID NO: 27074 - DNA, 813 bp, Artificial Sequence
  derived and/or modified sequence
atgggaggttgtttctcgaagcctaagcccgtcgagctaaaaatcgaagtggtcttgcccgaaaaggagcgcgggaaagaagaactgagcgcaagcggaaagggatcccctcgcgcttaccaaggcaacggaaccgcaagacacttccatacagaggaacgtctgtccacccctcatccttatccctctccccaagactgcgtcgaggcggctgtgtgccacgtcaaggatctcgagaatgggcagatgcgggaggtcgagctcgggtgggggaaagtattactcgtgaaagacaacggagaattccatgcactgggccataagtgtccccattatggcgctcccttggttaagggagtgctatcccggggcagggtacgctgtccatggcacggggcatgcttcaatattagtactggagatctcgaagacttccccggcttagattctttacacaaatttcaggtgaaaatagagaaagagaaagtttacgttcgggccagcaaacaggcactgcagctccagcgacgaactaaagtgatggctaaatgtattagcccatccgctggctacagctcatctaccaacgtgctgatcgtcggagccggtgccgccggcttggtgtgtgccgagacactgcgccaggaggggtttagtgaccggatcgtgctgtgtactctggatcgccatctgccctacgacagacctaagttgagcaagtcactggatacacagcctgaacagcttgcactacggcccaaagagttttttagagcatacggaatagaggtcctcacggaggctcaggtgtag

SEQ ID NO: 27075 - DNA, 390 bp, Artificial Sequence
  derived and/or modified sequence
atggggggatgtttctccaagcctaagcccgtcgagctgaagatcgaagtcgtgctcccggaaaaagagcgggggaaggaagaactgtccgcttcagggaaaggaagccctagggcctatcagggcaatgggaccgcgcgtcattttcataccgaggaacgcctgtcaacaccccatccttatccatcgcctcaggattgtgtggaggcggccgtgtgccacgtcaaagacctggagaatggccagatgcgcgaagtcgaactcgggtggggcaaagtgctgctggtgaaagacaacggcgagtttcacgctctcggacacaagtgccctcattacggtgctcctctggtgaaaggtgtgctgtcacgcggacgggtgcgttgcccctag

SEQ ID NO: 27076 - DNA, 1797 bp, Artificial Sequence
  derived and/or modified sequence
atgggcggctgcttcagcaagcccaagcctgtggagctgaagattgaggtggtgctgcctgagaaggagcggggcaaggaggagctgagcgccagcggcaagggcagcccccgggcctaccagggcaatggaacagcccggcacttccacacagaggagcggctgagcaccccccacccctaccccagcccccaggactgtgtggaggccgctgtgtgccacgtgaaggacctggagaatggccagatgagggaggtggagctgggctggggcaaggtgctgctggtgaaggacaatggagagttccacgccctgggccacaagtgcccccactacggggcccccctggtgaagggcgtgctgagccggggccgggtgcgctgcccctggcatggagcctgcttcaacatcagcactggagacctggaggacttccctggcctggacagcctgcacaagttccaggtgaagattgagaaggagaaggtgtatgtgcgggccagcaagcaggccctgcagctgcagaggaggaccaaggtgatggccaagtgcatcagccccagcgctggctacagcagcagcaccaacgtgctgattgtgggcgctggagctgctggcctggtgtgtgccgagaccctgcggcaggagggcttcagtgaccgcatcgtgctgtgcaccctggacagacacctgccctatgaccggcccaagctgagcaagagcctggacacccagcctgagcagctggccctgcggcccaaggagttcttccgggcctacggcatcgaggtgctgacagaggcccaggtggtgacagtggatgtgaggaccaagaaggtggtgttcaaggatggcttcaagctggagtacagcaagctgctgctggcccctggcagcagccccaagaccctgagctgcaagggcaaggaggtggagaatgtgttcaccatccgcaccccagaagatgccaacagagtggtgcggctggcccggggcagaaatgtggtggtggtgggcgccggcttcctgggcatggaggtggccgcctacctgacagagaaggcccacagcgtgtctgtggtggagctggaggagacccccttccgccgcttcctgggggagcgggtgggccgggccctgatgaagatgtttgagaacaacagagtgaagttctacatgcagacagaggtgtctgagctgcggggccaggagggcaagctgaaggaggtggtgctgaagagcagcaaggtggtgcgggcagatgtgtgtgtggtgggcattggagctgtgcctgccaccggcttcctgcggcagagcggcatcggcctggacagccggggcttcatccctgtgaacaagatgatgcagaccaacgtgcctggggtgtttgctgctggagatgctgtgaccttccccctggcctggaggaacaacaggaaggtgaacatcccccactggcagatggcccacgcccagggccgggtggccgcccagaacatgctggcccaggaggccgagatgagcacagtgccctacctgtggacagccatgtttgggaagagcctgcgctatgccggctatggagagggctttgatgatgtgatcatccagggcgacctggaggagctgaagtttgtggccttctacaccaagggagatgaggtgattgctgtggcctccatgaactatgaccccatcgtgtccaaggtggccgaggtgctggccagcggccgggccatcaggaagcgggaggtggagactggagacatgtcctggctgaccgggaagggcagctag

SEQ ID NO: 27077 - DNA, 1761 bp, Artificial Sequence
  derived and/or modified sequence
atgggcggggccctgggcctgcggcagctgcccatctgtgccccagcctgccggcccagcagcggccacagcccctgggccgccgccagccccaaccccaaccagtggagcagccgcagccgctggtgctgcctgcggcgctctgaggcccggcgcagctgcaggcctgtgggccgggccgcccctggccccacccgggccatggcccggcctgccaccagcacccggcgcagcgcctgcccccccctgacccccaccccagccctgagaattgcctggaggctgctgagcgccaccagcaggaccagcaggatggcctctgtgctgagccggggccgggtgcgctgcccctggcatggagcctgcttcaacatcagcactggagacctggaggacttccctggcctggacagcctgcacaagttccaggtgaagattgagaaggagaaggtgtatgtgcgggccagcaagcaggccctgcagctgcagaggaggaccaaggtgatggccaagtgcatcagccccagcgctggctacagcagcagcaccaacgtgctgattgtgggcgctggagctgctggcctggtgtgtgccgagaccctgcggcaggagggcttcagtgaccgcatcgtgctgtgcaccctggacagacacctgccctatgaccggcccaagctgagcaagagcctggacacccagcctgagcagctggccctgcggcccaaggagttcttccgggcctacggcatcgaggtgctgacagaggcccaggtggtgacagtggatgtgaggaccaagaaggtggtgttcaaggatggcttcaagctggagtacagcaagctgctgctggcccctggcagcagccccaagaccctgagctgcaagggcaaggaggtggagaatgtgttcaccatccgcaccccagaagatgccaacagagtggtgcggctggcccggggcagaaatgtggtggtggtgggcgccggcttcctgggcatggaggtggccgcctacctgacagagaaggcccacagcgtgtctgtggtggagctggaggagacccccttccgccgcttcctgggggagcgggtgggccgggccctgatgaagatgtttgagaacaacagagtgaagttctacatgcagacagaggtgtctgagctgcggggccaggagggcaagctgaaggaggtggtgctgaagagcagcaaggtggtgcgggcagatgtgtgtgtggtgggcattggagctgtgcctgccaccggcttcctgcggcagagcggcatcggcctggacagccggggcttcatccctgtgaacaagatgatgcagaccaacgtgcctggggtgtttgctgctggagatgctgtgaccttccccctggcctggaggaacaacaggaaggtgaacatcccccactggcagatggcccacgcccagggccgggtggccgcccagaacatgctggcccaggaggccgagatgagcacagtgccctacctgtggacagccatgtttgggaagagcctgcgctatgccggctatggagagggctttgatgatgtgatcatccagggcgacctggaggagctgaagtttgtggccttctacaccaagggagatgaggtgattgctgtggcctccatgaactatgaccccatcgtgtccaaggtggccgaggtgctggccagcggccgggccatcaggaagcgggaggtggagactggagacatgtcctggctgaccgggaagggcagctag

SEQ ID NO: 27078 - DNA, 813 bp, Artificial Sequence
  derived and/or modified sequence
atgggcggctgcttcagcaagcccaagcctgtggagctgaagattgaggtggtgctgcctgagaaggagcggggcaaggaggagctgagcgccagcggcaagggcagcccccgggcctaccagggcaatggaacagcccggcacttccacacagaggagcggctgagcaccccccacccctaccccagcccccaggactgtgtggaggccgctgtgtgccacgtgaaggacctggagaatggccagatgagggaggtggagctgggctggggcaaggtgctgctggtgaaggacaatggagagttccacgccctgggccacaagtgcccccactacggggcccccctggtgaagggcgtgctgagccggggccgggtgcgctgcccctggcatggagcctgcttcaacatcagcactggagacctggaggacttccctggcctggacagcctgcacaagttccaggtgaagattgagaaggagaaggtgtatgtgcgggccagcaagcaggccctgcagctgcagaggaggaccaaggtgatggccaagtgcatcagccccagcgctggctacagcagcagcaccaacgtgctgattgtgggcgctggagctgctggcctggtgtgtgccgagaccctgcggcaggagggcttcagtgaccgcatcgtgctgtgcaccctggacagacacctgccctatgaccggcccaagctgagcaagagcctggacacccagcctgagcagctggccctgcggcccaaggagttcttccgggcctacggcatcgaggtgctgacagaggcccaggtgtag

SEQ ID NO: 27079 - DNA, 390 bp, Artificial Sequence
  derived and/or modified sequence
atgggcggctgcttcagcaagcccaagcctgtggagctgaagattgaggtggtgctgcctgagaaggagcggggcaaggaggagctgagcgccagcggcaagggcagcccccgggcctaccagggcaatggaacagcccggcacttccacacagaggagcggctgagcaccccccacccctaccccagcccccaggactgtgtggaggccgctgtgtgccacgtgaaggacctggagaatggccagatgagggaggtggagctgggctggggcaaggtgctgctggtgaaggacaatggagagttccacgccctgggccacaagtgcccccactacggggcccccctggtgaagggcgtgctgagccggggccgggtgcgctgcccctag

SEQ ID NO: 27080 - DNA, 1797 bp, Artificial Sequence
  derived and/or modified sequence
atgggcggctgcttcagcaagcccaagcccgtggagctgaagatcgaagtggtgctgcccgaaaaagaacgaggcaaagaagagctcagcgcatcaggaaaaggtagcccccgggcctatcagggcaacggtactgccagacattttcatacagaggagcgcctcagtacaccccatccttacccaagcccccaggactgcgttgaggcggccgtctgccacgtaaaggatctcgaaaacgggcagatgcgggaggtcgagctcggctgggggaaagttctgttagtgaaggataatggagaattccacgcactgggtcataaatgcccgcattacggggcaccactagtgaaaggcgtgctgtctcgcggaagagtgcgctgcccttggcatggggcatgcttcaacatcagcaccggcgatctagaggactttccgggcctggatagcttacataaatttcaagtgaagatagagaaagaaaaagtttatgttcgggctagcaagcaagctttacagttgcaacggcgcaccaaagtaatggccaagtgcatctctccgtctgcgggctattcttcctctactaacgtcctcatcgttggagcaggagcagccggactggtgtgcgcggagacacttaggcaggagggattttcagatcggatcgtcctgtgtacactggatagacatctcccttacgatagaccaaaactgtcaaaaagccttgacacacagccagagcagttggcactgcgacctaaggagtttttccgcgcctacggaatagaggttctaacagaggcccaggtcgtgacagtggacgtgagaacaaaaaaagtggtgtttaaggacgggttcaagctggaatatagcaagttgctgttggctccggggagttctccgaaaactctcagctgtaagggcaaggaagtagaaaacgtctttacaatccgcacacctgaggatgccaatcgggtcgtgagattggctcgggggcggaatgtcgtggttgtaggagctgggtttctgggcatggaggtggcggcttaccttacagagaaggcacactcggtgagcgtagtggagctggaggagacaccattccgccgcttcctgggtgaacgggtgggtcgtgctctgatgaagatgttcgaaaacaaccgagtgaagttctacatgcagacggaagtaagcgaactgcgaggccaggaggggaaactgaaggaagtggtgttgaagtcctctaaagtggtgagagccgacgtctgtgtcgttggtatcggcgcagtacccgctactggcttcttaagacagagcggcatcgggcttgatagtaggggctttatacccgttaataaaatgatgcagacgaacgtgcccggggtcttcgccgccggcgatgcagtcacattccctttggcatggagaaacaacaggaaggtgaatatccctcactggcagatggcacacgcacagggaagggttgctgcccaaaatatgctcgcccaggaagcagagatgtcaaccgttccctacctgtggacagcaatgtttggcaaatccttacggtacgccggctatggcgagggcttcgacgatgtcatcattcagggcgatctggaggaattaaaatttgtggccttctacaccaagggggacgaagttatcgccgtggcgtccatgaactatgatcctatcgtgtccaaagtagccgaggttttggccagcggccgagccattcgtaaaagagaggtggagacgggagatatgtcttggttgaccgggaagggctcttag

SEQ ID NO: 27081 - DNA, 1761 bp, Artificial Sequence
  derived and/or modified sequence
atgggcggcgccctgggcctgcggcagctgcccatctgcgcccccgcatgcagaccaagttctgggcacagtccatgggctgctgcctctccaaatcctaaccagtggtcatctcgctcacgctggtgttgtctccgccgctccgaagctcgacggagctgccgccccgttggccgcgccgcccccgggccgacccgcgccatggcgcgtccagccaccagcacacggagatccgcatgcccaccactgacccccactccagccctgcgtattgcgtggcgactcctgtcagcaactagtaggacaagccgaatggcctcagtgctctcacgcggtcgtgtacgctgcccgtggcacggggcatgttttaatatatccacaggggacctggaggactttcccgggctggattccctgcataagtttcaagtgaaaattgaaaaggagaaagtttacgtgagagcatcaaaacaggccctgcagcttcagagacggacaaaagttatggcaaagtgtataagcccctccgcaggttacagctcaagtactaatgtgctgatcgtgggggcaggcgcagctggactggtgtgcgccgagactttgcgccaggaaggtttttctgaccgcatcgtgttatgcactctggacagacacctgccttatgaccggccaaagcttagcaagagtctggatacgcaacctgagcagctggcacttcgcccaaaagagttcttcagagcgtacggtatcgaagtgctgacagaagctcaggtagtgactgtggatgtgcggaccaagaaggtagtgttcaaagatgggttcaagctggagtacagtaagctcttattggctcccgggtcttctcctaagacactgagctgcaaaggcaaagaagtggaaaatgtcttcacaatccgcactcccgaagatgcgaaccgagtggtaaggctggcaagaggacgcaatgtggtggtcgttggcgcgggcttcctgggaatggaggtcgccgcgtatttgaccgagaaagcgcattctgtgagtgtcgtggagctagaggagacgcccttcagaaggttcttgggcgagcgcgtgggacgggctttaatgaagatgttcgaaaataatcgcgtgaagttctatatgcagacagaggtttccgagctgcgaggtcaggaaggcaaactaaaggaagtggtactaaagtcttcaaaggttgttcgggccgacgtgtgtgtggtgggcatcggagccgtacccgctactggctttctgagacagtccggcattggcttagatagtcggggcttcattccagtgaataagatgatgcagactaacgttccaggggtgtttgccgccggtgatgccgtcaccttccctctagcgtggcgtaacaatcgaaaggtgaacattcctcactggcagatggcccacgctcagggcagggtcgccgcccaaaacatgctggcgcaggaagccgagatgagtaccgtaccttacctgtggacagcaatgtttggaaaatcactgaggtatgccggttacggcgagggattcgacgatgtgattatccagggcgacctggaagaattgaagttcgtcgcgttctatacaaaaggtgacgaggttattgctgtggccagtatgaattacgatccaatcgtgtccaaggtggccgaagtcttggcaagcgggcgggccattcgaaaacgcgaggtggaaacaggggacatgagctggctaaccggaaagggcagctag

SEQ ID NO: 27082 - DNA, 1797 bp, Artificial Sequence
  derived and/or modified sequence
atgggcggctgcttcagcaagcccaagcccgtggagctgaagatcgaagtggtcctccccgaaaaagagcgagggaaagaagagctgtcagcctccgggaaaggcagccctcgggcctaccaggggaacggaacagcccgtcacttccacaccgaggaaagactgagcaccccacatccatacccttctccccaggactgtgtcgaggccgctgtgtgtcatgttaaagacctggagaacgggcaaatgcgcgaagtggagctgggctggggtaaggtgctgctggtgaaggataatggagaatttcatgccctggggcataagtgcccgcactacggcgcaccacttgtaaaaggtgttctgagcaggggtagggtccggtgtccgtggcacggtgcttgtttcaacattagcacaggcgacttggaggattttcccggcctcgactcactccacaagttccaggtgaagattgagaaagagaaagtttacgtacgcgcttcgaaacaggccctccagttgcagagaagaacaaaggtgatggcaaaatgcatttcaccttccgccggctactctagttccactaacgtcctgatagtgggcgcgggtgccgctggactggtgtgcgcagaaaccctccgccaggagggtttttccgatcggatcgtgctctgtactctggatcgtcacctgccttacgaccgccctaaactaagcaagtccctggacacacagccagagcagctggccctgcgccccaaagaattcttcagagcctatgggatcgaggtgctgacagaggcgcaagtggtgacggtcgatgtgagaaccaagaaagtggtttttaaagacggattcaagctggaatattccaaactgcttcttgctccaggatcaagccccaaaaccttatcgtgtaagggcaaggaagtggaaaatgtattcacgatacgaactcctgaggacgccaacagggtagtgcgcctggcacgcggccgaaacgtggtggtggtcggcgccggcttcctgggaatggaagtggcggcttaccttactgagaaggctcacagtgtatcagtggtggaactggaggaaaccccttttcggcgattcctgggcgagcgcgtgggccgcgctctcatgaaaatgttcgagaataatagagtaaaattttacatgcagaccgaggtgagtgagctcaggggccaagaaggcaaactgaaggaagtggtgttgaagtcctccaaagtggtacgggcggacgtgtgtgtggtgggtatcggtgccgtgccagccaccggcttcctcagacagagtggtatcggactcgattctagaggttttatacccgttaacaagatgatgcaaactaacgtgcccggagtgtttgcagcaggcgacgctgttaccttccctttagcctggaggaacaatagaaaggtcaacattccccattggcagatggctcacgctcagggtcgggtggcagcacagaacatgctggcgcaggaagctgagatgagtacggtcccatacttatggactgccatgttcgggaagtctctgagatatgccggctatggcgagggattcgacgacgtcattattcagggtgacctggaagaacttaagttcgtggccttctacaccaagggagatgaggtgatcgccgtggcctccatgaactatgatccaatcgtttctaaggtggcggaggtcctcgcgagtggccgagcaatccggaagagggaggtggaaactggtgacatgagctggctgaccggcaagggctcctag

SEQ ID NO: 27083 - DNA, 2309 bp, Artificial Sequence
  derived and/or modified sequence
cgcggccccaagcggttcccgagcccaggcccgcgccgagcccaggtcctagagcagctccagcaggatggcggctccagcgtctctaaggcctgcagggggtccagccccatggggggcgccctaggcctccgacagctccccatctgtgctcctgcctgccggccatcctcaggccactcgccatgggcggctgcttctccaaacccaaaccagtggagctcaagatcgaggtggtgctgcctgagaaggagcgaggcaaggaggagctgtcggccagtgggaagggcagcccccgggcctaccagggcaatggcacggcccgccacttccacacggaggagcgcctgtccacccctcacccctaccccagccctcaggattgcgtggaggctgctgtctgccacgtcaaggacctcgagaatggccagatgcgggaagtggagctgggctgggggaaggtgttgctggtgaaggacaatggggagttccacgccctgggccataagtgtccgcactacggcgcacccctggtgaaaggcgttctgtcccgtggtcgggtgcgctgcccctggcacggcgcctgcttcaacatcagcactggggacctggaggacttccctggcctggacagtctacacaagttccaggtgaagattgagaaggagaaggtgtacgtccgggccagcaagcaggccctacagctgcagcgaaggaccaaggtgatggccaagtgtatctctccaagtgctgggtacagcagtagcaccaatgtgctcattgtgggtgcaggtgcagctggcctggtgtgtgcagagacactgcggcaggagggcttctccgaccggatcgtcctgtgcacgctagaccggcaccttccctacgaccgtcccaagctcagcaagtccctggacacacagcctgagcagctggccctgaggcccaaggagtttttccgagcctatggcatcgaggtgctcaccgaggctcaggtggtcacagtggacgtgagaactaagaaggtcgtgttcaaggatggcttcaagctggagtacagcaagctgctgctggcaccagggagcagccccaagactctgagctgcaaaggcaaagaagtggagaacgtgttcactatccggacgccagaggatgccaatcgcgtggtgaggctggcccgaggccgcaacgtggtcgtcgtgggagccggcttcctggggatggaggtggccgcttacctgacggagaaggcccactctgtgtctgtggtggagctggaggagacgcccttcaggaggttcctgggggagcgcgtgggtcgagccctcatgaagatgtttgagaacaaccgggtgaagttctacatgcagacggaggtgtctgagctgcggggccaggagggaaagctgaaggaggttgtgctgaagagcagcaaggtcgtgcgggctgacgtctgcgtggtgggcattggtgcagtgcccgccacaggcttcctgaggcaaagcggcatcggtttggattcccgaggcttcatccctgtcaacaagatgatgcagaccaatgtcccaggcgtgtttgcagctggcgatgctgtcaccttcccccttgcctggaggaacaaccgcaaagtgaacattccacattggcagatggctcatgctcaggggcgcgtggcagcccagaacatgttggcgcaggaggcggagatgagcactgtgccctacctctggaccgccatgtttggcaagagcctgcgctacgcgggctacggagaaggcttcgacgacgtcatcatccagggggatctggaggagctgaagtttgtggctttttacactaaaggcgacgaggtgatcgccgtggccagcatgaactacgatcccattgtgtccaaggtcgctgaggtgctggcctcaggccgtgccatccggaagcgggaggtggagactggcgacatgtcctggcttacggggaaaggatcctgagctcacatgcagtagacttgggcaggcaaagggggcaccaagggcacaggccaagccttgggggcaggtgccaatctccagtcccaggatcccccagggcagaacctgagccctcccagtgcttgccttcagccacctggctcccctcctgggaggcctctgctggatccagaagatgctcaaccctcaaggcctctgctgccactgacagctggcactggaggcaggacaagccctgcctcttctccctctattgggactggtcccctgaagaaccctgcaacacgttaaacattaccgtaaaattaaaacgcacaaatttgcaga

SEQ ID NO: 27084 - DNA, 813 bp, Artificial Sequence
  derived and/or modified sequence
atgggcggctgcttcagcaagcccaagcccgtggagctgaagatcgaggtggtgctgcctgaaaaggaaagagggaaggaggaacttagcgcttcaggaaaaggctcgcccagggcctatcaagggaacggcacagcaagacacttccatacagaggaacggttgagcactcctcacccctatcctagccctcaggactgcgttgaagccgccgtttgccacgtgaaagatctcgagaacggccagatgagggaagtggagctaggttgggggaaggtgttattggtaaaagacaacggagaattccatgcccttgggcacaagtgccctcactatggcgcaccattggtcaagggagtgctctctcgcggccgagtaagatgcccctggcacggtgcttgcttcaatatctccacgggcgacctggaagatttccctggactggattccctgcacaagtttcaagttaaaattgaaaaagaaaaagtctacgtgcgtgccagcaagcaggccctgcagctccagagacggaccaaagtcatggcaaagtgcatctcaccttcagcagggtactccagttcaaccaacgttctgattgtcggagccggagccgccggcctggtgtgtgccgagactctgcggcaggagggcttttccgaccgaatcgtgctgtgtacactggaccggcacctgccctatgatcgaccaaaactcagcaaaagtctcgacactcagcccgaacagctggcactccgtccgaaggaatttttccgagcatatggcatcgaagtgctgactgaggcacaggtatag

SEQ ID NO: 27085 - DNA, 390 bp, Artificial Sequence
  derived and/or modified sequence
atgggcggctgcttcagcaagcccaagcccgtggagctgaagatcgaagtggttttaccggagaaagagcgcggcaaggaggagctgtccgccagcgggaaaggttcaccgcgcgcataccaggggaacggaaccgcgcgccacttccacacggaagaaaggctcagcactccacatccttatcccagtccacaggactgtgtcgaggccgctgtgtgtcatgtgaaagacctggagaatggccagatgcgcgaggttgaactgggctgggggaaggttctcctggttaaagataacggggagttccatgcacttggccataagtgtcctcactatggagcccccctggttaagggcgtgttaagtcgtggaagggtgagatgtccttag

SEQ ID NO: 27086 - DNA, 1797 bp, Artificial Sequence
  derived and/or modified sequence
atgggcggttgctttagcaagccaaaacccgttgagctgaagattgaggtcgttctacccgagaaagagcgcggaaaggaagagctctcagctagtggcaaggggagccccagagcgtatcagggcaatggaacagcaaggcatttccacacagaggagagattgtctaccccgcacccttaccccagtccccaggactgtgtcgaggcggctgtttgtcatgtaaaggaccttgaaaacggacagatgcgtgaagtggaattgggttgggggaaggtgttacttgttaaagataatggtgaatttcacgccctggggcacaaatgtcctcattatggggctccactggttaagggagtactgagtcgtgggcgtgtgcggtgcccttggcacggagcttgcttcaacattagcaccggagacctggaggatttccctggcctcgactctctgcataaatttcaagtgaagatagaaaaagagaaggtgtatgtgagagctagtaagcaggcccttcaactacagcgccgtaccaaagttatggcaaaatgtattagcccctcagcaggctactcttcctctaccaacgttcttattgtaggtgcgggagccgcagggctcgtgtgtgccgagacactcaggcaagagggatttagtgatcgaatcgtgctgtgcaccctggatagacatctgccttacgatcggcctaaactctctaaaagccttgatacacaacctgagcagctcgccttgcgtccgaaagagtttttccgggcttatgggatagaggtgctcactgaggcccaggtggtaaccgttgacgtgaggactaaaaaggtagtgtttaaagacggatttaagttggagtactcaaagcttctcctagctcccggttcatcaccaaaaacgctttcttgtaagggcaaagaggtggaaaatgtgtttacgatccggacacccgaagatgcaaatcgggtggtgcgactggccagaggtaggaatgtggtggtcgttggggctggttttctcggtatggaggtagccgcttacttgaccgagaaagcccattccgtgagcgtggtggaactggaggaaaccccctttagacgattcctgggagagagagtgggcagagctcttatgaaaatgtttgagaacaaccgtgtgaaattctatatgcagacagaggtttcagagctgcgcggacaagaaggcaaattaaaggaggtcgtcctcaagtcctccaaggtggttagggcggacgtgtgcgtggtgggaataggagcagtccctgcaaccggctttctgcggcagagtggcatcggcctggacagtagggggttcatacctgtgaataagatgatgcaaactaatgtgcccggtgtgtttgctgccggtgatgctgtgaccttccctctcgcttggaggaacaataggaaggtgaatatcccccattggcagatggctcacgctcagggcagagtcgcggcacagaacatgctcgcgcaggaggcagaaatgtctaccgtcccatacctgtggactgccatgttcgggaagtccctccgatacgccggttatggagagggatttgacgatgttatcattcagggcgatctggaagagctaaagtttgtggcattctataccaagggcgacgaagtaatcgcagtggcctccatgaattatgatccaatcgtatccaaggtcgctgaggtgctcgcgtccggacgcgctatacgcaaacgggaggtggaaacgggtgacatgagctggttaactggaaaaggtagctag

SEQ ID NO: 27087 - DNA, 1761 bp, Artificial Sequence
  derived and/or modified sequence
atgggtggtgcattaggacttaggcagctgcccatttgcgctccggcttgccgccctagttccggacatagcccctgggccgctgcgtctcctaaccccaaccagtggagtagccgctcccgctggtgttgcttgcggagaagtgaagctcgtagatcctgccgacccgtgggtagagccgcacctggcccaacccgcgctatggccaggcctgctacctctactcgtaggagcgcctgccccccactcactcccactcctgccctgcgcatagcatggaggctgctgtcagccaccagcagaactagtcgcatggcatccgttttatcacgcggtagggtcagatgcccatggcacggggcttgctttaacatcagcacaggagatcttgaagattttcctggacttgattcattacacaaattccaggtgaagatcgaaaaggagaaggtgtacgtgagggcctctaagcaggcactgcagctacagagacgaactaaagtgatggcaaaatgcatatccccatccgccggatattccagctccactaacgtgttgatcgtgggtgccggtgctgcaggtttggtgtgcgcggagactctgcggcaggaaggctttagcgataggatcgtcctttgtacactggatcgtcatcttccgtacgaccgacctaagttgagcaagtctttagatactcagcccgagcagcttgcactgcggccaaaggagttctttagagcctacggcattgaggtgctcactgaagctcaggtggtgaccgtggacgtaagaacaaagaaagtggtgtttaaggatggctttaagctggagtacagcaagctgcttttggccccaggaagctcacctaagactctctcgtgcaagggcaaggaggttgaaaacgtattcactatccgtacccccgaagatgccaaccgggtcgtgaggttggctaggggtcggaacgtagtggtggtgggtgccggattccttggtatggaggtggctgcttacctcaccgaaaaggctcacagcgtaagcgtcgtggagctggaagaaacaccattccggaggttcctgggtgagagggttgggagagcactgatgaaaatgttcgagaataacagagtaaaattttacatgcagacagaggtgtcggagctgcgaggtcaggaggggaagctaaaggaggtggttctcaagtccagcaaggttgttcgcgcagacgtttgcgtagtcggaatcggagctgtgcctgctaccggcttcttgcgacaatcaggtatcggccttgattctagaggcttcataccggtgaataaaatgatgcagacgaacgttcccggtgtttttgctgcaggtgatgcagtcacatttcccctcgcatggagaaataacaggaaagtcaacatcccccattggcagatggcacacgcacaggggagagtggcggcacagaacatgttagcacaggaggcagagatgagcactgtgccgtacctgtggactgcaatgtttggtaaaagtttgagatatgctggctatggcgaaggctttgatgacgtgatcattcaaggcgatctggaagaacttaaattcgtggccttttacacaaaaggggacgaggtcatagccgtcgcctctatgaattatgaccccatcgtgtcgaaagttgcagaggttcttgcctccggccgtgccatacgcaaacgagaggtcgagaccggcgatatgagctggctgacaggcaaggggtcctag

SEQ ID NO: 27088 - DNA, 1797 bp, Artificial Sequence
  derived and/or modified sequence
atgggcggatgcttttcaaaacccaagcctgtggagctcaagattgaagtggtgcttcccgaaaaggaaaggggtaaagaggagctgagcgcatctggcaaggggtcacctcgggcttaccaagggaatggtaccgcccgacactttcacaccgaggagcgtttatccaccccacacccgtatcccagcccccaggactgcgtcgaggccgctgtgtgccacgtaaaagacctggaaaatggccagatgcgagaagtggaacttgggtggggcaaggtgctcttggtgaaggataacggggaattccacgctttaggacacaaatgtccgcattatggtgctccacttgtgaagggcgtcctgagtcggggtcgcgttcggtgtccctggcacggagcatgctttaatatatctaccggagacctcgaagatttcccaggtctggatagccttcataagtttcaggtgaaaattgaaaaagaaaaggtgtatgtacgtgcgtcgaagcaggccctgcaactccagcgcagaacaaaagtcatggccaaatgtattagcccctcagcagggtactcatcttccaccaacgtgttgatcgtcggagcaggcgcagcgggtcttgtatgcgcagaaacattgcgccaagaggggttttcagaccgaattgtcctgtgtacccttgatagacacctcccctatgaccgccctaaattaagtaaaagcttggatacacaacctgaacagttggctctgaggcccaaggagttttttagagcatatggtatagaagtcctaacagaggcccaggtcgtgaccgtggacgtgcgaaccaaaaaggtcgtgtttaaagatggcttcaaactcgagtacagtaaactgctgctcgcgccaggttctagtccaaaaaccctgagttgcaagggcaaagaggtggaaaacgtcttcactattcgaaccccagaggacgcgaatagagtggtccgccttgctaggggaagaaacgtggtcgtcgttggggcaggattcctgggcatggaggtagctgcctacctgactgaaaaggcccatagcgtctccgttgttgagttagaggagacccccttccgcagatttctgggagagagagtaggcagggcactaatgaagatgttcgagaataatcgcgtaaaattctacatgcagacggaggttagcgagctcagaggccaggagggcaaactgaaagaagtcgtgctgaaaagctctaaggttgtgagagctgacgtgtgcgtggttgggataggtgccgtgcctgccaccggtttcctgaggcagtccgggataggattagattccagaggattcatccccgtgaacaagatgatgcagaccaacgttcccggagtgtttgccgcaggcgacgcggttactttccctttggcctggcgtaacaataggaaggttaatattccccactggcagatggcacacgctcaggggagggtggcagctcagaatatgctggcccaggaagccgaaatgagtactgttccttatctgtggaccgccatgtttggaaagagtctaaggtacgccggttacggcgagggcttcgacgatgtcattatccagggtgacttggaggaactgaaatttgtggccttttacacgaagggggacgaggtgatagctgtagcttccatgaactatgacccaattgtgtcgaaggttgccgaagtgctcgcgtcgggtcgagccattcgcaaacgagaggtagaaacaggcgacatgtcttggctgacagggaaaggttcatag

SEQ ID NO: 27089 - DNA, 813 bp, Artificial Sequence
  derived and/or modified sequence
atgggagggtgtttctctaagcctaaaccagtggagctcaagatcgaagtcgtgctgcccgaaaaggagaggggaaaggaggagctgagtgccagcggcaaaggttccccgcgagcttaccagggcaatggtaccgcacgacattttcacactgaagaaaggctgtcgaccccccacccttatccttcgccccaagactgcgtcgaagcagcagtgtgtcatgtgaaagatctggagaacggccagatgcgtgaagtggaactgggatggggaaaagtgctgcttgtgaaggacaatggtgagtttcacgctttaggccacaagtgtccccattacggtgctcctctggtgaaaggtgtgttatcccggggaagggtgcgctgtccatggcacggcgcatgttttaatatctcaactggcgatctggaggactttccaggattggactccctccataagtttcaggtcaagattgagaaggaaaaggtgtacgtgcgcgcatccaaacaagcgctccagcttcagcgtcgtactaaagtcatggccaaatgtattagccctagtgccggttacagctcatccacaaatgtactgatcgtcggcgcaggggctgctggcctagtctgtgccgaaactctgagacaggaggggttttcagatagaatagtgctctgcacacttgatcgccatctgccctatgataggccgaagctcagcaagagtctagacactcaacctgagcagttggcactcagacccaaagagttttttagggcctacggaattgaggtcctcactgaggctcaggtgtag

SEQ ID NO: 27090 - DNA, 390 bp, Artificial Sequence
  derived and/or modified sequence
atgggcggatgcttttcaaagcccaagcccgttgaactcaaaatcgaggtggtgctgcccgaaaaagaacgaggaaaagaggaactttccgcctccggcaagggatctccccgagcctatcaggggaacgggactgcaaggcattttcacacagaagagcggctttcaacacctcacccttacccaagcccccaggactgcgtggaagccgctgtgtgccacgttaaggacttggagaatggacagatgcgcgaggtggagctgggctggggcaaggttctcctggtgaaggacaatggggaattccatgccctgggccacaagtgtccgcattatggggcaccgctcgtgaagggagtcctctcccggggtagagtccgttgtccctag

SEQ ID NO: 27091 - DNA, 1094 bp, Artificial Sequence
  derived and/or modified sequence
ctcctggccacagcttgagctgggaggagggtggaggctgggccgcctcctggacccctgccctccctgcccggccttccaaggcccggcagcctcagtccactgctgggcctggaacacggagcagtggctgccctgcgaggaggtcctagagcagctccagcaggatggcggctccagcgtctctaaggcctgcagggggtccagccccatggggggcgccctaggcctccgacagctccccatctgtgctcctgcctgccggccatcctcaggccactcgccatgggcggctgcttctccaaacccaaaccagtggagctcaagatcgaggtggtgctgcctgagaaggagcgaggcaaggaggagctgtcggccagtgggaagggcagcccccgggcctaccagggcaatggcacggcccgccacttccacacggaggagcgcctgtccacccctcacccctaccccagccctcaggattgcgtggaggctgctgtctgccacgtcaaggacctcgagaatggccagatgcgggaagtggagctgggctgggggaaggtgttgctggtgaaggacaatggggagttccacgccctgggccataagtgtccgcactacggcgcacccctggtgaaaggcgttctgtcccgtggtcgggtgcgctgcccctggcacggcgcctgcttcaacatcagcactggggacctggaggacttccctggcctggacagtctacacaagttccaggtgaagattgagaaggagaaggtgtacgtccgggccagcaagcaggccctacagctgcagcgaaggaccaaggtgatggccaagtgtatctctccaagtgctgggtacagcagtagcaccaatgtgctcattgtgggtgcaggtgcagctggcctggtgtgtgcagagacactgcggcaggagggcttctccgaccggatcgtcctgtgcacgctagaccggcaccttccctacgaccgtcccaagctcagcaagtccctggacacacagcctgagcagctggccctgaggcccaaggagtttttccgagcctatggcatcgaggtgctcaccgaggctcaggt

SEQ ID NO: 27092 - DNA, 609 bp, Artificial Sequence
  derived and/or modified sequence
aagcggttcccgagcccaggcccgcgccgagcccagcaggcacccacccacggcccttcctggtatctggaccagaccaggtcctagagcagctccagcaggatggcggctccagcgtctctaaggcctgcagggggtccagccccatggggggcgccctaggcctccgacagctccccatctgtgctcctgcctgccggccatcctcaggccactcgccatgggcggctgcttctccaaacccaaaccagtggagctcaagatcgaggtggtgctgcctgagaaggagcgaggcaaggaggagctgtcggccagtgggaagggcagcccccgggcctaccagggcaatggcacggcccgccacttccacacggaggagcgcctgtccacccctcacccctaccccagccctcaggattgcgtggaggctgctgtctgccacgtcaaggacctcgagaatggccagatgcgggaagtggagctgggctgggggaaggtgttgctggtgaaggacaatggggagttccacgccctgggccataagtgtccgcactacggcgcacccctggtgaaaggcgttctgtcccgtggtcgggtgcgctgcccctg

SEQ ID NO: 27093 - protein, 553 aa, Artificial Sequence
  derived and/or modified sequence
MSSWIRWHGPAMARLWGFCWLVVGFWRAAFACPTSCKCSASRIWCSDPSPGIVAFPRLEPNSVDPENITEIFIANQKRLEIINEDDVEAYVGLRNLTIVDSGLKFVAHKAFLKNSNLQHINFTRNKLTSLSRKHFRHLDLSELILVGNPFTCSCDIMWIKTLQEAKSSPDTQDLYCLNESSKNIPLANLQIPNCGLPSANLAAPNLTVEEGKSITLSCSVAGDPVPNMYWDVGNLVSKHMNETSHTQGSLRITNISSDDSGKQISCVAENLVGEDQDSVNLTVHFAPTITFLESPTSDHHWCIPFTVKGNPKPALQWFYNGAILNESKYICTKIHVTNHTEYHGCLQLDNPTHMNNGDYTLIAKNEYGKDEKQISAHFMGWPGIDDGANPNYPDVIYEDYGTAANDIGDTTNRSNEIPSTDVTDKTGREHLSVYAVVVIASVVGFCLLVMLFLLKLARHSKFGMKDFSWFGFGKVKSRQGVGPASVISNDDDSASPLHHISNGSNTPSSSEGGPDAVIIGMTKIPVIENPQYFGITNSQLKPDTWPRGSPKTA

SEQ ID NO: 27094 - DNA, 1662 bp, Artificial Sequence
  derived and/or modified sequence
atgtcatcctggataagatggcatgggcccgcaatggcgcgcctttgggggttttgttggctggtggtcggcttctggcgtgccgcgttcgcttgtccaacttcctgtaaatgcagtgcctctaggatctggtgttcagatcctagtcctggtatcgtcgcatttccccggctagagccgaactccgtcgatcccgaaaacatcactgaaattttcatcgccaatcagaagagattggaaattattaatgaggacgatgtcgaggcttatgtaggtctaagaaacctgacaatagtcgacagcgggctcaagtttgtggcacacaaggcctttctcaaaaacagcaaccttcagcatatcaatttcacacgcaacaaattaacgagcctgtcgcggaaacacttcagacacctagacctctcagaacttattttagtcggcaacccattcacatgtagctgcgacatcatgtggattaagaccttacaggaagcgaaatcgtcccccgacacgcaggatttatattgtcttaatgagtcctcgaaaaatatcccactggccaatctccaaatccctaactgcggattgccaagcgccaatctggcagcgccaaacttgactgtcgaagaaggaaagagtatcactctgagttgttccgtcgcaggggaccccgttccgaatatgtactgggatgtaggcaacctcgttagtaaacacatgaacgagacttctcacacacagggctctctgcgcatcacgaatataagcagcgacgatagtggtaaacaaatttcatgcgtggccgaaaatctggttggcgaggatcaggattccgttaacctgacagtacatttcgcccccaccataaccttcctcgaaagtccaacatctgaccatcattggtgcatccccttcaccgtgaagggcaaccctaaacccgccttgcagtggttctacaatggcgcgatacttaacgaatctaaatacatatgtaccaagattcatgttactaatcataccgaataccatgggtgccttcagctggacaaccccacccacatgaacaacggagactacactcttatcgctaagaacgaatacgggaaggacgaaaaacagattagcgcacactttatgggttggcctggcatcgacgacggcgcgaatcccaactacccagatgttatttacgaagactacggcaccgcagccaatgacatcggcgataccactaatcgcagcaacgagattccatcgaccgatgtgaccgataagaccgggagggagcatctgtcggtctacgcagtggtggtgattgcaagcgtggtcgggttttgtctcctggtcatgctcttcctgctcaagctggccagacacagtaaattcggcatgaaagatttctcctggttcggatttggaaaggtgaagagcaggcagggcgtgggtccagccagtgtgatctcaaatgatgacgatagtgcaagtccacttcaccatattagcaacgggagcaacaccccgagtagctccgaaggaggccccgatgcggttatcattgggatgactaaaatcccagtgatagagaacccgcaatacttcgggattacaaactctcaactcaaacccgatacttggccgaggggaagtccaaaaacggcctag

SEQ ID NO: 27095 - DNA, 1662 bp, Artificial Sequence
  derived and/or modified sequence
atgagctcctggatccgctggcacggccctgccatggcccggctgtggggcttctgctggctggtggtgggcttctggagggctgcctttgcctgccccaccagctgcaagtgcagcgccagccgcatctggtgcagcgaccccagccctggcatcgtggccttcccccggctggagcccaacagcgtggaccctgagaacatcacagagatcttcatcgccaaccagaagaggctggagatcatcaatgaagatgatgtggaggcctacgtgggcctgaggaacctgaccatcgtggacagcggcctgaagtttgtggcccacaaggccttcctgaagaacagcaacctgcagcacatcaacttcaccaggaacaagctgaccagcctgagcaggaagcacttccgccacctggacctgtctgagctgatcctggtgggcaaccccttcacctgcagctgtgacatcatgtggatcaagaccctgcaggaggccaagagcagcccagacacccaggacctgtactgcctgaatgaaagcagcaagaacatccccctggccaacctgcagatccccaactgtggcctgcccagcgccaacctggccgcccccaacctgactgtggaggagggcaagagcatcaccctgagctgcagcgtggccggggaccctgtgcccaacatgtactgggatgtgggcaacctggtgtccaagcacatgaatgagaccagccacacccagggcagcctgcgcatcaccaacatcagcagtgatgacagcggcaagcagatcagctgtgtggccgagaacctggtgggggaggaccaggacagcgtgaacctgactgtgcactttgcccccaccatcaccttcctggagagccccaccagtgaccaccactggtgcatccccttcaccgtgaagggcaaccccaagccagccctgcagtggttctacaacggggccatcctgaatgaaagcaagtacatctgcaccaagatccacgtgaccaaccacacagagtaccacggctgcctgcagctggacaaccccacccacatgaacaacggggactacaccctcatcgccaagaatgaatatggcaaggatgagaagcagatcagcgcccacttcatgggctggccaggcattgatgatggagccaaccccaactacccagatgtgatctatgaggactatggaacagctgccaatgacattggagacaccaccaacagaagcaatgagatccccagcacagatgtgacagacaagacaggccgggagcacctgtctgtgtatgctgtggtggtgattgcctctgtggtgggcttctgcctgctggtgatgctgttcctgctgaagctggcccggcacagcaagtttggcatgaaggacttctcctggtttggatttgggaaggtgaagagccggcagggcgtgggccctgccagcgtcatcagcaatgatgatgattctgccagccccctgcaccacatcagcaatggcagcaacacccccagcagcagcgagggcggcccagatgctgtgatcatcggcatgaccaagatccctgtgattgagaacccccagtacttcggcatcaccaacagccagctgaagccagacacctggccccggggcagccccaagacagcctag

SEQ ID NO: 27096 - DNA, 1662 bp, Artificial Sequence
  derived and/or modified sequence
atgagcagctggatccggtggcacggccccgccatggcccggctgtgggggttctgttggctcgtggtcgggttctggcgcgccgccttcgcatgtcctacttcctgcaaatgtagcgcttcgagaatctggtgctctgatcccagccccggtattgtggctttccctcggctggagcctaattctgtcgatcccgaaaacatcacagagatcttcatagcgaatcagaagcgccttgagattattaacgaagacgacgtagaggcctacgtggggctgcggaacctaacaattgtggattccggactaaaattcgtggcccacaaagccttcctgaagaattccaatttgcagcatatcaacttcacaagaaataagctgaccagcctaagtagaaagcacttcagacacctggacctgagcgagcttattctggtggggaatccttttacctgttcttgcgatatcatgtggattaaaacactgcaggaagcaaagtcttcgccagacacccaagatctttactgcctgaacgaatcttccaaaaatattcccctggctaatctgcagatccccaattgcgggctgccctccgccaacctggcggctcccaatcttaccgttgaagaagggaagagcatcactctttcctgtagcgtggccggagatccagtaccaaatatgtactgggatgtgggcaatcttgtgagtaagcatatgaacgagacttcacacactcaaggttctttgagaattaccaatatcagctcggacgattccggaaaacagatcagctgcgttgcggagaacctagtgggcgaggaccaagacagcgtcaatctgactgtgcacttcgctccaactataacttttcttgaatcacctacttctgaccaccactggtgcattccgtttacagtgaaaggcaacccgaagccagccctccagtggttctacaacggcgccatcctgaatgagagtaagtacatttgtaccaagattcacgttactaatcatactgaatatcacgggtgtctccagctggacaacccaacgcatatgaacaatggagactacacactcatcgccaagaatgagtacggcaaagacgaaaagcagattagcgcccatttcatgggctggccaggaatcgatgatggtgccaaccctaactatccagatgttatctacgaggactatggcaccgctgccaatgacattggggacacgactaataggtcgaatgagattcctagcaccgatgtcaccgataaaaccggaagggaacacttgagcgtgtatgccgtggtggtgatcgcttccgtcgtcggtttttgtctgctggtcatgttgtttctgctcaagctggctcggcactcaaaatttggaatgaaggatttctcttggttcggctttggaaaagtgaaaagccgccagggagtcggccctgcaagcgtcattagcaacgatgatgattccgcctctcctcttcaccacatctctaacggatccaacacgccgagcagttcggagggcggaccagatgccgtgatcatcggcatgaccaagataccagtgatcgagaacccccagtattttggcataacaaactctcagctgaagccggatacctggcctcggggttcaccaaaaactgcctag

SEQ ID NO: 27097 - DNA, 8226 bp, Artificial Sequence
  derived and/or modified sequence
ggagcaggagcctcgctggctgcttcgctcgcgctctacgcgctcagtccccggcggtagcaggagcctggacccaggcgccgccggcgggcgtgaggcgccggagcccggcctcgaggtgcataccggacccccattcgcatctaacaaggaatctgcgccccagagagtcccgggagcgccgccggtcggtgcccggcgcgccgggccatgcagcgacggccgccgcggagctccgagcagcggtagcgcccccctgtaaagcggttcgctatgccggggccactgtgaaccctgccgcctgccggaacactcttcgctccggaccagctcagcctctgataagctggactcggcacgcccgcaacaagcaccgaggagttaagagagccgcaagcgcagggaaggcctccccgcacgggtgggggaaagcggccggtgcagcgcggggacaggcactcgggctggcactggctgctagggatgtcgtcctggataaggtggcatggacccgccatggcgcggctctggggcttctgctggctggttgtgggcttctggagggccgctttcgcctgtcccacgtcctgcaaatgcagtgcctctcggatctggtgcagcgacccttctcctggcatcgtggcatttccgagattggagcctaacagtgtagatcctgagaacatcaccgaaattttcatcgcaaaccagaaaaggttagaaatcatcaacgaagatgatgttgaagcttatgtgggactgagaaatctgacaattgtggattctggattaaaatttgtggctcataaagcatttctgaaaaacagcaacctgcagcacatcaattttacccgaaacaaactgacgagtttgtctaggaaacatttccgtcaccttgacttgtctgaactgatcctggtgggcaatccatttacatgctcctgtgacattatgtggatcaagactctccaagaggctaaatccagtccagacactcaggatttgtactgcctgaatgaaagcagcaagaatattcccctggcaaacctgcagatacccaattgtggtttgccatctgcaaatctggccgcacctaacctcactgtggaggaaggaaagtctatcacattatcctgtagtgtggcaggtgatccggttcctaatatgtattgggatgttggtaacctggtttccaaacatatgaatgaaacaagccacacacagggctccttaaggataactaacatttcatccgatgacagtgggaagcagatctcttgtgtggcggaaaatcttgtaggagaagatcaagattctgtcaacctcactgtgcattttgcaccaactatcacatttctcgaatctccaacctcagaccaccactggtgcattccattcactgtgaaaggcaaccccaaaccagcgcttcagtggttctataacggggcaatattgaatgagtccaaatacatctgtactaaaatacatgttaccaatcacacggagtaccacggctgcctccagctggataatcccactcacatgaacaatggggactacactctaatagccaagaatgagtatgggaaggatgagaaacagatttctgctcacttcatgggctggcctggaattgacgatggtgcaaacccaaattatcctgatgtaatttatgaagattatggaactgcagcgaatgacatcggggacaccacgaacagaagtaatgaaatcccttccacagacgtcactgataaaaccggtcgggaacatctctcggtctatgctgtggtggtgattgcgtctgtggtgggattttgccttttggtaatgctgtttctgcttaagttggcaagacactccaagtttggcatgaaagatttctcatggtttggatttgggaaagtaaaatcaagacaaggtgttggcccagcctccgttatcagcaatgatgatgactctgccagcccactccatcacatctccaatgggagtaacactccatcttcttcggaaggtggcccagatgctgtcattattggaatgaccaagatccctgtcattgaaaatccccagtactttggcatcaccaacagtcagctcaagccagacacatggcccagaggttcccccaagaccgcctgataataatttggtatttggaggctcctgtgtcactgcaggaactaaaggaggctaaatccatgcctgatggaggagaagagttctatggttatctgcaaattctggccagacaacatcttgacgtcactccttagcttccataacctagccaagcaagaagttgcctttccaagacaaagcagtgtgctctaatgactaacccctcaaagtactatgccactttaactatagacccatctcctcgatcaatcaggatggcaagatggagctgaggagctcagcaacatcaagtctggagttggtctttaactcaactagctcgtttagacgtgtctgaacaccacatcacctgacagcacggggtggtttcccagtaaaatttacaaactcagctcaagggcagctgtgttgctttcctttccttgactgctgagaaactttttgacagggaacaatggaaacacaccttctgagctgaaacaaacaaacagaaacaaaacatactaaccagcaaaatccccaaatcatcaatcttgggttctcttgaagggcaggagtgtgttttatcttctcccgtcggagcaaacactatagatgtcctccctaaaattctgtcttccctagagcagccttgtaaattagctagggtcctagggttgaggcctaaatcaacttaaaattgtctctaaatatgtacctggatgtgtttgtacttgcagagcatgccctcttcatgtgcctagggctagtaactccctgtggcagaggcatgtaaagtattctgactttttttttttcaacttaattccatttccaatgaaatggatttttaaaaattttctccagagtgtgccatacttctccagctattatagttaatgtgtgtgtatccttgtgtatatgtgtgtttgtgtgtgcatatgtgttttcctagtggttacatgcttactaggcaattatgtaaataagcacagattcataggccagctaggcctgaggaaagaagacattataaagggagggagtattttaacattagctaaagctatcacacaaggcacccattctgctcccctcaacagccacagcccacttcgtccttgtcttaccaataaggggaaaggctggaggtgatatttttcacagaaccgcagaggttttgaacatatttgcaacattactttgagtacacatgagcaaaaattctgaattacatccaggaccccagaagctcattagatcaaagagtgcggggcccctcagagttaccagagattatctgcagacttcagtgcaatcgaatgaccatggtccattttgatggtcagaggtaggactgaaaaacgggtagaaacaattgctttagcgcttccttctgtactttgcctattaatgttttgtctttcaaaaatatattttctcctaattgtttaattggccaaataatggctgctttgggagttgtttgtatgccttggaaggccatggcctgcactttaaaaataagctaagtccattctgcccagcacgagcattaggacagagaatgcacttattttaggatccttaaaaattgcttcttttatggcacactgggttgacgactcatctcgtgggagccttcatggcacattgctgctgttctgcaggtcccaatacaattccttccccctctcagtgccacggcccccccattgctagctacaacaatttgatatcatattcccttttcaactccaaaggagatgataagaagctatcaaataatgctttaaaaaagcaacttgagtttcttaaaagaaaggaaatgaatacatgctgcataattacatttaaaatgtaagccatgttattataagccgcactgagatgaagatttgttagcaaaccagtttcaagcacactcacagtgaagtaaaatcatgtttttagcatctgaccattgggtaatattattctttgttatcaaaagagaaatatcacccaagtatagtatacttagacctcctagaggaaacactccagtcctaagcttggtgtctgaaaagaaaaacaaaaataaagattatggatttaggtcagggagacagagtgatattctgaagactgtgtttactccctcatcatcggccaaccaagatggagttctgcatcctgcacatatcagacatttcagtccaatttcaccaaagcatcagtgatgttctagaagcatcccagcagatggaggatcctaatgtatttgttctgggtatttcccaaggcccagcctgactggagtgtgtgtaccaacaggatgaatccaatcaagctacgcccccattttggtttcggattggccactcttgcatgtgctagtagattgtggaccaggaccagctgagcaaacacagttgcagagtagcctcctatgttgctaagaagctcctgctacccaggtgctttgaacaattgagtgctccctctggttaagtagagatggcaccaccggagtttttcttggatgtgaggctcaatcctttacggcagctattataacaaagtgaaggttttctccctgggaaatgcagcttttctctgtctttactaattctgccagcctgtgagagtaaccaccgtagctgggcttcttctcagattaattgtcatgccaggtctccttcctggggagctgtgatgctgctctgaggttgattgctgaggttgtagtgggtttttgtttgtttttgtttagtttttcttgattgttcttctttctcttgaatggcaagagaagaaacactttctctaacccacggccaggaaggaaatggggagagagctacttcttagttcaacctggttgccacataaaggaatctctctccttggactcagcccctaactggaagcaagagccactgccctctgagactgagagagcagcccgaggaggagatgaatccattctgccctttgtttgggtttgcttcctgtcagtgagagaatgctgaggcagttcctgttatgtgaaactttcatttttaaaaccaggacagtcctaaacagactggaatgagttggtcaatcccagttggtataggcccaatgatttttgctagtaagataggattgtcttcctcacccaaaatgccttcaagtgccctaaaatgggtattttaaaataagaataaataatgtagatttagtagaaaacctggaaaacataagaaacaaagatgaaacgaaaagtcccatgtaattccaccagttagagttaaccactgatatcgtttggatatatggctttctagtcttgtggatatccttttaatctcttgtaatataaagtctgaccatatgtgtccttgcatttgtttgtactggactctgttaatatttctatagtaatggctcactttggggagattgtgctgcacagtgtgtaggaagcacattgggtgtattattcccagttttgtattttgtatttccttggagatgtgcaggggttaagagcgggggtctggccatagctggccacgtcagactctcatatggtaagtatcacagagcacatgaggcctgtgttatgcgctggaaagactcaggaaatgagaggctctcttgttctgacaaggcaggctgagagctctcatttagggtcatcactccagataactccaaatgcagtttattgctcaactgaagcagatgatcactttttgcctccaagttcttcaccctagctagctcctttcaaagagccgagtatgctggatcttaaagggccaaactagttacatctcatacatttcctgatgtttagggatgccttcacttccatcaaggataccttggctgtgcaaggacctctgatagctggagtctccttttggtcactcccagctttgcttaaacttgatggagtttgctgtccagtgatccccggatctttcatcatgaaagccttccttcctctcctgatgtctcaggcctctagacctagactggggttctggcaaggaggcctctatcaatagtatgacatccaataatatgttagtgttgatattttgcacagtaatattaagtttaagagattataaaaatgagttcaaatgaataagttcctgtgatgtaagagattagatatgtgtgatttcagaaccaaaggcaggggggaatcccagaaagaaaacaataatataatcctagtttctatatattatttttattcattactgtatatgggtagagatcaatattctttcttatgctgttactattaattaacacattttttaaccatgccattgaacttttgggtgcattaaagtggaacccaagctcctcattagataataatggcatttggactgagtgccatattcctaaatttccaataaagtggttgatatagagaggacaggataaagccctatagtgtgcagttatatcaaaacagctagtctccactttagggaatgcctttactagagattacatgaaatgtctgcttataaaataagcagagatggcaccactaagcagccacctgaattgttttcctacaggaatgattacttttcagatccatttatgttttcatgctcaatacttactccccttccctgcaacacccaaagagtttacttttgcaagtcatttggtcttcagtctactactgaggaatagagaggcactaactgctttacccaggatcagaactcatgttcttaccttctattaatagagtacttgagccagatggactaactggtctcacattttctctatcttggttttacttccataaacatcaatatctttacccacatgatttttccatcctcccatttttttccatatgtattagggttcaggaactatgatgctaatgatcacatttcttcctagttcctaatttcattagtgccatttcctgatatctacagaaacaattatcaatacatgtagctgcttgagccttatttagaaggctagcctttcttttccaagtgctgtcagaatgtatacatttagtctgtctttttcccttttaggagtctttgttctgggttgatggcaaaattcctctttttacatgtgagatttttgatttcactgaattctacctagatttttatggacattggattttaaagaggaaaacactcattttcttagtaagatattggtgatacatagctatgccattgatttccatactcctgagctttggggagggagacagtggccaagtagcaggcagaataagatcatcactcatgtcctgaatcaatcacactttccttctcggattgtgtatatgctctgccacttcctacatattacatcctgagtttttaagtaaagtggatcttagccagatttgagtctaatggctgattcatcggcatagttcttggcgttaacatctcagtgtcctctttagttctctttgaggattcatgtcattgagggcctttgtgcctccacttgtctcagtatgaggaagaactttggtgtgagggcggagctatgtgaagggttgctgggttgggggattagttcatatggtccccatgccatctatttacttttggagagaggggactttgagtgggtgggtatggatagatgttcctcaaggaaaccctgctggctaatgggcactacatctgtgtattactgtgattctctctgtaagctccccatgtggccaaggacccccctcctaccagggcacttcctgccacctcattgcactggtctcaaccattcagcctgctgctgctgcaccatgttgggctgcggtaggatagggaaggggttctgttgattgctaaatgttgcctaactttatttccctctcccacatttcatgcaagggagcggacctaacacatgacttgcattctcttcctatgttcagaaactccagggcttgcccacgtgtatgtatgagtgaccaatggagcttggaattctttatctatatgatctgtccgaaaatgagatcttttgtactggaatttgtgatgtagttgatcattcagagccaaacgcatataccaataaagacaagactgtcatata

SEQ ID NO: 27098 - DNA, 1662 bp, Artificial Sequence
  derived and/or modified sequence
atgtcctcatggattcgctggcacgggccagccatggctagactgtggggcttttgttggctggtcgtgggattttggcgcgcagccttcgcctgccccacttcttgtaagtgctctgctagcagaatatggtgcagcgacccatccccgggtatagttgcatttcctcggcttgaacccaacagcgtcgacccagaaaacatcacagagatattcatcgctaatcagaagcgccttgagatcattaacgaagacgacgtggaagcttacgtgggactgagaaacctgactatcgtcgatagcggactgaaatttgtggcccacaaagctttcctcaagaattccaatttacagcacatcaatttcacaaggaacaagctcacatctctgagcaggaaacatttccggcatctcgatctcagcgaactgatactggttggtaatccatttacctgctcgtgtgacatcatgtggatcaagactttacaggaggcaaagtcctcccccgatacgcaggacctgtactgtttgaatgagagtagcaaaaatatccctctagctaacctgcagatccccaattgcggactcccatcagccaacctggcagctccgaatttaacagtagaggaaggtaagagtattactctgtcctgttcagtggccggagatcccgtgcccaatatgtactgggacgttggcaacctagtgagcaaacacatgaacgagaccagccacacccagggcagtttaaggattacgaacatcagctctgacgatagcgggaaacagatcagctgcgtcgccgaaaacctggtgggcgaggaccaggatagtgttaatctgaccgttcattttgccccaaccattacttttctggaaagcccaacaagcgaccatcactggtgtatacccttcaccgtgaaagggaatccaaagcctgcactgcagtggttctataacggagctatactgaatgagtccaaatacatttgtacgaagatccacgtgaccaatcacactgagtatcatggatgcctacagctggataatccaacccatatgaataatggagattatacgctgatcgctaaaaatgaatacggaaaggatgagaaacaaattagcgcccattttatgggttggcccggaattgatgacggcgcaaatccaaattaccctgacgttatctacgaggattatgggacggccgcaaatgatattggggacactaccaatcgaagcaatgaaatcccctcaactgatgtgaccgataagaccgggagggagcatttgagtgtgtacgccgtcgtggtgatcgcatcagtagtgggattctgcctgctggtcatgctattcttgctaaaactggccagacacagtaagttcggcatgaaggacttctcctggttcggatttgggaaagtcaaatcccgccagggggttggcccagccagcgtgatcagcaacgatgacgatagcgcttcccctctgcaccatatctctaacggaagtaacaccccatcgtcctcagagggaggccctgatgcggtgatcataggtatgaccaaaattcccgtcatcgagaacccgcaatacttcggtataaccaatagtcagttaaagccagatacttggccgagaggttctcccaaaacggcatag

SEQ ID NO: 27099 - DNA, 1662 bp, Artificial Sequence
  derived and/or modified sequence
atgagcagctggatcagatggcacggccccgccatggccagactgtggggcttctgctggctggtggtgggcttctggagagccgccttcgcctgccccaccagctgcaagtgcagcgccagcagaatctggtgcagcgaccccagccccggcatcgtggccttccccagactggagcccaacagcgtggaccccgagaacatcaccgagatcttcatcgccaaccagaagagactggagatcatcaacgaggacgacgtggaggcctacgtgggcctgagaaacctgaccatcgtggacagcggcctgaagttcgtggcccacaaggccttcctgaagaacagcaacctgcagcacatcaacttcaccagaaacaagctgaccagcctgagcagaaagcacttcagacacctggacctgagcgagctgatcctggtgggcaaccccttcacctgcagctgcgacatcatgtggatcaagaccctgcaggaggccaagagcagccccgacacccaggacctgtactgcctgaacgagagcagcaagaacatccccctggccaacctgcagatccccaactgcggcctgcccagcgccaacctggccgcccccaacctgaccgtggaggagggcaagagcatcaccctgagctgcagcgtggccggcgaccccgtgcccaacatgtactgggacgtgggcaacctggtgagcaagcacatgaacgagaccagccacacccagggcagcctgagaatcaccaacatcagcagcgacgacagcggcaagcagatcagctgcgtggccgagaacctggtgggcgaggaccaggacagcgtgaacctgaccgtgcacttcgcccccaccatcaccttcctggagagccccaccagcgaccaccactggtgcatccccttcaccgtgaagggcaaccccaagcccgccctgcagtggttctacaacggcgccatcctgaacgagagcaagtacatctgcaccaagatccacgtgaccaaccacaccgagtaccacggctgcctgcagctggacaaccccacccacatgaacaacggcgactacaccctgatcgccaagaacgagtacggcaaggacgagaagcagatcagcgcccacttcatgggctggcccggcatcgacgacggcgccaaccccaactaccccgacgtgatctacgaggactacggcaccgccgccaacgacatcggcgacaccaccaacagaagcaacgagatccccagcaccgacgtgaccgacaagaccggcagagagcacctgagcgtgtacgccgtggtggtgatcgccagcgtggtgggcttctgcctgctggtgatgctgttcctgctgaagctggccagacacagcaagttcggcatgaaggacttcagctggttcggcttcggcaaggtgaagagcagacagggcgtgggccccgccagcgtgatcagcaacgacgacgacagcgccagccccctgcaccacatcagcaacggcagcaacacccccagcagcagcgagggcggccccgacgccgtgatcatcggcatgaccaagatccccgtgatcgagaacccccagtacttcggcatcaccaacagccagctgaagcccgacacctggcccagaggcagccccaagaccgcctag

SEQ ID NO: 27100 - protein, 537 aa, Artificial Sequence
  derived and/or modified sequence
MSSWIRWHGPAMARLWGFCWLVVGFWRAAFACPTSCKCSASRIWCSDPSPGIVAFPRLEPNSVDPENITEIFIANQKRLEIINEDDVEAYVGLRNLTIVDSGLKFVAHKAFLKNSNLQHINFTRNKLTSLSRKHFRHLDLSELILVGNPFTCSCDIMWIKTLQEAKSSPDTQDLYCLNESSKNIPLANLQIPNCGLPSANLAAPNLTVEEGKSITLSCSVAGDPVPNMYWDVGNLVSKHMNETSHTQGSLRITNISSDDSGKQISCVAENLVGEDQDSVNLTVHFAPTITFLESPTSDHHWCIPFTVKGNPKPALQWFYNGAILNESKYICTKIHVTNHTEYHGCLQLDNPTHMNNGDYTLIAKNEYGKDEKQISAHFMGWPGIDDGANPNYPDVIYEDYGTAANDIGDTTNRSNEIPSTDVTDKTGREHLSVYAVVVIASVVGFCLLVMLFLLKLARHSKFGMKGPASVISNDDDSASPLHHISNGSNTPSSSEGGPDAVIIGMTKIPVIENPQYFGITNSQLKPDTWPRGSPKTA

SEQ ID NO: 27101 - DNA, 1614 bp, Artificial Sequence
  derived and/or modified sequence
atgagctcatggatcaggtggcacggaccagcgatggcgagactctggggcttctgctggctcgtcgtgggcttctggagggctgcttttgcctgccccacctcctgcaagtgctccgccagtagaatatggtgctcggatcccagccccggcattgtcgcatttcctcgtctggagcctaactcagttgatcccgaaaatatcaccgaaatttttatcgccaaccagaaaaggctcgaaattattaacgaggacgatgtggaagcatacgtaggattgcggaacctcaccattgtggattccggtcttaagttcgtggcccacaaggccttcctcaagaatagcaacctccagcacatcaactttacccggaataagctcacctctctctccagaaaacatttcagacacctcgatctgtccgaactcattttggttggcaatccctttacttgtagttgcgatatcatgtggatcaagaccctacaggaggccaagtcatcccctgatactcaagacttatattgcctgaatgaaagctctaaaaatattccactagcaaatcttcagattccaaattgcgggctgcccagtgctaatcttgcagctcctaatctcaccgtcgaagaggggaagtctataaccctctcatgttccgtcgccggagaccctgtccctaacatgtattgggatgtgggcaatctggtgtctaaacacatgaacgaaaccagccacacacagggcagtttgcggattactaacataagcagcgacgatagtggcaaacagattagctgtgttgccgagaacctagtgggcgaggatcaggacagcgtgaacctaacagtgcatttcgcccccacaatcacttttttggagagcccgaccagtgaccaccattggtgtatcccttttacagtgaaaggtaatccaaaaccggcactccagtggttctacaacggggctatattgaatgagtcaaaatacatctgcactaagattcacgttactaaccacacggagtatcatggctgcctgcagctggataatcctacccatatgaacaatggagattataccttaatcgccaaaaatgagtatggcaaagatgaaaaacaaattagcgctcatttcatgggatggccaggaattgacgacggcgccaacccgaactaccctgatgtgatatatgaggactacggcactgcagcaaacgacatcggtgatactactaatcgttccaacgagattccatccactgacgtcactgataaaactggcagggagcatctctcggtttacgccgtcgttgtgatagcaagtgttgtaggcttctgtctgctagtaatgctgttcctgctgaagttagcaagacatagcaaatttggaatgaaggggcccgccagtgtgattagtaacgacgatgattcggcatcccctttacatcacatttcaaatggctccaacaccccaagctcctcggaagggggtccagatgctgttatcatcggaatgaccaaaattccagtgatagagaacccccagtactttggaattacaaactcacagctgaagcctgacacttggccacgagggtccccgaaaactgcatag

SEQ ID NO: 27102 - DNA, 1614 bp, Artificial Sequence
  derived and/or modified sequence
atgagctcctggatccgctggcacggccctgccatggcccggctgtggggcttctgctggctggtggtgggcttctggagggctgcctttgcctgccccaccagctgcaagtgcagcgccagccgcatctggtgcagcgaccccagccctggcatcgtggccttcccccggctggagcccaacagcgtggaccctgagaacatcacagagatcttcatcgccaaccagaagaggctggagatcatcaatgaagatgatgtggaggcctacgtgggcctgaggaacctgaccatcgtggacagcggcctgaagtttgtggcccacaaggccttcctgaagaacagcaacctgcagcacatcaacttcaccaggaacaagctgaccagcctgagcaggaagcacttccgccacctggacctgtctgagctgatcctggtgggcaaccccttcacctgcagctgtgacatcatgtggatcaagaccctgcaggaggccaagagcagcccagacacccaggacctgtactgcctgaatgaaagcagcaagaacatccccctggccaacctgcagatccccaactgtggcctgcccagcgccaacctggccgcccccaacctgactgtggaggagggcaagagcatcaccctgagctgcagcgtggccggggaccctgtgcccaacatgtactgggatgtgggcaacctggtgtccaagcacatgaatgagaccagccacacccagggcagcctgcgcatcaccaacatcagcagtgatgacagcggcaagcagatcagctgtgtggccgagaacctggtgggggaggaccaggacagcgtgaacctgactgtgcactttgcccccaccatcaccttcctggagagccccaccagtgaccaccactggtgcatccccttcaccgtgaagggcaaccccaagccagccctgcagtggttctacaacggggccatcctgaatgaaagcaagtacatctgcaccaagatccacgtgaccaaccacacagagtaccacggctgcctgcagctggacaaccccacccacatgaacaacggggactacaccctcatcgccaagaatgaatatggcaaggatgagaagcagatcagcgcccacttcatgggctggccaggcattgatgatggagccaaccccaactacccagatgtgatctatgaggactatggaacagctgccaatgacattggagacaccaccaacagaagcaatgagatccccagcacagatgtgacagacaagacaggccgggagcacctgtctgtgtatgctgtggtggtgattgcctctgtggtgggcttctgcctgctggtgatgctgttcctgctgaagctggcccggcacagcaagtttggcatgaagggccctgccagcgtcatcagcaatgatgatgattctgccagccccctgcaccacatcagcaatggcagcaacacccccagcagcagcgagggcggcccagatgctgtgatcatcggcatgaccaagatccctgtgattgagaacccccagtacttcggcatcaccaacagccagctgaagccagacacctggccccggggcagccccaagacagcctag

SEQ ID NO: 27103 - DNA, 1614 bp, Artificial Sequence
  derived and/or modified sequence
atgagcagctggatccggtggcacggccccgccatggcccggctgtggggcttctgctggctggttgtcggattttggcgagcagccttcgcatgtcccacctcatgcaaatgttcagcatcccgtatctggtgtagtgacccctcccctggaattgtggcattcccccgcctggagccaaatagtgtggacccagaaaacattactgaaatcttcattgccaatcagaagaggctggaaatcattaatgaagacgatgtggaggcctacgtaggtctccgtaacctcacaatagttgacagcgggctgaagtttgtagcccacaaggcattccttaagaattccaacctccagcacataaacttcactaggaacaagcttaccagcctctcacgcaagcattttcgacacctcgatctcagcgagttgatactggtgggcaatccattcacttgctcttgcgacataatgtggatcaaaacactccaagaagcaaaaagtagccccgatacgcaagacctgtattgtctaaatgagtcatccaagaatatcccactggccaacctgcagattcctaactgcgggctgccctcggctaacctggcggcaccgaatttgactgttgaggagggcaagagtatcactctaagctgttcggttgccggagacccagtgcctaacatgtactgggacgtggggaatctggtttctaaacacatgaacgagaccagtcacacccaaggcagtttgcgtattacaaacatttcctccgacgatagcggcaagcagatctcgtgcgtcgctgagaacttggtgggagaagaccaggactcagttaatctgactgtccatttcgcacctaccataacctttctggaatctcccacctctgaccaccattggtgtattccttttacggtgaaaggcaatcccaaacccgctctgcagtggttttacaacggagcaatccttaacgaaagcaaatatatctgcaccaagatccatgtgaccaatcacacagagtaccatggatgcctgcagctcgacaatcccacccacatgaacaatggcgattacactctgattgctaaaaatgagtacggaaaagatgaaaaacagatcagcgcacacttcatgggatggcccggcatcgatgatggcgccaacccaaactaccctgacgttatatacgaggactatgggacggccgccaatgacatcggcgacaccacaaaccggtccaatgaaattccatcaaccgacgtgactgacaagaccgggagggagcacctgtccgtgtatgccgtcgtggttattgcctcagttgtgggtttttgcttactggttatgctcttcctgttaaaattagctaggcactccaaattcggaatgaaggggcccgccagtgtcatctctaacgatgatgacagtgcttctccattgcaccacattagtaatggatctaacaccccttcatctagcgaaggtggcccagacgccgtaatcatagggatgaccaagatacctgtcatcgaaaatccccagtacttcggcatcaccaacagccagctgaaacccgacacatggcccagaggctcccctaaaactgcctag

SEQ ID NO: 27104 - DNA, 8178 bp, Artificial Sequence
  derived and/or modified sequence
ggagcaggagcctcgctggctgcttcgctcgcgctctacgcgctcagtccccggcggtagcaggagcctggacccaggcgccgccggcgggcgtgaggcgccggagcccggcctcgaggtgcataccggacccccattcgcatctaacaaggaatctgcgccccagagagtcccgggagcgccgccggtcggtgcccggcgcgccgggccatgcagcgacggccgccgcggagctccgagcagcggtagcgcccccctgtaaagcggttcgctatgccggggccactgtgaaccctgccgcctgccggaacactcttcgctccggaccagctcagcctctgataagctggactcggcacgcccgcaacaagcaccgaggagttaagagagccgcaagcgcagggaaggcctccccgcacgggtgggggaaagcggccggtgcagcgcggggacaggcactcgggctggcactggctgctagggatgtcgtcctggataaggtggcatggacccgccatggcgcggctctggggcttctgctggctggttgtgggcttctggagggccgctttcgcctgtcccacgtcctgcaaatgcagtgcctctcggatctggtgcagcgacccttctcctggcatcgtggcatttccgagattggagcctaacagtgtagatcctgagaacatcaccgaaattttcatcgcaaaccagaaaaggttagaaatcatcaacgaagatgatgttgaagcttatgtgggactgagaaatctgacaattgtggattctggattaaaatttgtggctcataaagcatttctgaaaaacagcaacctgcagcacatcaattttacccgaaacaaactgacgagtttgtctaggaaacatttccgtcaccttgacttgtctgaactgatcctggtgggcaatccatttacatgctcctgtgacattatgtggatcaagactctccaagaggctaaatccagtccagacactcaggatttgtactgcctgaatgaaagcagcaagaatattcccctggcaaacctgcagatacccaattgtggtttgccatctgcaaatctggccgcacctaacctcactgtggaggaaggaaagtctatcacattatcctgtagtgtggcaggtgatccggttcctaatatgtattgggatgttggtaacctggtttccaaacatatgaatgaaacaagccacacacagggctccttaaggataactaacatttcatccgatgacagtgggaagcagatctcttgtgtggcggaaaatcttgtaggagaagatcaagattctgtcaacctcactgtgcattttgcaccaactatcacatttctcgaatctccaacctcagaccaccactggtgcattccattcactgtgaaaggcaaccccaaaccagcgcttcagtggttctataacggggcaatattgaatgagtccaaatacatctgtactaaaatacatgttaccaatcacacggagtaccacggctgcctccagctggataatcccactcacatgaacaatggggactacactctaatagccaagaatgagtatgggaaggatgagaaacagatttctgctcacttcatgggctggcctggaattgacgatggtgcaaacccaaattatcctgatgtaatttatgaagattatggaactgcagcgaatgacatcggggacaccacgaacagaagtaatgaaatcccttccacagacgtcactgataaaaccggtcgggaacatctctcggtctatgctgtggtggtgattgcgtctgtggtgggattttgccttttggtaatgctgtttctgcttaagttggcaagacactccaagtttggcatgaaaggcccagcctccgttatcagcaatgatgatgactctgccagcccactccatcacatctccaatgggagtaacactccatcttcttcggaaggtggcccagatgctgtcattattggaatgaccaagatccctgtcattgaaaatccccagtactttggcatcaccaacagtcagctcaagccagacacatggcccagaggttcccccaagaccgcctgataataatttggtatttggaggctcctgtgtcactgcaggaactaaaggaggctaaatccatgcctgatggaggagaagagttctatggttatctgcaaattctggccagacaacatcttgacgtcactccttagcttccataacctagccaagcaagaagttgcctttccaagacaaagcagtgtgctctaatgactaacccctcaaagtactatgccactttaactatagacccatctcctcgatcaatcaggatggcaagatggagctgaggagctcagcaacatcaagtctggagttggtctttaactcaactagctcgtttagacgtgtctgaacaccacatcacctgacagcacggggtggtttcccagtaaaatttacaaactcagctcaagggcagctgtgttgctttcctttccttgactgctgagaaactttttgacagggaacaatggaaacacaccttctgagctgaaacaaacaaacagaaacaaaacatactaaccagcaaaatccccaaatcatcaatcttgggttctcttgaagggcaggagtgtgttttatcttctcccgtcggagcaaacactatagatgtcctccctaaaattctgtcttccctagagcagccttgtaaattagctagggtcctagggttgaggcctaaatcaacttaaaattgtctctaaatatgtacctggatgtgtttgtacttgcagagcatgccctcttcatgtgcctagggctagtaactccctgtggcagaggcatgtaaagtattctgactttttttttttcaacttaattccatttccaatgaaatggatttttaaaaattttctccagagtgtgccatacttctccagctattatagttaatgtgtgtgtatccttgtgtatatgtgtgtttgtgtgtgcatatgtgttttcctagtggttacatgcttactaggcaattatgtaaataagcacagattcataggccagctaggcctgaggaaagaagacattataaagggagggagtattttaacattagctaaagctatcacacaaggcacccattctgctcccctcaacagccacagcccacttcgtccttgtcttaccaataaggggaaaggctggaggtgatatttttcacagaaccgcagaggttttgaacatatttgcaacattactttgagtacacatgagcaaaaattctgaattacatccaggaccccagaagctcattagatcaaagagtgcggggcccctcagagttaccagagattatctgcagacttcagtgcaatcgaatgaccatggtccattttgatggtcagaggtaggactgaaaaacgggtagaaacaattgctttagcgcttccttctgtactttgcctattaatgttttgtctttcaaaaatatattttctcctaattgtttaattggccaaataatggctgctttgggagttgtttgtatgccttggaaggccatggcctgcactttaaaaataagctaagtccattctgcccagcacgagcattaggacagagaatgcacttattttaggatccttaaaaattgcttcttttatggcacactgggttgacgactcatctcgtgggagccttcatggcacattgctgctgttctgcaggtcccaatacaattccttccccctctcagtgccacggcccccccattgctagctacaacaatttgatatcatattcccttttcaactccaaaggagatgataagaagctatcaaataatgctttaaaaaagcaacttgagtttcttaaaagaaaggaaatgaatacatgctgcataattacatttaaaatgtaagccatgttattataagccgcactgagatgaagatttgttagcaaaccagtttcaagcacactcacagtgaagtaaaatcatgtttttagcatctgaccattgggtaatattattctttgttatcaaaagagaaatatcacccaagtatagtatacttagacctcctagaggaaacactccagtcctaagcttggtgtctgaaaagaaaaacaaaaataaagattatggatttaggtcagggagacagagtgatattctgaagactgtgtttactccctcatcatcggccaaccaagatggagttctgcatcctgcacatatcagacatttcagtccaatttcaccaaagcatcagtgatgttctagaagcatcccagcagatggaggatcctaatgtatttgttctgggtatttcccaaggcccagcctgactggagtgtgtgtaccaacaggatgaatccaatcaagctacgcccccattttggtttcggattggccactcttgcatgtgctagtagattgtggaccaggaccagctgagcaaacacagttgcagagtagcctcctatgttgctaagaagctcctgctacccaggtgctttgaacaattgagtgctccctctggttaagtagagatggcaccaccggagtttttcttggatgtgaggctcaatcctttacggcagctattataacaaagtgaaggttttctccctgggaaatgcagcttttctctgtctttactaattctgccagcctgtgagagtaaccaccgtagctgggcttcttctcagattaattgtcatgccaggtctccttcctggggagctgtgatgctgctctgaggttgattgctgaggttgtagtgggtttttgtttgtttttgtttagtttttcttgattgttcttctttctcttgaatggcaagagaagaaacactttctctaacccacggccaggaaggaaatggggagagagctacttcttagttcaacctggttgccacataaaggaatctctctccttggactcagcccctaactggaagcaagagccactgccctctgagactgagagagcagcccgaggaggagatgaatccattctgccctttgtttgggtttgcttcctgtcagtgagagaatgctgaggcagttcctgttatgtgaaactttcatttttaaaaccaggacagtcctaaacagactggaatgagttggtcaatcccagttggtataggcccaatgatttttgctagtaagataggattgtcttcctcacccaaaatgccttcaagtgccctaaaatgggtattttaaaataagaataaataatgtagatttagtagaaaacctggaaaacataagaaacaaagatgaaacgaaaagtcccatgtaattccaccagttagagttaaccactgatatcgtttggatatatggctttctagtcttgtggatatccttttaatctcttgtaatataaagtctgaccatatgtgtccttgcatttgtttgtactggactctgttaatatttctatagtaatggctcactttggggagattgtgctgcacagtgtgtaggaagcacattgggtgtattattcccagttttgtattttgtatttccttggagatgtgcaggggttaagagcgggggtctggccatagctggccacgtcagactctcatatggtaagtatcacagagcacatgaggcctgtgttatgcgctggaaagactcaggaaatgagaggctctcttgttctgacaaggcaggctgagagctctcatttagggtcatcactccagataactccaaatgcagtttattgctcaactgaagcagatgatcactttttgcctccaagttcttcaccctagctagctcctttcaaagagccgagtatgctggatcttaaagggccaaactagttacatctcatacatttcctgatgtttagggatgccttcacttccatcaaggataccttggctgtgcaaggacctctgatagctggagtctccttttggtcactcccagctttgcttaaacttgatggagtttgctgtccagtgatccccggatctttcatcatgaaagccttccttcctctcctgatgtctcaggcctctagacctagactggggttctggcaaggaggcctctatcaatagtatgacatccaataatatgttagtgttgatattttgcacagtaatattaagtttaagagattataaaaatgagttcaaatgaataagttcctgtgatgtaagagattagatatgtgtgatttcagaaccaaaggcaggggggaatcccagaaagaaaacaataatataatcctagtttctatatattatttttattcattactgtatatgggtagagatcaatattctttcttatgctgttactattaattaacacattttttaaccatgccattgaacttttgggtgcattaaagtggaacccaagctcctcattagataataatggcatttggactgagtgccatattcctaaatttccaataaagtggttgatatagagaggacaggataaagccctatagtgtgcagttatatcaaaacagctagtctccactttagggaatgcctttactagagattacatgaaatgtctgcttataaaataagcagagatggcaccactaagcagccacctgaattgttttcctacaggaatgattacttttcagatccatttatgttttcatgctcaatacttactccccttccctgcaacacccaaagagtttacttttgcaagtcatttggtcttcagtctactactgaggaatagagaggcactaactgctttacccaggatcagaactcatgttcttaccttctattaatagagtacttgagccagatggactaactggtctcacattttctctatcttggttttacttccataaacatcaatatctttacccacatgatttttccatcctcccatttttttccatatgtattagggttcaggaactatgatgctaatgatcacatttcttcctagttcctaatttcattagtgccatttcctgatatctacagaaacaattatcaatacatgtagctgcttgagccttatttagaaggctagcctttcttttccaagtgctgtcagaatgtatacatttagtctgtctttttcccttttaggagtctttgttctgggttgatggcaaaattcctctttttacatgtgagatttttgatttcactgaattctacctagatttttatggacattggattttaaagaggaaaacactcattttcttagtaagatattggtgatacatagctatgccattgatttccatactcctgagctttggggagggagacagtggccaagtagcaggcagaataagatcatcactcatgtcctgaatcaatcacactttccttctcggattgtgtatatgctctgccacttcctacatattacatcctgagtttttaagtaaagtggatcttagccagatttgagtctaatggctgattcatcggcatagttcttggcgttaacatctcagtgtcctctttagttctctttgaggattcatgtcattgagggcctttgtgcctccacttgtctcagtatgaggaagaactttggtgtgagggcggagctatgtgaagggttgctgggttgggggattagttcatatggtccccatgccatctatttacttttggagagaggggactttgagtgggtgggtatggatagatgttcctcaaggaaaccctgctggctaatgggcactacatctgtgtattactgtgattctctctgtaagctccccatgtggccaaggacccccctcctaccagggcacttcctgccacctcattgcactggtctcaaccattcagcctgctgctgctgcaccatgttgggctgcggtaggatagggaaggggttctgttgattgctaaatgttgcctaactttatttccctctcccacatttcatgcaagggagcggacctaacacatgacttgcattctcttcctatgttcagaaactccagggcttgcccacgtgtatgtatgagtgaccaatggagcttggaattctttatctatatgatctgtccgaaaatgagatcttttgtactggaatttgtgatgtagttgatcattcagagccaaacgcatataccaataaagacaagactgtcatata

SEQ ID NO: 27105 - DNA, 1614 bp, Artificial Sequence
  derived and/or modified sequence
atgtcatcctggatcaggtggcacggccctgcaatggccagactctggggcttctgctggctggtcgtggggttctggcgagctgcgttcgcgtgccctacatcgtgtaagtgctccgcttcccggatctggtgttccgaccccagccccggaatcgttgccttccctcgactggaacccaatagcgtcgatcccgaaaatattacagagatcttcattgcaaatcagaagcggctggagatcataaacgaggacgatgtggaggcctatgtgggcctccggaacctgaccattgtggactccggactgaagttcgtcgctcacaaagcctttttgaagaacagcaacctccagcatataaatttcacgcgcaacaagctgaccagtttaagcagaaagcatttcaggcatttggatctgtccgaattgatacttgttggtaatccatttacatgcagctgcgatatcatgtggataaagactctgcaggaggcaaagagctcacccgatacacaagacctgtattgccttaacgagagctctaagaatatcccactcgccaacctgcagatccctaattgcggattgccttccgcaaacctggctgcccctaatctaaccgttgaagaaggtaagagtattacgctgagttgtagcgtagccggagaccctgtgcctaacatgtattgggatgtaggcaacctcgtgtcaaagcatatgaatgagacgagccatacgcagggctctctccgaatcacaaacatcagctccgacgatagtgggaaacagataagttgcgtcgctgagaatctcgtgggcgaagatcaggactctgttaacctaaccgtgcatttcgcccctacaattacctttttggaatcccctactagcgaccatcactggtgcatccccttcacagtgaaaggaaatcctaaacccgctctccaatggttctacaatggtgcaatcctgaacgagagtaagtatatttgtacaaagatccatgtgactaatcataccgagtaccacgggtgtctacagcttgataaccccacccacatgaacaacggtgactacactcttatagcgaagaacgagtacggaaaggatgagaaacaaatttccgcccacttcatgggatggcctggcatcgatgacggtgctaacccgaattatccagatgtgatttatgaggactatggaaccgcagcaaacgacataggtgataccacaaacagatcaaacgagatcccatctacagacgtcacagataagacagggcgagaacaccttagcgtgtacgcagtcgtcgtgatcgcatccgtcgtgggcttttgtttacttgtaatgctctttcttctgaaactcgccagacattccaaatttggcatgaagggaccagcaagcgtcatctccaacgacgacgacagcgccagtccactgcatcacatatcaaatggatctaacactccatcgagtagcgaagggggtccagacgcagtgatcattggtatgacaaagatcccagtcatcgagaatccccagtatttcgggatcaccaacagtcagctcaaacctgacacttggcccaggggcagtccaaagaccgcttag

SEQ ID NO: 27106 - DNA, 1614 bp, Artificial Sequence
  derived and/or modified sequence
atgagcagctggatcagatggcacggccccgccatggccagactgtggggcttctgctggctggtggtgggcttctggagagccgccttcgcctgccccaccagctgcaagtgcagcgccagcagaatctggtgcagcgaccccagccccggcatcgtggccttccccagactggagcccaacagcgtggaccccgagaacatcaccgagatcttcatcgccaaccagaagagactggagatcatcaacgaggacgacgtggaggcctacgtgggcctgagaaacctgaccatcgtggacagcggcctgaagttcgtggcccacaaggccttcctgaagaacagcaacctgcagcacatcaacttcaccagaaacaagctgaccagcctgagcagaaagcacttcagacacctggacctgagcgagctgatcctggtgggcaaccccttcacctgcagctgcgacatcatgtggatcaagaccctgcaggaggccaagagcagccccgacacccaggacctgtactgcctgaacgagagcagcaagaacatccccctggccaacctgcagatccccaactgcggcctgcccagcgccaacctggccgcccccaacctgaccgtggaggagggcaagagcatcaccctgagctgcagcgtggccggcgaccccgtgcccaacatgtactgggacgtgggcaacctggtgagcaagcacatgaacgagaccagccacacccagggcagcctgagaatcaccaacatcagcagcgacgacagcggcaagcagatcagctgcgtggccgagaacctggtgggcgaggaccaggacagcgtgaacctgaccgtgcacttcgcccccaccatcaccttcctggagagccccaccagcgaccaccactggtgcatccccttcaccgtgaagggcaaccccaagcccgccctgcagtggttctacaacggcgccatcctgaacgagagcaagtacatctgcaccaagatccacgtgaccaaccacaccgagtaccacggctgcctgcagctggacaaccccacccacatgaacaacggcgactacaccctgatcgccaagaacgagtacggcaaggacgagaagcagatcagcgcccacttcatgggctggcccggcatcgacgacggcgccaaccccaactaccccgacgtgatctacgaggactacggcaccgccgccaacgacatcggcgacaccaccaacagaagcaacgagatccccagcaccgacgtgaccgacaagaccggcagagagcacctgagcgtgtacgccgtggtggtgatcgccagcgtggtgggcttctgcctgctggtgatgctgttcctgctgaagctggccagacacagcaagttcggcatgaagggccccgccagcgtgatcagcaacgacgacgacagcgccagccccctgcaccacatcagcaacggcagcaacacccccagcagcagcgagggcggccccgacgccgtgatcatcggcatgaccaagatccccgtgatcgagaacccccagtacttcggcatcaccaacagccagctgaagcccgacacctggcccagaggcagccccaagaccgcctag

SEQ ID NO: 27107 - protein, 489 aa, Artificial Sequence
  derived and/or modified sequence
MSFRKVVRQSKFRHVFGQPVKNDQCYEDIRVSRVTWDSTFCAVNPKFLAVIVEASGGGAFLVLPLSKTGRIDKAYPTVCGHTGPVLDIDWCPHNDEVIASGSEDCTVMVWQIPENGLTSPLTEPVVVLEGHTKRVGIIAWHPTARNVLLSAGCDNVVLIWNVGTAEELYRLDSLHPDLIYNVSWNHNGSLFCSACKDKSVRIIDPRRGTLVAEREKAHEGARPMRAIFLADGKVFTTGFSRMSERQLALWDPENLEEPMALQELDSSNGALLPFYDPDTSVVYVCGKGDSSIRYFEITEEPPYIHFLNTFTSKEPQRGMGSMPKRGLEVSKCEIARFYKLHERKCEPIVMTVPRKSDLFQDDLYPDTAGPEAALEAEEWVSGRDADPILISLREAYVPSKQRDLKISRRNVLSDSRPAMAPGSSHLGAPASTTTAADATPSGSLARAGEAGKLEEVMQELRALRALVKEQGDRICRLEEQLGRMENGDA

SEQ ID NO: 27108 - protein, 287 aa, Artificial Sequence
  derived and/or modified sequence
CFLLPRGRDPEPPEAGAAAPCAPGAPDMSFRKVVRQSKFRHVFGQPVKNDQCYEDIRVSRVTWDSTFCAVNPKFLAVIVEASGGGAFLVLPLSKTGRIDKAYPTVCGHTGPVLDIDWCPHNDEVIASGSEDCTVMVWQIPENGLTSPLTEPVVVLEGHTKRVGIIAWHPTARNVLLSAGCDNVVLIWNVGTAEELYRLDSLHPDLIYNVSWNHNGSLFCSACKDKSVRIIDPRRGTLVAEREKAHEGARPMRAIFLADGKVFTTGFSRMSERQLALWDPGVRRFCLA

SEQ ID NO: 27109 - protein, 289 aa, Artificial Sequence [sequence omitted]

SEQ ID NO: 27110 - protein, 183 aa, Artificial Sequence
  derived and/or modified sequence
MSFRKVVRQSKFRHVFGQPVKNDQCYEDIRVSRVTWDSTFCAVNPKFLAVIVEASGGGAFLVLPLSKTGRIDKAYPTVCGHTGPVLDIDWCPHNDEVIASGSEDCTVMVWQIPENGLTSPLTEPVVVLEGHTKRVGIIAWHPTARNVLLSAGLHRPPFCAPPPHGPLHTSQQPLQGPHDKWES

SEQ ID NO: 27111 - DNA, 1470 bp, Artificial Sequence
  derived and/or modified sequence
atgtctttcaggaaggtggttcgacaatcaaagtttcgacacgtcttcgggcaacccgtcaagaacgatcaatgttatgaggacatacgcgtttcaagggtgacgtgggacagtactttttgcgctgtgaaccccaagttcttggccgttatcgtggaagcatccggcgggggcgcattcctggttctcccactgtcaaaaacggggcggatcgacaaagcctatcccactgtctgtggacatacaggaccggtcctagatatcgactggtgtccccataatgatgaggttatagcatccggcagcgaggattgtaccgtgatggtttggcaaattcctgagaatggactgacctcgccactgacagaacctgtggtggtgcttgagggccataccaagagggtcggaattattgcctggcacccaactgcaaggaacgttctgttgtccgccgggtgcgataacgtcgttctcatctggaatgtcggaaccgccgaggaactctacagactggatagtctgcatcccgaccttatctacaatgtgagttggaatcataatggttccctattttgctccgcatgcaaagacaaaagcgtaaggattatcgacccacgccggggaaccctagtcgcagaacgagagaaggcacacgagggtgcccggcctatgcgggcgatatttcttgcagatgggaaagtgtttacgactggcttttccaggatgtctgaaaggcagctcgccctgtgggaccctgagaacctggaagaaccaatggcgcttcaagagctggactccagcaacggggcacttctgccgttttacgatcccgacacatcagtcgtttacgtgtgtgggaagggcgacagttctataaggtactttgagatcactgaagagccaccctatattcactttttgaatacgttcacatctaaggaaccacagaggggtatggggagtatgcccaagcgagggctggaggtgagcaaatgtgagattgctcgattttacaaattgcatgagcgcaaatgtgaacccattgtcatgaccgtacctcggaagtctgatctctttcaagatgatttgtatccggacaccgctggtcccgaggcggctttggaagctgaggaatgggtgtctgggcgggatgcagaccccatcctcatttctctgcgcgaggcctacgtgccatccaagcagcgagatctgaagatctctcgcagaaacgtcctcagcgattcacgtccggccatggcccctggaagctctcacctgggagcacctgcgagtaccaccactgccgccgatgcgacaccttcgggctccctcgctcgtgccggcgaggccgggaaactcgaggaggtgatgcaggagttgcgggcattgcgggcactagtcaaagagcagggggacaggatatgtcgcctcgaagagcagttgggccgcatggaaaacggagatgcgtag

SEQ ID NO: 27112 - DNA, 864 bp, Artificial Sequence
  derived and/or modified sequence
tgcttcctcctcccccggggacgagacccagagccccctgaagctggagccgccgctccctgtgccccaggcgcaccggatatgagcttcagaaaggtggttaggcagagcaaatttagacatgtattcgggcaaccagttaaaaacgatcagtgttacgaggacatcagggttagtagagttacctgggatagtactttctgtgccgtgaaccctaaatttctcgctgtgattgtggaagccagcggaggtggcgcctttcttgtgcttcctctttctaagacaggcaggatcgacaaggcgtaccctactgtgtgtggtcacactgggcccgtgctagacatagactggtgcccccacaacgacgaggttatcgcttctggcagcgaggactgcaccgtaatggtatggcagatacccgaaaatgggctcacttctccactaacggaacccgtggtggtgttggagggacataccaagcgagtcggaatcatcgcatggcatccaactgcccgtaacgtgctgctatccgcaggttgtgacaacgtggtgttgatatggaatgttggtaccgctgaggagctgtaccgactcgattccttgcatcctgacctcatctacaatgtgtcttggaatcacaatggcagcctgttctgttccgcatgtaaagataagagtgtgagaataattgacccccgccgcggtacactagtggctgaaagagaaaaagctcatgagggagcgcgcccgatgcgggccatcttcttggccgatggaaaagttttcactaccggattctctaggatgagtgagagacagctcgctttatgggatcctggcgtcagaagattttgccttgcctag

SEQ ID NO: 27113 - DNA, 1470 bp, Artificial Sequence
  derived and/or modified sequence
atgagctttcggaaggttgtgaggcagtccaagttcaggcatgtgtttgggcagcctgtgaagaatgatcaatgttacgaggacattcgggtcagtagggtgacatgggattctacattctgtgcagtgaaccccaagtttctagctgtaatcgtggaagcatccggaggtggggcgttcctggtcctgccattgtctaaaaccgggagaatcgacaaggcttatcccaccgtctgcggccacacaggcccagtactagacattgactggtgtccgcataatgacgaggttattgcgagcggaagcgaagactgtacggttatggtgtggcagatccccgaaaatggcctaacctcccccctaacggagcccgtggtggtgctggagggccacactaaaagggtggggataattgcgtggcacccgacagctcggaatgtcctactgagtgccggctgcgacaacgtggtgttgatatggaacgtgggcactgccgaggagctatatagattagactcactccaccccgacctgatctacaacgtaagttggaaccataacgggtctctgttttgttcggcatgtaaggacaagtctgtcagaattattgatcctcgacgcggcactctggtggccgaacgcgagaaggcgcatgaaggagccagacctatgcgggctattttcctggcagacggtaaggtctttacaacagggtttagccgcatgagtgagaggcagcttgcgctgtgggaccctgagaatctggaggagccgatggccctccaggaattggactcatcaaacggggctctccttcccttctacgatcctgacacctcagtagtgtatgtttgcggtaaaggcgactccagtataaggtactttgagattacggaagagcccccatatattcacttcctcaataccttcacatccaaagagcctcagcgcggcatgggatccatgccaaagcgcgggctggaggtgtctaaatgcgagatcgctcgcttttataagctccacgagaggaaatgtgagccaatcgttatgaccgtccctcgaaaatcagacttgtttcaggacgatctgtacccggataccgcaggaccggaagctgctttggaggcagaagagtgggtgtccggtagagacgctgaccctatactgatttcgttacgtgaagcatacgtaccatctaagcagcgtgatctcaagatttcgcgcagaaacgtgctgtccgatagcaggcccgctatggccccaggttccagtcatctgggcgctcctgcttccaccactactgcagcggatgccacaccatccgggtcactggccagggcaggcgaggctggtaaactcgaggaggttatgcaggagcttcgagctcttagggcactggttaaggagcagggggaccgcatttgcaggctggaagaacagctggggcggatggagaacggggacgcttag

SEQ ID NO: 27114 - DNA, 870 bp, Artificial Sequence
  derived and/or modified sequence
atgagtttcagaaaggttgtcaggcagtcaaagttcagacacgtttttggacagcctgtcaaaaacgatcaatgttatgaggatatcagggtgagtcgcgtgacctgggattcaacattttgtgctgtcaatcctaagttcctggccgttattgtggaagcttcaggcggcggcgcctttctggtgctacctttatccaaaaccggccggatagacaaggcgtatcccaccgtatgcggccataccggaccagttctggacatcgactggtgtccgcacaatgacgaggtgatcgcaagtggtagtgaggattgcacagtaatggtgtggcagatccccgaaaacggcctcacaagcccgctaactgaacccgtagtcgtgctggaaggtcacaccaagagagtgggaatcatcgcatggcacccaactgcgaggaatgtactgcttagcgccggatgcgacaacgtggtgctgatttggaatgtgggaaccgcggaggagttataccggctagactccctccacccagatcttatttacaatgtatcttggaaccataacggcagtctattttgctccgcctgcaaggataagtccgtccgcatcatagaccctcggcggggcacactcgtggccgagcgcgaaaaagcgcacgaaggcgcccgcccaatgagggccatatttctagccgatggaaaggtgttcactaccgggtttagccgcatgagcgaaagacaactcgcgctgtgggaccccgtatccggacagcctgagggagcaaatcttcgcctaggaccacacccggggcccggccggcaagggtctccttggggcggactctggtttttagcctccctgcctgggacctag

SEQ ID NO: 27115 - DNA, 552 bp, Artificial Sequence
  derived and/or modified sequence
atgtcttttagaaaggtggtcagacaaagcaagttcagacatgtatttgggcaacccgtcaagaacgatcaatgctatgaggatatcagagtcagtcgggtgacctgggatagcaccttctgtgccgttaacccgaagtttctggccgtgatcgtcgaagcctccggagggggcgcattcttagtgctgccgctttctaaaacgggccgcattgataaggcatacccgacagtctgtgggcatactgggccggtgttagacatcgactggtgccctcacaacgatgaggttattgcatcggggagcgaagactgtactgtcatggtgtggcagatcccagaaaacggtctgacctccccgctcaccgagccggtggtagttctcgaggggcatacaaaacgtgtaggcataatcgcttggcatcctacagctcggaatgtccttctctcagcgggcctgcacaggccccccttttgcgcgccccctccacacggacccttacacacttctcagcaaccactccagggaccgcatgacaagtgggagtcttag

SEQ ID NO: 27116 - DNA, 1470 bp, Artificial Sequence
  derived and/or modified sequence
atgtccttcaggaaggtggtgcggcagagcaagttccgccacgtgtttggccagcctgtgaagaatgaccagtgctatgaggacatccgggtgtcccgggtgacctgggacagcaccttctgtgctgtgaaccccaagttcctggccgtgattgtggaggccagcggcggcggggccttcctggtgctgcccctgagcaagacaggaagaattgacaaggcctaccccaccgtgtgtggccacacaggccctgtgctggacatcgactggtgcccccacaatgatgaagtcatcgccagcggcagcgaggactgcaccgtgatggtgtggcagatcccagaaaatggcctgaccagccccctgacagagcctgtggtggtgctggagggccacaccaagagggtgggcatcatcgcctggcaccccacagccagaaatgtgctgctgtctgctggctgtgacaacgtggtgctgatctggaatgtgggcacagctgaggagctgtaccgcctggacagcctgcacccagacctgatctacaacgtgtcctggaaccacaacggcagcctcttctgcagcgcctgcaaggacaagtctgtgcgcatcatcgacccccggcggggcaccctggtggccgagcgggagaaggcccacgagggcgcccggcccatgagggccatcttcctggctgatggcaaggtgttcaccaccggcttcagcaggatgtctgagcggcagctggccctgtgggaccctgagaacctggaggagcccatggccctgcaggagctggacagcagcaatggagccctgctgcccttctatgaccctgacacctctgtggtgtatgtgtgtgggaaaggagacagcagcatccgctactttgagatcacagaggagcccccctacatccacttcctgaacaccttcaccagcaaggagccccagaggggcatgggctccatgcccaagaggggcctggaggtgtccaaatgtgagatcgcccgcttctacaagctgcacgagaggaaatgtgagcccatcgtgatgacagtgcccaggaagagtgacctcttccaggatgacctgtacccagacacagctggccctgaggccgccctggaggccgaggagtgggtgtctggaagagatgctgaccccatcctgatcagcctgcgggaggcctacgtgcccagcaagcagagggacctgaagatcagcagaagaaatgtgctgagtgacagcaggcctgccatggcccctggcagcagccacctgggcgccccagccagcaccaccacagctgctgatgccaccccatctggcagcctggcccgggccggggaggccggcaagctggaggaggtgatgcaggagctgcgggccctgcgggccctggtgaaggagcagggcgaccgcatctgccgcctggaggagcagctgggccgcatggagaatggagatgcctag

SEQ ID NO: 27117 - DNA, 864 bp, Artificial Sequence
  derived and/or modified sequence
tgcttcctgctgccccggggccgggaccctgagcccccagaggccggggccgccgccccctgtgcccctggggccccagacatgtccttcaggaaggtggtgcggcagagcaagttcagacatgtgtttggccagcctgtgaagaatgaccagtgctatgaggacatccgggtgtcccgggtgacctgggacagcaccttctgtgctgtgaaccccaagttcctggccgtcatcgtggaggccagcggcggcggggccttcctggtgctgcccctgagcaagacaggaagaattgacaaggcctaccccaccgtgtgtggccacactggacctgtgctggacatcgactggtgcccccacaatgatgaggtgattgccagcggcagcgaggactgcaccgtgatggtgtggcagatcccagaaaatggcctgaccagccccctgacagagcctgtggtggtgctggagggccacaccaagagggtgggcatcatcgcctggcaccccacagccagaaatgtgctgctgtctgctggctgtgacaacgtggtgctgatctggaatgtgggcacagctgaggagctgtaccgcctggacagcctgcacccagacctgatctacaacgtgtcctggaaccacaacggcagcctcttctgcagcgcctgcaaggacaagtctgtgcgcatcatcgacccccggcggggcaccctggtggccgagcgggagaaggcccatgaaggagcccggcccatgagggccatcttcctggctgatggcaaggtgttcaccaccggcttcagcaggatgtctgagcggcagctggccctgtgggaccccggggtgcggcgcttctgcctggcctag

SEQ ID NO: 27118 - DNA, 870 bp, Artificial Sequence
  derived and/or modified sequence
atgtccttcaggaaggtggtgcggcagagcaagttccgccacgtgtttggccagcctgtgaagaatgaccagtgctatgaggacatccgggtgtcccgggtgacctgggacagcaccttctgtgctgtgaaccccaagttcctggccgtgattgtggaggccagcggcggcggggccttcctggtgctgcccctgagcaagacaggaagaattgacaaggcctaccccaccgtgtgtggccacacaggccctgtgctggacatcgactggtgcccccacaatgatgaagtcatcgccagcggcagcgaggactgcaccgtgatggtgtggcagatcccagaaaatggcctgaccagccccctgacagagcctgtggtggtgctggagggccacaccaagagggtgggcatcatcgcctggcaccccacagccagaaatgtgctgctgtctgctggctgtgacaacgtggtgctgatctggaatgtgggcacagctgaggagctgtaccgcctggacagcctgcacccagacctgatctacaacgtgtcctggaaccacaacggcagcctcttctgcagcgcctgcaaggacaagtctgtgcgcatcatcgacccccggcggggcaccctggtggccgagcgggagaaggcccacgagggcgcccggcccatgagggccatcttcctggctgatggcaaggtgttcaccaccggcttcagcaggatgtctgagcggcagctggccctgtgggaccctgtgtctggccagcctgagggcgccaacctgcggctgggcccccaccctggccctggccggcagggcagcccctggggcggcctgtggttcctggccagcctgcccggcacctag

SEQ ID NO: 27119 - DNA, 552 bp, Artificial Sequence
  derived and/or modified sequence
atgtccttcaggaaggtggtgcggcagagcaagttccgccacgtgtttggccagcctgtgaagaatgaccagtgctatgaggacatccgggtgtcccgggtgacctgggacagcaccttctgtgctgtgaaccccaagttcctggccgtgattgtggaggccagcggcggcggggccttcctggtgctgcccctgagcaagacaggaagaattgacaaggcctaccccaccgtgtgtggccacacaggccctgtgctggacatcgactggtgcccccacaatgatgaagtcatcgccagcggcagcgaggactgcaccgtgatggtgtggcagatcccagaaaatggcctgaccagccccctgacagagcctgtggtggtgctggagggccacaccaagagggtgggcatcatcgcctggcaccccacagccagaaatgtgctgctgtctgctggcctgcaccggccccccttctgtgcccccccaccccacggccccctgcacaccagccagcagcccctgcagggcccccatgacaagtgggagagctag

SEQ ID NO: 27120 - DNA, 1470 bp, Artificial Sequence
  derived and/or modified sequence
atgagcttccggaaggtggtgcggcagagcaagttccggcacgtgtttggccagcccgtcaagaacgaccaatgctatgaggacattcgggtgagcagagttacctgggatagtacgttttgcgccgttaatccaaaatttttggccgtgatcgtcgaagcatccggggggggagcattcctggtgctgccgctgtccaagaccggcagaatcgataaggcttacccaacggtatgcgggcacaccggaccagtccttgacattgactggtgcccacacaatgatgaagtcatcgcctccggcagcgaagactgcactgtcatggtgtggcagattcctgagaacggtctgacttcccctctgaccgaacctgtggtggtactggagggacacacaaagcgcgtggggataatagcgtggcacccaaccgcaaggaacgtcctgctcagcgccggatgtgacaacgtggtgctgatatggaatgtaggtactgctgaagaactctatagactagactctctgcatcccgacttaatctacaatgtgtcctggaaccacaacggatctctgttctgcagtgcatgtaaggacaagtctgtcaggatcatcgacccccggaggggtaccctagtggctgagagggaaaaggcacacgagggcgcaagacctatgagagctatcttcctggctgacggaaaggtgtttactacgggcttttcacgtatgtccgaaagacaactcgccctttgggacccggagaacttggaggagccgatggccctgcaggaattggattcctccaacggcgcccttctgcccttctacgaccctgacaccagtgttgtgtatgtatgtgggaagggagacagctcgatcagatatttcgaaattactgaagaacccccttatattcacttcctcaacaccttcacttctaaggaacctcagcgtggtatgggatctatgccaaagcgcgggttagaggtgtcgaaatgcgagatcgctaggttttacaaattgcatgagcggaagtgtgagccaatcgtgatgacggttccgagaaagtctgatctgtttcaggacgatttataccccgataccgcaggtccggaggcggccttagaagcagaagaatgggtcagcggacgcgacgccgatcccatacttatctcactccgggaggcctacgtacctagcaagcagagagacttgaagatctcaaggcgcaatgtactttctgacagcagacctgccatggcccccggatccagccacctcggggccccagcctctactactactgctgctgacgccactccttctggctcactggctcgggccggggaggcaggaaagctcgaggaggtaatgcaggagctgagagctctgcgggctcttgttaaggagcagggtgatcgaatctgtcggctggaagaacagctgggtagaatggaaaatggagacgcgtag

SEQ ID NO: 27121 - DNA, 864 bp, Artificial Sequence
  derived and/or modified sequence
tgcttcctgctgccccggggccgggaccccgagccccccgaggccggtgctgccgctccctgtgctccgggtgccccagacatgtctttccgcaaggtggtccgacagtctaagttcagacacgtatttggccaaccagtaaagaacgaccagtgctacgaggatatccgcgtaagccgtgtgacgtgggacagcaccttctgtgccgtgaatcctaagtttttagctgtgatcgtagaggctagcggcggaggggcctttctggtcctccctctgagtaagactggacggatcgacaaggcctaccccaccgtatgcggtcacacagggcctgtgcttgatatagattggtgtccccataacgatgaggtcattgcctctggctccgaggattgcaccgttatggtgtggcaaatccctgagaatgggcttacctctccacttactgagccggtggttgtgctggaaggtcacactaagagagtggggatcatcgcgtggcatccgacagccaggaatgtgctgctgagcgctggatgtgataacgtcgtccttatttggaacgtggggactgctgaagagctctataggcttgacagtcttcatccggatctcatttataacgtctcatggaaccacaatggaagcctcttttgttctgcatgtaaagataagagtgtgcgtatcattgatccaaggcgcggcactttggtagcagagcgggaaaaggcccacgaaggtgcgcggccaatgagggctatattcctggccgacgggaaagtgtttacaactggtttttcccggatgtcggagaggcagctggcattgtgggatcctggcgtgaggaggttctgtctggcatag

SEQ ID NO: 27122 - DNA, 1470 bp, Artificial Sequence
  derived and/or modified sequence
atgagcttccggaaggtggtgcggcagagcaagttccggcacgtgttcgggcagcctgttaagaatgatcaatgctacgaggatattagagtgagtagggttacgtgggatagtaccttctgtgctgtgaatcccaagtttctcgctgtgatcgtagaggcttcagggggcggcgccttccttgtcctgccattaagtaagacaggcagaattgacaaagcctatccgactgtgtgcggtcacaccgggcctgtgctggacatcgactggtgcccacataatgacgaagttattgccagtggcagcgaagattgtaccgtgatggtgtggcagatacccgagaatgggctgactagccccttaaccgagcccgtagttgtactggagggccacactaaacgggtaggcattattgcctggcaccctacggcgagaaatgtactgctgtctgccgggtgtgataatgtagttctgatctggaacgtcggcacagctgaggagctgtatcgtttagattccctgcacccggacctgatctacaacgtgagctggaatcataacggcagcctgttctgttctgcatgcaaagacaagagcgtccggatcatcgacccgaggagaggtaccctggtggccgaacgcgagaaggctcacgagggcgcgcgccccatgcgagctattttcctggccgatgggaaggtgttcactactggattttcccgcatgagtgaacgacaacttgcactctgggacccagaaaacctcgaagagcctatggccctgcaggagcttgattcctctaacggcgccctgctgcccttctacgacccagacacgtctgtggtgtatgtgtgtgggaaaggtgatagtagcattaggtactttgagatcacagaagaacccccatacatccactttttgaacactttcaccagtaaggagcctcagcgcggaatggggagtatgcccaagcggggactggaagtgtccaagtgcgagatcgccagattctataaacttcacgagcggaaatgcgagcctatcgtaatgaccgtacctcgcaagtccgaccttttccaggatgacctctaccccgatactgctggccctgaggctgcactagaggcagaggagtgggtgtctggcagagatgccgaccccattctgatttctttaagagaagcctacgtgccttcaaagcagcgcgacctgaagatatccagacgtaatgtgctgtccgatagccggcccgccatggcacccggttctagccatttgggcgccccagcctctactactacggccgctgatgctactcctagcgggtcgctcgcccgggccggtgaggccggtaaactggaggaggtcatgcaagaactgagggctttgcgtgcattggtgaaagaacaaggcgatcggatctgccggctggaggagcagctgggcaggatggaaaatggcgacgcatag

SEQ ID NO: 27123 - DNA, 870 bp, Artificial Sequence
  derived and/or modified sequence
atgagcttccggaaggtggtgcggcagagcaagttccggcacgtgttcggtcagcccgtgaaaaacgatcagtgttacgaagatattagggtgtcgcgcgtcacttgggattctacgttttgcgctgtgaaccctaagtttctagctgtgatagtggaggcctcaggtggtggggcgttcctggtgttgcccttaagcaaaacgggcagaattgacaaagcttatcctacagtgtgcggccacaccgggcctgttttggacattgactggtgtccgcataacgacgaggtgattgcctctgggtccgaggattgcacggttatggtgtggcaaattccagagaatggtcttacaagtccgctcaccgagccagtggtcgttctggaagggcacactaaacgagtcggtattatagcctggcatccaactgcacggaacgtcctcctctcagccgggtgcgataacgttgttctcatctggaacgttgggaccgccgaggaactctatcgccttgatagtctccatcctgatttgatttataacgtctcttggaaccataatgggtccctgttttgctctgcttgcaaggataagagtgtccggatcatcgatcccagaagaggcactctggtggccgagcgggaaaaggcccacgaaggagctagaccaatgcgtgctatctttctggccgacggcaaggtgttcaccaccggcttctctagaatgtctgagcggcagctggcactatgggaccccgtgagcggtcaacctgagggagctaatctacgactgggtccgcacccgggcccagggcggcaaggatccccatggggagggttgtggttcctcgcctccctgcccggcacatag

SEQ ID NO: 27124 - DNA, 552 bp, Artificial Sequence
  derived and/or modified sequence
atgagcttccggaaggtggtgcggcagagcaagttccggcacgtgttcgggcagcccgtaaagaacgatcagtgttatgaggatatccgagtgtccagagtcacctgggactcaacattttgcgccgtcaaccctaagttcctggccgtaatagttgaggctagtggtggaggtgccttccttgtcctcccccttagcaagacgggcaggatcgataaagcttatcctaccgtttgcggtcacacagggcccgtgctggacattgactggtgtccccacaatgacgaggttattgcctctgggtcagaggactgtacagttatggtgtggcaaattcccgaaaacggcctgacaagtccccttacggaacccgtggtggtactcgaaggacatactaagcgagtcggcatcattgcttggcatcctaccgcccggaacgtgcttctgagcgcaggattgcatcgacccccattttgtgctccgccgccccatgggcccctgcatacaagccagcagcctctgcagggcccacacgataagtgggaatcttag

SEQ ID NO: 27125 - DNA, 1470 bp, Artificial Sequence
  derived and/or modified sequence
atgtcttttagaaaggtggttcggcagtccaagtttcggcacgtctttggtcagcccgtcaagaatgatcaatgctacgaagacatccgggtctcacgtgtgacctgggactcaacattctgtgccgtaaatccaaagtttcttgcggttatagtggaagcctctggcggaggagcttttcttgtgttacccttgagcaagacaggtagaatagacaaagcctaccctacagtctgtggccacactgggcctgtgcttgatatcgattggtgcccacataacgacgaagtaatcgcttctggtagcgaagattgcaccgtcatggtttggcagatccccgagaacggattgacctccccactgacagagccagtggtggtgctggaaggccacaccaaaagggtggggataattgcatggcatcctacagcacgcaatgtgctgctgtccgccggatgtgacaacgtggtactaatttggaacgtgggaacggccgaggagctgtacaggctggattctcttcacccagatctgatttacaacgtgagctggaatcataacggatcactcttctgcagcgcttgcaaggacaagtccgtacgcattatcgatcctcggaggggcaccctggtagccgagcgtgagaaggcacatgagggcgcaagacctatgcgcgctatttttctggccgacggaaaagtctttactacaggtttttcaaggatgtctgagaggcaactggccctttgggacccagagaacctcgaggagccaatggccttgcaggagctggacagcagcaacggggcactactgcccttttacgaccctgacactagcgtagtctacgtctgtggcaagggggacagctcgatcagatatttcgaaatcaccgaagaaccaccttacatccactttctgaacacttttacttctaaggaacctcagcgtggcatggggtccatgcccaagcgcggactggaggtctccaaatgtgagattgccagattctataaactccacgaacgtaagtgtgaacccatcgtcatgacagtgccccgtaaaagtgatttatttcaggacgacttgtatcccgacactgcgggacccgaggccgctctggaagctgaagagtgggtctctggcagagatgccgaccccatactgatctctctccgcgaggcatacgtaccttctaagcagagagacctaaagatatcccgtagaaatgtcctgtcggatagcaggcctgccatggcccctggctcatctcacctcggggcacccgcaagtacaacaacggcagctgacgccacccccagcgggagcctggcaagagccggagaggccggaaagttagaggaagtgatgcaggagctacgcgctctgagagccctggttaaagagcagggcgaccggatctgtcggctggaagaacaactcgggaggatggagaacggtgacgcttag

SEQ ID NO: 27126 - DNA, 864 bp, Artificial Sequence
  derived and/or modified sequence
tgtttcctgctgcctagagggagagaccccgagcctccagaagccggtgctgctgcaccctgcgccccaggggctcccgacatgagcttccgcaaggtggttagacagagtaaatttagacatgtgtttgggcagccagtgaagaatgatcagtgttatgaggacatcagggtctccagagtaacctgggacagcacattttgcgctgtgaatcccaagttcctcgccgtgattgtggaggccagtggcggaggtgcgttcctggttttgccattatccaaaaccggcagaatcgataaggcttatcctaccgtgtgcggacatacaggacccgtactggacattgattggtgtcctcataacgatgaagtgattgcttccgggagcgaagattgtacagtgatggtgtggcaaatcccagaaaacggactaacaagccctctgaccgagcctgtggtagtgctggagggccacacaaagcgtgttgggatcatcgcctggcatcccaccgcccgtaacgtactcctgagtgcaggctgcgataatgtggtgctgatctggaacgtcggtacagctgaggagctgtatcgcctggactccctgcaccctgatctgatttataatgtgtcttggaatcataacggaagtctgttctgcagcgcttgcaaggacaaaagcgttagaattatcgatcctcggagaggtacactagtcgctgagagagaaaaggcccatgagggagcgcgaccgatgcgcgcaatttttctggcagacggaaaggtttttaccactgggttttctcgtatgagtgaaagacagttggcgctatgggaccccggagttcggagattttgtttggcctag

SEQ ID NO: 27127 - DNA, 1470 bp, Artificial Sequence
  derived and/or modified sequence
atgtctttcagaaaggtcgtcagacagtccaagtttagacacgtgttcggccagcccgttaaaaatgaccaatgctacgaagacattcgagtgagccgggttacctgggatagtaccttttgtgctgtgaatcccaagttcctggctgtgatcgtagaggccagcggcggtggcgcattcctcgtgttgccgctttcaaaaaccggcaggattgacaaagcttatcccactgtgtgtggacataccggcccagtgttggatattgactggtgtccacacaatgacgaggtaattgccagcggaagcgaggactgcaccgtcatggtttggcaaattcctgagaacggactgacatcacctttaaccgagccagtggtggtcctggagggccacaccaagagggtaggaattatagcttggcatcctacagctcggaatgtattgctgagtgcgggttgcgacaacgttgtgctgatctggaacgtaggcacagccgaggaattgtacaggctggatagccttcaccctgacctgatctacaatgtgtcttggaaccacaacggaagtctcttctgttcagcttgcaaagataaatcagtgaggatcattgacccgaggcgaggtactcttgtggccgaacgggaaaaggcccacgaaggcgctaggccaatgcgcgctatattccttgccgatgggaaggtatttaccactgggttttccagaatgtcggagagacagctagcactgtgggaccctgagaatctagaagagcccatggctcttcaggaattggacagctcaaacggggctctcttgcccttctacgacccagacacaagcgtggtgtacgtctgcggcaaaggggacagttcaattcgttacttcgaaataaccgaggaacctccctatatccacttcctgaacacgtttacgagcaaggagccacagagaggcatgggaagcatgccaaagagaggattggaggtgtccaaatgcgaaatcgccaggttttacaaacttcacgaaagaaaatgtgagccaatagtaatgacagtcccgaggaaaagtgacttgtttcaggatgatttgtatcctgacacagccggtccggaagcagcgttggaggcagaggagtgggtgagcggcagggacgccgaccctatcctcataagcctcagagaagcttacgtcccttcaaaacaaagagacctgaagatctcgcggaggaatgtcctgtctgatagccgaccagctatggccccagggagcagccatttgggagctcccgcatccaccaccaccgctgcagacgctacccctagcggcagtttagcccgagcaggcgaggccggaaaattggaggaggtaatgcaggaactccgggctctccgtgcacttgtgaaagaacagggagaccgcatctgccgcttggaagaacagcttggaagaatggagaatggtgacgcctag

SEQ ID NO: 27128 - DNA, 870 bp, Artificial Sequence
  derived and/or modified sequence
atgtccttccggaaggtggtacgccagagtaagtttaggcacgtattcggccagcctgtcaagaatgatcagtgctacgaggacatccgagtctcccgcgtcacttgggactctactttttgcgcagttaacccgaagtttctcgccgtaatcgtggaagcttcaggcggaggtgcctttttggtactgcccctgagcaaaaccgggagaatcgataaagcctatccaactgtatgcgggcatactggccctgtacttgacattgattggtgccctcataatgatgaggtcatcgcgtcagggtccgaggattgcacagttatggtttggcagatccctgagaatgggttgacttcccccttaactgaaccagtggtcgtgctcgagggccacaccaaaagggtgggcattattgcatggcacccaactgccaggaatgtgcttctgtccgccggatgcgacaacgtggtgctgatatggaacgttggtacagcggaggaattgtatagactcgacagcctgcatcccgatctcatctataacgttagttggaatcataacggcagtctcttttgctcagcctgcaaagataaatccgtgcgaatcatagatcctaggcggggtacactcgtagccgaaagggaaaaagcacacgagggcgcacgcccaatgagggcgattttcctagcagacgggaaggtgtttacaactggattctccagaatgtcagagcgccagctggctctgtgggaccctgtcagcggccagccggagggcgctaatctgaggctgggaccacatccaggacctggcaggcaggggagtccctgggggggtctgtggttcctggccagtctccccggaacgtag

SEQ ID NO: 27129 - DNA, 552 bp, Artificial Sequence
  derived and/or modified sequence
atgtcattccggaaagtggtgcggcagtctaaattccgccatgtgttcggccagcccgttaaaaacgatcagtgttatgaggacatccgtgtttcgcgcgtaacctgggatagcaccttttgtgctgtcaatcctaagttcctggctgttattgtggaggccagcggaggcggagcctttctggttcttcctctgtctaaaaccgggagaattgataaggcatacccaactgtatgtggccataccggaccagtcctcgacattgactggtgtccccataacgatgaggtgattgcgtcagggagtgaggattgtactgtcatggtgtggcagattccagaaaatggactcacatctccgctaacagaacccgtagtagtgctggaaggccacaccaaaagagtgggcattatagcttggcatcctacggctcggaacgtcctcctctctgccggtctgcatcgtccccctttctgtgccccacctccgcacggccctctgcacactagccagcagcctttacaggggccacatgataaatgggagagttag

SEQ ID NO: 27130 - DNA, 1881 bp, Artificial Sequence
  derived and/or modified sequence
ctccgggtccctctgtcacttcctgaatcctgcttcctgcttcccagaggccgggatccggagccgcccgaagccggtgccgcagccccctgcgcccccggtgcccccgacatgtccttccgcaaagtggtccggcagagcaaattccggcatgtgttcgggcagccggtcaagaacgaccagtgctatgaggacattcgcgtgtcccgtgttacctgggacagcaccttctgcgccgtcaaccccaagttcctggcggtgattgtggaggccagtggagggggtgcctttctggtgctccccctaagcaagacgggccgcattgacaaggcctacccgacggtgtgtgggcacacgggacctgtcctggacatcgactggtgtcctcacaacgacgaagtcatagccagcggctcggaggactgcacggtcatggtgtggcagatcccagagaacgggctgacctccccgctgacagagccggtggtggtactggaggggcacaccaagcgagtgggcatcatcgcctggcaccccacggcccgaaacgtgctgctcagtgcaggctgcgacaacgtggtactcatctggaatgtgggcacagcggaggagctgtaccgcctggacagcctgcaccctgacctcatctacaatgtcagctggaaccacaatggcagcctgttttgctcagcatgcaaggacaagagcgtgcgcatcatcgacccccgtcggggcaccctggtggcagagcgggagaaggctcatgagggggcccggcccatgcgggccatcttcctggcagatggcaaggtgttcaccacaggcttcagccgaatgagcgagcggcagctggcgctctgggacccagaaaacctcgaggaacccatggccctgcaggaactggactcgagcaacggggccctgctgcccttctacgaccccgacaccagtgtggtctacgtctgcggcaagggtgactccagcatccggtactttgagatcacagaggagcctccctacatccacttcctgaacacgttcaccagcaaggagccgcagcggggtatgggcagcatgcccaagcggggcctggaggtcagcaagtgcgagatcgcccggttctacaaactgcatgagcgcaagtgtgagcccatcgtcatgactgtgccaagaaagtcggacctcttccaggatgatctgtaccccgacacagccgggcccgaggcagccctggaggctgaggagtgggtgagcgggcgggatgccgacccgatcctcatctcactgcgggaggcctacgtgcccagcaagcagcgggacctgaagatcagccggcgcaacgtgttgtctgacagccggcccgccatggccccgggctcctcccacctaggggcccccgcctccaccaccactgctgctgatgccacccccagcggcagcctggccagagccggggaggctgggaagctggaggaggtgatgcaggagctgcgggccctgagggcgctggtcaaggagcagggcgaccgcatctgccgcctggaggagcagctgggccgcatggagaacggggatgcgtagggccacagccacacgccaccttcatctcctccgccgcccccttcccactcagcttctgccagcgggtcgcaccgggctagctggctgcccagagcctctgaggcagcgcaggggtcagttcccacccccacccgtcccaggcccaggccgaagccagcgcccagctttcctcactgttcctgtggaggatgtctacgcccaggcgagctcctcgacctctgagggaccatctccccgaccactgcccagccctctgctccctccccagaggaggcgggagggtgggctctatattttcat

SEQ ID NO: 27131 - DNA, 877 bp, Artificial Sequence
  derived and/or modified sequence
acttcctgaatcctgcttcctgcttcccagaggccgggatccggagccgcccgaagccggtgccgcagccccctgcgcccccggtgcccccgacatgtccttccgcaaagtggtccggcagagcaaattccggcatgtgttcgggcagccggtcaagaacgaccagtgctatgaggacattcgcgtgtcccgtgttacctgggacagcaccttctgcgccgtcaaccccaagttcctggcggtgattgtggaggccagtggagggggtgcctttctggtgctccccctaagcaagacgggccgcattgacaaggcctacccgacggtgtgtgggcacacgggacctgtcctggacatcgactggtgtcctcacaacgacgaagtcatagccagcggctcggaggactgcacggtcatggtgtggcagatcccagagaacgggctgacctccccgctgacagagccggtggtggtactggaggggcacaccaagcgagtgggcatcatcgcctggcaccccacggcccgaaacgtgctgctcagtgcaggctgcgacaacgtggtactcatctggaatgtgggcacagcggaggagctgtaccgcctggacagcctgcaccctgacctcatctacaatgtcagctggaaccacaatggcagcctgttttgctcagcatgcaaggacaagagcgtgcgcatcatcgacccccgtcggggcaccctggtggcagagcgggagaaggctcatgagggggcccggcccatgcgggccatcttcctggcagatggcaaggtgttcaccacaggcttcagccgaatgagcgagcggcagctggcgctctgggacccaggggtgaggaggttctgcttggcctga

SEQ ID NO: 27132 - DNA, 1902 bp, Artificial Sequence
  derived and/or modified sequence
attatgaggagcaagaacgcgaaggggcctcgggtccgctaggccgggatccggagccgcccgaagccggtgccgcagccccctgcgcccccggtgcccccgacatgtccttccgcaaagtggtccggcagagcaaattccggcatgtgttcgggcagccggtcaagaacgaccagtgctatgaggacattcgcgtgtcccgtgttacctgggacagcaccttctgcgccgtcaaccccaagttcctggcggtgattgtggaggccagtggagggggtgcctttctggtgctccccctaagcaagacgggccgcattgacaaggcctacccgacggtgtgtgggcacacgggacctgtcctggacatcgactggtgtcctcacaacgacgaagtcatagccagcggctcggaggactgcacggtcatggtgtggcagatcccagagaacgggctgacctccccgctgacagagccggtggtggtactggaggggcacaccaagcgagtgggcatcatcgcctggcaccccacggcccgaaacgtgctgctcagtgcaggctgcgacaacgtggtactcatctggaatgtgggcacagcggaggagctgtaccgcctggacagcctgcaccctgacctcatctacaatgtcagctggaaccacaatggcagcctgttttgctcagcatgcaaggacaagagcgtgcgcatcatcgacccccgtcggggcaccctggtggcagagcgggagaaggctcatgagggggcccggcccatgcgggccatcttcctggcagatggcaaggtgttcaccacaggcttcagccgaatgagcgagcggcagctggcgctctgggacccagaaaacctcgaggaacccatggccctgcaggaactggactcgagcaacggggccctgctgcccttctacgaccccgacaccagtgtggtctacgtctgcggcaagggtgactccagcatccggtactttgagatcacagaggagcctccctacatccacttcctgaacacgttcaccagcaaggagccgcagcggggtatgggcagcatgcccaagcggggcctggaggtcagcaagtgcgagatcgcccggttctacaaactgcatgagcgcaagtgtgagcccatcgtcatgactgtgccaagaaagtcggacctcttccaggatgatctgtaccccgacacagccgggcccgaggcagccctggaggctgaggagtgggtgagcgggcgggatgccgacccgatcctcatctcactgcgggaggcctacgtgcccagcaagcagcgggacctgaagatcagccggcgcaacgtgttgtctgacagccggcccgccatggccccgggctcctcccacctaggggcccccgcctccaccaccactgctgctgatgccacccccagcggcagcctggccagagccggggaggctgggaagctggaggaggtgatgcaggagctgcgggccctgagggcgctggtcaaggagcagggcgaccgcatctgccgcctggaggagcagctgggccgcatggagaacggggatgcgtagggccacagccacacgccaccttcatctcctccgccgcccccttcccactcagcttctgccagcgggtcgcaccgggctagctggctgcccagagcctctgaggcagcgcaggggtcagttcccacccccacccgtcccaggcccaggccgaagccagcgcccagctttcctcactgttcctgtggaggatgtctacgcccaggcgagctcctcgacctctgagggaccatctccccgaccactgcccagccctctgctccctccccagaggaggcgggagggtgggctctatattttcattccaaataaaattctctttctaaaagcc

SEQ ID NO: 27133 - DNA, 1161 bp, Artificial Sequence
  derived and/or modified sequence
ttcccagaggccgggatccggagccgcccgaagccggtgccgcagccccctgcgcccccggtgcccccgacatgtccttccgcaaagtggtccggcagagcaaattccggcatgtgttcgggcagccggtcaagaacgaccagtgctatgaggacattcgcgtgtcccgtgttacctgggacagcaccttctgcgccgtcaaccccaagttcctggcggtgattgtggaggccagtggagggggtgcctttctggtgctccccctaagcaagacgggccgcattgacaaggcctacccgacggtgtgtgggcacacgggacctgtcctggacatcgactggtgtcctcacaacgacgaagtcatagccagcggctcggaggactgcacggtcatggtgtggcagatcccagagaacgggctgacctccccgctgacagagccggtggtggtactggaggggcacaccaagcgagtgggcatcatcgcctggcaccccacggcccgaaacgtgctgctcagtgcaggctgcgacaacgtggtactcatctggaatgtgggcacagcggaggagctgtaccgcctggacagcctgcaccctgacctcatctacaatgtcagctggaaccacaatggcagcctgttttgctcagcatgcaaggacaagagcgtgcgcatcatcgacccccgtcggggcaccctggtggcagagcgggagaaggctcatgagggggcccggcccatgcgggccatcttcctggcagatggcaaggtgttcaccacaggcttcagccgaatgagcgagcggcagctggcgctctgggacccagtgagtggccagcctgagggggcaaacttgagacttgggccccaccctgggccaggcaggcagggttcaccctggggaggcctgtggttcctagcttctctgcctggaacttgaggctctcagggcctaggactctgtcagactttcctctcctgccccctgctcgcccgactgccccaccactcccccatggcctcccactgcctctgtgtctttgcccatgttgttcatgccaacggaagggcccttctctcccttgcttgcctgtaccacccactgcctgcacagggctccccgctcctccagaaagcctcctcctccagcaagcctcctg

SEQ ID NO: 27134 - DNA, 1037 bp, Artificial Sequence
  derived and/or modified sequence
aatcctgcttcctgcttcccagaggccgggatccggagccgcccgaagccggtgccgcagccccctgcgcccccggtgcccccgacatgtccttccgcaaagtggtccggcagagcaaattccggcatgtgttcgggcagccggtcaagaacgaccagtgctatgaggacattcgcgtgtcccgtgttacctgggacagcaccttctgcgccgtcaaccccaagttcctggcggtgattgtggaggccagtggagggggtgcctttctggtgctccccctaagcaagacgggccgcattgacaaggcctacccgacggtgtgtgggcacacgggacctgtcctggacatcgactggtgtcctcacaacgacgaagtcatagccagcggctcggaggactgcacggtcatggtgtggcagatcccagagaacgggctgacctccccgctgacagagccggtggtggtactggaggggcacaccaagcgagtgggcatcatcgcctggcaccccacggcccgaaacgtgctgctcagtgcaggtctgcaccgccccccgttttgtgctccccccccccacggacccctccatacatcccagcagcccctccagggcccacatgacaaatgggaaagctgaggccctcagagttggagagacccgtctgtcccagggtggtgggcagagtgggcctcagcctggtgagctaatggcctcctgccacccacccggcccgagctgacaaccctcacctgccaggctgcgacaacgtggtactcatctggaatgtgggcacagcggaggagctgtaccgcctggacagcctgcaccctgacctcatctacaatgtcagctggaaccacaatggcagcctgttttgctcagcatgcaaggacaagagcgtgcgcatcatcgacccccgtcggggcaccctggtggcagtacgtggctctggagggcaaggatggctgtggataggcccaggaccttgagcagggcgctgcactgaccagcctgtccccccgacaggagcgggag
